United States Patent Application Publication US 2008/0114160 A1 - sequence listing, part 47

SEQ ID NO: 12628 - DNA, 10233 bp, Oryza sativa
  unsure (1)..(10233): unsure at all n locations
cgataatctccgcatatagatgtctaacatctatcctattttatcatgataaaaagtgagactctgctatggcaaacccatcacttatgatcacaatcgtaataggtgcaattattggaagagcataaattacacttaatttttgagggaatctatcctaccatgtcatatcctgaaaaggtcacggggtacacagatctcatctatgattcgccatatgaaaaccttaacggtgtaatcaaattgtgccgaaactgagtcaatctcattgtctcgtttttctcaatgcgtgcggttccagtggacatcggactatccgatgaacacaatcatgctcggccgtggtgagtaccagacattctagtgaagtcaccaacacatatactgattgatctcatcaacccatgtgcctatcggtccatcttatgttccgatcatctaagtactcatctactacaaaatagatctcatctactacgcccgcatatcaactatatgcaatgatctaaatcataaattatacaaggcggctctgataccactgttaggatacgcgaaggctacgatagcataaatcaaaattttctaccacgtaaactaggaaccatgcaagtattagatcatagatcattaccactcgacgtgttgcgcagcggaagaaagcgctaagaaggcaaaggaaccctcgcgatgtagcgcgcgtcgatgtagaggaagttgtcgatcgcaccaggtcgaccttctccttcccgtgcattctcctcgccgtagtaccacgccgatcagcaccgcaatgcagcggcgcctctactgtacagagacggaacgccacgcgcagatgcgctagcacccgcgcgcggctagggtttttctcgggaaggagagtagcggctagggtttctcacgtgattcaatacctccaccagtcacacccctcacgaatatataggatccatgactcgggccttcaaggcccgtaggactcctattcagacccctatccgaattatgctcatattggatctccatccaatcctcttattccgacctattaagcgtacgaccctataggttcatgcatactcggctgtaacccgaaaattctttttcggtccacgtgtcaacagcggcccctagcagaatgtactgactgactgggcatacacaaagatcatatcggttggacctctattgtatacttgtatgaaccctttgactcacgatatctattaagctcaaggctagatatgtgccatcctataatagctcaatcattcactcgaacttgtgatagattatgtaacttgtgattgactcttcagtcacctttggtatggctatgcacttctataatctataacatcgaggggcccagagatatctctccataggaggggaaaatcccatctttattattcatatcccactacatgtttcgtagcatacccgaagaatacttttataactacccaattacggagcatgctgcgtttagcagttactaagtaagctactacacatgttgggagtcatgataatctaagatctaaggactcaacaccaatactaaatgaaatcattgatgacacggcacatatggctcttgcactgtctcatgttggggctatccaataacatattccccaacatgtgtccatattattaatttaatatctcaataccatgatccatgagacatgatcatcaattaatacatgtgttgatcatttaaacatatttgttccatatatgatatttgatcagcgatcctttataaatagtaacatacaacataaagattctcatgaaagaatcacatattcattaaccaataatgaattatctatttcaaaaaacaatgtcggataaatatgtaaacatagtatgtcatacaatcacttttctccatggtaatgcgcatgactagtaaaaagaaagaaacattatacctacccgcacaatggttgttagagtagtgtgtagaattaataaatgattggctggagtgtccatgtactactaatcaaaagtctacttcgaaggagagatttaattggtttctagttatctaatttaatttaataattcactaatacactgcgtcacatatgtaacgtccttatacatgcatgttcgcttaaaaccagacatcatatattaaaaaaaaataaagcctaaaattgcacactcctaagtctaaaattgtacttggtatgcgtgtgtatgtttaccttttttaacagtacttatgatgttagatatggctttactttatttttatctaagattgaactttttgtaactagttttgtaaaggttatgagctgtaatttttgttattatttctatatgttaaaatatattgttcatccttttcgataagaaaaaaaagatgaagcaattgaaatcattgaatgtcatgtgtgagaatcacctagacagtcctaaaactaaaaacactactttacattgtgaaatggagcgagcatatataattaattggatctatgaacaatataattagatctgccttttgacgttaccttgtcacaaattatggtgcaaatatacggatcgagctacaaagcactactgtccgtctgccatccctgaccatttctttattgtccttagccggctggtgacatatttggtgacgcctaacaacaaattcaggtgatcaccctactgttcatcaagacactttagcagcacacactacagtgcaatggcgctgcatcttctctcactacgggagaaaccatctttggtcggtcaatcaaattccacaatagttccggatgcaataaaaaccgggactaacgatattctttagtctcgatcaaaaggttagagctactttttttataccaatcaagactaaagatcaatttttagtcccggttaaaaaacggtaggcggtgtcagacccctctattatctttagtccactaaagatctatttctagtctcggttgctaaacaaccagaaaaaaagattggcatgcgcggagaggaccaggcatgcgcgcgtgatcgaggaggaggcgcatgggatcagttaataagttagtctccttctcctccctcacatttatctcctcctctcctcactcaccccatcttttcctcttcctcctccggatccgccccctcccctctcctccccctcctcctcacatctcaggcggccgggcggtgatggcggtggcctcgcgtggcagcggccgggcggcggcggaggcagcctcgcgcggtggatccaggaggggaggcggccagaccacccccggcagctgcaggcggcggccggcacggaggcgcgcggcggcaagcggtggaggccggcgcggctacacggatttttttcttttttccttcttaaagtgtgattcgatctgtgttgagaatgaactatattgttctgaatgatttatgttgaactatgttgctgtgaatgatttgatataatgggcgtgagatatacaaaatagcaaaaaaaaaaaaagaaaaaaaacttggtcccaggtatttgaacttcgtagtccaggggttaccaaccgggactaaagatcgatctttagtgtcaagtatttaaaccttcgtagtctcgattggaaaaccgggactacagggggttaccaactgggaatacaaagcatttctccaccagtgtatgagaatgatcttttcttccgtggaattgctgtatatctgtcgacagatttcgatttcttcaccgtcaaaatgttctgaacactaaaattaatatatcttcctggcccatgcacatggataggatgtaaaagcacaaaaaaatgagtttgaaaagaaagtataatatatactcgctccacttttttaatgttggaccttaatttgtatatatatttaaccatttatctttttagaaactcacataattattatttattttgatatgatctagtttatttttaaaggtgctttaagcttggcttacaatttttacgtaattgtataaaagttttaaataaaatagcagttaaatgaatgaacaacagtcaaactgaagggagtatatcacagtccgcataggcagaaacaagtgctcaagttttcaacaaacttggatgtgttaatatgcagatgggggagctgaagaaactggttgaagagggaaagataaagtacattggactgtctgaagcgtcggcatcaacaatcagaagagcacacgcagtgcatcccatcacagctgtccagcttgagtggtctctgtggtcaagagatgctgaagaagacataatcccaacttgcaggtcaacataacaaacaatatatattaatctgcccagagtgaattttcataatattttcaattggacatatgtttctgaacatttcagggaactcggcattggaattgtcggctttttgtccagtggcccaaaaatagtaggcacaatgtccgaactagagatgaaaacggatcgaatacgctcggaaactagctctatcatattcgttttcatattttttctcgaaatcaaaatcggaatcggaaacccggatacgaaaacagaatcgaatattatcgaatacaaatacgaagcgaatatgaatcgaaacgaatacggtaatgtataattatcaaaatatcaagacccctcaaaataagcttcttaaaacgaggaagagatgtagccattagttttcaaaaacaaaacatcagtattctcaaattttatcagtattcttaaatgttatgtttattttccatacaaatttatgttatcatgaaacaaataaattaatgtgtatagctgaaattttcgtaagcacattgaaatttttgaaaattggttgaatattttaaattttgggttgaacatttcaattgaaagtttttaaaaatttgagtggttctttttcagaattgaatttttttatttgtttgtttgtggaccatttaaggacccgcatggaaaaatcaatttttccatacggatgacttaagaagccgtatgcaaaaataaaatttgaaaatttgaaactaatttatctcactcatatgaactccaaattggatgatttttttttcctaaatgtttttaaaatcatgctctatcatgttattgtgttcttactgctattattttggcaatttttttcttgtgactttattttatcaattaaaattttgaatttcaaaacttcaaataatattttgaagctgtaattaatttcagctgaaaaagtcatgaacataaaagttatagagctcatcaagacatacaacttttattttggtcatttcttcatccgataaagtgatagtagtattattcaaaaagtttacacatctctcttatagtttatagaaacaaatgagatagatgtaaattttatgaacaatgttactatcactttgtcggatgaaaaaatgaccaaaataaaagttatagatcttgatgagttatacaactttattgttgatgactttttcagttgaaatcatttagtatttcaaaatattgtttgaagttgtcatattttgaaattcaaattcaaacggttcaaacaaagtcatatagaaaaatgaccaaaacaaaagttgtagatgttgatgcgttatacaactttattgttgaaaattttttcatttgaaatcatttactacccgaaaaattatttgaatttcttatatttttaaattcaaattttatatggtttaatcaaactcggatggagaaatgaccaaaataaaaatgatagatctcaataagttatacaactttgtttttaacaacttttttcatatgagttgatttagtgcctttaaattcgttttaaagagccacatgtaaaatgaaaattgatttttacattaaaaaaatcccccattttcttcaccccaaccttatcctcttgactcttcctctcctctctctcacacacacactttctactctctctctctcacttcctctcatccacagggcgcaggtcgggtcgggcggcggccggccgagagcggtgcggagcggggcaggcggccggccgaatcggaaaattggtccggacagacggaaagtatccgaaccactttcatccctagtccgaacaagattaccggaaggtttcttttgcccatatatattttctctccgtgtttttaatagatgacgccgttgacttttatacatatatttgactattcattttatttaaaaattttatgtaaatgtataagatataaataaaactttaagcaaatgtataagatataaattatgcttaaatactttgtgtgataaaacaactcacaacaaaataaagtataatcagttaaattttttgaataagacaaatgaacaaacgtatgataaaaagttaacggcatcatgtattaaaacacggaggtagtatataacaatccatttgaccaccgtcatctctcttaaatcaatcatgacactatccaaaatttgcaaactcaatgaatggccattttctgtttcttccaggatctaccaagattccagccggagaacatggagaagaacacggtgatcttcgagcgggtgagcgtgatggcgacgaggaagggctgcacggcgtcgcagctggcgctggcgtgggtgcatcatcaggggagcgacgtctgcccgatcccgggcaccagcaccaccaagggtggccaacttcgaccagaacgtggcggcgctgggcgtgcgcctcgcggcggaggagatggccgagctcgagtcgttggcggcggcggacgtgctgcgcggggacaggtaccacgccagcttcctcaccacctagagggactccgagacaccgccattgtcgtcctggaaggaataagattgaatgataactacacaagtgtggctatgcctccattatccttcttggcgttgtgaaatatgcacttgtgttgtgtgtgttaataaattcttaatatgagatgttccctatacaaggtttgctatggtccaacagatagtacctcaaggtannnnnnnnnnnnnnnnnnnnnaattgatgggggcacgattggaaacgaactcaagccctctccctagcacaaatgagcacttgtatatagatgcctttcaatcttctagtcctcgcgtgcccgcatcgacaccgtaatctctagctagccctgcctacgaaaaaattcttgatacgatgctgtccacttgtctgctcctgtgaggtaccaaagttttgatgggcggtaaaaaaaaaaactctccccatatagtttgatagtgtaaactcttttatttgacggtatgtaatcacagttctccatcttacctctgccagagattttatagcttataataaaatcccgttgttcaaaaatttggggtttgagagttgtgctaaaatttctattaattatttagttccataaacataatgcagagatcagcagaaaaaaaaaaggagagtgtgctaattggtacacagttatacttcttttagatcaaatcattcattgatctactaaatacatgcacggttaccaaataattaacaaccagaattcctatttggacttttgattggaaattaagcataaacatacatagtattttgagtacatatgttttgaatttgaagcagaagaaaacagtgttttgaaattatgtgtttctgtagtaacaggattctaatataattggtgacaaagtaatttcagttatttctagtatactcaccatattgcgtgcttggtgagctcggcgtcaccacggacatttccatgcctacttaatttcattgacgctgcttcggtgtaacactaatctatctgctcatccatgttgctcagaagtgcatttgaaatccccccacaaatttttgatgcaaaatttgttgtattcaagcctagagctgggacatgggctgtgcattctggggccgaggcaggcccagggaaggcagcccggcacaacgaaaaacactatagcctcaggccgatttgaacctagccgggcagttgggccgtgcctgtgcctgaaaatttggcacgatggctgtcatgttaaagtcctattttggctccactatgatctggaatcatagttatgaggatcagaccatacgtcaaaccgttgaagccctcgatttagtgttcgctcagtctgaccggttcgaccactcgttcaacacgactcaaatatactagtactaatggccgtccttgatattttttttgtctgaactctaatgaaagaattgctttcgcccacacgtttcctaccaataacacgagggggaatgtgtttttcttttgctgtagggatgtggaaggatctacttgcaaaaagaagtttcatgaaggaccacaagaagattccaccgatgcaacaatccaacggttcgcatcatctggagtgaagatctgacgacctttgttttagacgtggacatggtaactttgcaataaaggattcttctttcacttatttagattagcgatttcaattaaattgtcaactgatacatagctcagtggtgtaagacaacacctgggccctaaggtcagggggttcgaacaacacggcaagcaccacaaagggtaacaattctgaggcgtttgtcgtctatatacataaagagagcagggtgtcatgggtctagtagtcgatgctatgcaatgaggctaaatagcatgtccacgtagccatgtattcaataaggcagtaaatgaaatgaattgaatttgattcctctcctgttgttcttcttcttcctttgtctccttctattctgcactagattccccagtctctttccatattatattgagttctcattgtattcgatcttgtggtagtttgtgtgattcgatctctcacgaacttgggtcataacaattggtatcaaagccgttccgatccatcgtctcttggtctgagcagtagatccaagcaaggttggtgtttatccttagcgccgtgattctgttccatggtttgagcagcgagaagatgagtgaagacggtggttgtcatgctcatggagacggtcatgtatgctttgaacaacacggcaagcaccacaaagggtaacaattttggtgaagctttgaaaagttagatgtcatgcttcacaaaggaggccatgtatgctcgaattttggtgaagctttgaaaagttagatgtcaatttggaccataccctcggttgtgcatcctcttccccagccggcctccgatgtaaattaatgcttcaccagcatcctcggatatcaccagtaatgtgaatggttgcaggagaaagaaagattgaggagattcagagagaatatgatttaggggggcaacgtagatatttcacgtcatccgttcacactgggacacctaagaaaacaatattaagaatttagaggttatatctccattgacaaaaacatctaaggccaaacctaaaaatggacattttcaaaagttgtcggtttttattgcgacaactagtggaaattcccccttggctacaacatttccactgttctcttttttttcttcttctttcctctctggctcagcttgctcggcacatctgttattttaatattttttaattcccagcttgcatcagtaaccacggcagcaacaaacgaagagtagaccaggcagcaggcagcagagcacaaagcagcagcagtagaaaatagcaagcaggagcagggatgggcagagcaaaagctagcgggggtggaagccagctagagcagatcgatccatctctttacgcctcttttttatccgttctccctttatttatttttgagagtgaatcgaacattagtctagatatcttaaccatgtactttcgtatcggatcagggacagtggcggacctaagatttttttatcttgggtgtgcccacgtaaaccttagtatacaaattgagtatttcattaaggttttaatctgaagatagaacggtactagagaggtgaaaaactacttgatgaccttatctaggctatgtttagttccacgataaaattgaaaatttaaagaaattaaaacgatgtgacgaaaaaattaaaagtttatgtgtgtaggtaagtttggtgtgacaaaaagttagaggaagaaaaaagttggaatctaaacaggaccctaagtcttgggacaaactccaagccccagttgcttgtcctggctgccaatgacccaatggccttaggcagcggcgtgcctttattctcaacc

SEQ ID NO: 12629 - DNA, 521 bp, Oryza sativa
tattgatggattctatggatgtatggaatgatgttggaattgatggatggatgtatggttctctggatatattactgcctgtgaatatattattgcctgtgatgtgtgttgtgtgcaaagtctgactggacagagagcagtcttgctaagttttagcaggactgcaaactcagcgccagggaaaatggcgctgagattttcaccctcagtgccaggtgcactggcgctgaggtcccagcccagccatacaaaggcttgctgggccgggccatggccgattcggccaagtcccatccctaggtccagcgccattatggctagcgttgagttcccagcccgcaagccatccagaaggcttgccgggctgggccatggacgattctgccaagtcccacctcagcgccgggtgggctggcgctgaggtccctaggtccagcgccattatgcctggcgctgagttccaagcccgcaaggggtccagcgccattatggttggcgctgagttcctagcccgcaagcca

SEQ ID NO: 12630 - DNA, 654 bp, Oryza sativa
ttcaccaccccacttaataatcctcccaccggtcacaattcacaaccaaattccggtcgaacttttctttggggaagggaagaaacaaacaaaggttgtcaaggcagtcagcactcaacagaccatatgaatatagaataagacatgacattgcttaatttgaacaaacatgttagtaacacaaaattagtgattgcaaaacattattttattattagcacacgtactgcgtgcagtgcacaggcttatagaaccgcacttcacacaagtaggttgtaggcacaaacatgacgaaagcatagaacataacacaatacagacagacaggacatctcattccaaatatacgtgatgtataacaggagcaagcagcgtccagcgactgatgaatacgttctacaaaatcttgtgtgcgctctgccattcagctattttggaccaggactttgtatttgaacagatgaaaacaattactgagctttccaagatgacaagggaagggtctcagaattttggcaagtagtggtgggcatcgcctgaggataccggtcgcctcgaacatcatctgtgccttgcgtagactcgagttcaccatttcctcaggtgtgagcttcacagatagtgctccaattgtttggttaaaatctcgatttt

SEQ ID NO: 12631 - DNA, 568 bp, Oryza sativa
atttggatgcttgtgttggtgtaaccatttacaacgagcagttcctgtcctccatagactaggaacatatccttagttcttctcaagtactttaggatattctttatagcaatccagtgactcttacctggatctgattggtatcggcttgttgcactaattgcatatgaaacatctggacgtgtagataacaggcatacatgatggatccaattgccgaggcatatggattcacactcatcttgttttgctaatcagtcgtttgaggacactgattcttgccaagattaatgccatgtgacatcggtaagaaacctttcttagaatcttgcatgttgaacctcttcaacacattgtcaatgtatgtactctggcttaatccaattagcctccttgatctatctctatagatccttatgcccaaaatatatgctacttctccaaagtccttcattgaaaaactattttccaacgatgtcttaacggatccaagcataggaatatcattcccaatcaacaatatgtcatctacatataggattagaaacacctgtgcgctcccactaat

SEQ ID NO: 12632 - DNA, 1739 bp, Oryza sativa
gtcccaatttgtctttcctaaaaatttggggctgtgaggggctatgtaaaacgtttgagatcggacaaactcacatctaaatcagataaatgcttctttgtggggtatcgtaaggaaacaaaaggatattgtttctataaacgggaagaaggcaaagtgtttgtcgcccaacacggtgttttcttggaaaaagagtttatttcaaaaaaggatagtgagagcatggtgggacttgaagaaatccaggaatcaccggtaaacgcttcaacgtccacacaaccacaacaagttgagcaagatgttgttcaattggttgaacaagttgttgttgaaccagctgtggaagcgccggcttcacgaaggtccgataggatatgacgtacacctgcgagatatgcgttgttaactacaggacaacatgatatattgttgttagacaacgatgaacctactacctatgaggaagcaatggtggcaccagactttaagaaatggcttggagccatgaaatccgaaatacaatgaatggatgacaatcaagtttggaacttggttgatccacctaatggtgtaaaagccattgagtgcaaatgggtctttaagaaaaagacagacgtagatggaaatgttcacatctacaaggcacgattggtggctgtcacaccctaaaaatcctgaatttataaattgttgtttaaatagaattattagaaatgattttaaaagcctagaagaaaagatctaattttaaataataaattccaatataaaagtgggccagataaaattttattaaatacttctatagttccaagatttttcaggaatttatttgagtcaaggaagtatttttaataaatggaattgcatttcatgaataatttaaaaaagaaaaaggttttaaaaatcctcttttcgctttgggccgaaagtcggcccaattctctccctctctctcctcggcctgcttgcacccggcccaaccagcccaccgagtcgagccgccgctcactctcctctctcccgctgacaggtggggccgtgatcttcctcgcgcccgccagccgcgccctagccgcgcaagccggcgccgcccccttccaaaattcgcccgcatctttccatctccgatcaaatcaatagaggggaaatgatcctcgggatcccctcttccttttctcttttggaatcttcggctaatttcgtttggaaatcgttggattcgagctcgattcggattcgttttttcctcctaaccctagaccttccatcgccgttgttggccgccgtgggcctacatcgccgctcctagcccctatataaggacactcgggacctcctcttttcgtcgccaccctcgcctcagctcgccgccgcttgtagcgccgcctccacgacaacccgtgcgccgctgtcgccgccgcgagtccagccgtgcgccgccgccgctctggtcgtcgtcgtcgctcgggaaggccactgttgggttcgccaagtcgtcgccgtcctcgtcctaccctccgtttccaccgaggatcgccggagcaccgccgtcgtcgtcgacccgaacgcctccgcagcttcgacctcgtcgccgtcgctgtccgttgccgtccgccgtcgtccaagccctcagtgagttcgccgcgttgccctctacgtgtaggtgccctccgtttgcgccgtcgcgccatcgttcgccggcgagcgtgagttgccgagccgccgccggtgatgac

SEQ ID NO: 12633 - DNA, 620 bp, Oryza sativa
atcgtggtggtagcgataagggcggccgctcgctcctcctccacctcacgagcgatctccgtcagcgccgccttccgggcttcaagctccgagacgtgacggcggtgagctttacggcccacctccaccatggcgtccaccgagcgccgcccctcctcaacgcgtgcccatgcggcctcgagctccgctcgttccgcgcgcagggcctccacttgggcgctgaacccatctagcaccgcggtgtttgcggcggccaaggcctgcagaatgggctcggcgctcagcggggcgacggaagatgaggagaagagccgccttggagagaaggcgatgcggctcggccccccggaggacgtgctgggctcggggatgtcccccggacccgtttgatcctgggcgtcgcccggggaggtgggcccaggcgatgtgcccgcggcctcgtcgtgagcctccccggaggctgtcgcctgagggttgcccgagggagtgggcccagttgatgcgccagcagcagttgttgcctcagcctggcgagcccgggcggcctcctcccgagcagcttcctccgcttggcgaatccgggcggcctcccgggcggcctcttcagcttcccgaaggcg

SEQ ID NO: 12634 - DNA, 552 bp, Oryza sativa
accatcttccacattacagtcatcatcatattcacaagggatctttagatgacagttgtccaccttgtagtaaccatattgccccagatcatgatccatttatcttgtcaacctgtaacagaaaaaaaaacaaccattgatacagtattggaagaaagaagatcacatctaaagaatttgagaaatagcaccgtacaaaaattgctggccacgcaatatcaagtcgtacgacattgccaataattttgtagcctttgtatggcctgatcaattcttcatattttgccaatggaaaatgaacatgcaccatcaagtattcagttcctagctcaatacctgcaactttgcgtgttggatcacagcttacaattgaagcaacaaccacattcttatttcgatttttccagcttttcaagaatacattagttccaatctggtgcataaatatatgtccatcagcattatctctatataaagagcaattaagtatggaaaagaacatcatattaaaagttttacctccaatgaattggcatccataatgtccactat

SEQ ID NO: 12635 - DNA, 10122 bp, Oryza sativa
aacagttagataggctaccccaagtattatactggtgtgattatggtgaataagagcaataccggcttcggccaataggatgtagggttattatctgacaattcaggggcccgaacctgtataaaaatccttgtctctgtctcttttacctcagtctcgcgtataccctagtaccaacgatccccataccatgcaaataccggaatcgcgacatcaaacgtcgatagatccatttgataagctcttggcctgaaggaacataaaatttaatagctcgtcggacaacaaactaagattgaaacctacaaaaattaagaacacattggagcttctcatttcatatgttttttttctactgcacctccagtttactatattgacaacatactccttctgtctctcttgtgtagcaatgtgtctactgggctagactgtaccgagtcaaactgtattgctcattccctgccaatggcaatataataaagtttcggttgtcaagaaaaagatgctaaactggaatatgaaaaaataaactactgtatatatatacaacgttacttctttgctgtcattatgtaacagacagttgtattttggctgcagcaacggcattagttggtttgcagaaccaaatggaagttacccattagctaacctgccctaggtatgaacaataaacactacaaaaactctctaggattcttttgatttaacggcagagtgcaggacaccactcagaggccaaccacaaactcttacaaaagtccgaagtagaggataattaagtctatgaatagtttccaattctctgttcactgtatgctcaatattgtttttattgcctgatcaattcttctgaagcggagttccacaaagattgatatttccgtcaaacatcgatgttttgtgtgcgtttcagttatgctagccttcaatcagtaaaccaaaaaaaaaaaaggacttgattcaatgacttactcaccagctataaatttctggatttgttgattattcccatcaaatttactaacgcaaactttactattaagaagtatgcatctggatgagaaacaatgtaaatatatgtactaatacgaaggattaggattcattgtaagcctgatctacaaaagagatatttaggtgcatggcttaaaagttcctcaaaattatatgatggtataatttgaaaaggtttcagagcatgcaaatcttcaggaccttaaatttataattagaatttttttatgtttatttaattcataaactaggaaggtggcccgcgcacatgcgcgggcactttactaaattagtattggttaaatttgtattatgaatccttattatgtggaagtgactattttaaaaggtaatagtctgaattacacccttaaactataatgaaagtgcggatgcgaattgttccggttatatctaaactcgtctatcaccatcattcgctaacatatgagttaatatattttttgttttgttttttcacctatgcatgttcatgggtaatatacgatggaataatctataatgttaataattagcatatcattatatagatgggaatgatataattaaaaagatataatgtggttacatgcgacattttcgatgctatatatctatgtttttcctggcaaatattaagtacatatttttttcctctttttttgacaaatattttttctctcagtgtaggtgtgcgtatgcctatttttatgatgggtgtccgcatgtttatatatgcgctcgagattgcctttaacattaatagtaaaaaaaatgctttcaagaaaattggcgagatggcgtgtagcggtgctgtgcagcgtggcttcttcaacagccttgccaggagtggtcgctactcatatacacaatttgtggaaaatctcagagctgcaaagaaagaaagagaaaactacttgatggggctgatcgtatacacactttctttttttcctttataacatctgttgtgtacgtacatagtgagggattacttgaatagatataatataatgattgaaaataatatatccactggtttatgtgtaaataaacagttatattttgcttttcttaatatattttttcttatatgatcactaatttattagagcgtcatgcggcatcttggaagtgcaggaatgcttttagtcatagtcgtaatggattacttgaacatatctaatctaatggttaaaaataatttatccaccagtttaagtgtaaatcaatggctagatgttttactttttcttataacttttgttagatttaccctaatttattagagcgtcacgtggcatcctaggaatgtatgtaggtgtgtgggaacactattacccaataccaatatatttgtagtcaactattatttgttgtggcttggtggtatcaatacttacatatcatttgttgatggtttctcacttagtattgtccattatcagtacttgataacacactgcatattagatgtcatctaattattaggtgcattaagcacggatgcctcataagtaattaatatgacttgataattggtggatagtgatttgtatatgaaacttatacacataggaattagtagggatatatgattgatatatttggttctattcctaattgataaaatatattatatactatatattttatagtaaatttaaggttgagttctaaaatcttattggattggctagtccctttatggtgagatgtttcctggaacgatgcatgttttcaaatactttctatgcaaagttttttaaaaagatcaaataaatccatattcaagtatgtaatatttaatacttaattaatcttaagctgacgacattcttttttttcgcatgtcttagataagctcatctaatgaggtagaccgaatgaagcctaagagataaaaaatacatccacatggtgtcaaaaaatatatgatcgttaattttccaaaaatatatgaataaaggaacatataatatatgaaaatatattcatgataatttaataatgtcatttgggtatattatacagtagggagtgagtaaatttttagaacgctgctcataatttaaattctttttattttttgaaaatataagtccaatttaactatgttcttaagagatatacaataatataatctacaattttaatttattaatatttttaatggatgttttgatgagatgcgctatttagaataaaacttgaaatagcatatatttttacaactttaatttaacatggactttttagtttttcatctaacctaagaatataagaagaagaaaaaagaaaaagacttacacgggatacgcgtacgtatacaggtccatggggacaccgttgggtaacgtgggaatttttttttatagattgaattgggttttttttaacaaagatctaatggtttaaaatattgggtccaccagattaaatgaaaaatcgatggccagatgttttgcttttttcttagaatttctaggatttattaaaacgccacgtggcaatctaggagcgtttataggaacgccacatggcgatctaggagcgtttgtaggaagtttaatggacttttagtatataatagaagatagatagatagatagaagatagatagatagatagatagaagatagatagatagatgtcaattcaggtaaagaccaagatgcaaaaccttgttgtcggatggtatcagttttaattttgctatatatatatatttttaatttcttcctttctgtgttgctagaaaaatctcaatttctatatcctctatcaatatgatttgcaatgataaacctttagtttttccaattggccatctgtgcattgcaacatcactcatattatcgattatatgagtatattacaatcaccaaaaaaaaggaaatttaatatgcacattgtcttcccttttctcacacactcatattatctaattcatgaactgtgacatgctaaaatacaaattttccttattatgacctgaaatgaaatcaattatcaatattgataatggaaagtcaagctgagaaaaataaaggaaatgtgaagtaaagtgcaaaagttctttcctagcttgtagggaattaattaaacatgcgaagtaagaaactagaatactgtgagctgatcgctggattttcttttcatccgtaatcaagcttaatcagcagtgagatgttaaaatgtgtgcatattttggtgcttgatttattagctacaaaagttgtacacgtagagcacacttccattagtacaataagaaggggtaccttgcctaatgtccatgcaagcaatttatcgagcatctgatggtcacgagggcagtcgggatgggggagagaggagtgcgtgatgccgatgagaggtaggaagaggtgatcgcgtcagctttaagccttttaagccttttaaggccctgtttctttcttttagcttggaattattataatccagattattaagagtaagctgaaagaaacagacaacttattgaagtagcttattataatctggagcccagcttattataatctgataagctcatttaggtgagctttttctagattattgggtgaaaaattacccaccatgctaccccactccctctttagacttgcaaacccaataatctaagctctaataatctagaaaagaaacaactaaccgcttattctactactgattataacaatctagcttatagtaatctgactcaataatctaggttataataatcctaagctgaaagaaacagggccctaagtcagtgctcgtcgatttgggctttcatacctggatggaggaggacgaagatgggattctccactccaatcgccccggcagtgaatcagggaagatgacattggtggcgaaaggggcgtgggcttgttggtacgaagaggaggcggcaccacatggcgcaggttatgctgcccgtgtgtatagtgagaggaaggagacgtcttctcctcatcatccgtgtctcctttcctcaacaaggcagagtcggtgtgctcgatgagacagctgacacatttggcgactcccccaacaccatccatcacgccggtgaggacgaagcgatggcggtggggagggtttaggaagcggttgccgtggggaatggggaggaggcggcggtggatgggggtggtctactgggacttgggatgtgggaggacatgtttgcaaaacaagtttctggaaggaccgaaaagagctttcaccaattgtaggatccaaccgctcacaatgcttggaggaaaaattggacggcctatgttttcagcatgacgtggctattgtagtttgaatcatgtccttaaacccgcaatactaagatataacgtctcttaactcatagaaccgacttacgtgaatgatttgtcttgcttcttgtcccacgtaacattgacgtgccactgaaaactaaattaaacaaaagaagaaagaaatgaaaacaaaacatataggttccatatgtcagtagttcttaccttatctcgtctcctttctttctcctcccctacttcttatctcctctccctccccaaacgggtccctgcgtagtatgccggtgttgccagcattcaccaagagcttggccggaccgctgcccctcgccatgtgcgcaaagccggcgtgtgcggttcaccaatgtcatctgcccggggaagttgacatacgtccatggcatgccgaatggccactacagaccggtgagggagacgacggagttatagcgacgcggaggagatcggaggaggcgaggtgaggcgaggacaacgaccccggtgtaccgttggtcaccggcgatgatcgatcatcagtggcagcggcgagttgaggcgacggctgcgctccgggaaagagggagcagagattgcgcgtgaggggatggatggacaggcgatccgtacgggacggggtttgtaggggagagagtatgggggaggtgggagtaacgtgaggcgttggatttgattggggcgatcctgaccgatcaatgtggaatgaggatgtaacataccattggtgaattatagggtagatagaagaagactagtaatatacccgtgctaacgctacgatccttaaatatttttttaataaatgactaaaattttgtgttaataaaagtaatcagtttaatggtagctttaattcaaattatgccatatatttaaggcaaattataaagtaggtacttcactgcacctatattttcaataattatcaattaaacatataccgtgccagtgtataagcagccgaataacacgtgacttagcgtgaagactggtatctctactattataaaaattgaagatgtttttgacataatttttatccgagattgattcccatctgcttgcgtcatcgtggcgtcctacgatctccgcattttctctccgctgcggtatgctacattattgttacggaaacgcgtgtgttcacaacaattgtttccaaagcatgtacatccgtgagaattgattctttacttaatccgtttcgtttgtcgtgtccgaccatgcttcgttggaagctttgatgctaaccagaaacatgcgatagttgtgctcatcgtgaacttggatttgctgcttgagtgtatagatgagatatcagtattgtgctaatgaatacgtattaaagattttgcgctttgttacatgtatatgtaaatatatgtttgcattcgatcaccaaggggatcaaagtaggattaatctcataactaatactttaattaaaacataatattaataatgattagttatatcaaattataaaaattaatttaggaatatcttcgctatctacccatagaaaaatctttgtgttttcttttatcatccatcatcctgcggatcataaggattttttttttatcttggggtggattttgatatatgagaatctgaacaaattgtaaatgaggaaagactgattaaaaaattaatttgaaaggtaaaagttgaattcactttcaaatttctgaattgagtttgaggaattttcggaaaatgtcaaagtacagatctaatgtttattgaaattttagtttgtcccattgcaatacacgggcactttttctagtaagaagaaaaaactgaaaagacacgattgtcgttacatccttttcttttattaactaaaatcactgtgtacattggcttttgctgtactgattaaagagacttcaacccatttgagataaacaacagggcacccaaggtgaaaataacggaataaccgaatagccgatttacgaatctctcggtttcaagagagagaatcaggaaggatacctaatcacacatgtcaggagtttaaaggacagaaaattgttctcataaatgccaggaagcatcaacagaaactgcccagggaagagaagaatctacacataaaaatgtacttgctctgtaaaaaattctattatcctgttaatatcgtgtttgtctattatgcaccaaaattagccaaatgtatcacctatgttcccaatgtatcagtaatacaagaaaaaaatgattaataggactgaaaggcaaacctctgaatcgtgatccatataatctcttgtacacctctttaatcatggaactgaaaaaacacattattcgtttgaaataccaccaaaatacacacaatttctcaccaatagcaatttactttgggaggtgtttggttgtcacgctcagaaattcgctaacccgaattccaagcagaatgtatattgaatctctgtccaggaccagccagagtacacagatgataatttgatatagttccacaacttacaaaaatataaaataaactcagaaaatcagcggaaaaactaaagaccatctaaacttaatctttttagcaaagcgtagcttcctccaaatccacaggcaaaacctcgatgtccggcacaagcctaatcttcatagaactcaccattcaaaacattctctgcctcttgggaggaggggtgagaaataaagcaagactgagtaccaaccaccgtactcaacaagtcatactgaggcagagatattcaaaggagtggctcataggatatttgtagtaaaagcagcatttataaatcataagatgaaagcagtaaaacattatatatttaattgagcaatattaaacatcactgtacaacgctaaatccacgttgaaacaggcacaaccaaatcacctgaactatacccgttcattaagtcaaattattaataaagtgagactaatcaagacgagctggtcgaataattttactttgatcagaggtgtacaattttactcacaagacacagcctcaacatcgtgtctaccatgagtcgcgataccgaagtacccgaatagaggtcgtgacagaacccatcatataactctccctaatgaatacacccaccttaggtttcaccccctctcctatacaggcagcgggcagtcccctctcgtgcctaggtaaattcggaagcagcagagaccaaaaatccaagtctgtcctgcaccatcgccttacccttgccatgatatgttgactagttcgagttatactctaaactcagcctggaccacacgctggcttgtgattagtatgggtatatcttctagggattcccaagaaccggtccttaattgttatgggcacaacttgcaaaaccatgcacccacaacccactattattgcatattttagtttatttaaatatacaccaaggtggcatataatcattaaacaattaaggactaaattaacatgaatctcattctgagctaattgatctaagaatggctaaacattcctaaaccaatcatttagtcaaattataacccaagttatcaaaggtacagggtaatcaaaaggctgagtacggtttatccaatcccacatgatattcgaaaacaatgcaatttaatagaaaagtagggattttgcaaaataggctcaatatgatcaatgatatatgtgtgacttggcttactcttcaactgatggaacctcggcgaccacttcgaaataaacgggggcttcgaaactgcctaattctaatcgacaaacaaagcacataataaatataagctataaacctactgaaacaaataaagaaaccaattttattggattcttgacattttaacgaatttactgcaatttgaatggattaaaacggagcttggattatttagatatgaattttacaatatgagctacgtaattactattaacgggaaaacattagtcatttatcatagattaatgcccatagataaataggaacaaaggaattagatcattggtaagcaagcctcacgagttagtgactcaacgagccaactcatcgtgtcacgggaccatccaaacctaaagaacgactctgacgactgaacgaactaaagcttcgacaacacacttaccaagctagtaacaaaggctaaacagcaactaaaactctattttaacgagaccacagtcgctaaacgacatggcaaacaactaggccggtggcggcggctcggcacatggcagcggcagctacgagacgcggcaacggcggcgcaagacggcggcggcgcggcaacagaagacggtggcggcggcacaaccgacggcggcagcggcaactgggcgtcgacggcggcacagagcggctaggtgttgatgcgaaaaataccaaatttggtcgttaacactagggttaggggttaggaaactaaaacgaccactaaacaaagacaggacaggggcatctcaccggaaaatgacgacggcggcgaggaaaacgatggaggcgacggcggcaacctccgggatgacgacgatgacgactggattaaacctagaaccgagtagattagatgattgaaaaaatatgtatggttaaaatcataccaaaagaattgaagaggagctcaccggcgacgcgagggcgacgacagcggcgattgcaaccggcggcgacgacgataggagcggcggcggctagggcggtggcggcgcaaggtggtggttaaggttttggctaggactccaataaatttatgtgggaaaaaagaggggatatgatggcttatatagga

SEQ ID NO: 12636 - DNA, 2387 bp, Oryza sativa
  unsure (1)..(2387): unsure at all n locations
agaggaatnnattgattagacttctcggtcccattgatgcaagcacccaatgagaaaaaggctctttgcagcacactctttgttcgatcatcaaccgatgtaaatgtatgtaggtcatagtaagtattattattcctctgggcaatggtggctaacaaacgaggcaaattatcataagaagcttcaaatgtgccatacctcatctcaataatcttttgtttggctctccaggcctttgcatagcttatggtgtacttgaatttgttctcgatgtgcctaataattgattttggttcaaagccaatgttaccaacaacactgctgtacatctcacttgccacaaaagctgaagtgatgtttcggtgatacttctccaccccttgtaagtagcacttgtgctcggtcacaatgctaactttccaataatcattccatttacccttatatgcatggacacgccacggacaatcttccttcatgcacctcacttcatacacataatttgttgacttgaccaccctaaactctctctgcaaggaaactgcccaatgcttcaccgcctccttcatctcatccttatgagcataccttgcaccctcaattacctcgttctccttatactcccagggtacatgatcaccctctaatataacaagtccagagaagtcctcatttgcccaatcagtggccattacatcaccttcctcatcggatgatgcgtcgtcgtccgcttcctcattatcagaatcttccctctccatttcatcaacaattataccgactctctccccctcatccgccatgcccatggcctgctcctcccttggttgattttcctcattttgcatcgatggtccaacaacatcccctgcattgataggaccctctacatcttcggtttgcattgaaacatttatatctttctcttgtaccgacacaaatataacgaggggccatgaccgttcaaaagccatttccacataccgtctccaagcagcagtgctgtccatcggcattagttcccaaaaataaccttctgttgcacgactcactacaactgatactgacattgtgtagacttcttggtctattctaaatcctctcaacaaccaactataaattgactgaaatgttctctccgcaggcctatcgatgcccttagatgtcattacaaaatctgacagatcaacaccatctggaccaaatctaatatttccttcaccgtgaactatctaaaatgtgaccttatttgacattgtgcctgatgaaaacaataactgcgttaacctcgcatttctgtactacgccctaagttacattctctacaatattgttctccaaaattctaaaagtaggttatattctccagatcaaactaaactacatcttacaattaacactactgtctatgtctcaattcatactattatattctatgctctggatctacacatatgtgctgtgtgctacagatctgctaaaatatatggaactaaaactaaaacgcaacatatatactcaaacataacatattagtacaaatgcaaaagatgtatgggagcaaacctgtgatgaagtgagcgaaccagcagggcttcgccgctccccttctgctgccctcccctctctctctttcgttttttttggatttttactgaatataatgaaatttcagagagagagggctgggctttataggggggaggcaaaaatcgccctcccccagggcggcaagggggccgcctgcaaaattccaggccccccgccgcccatttgcaggcggccccccgcacagtacaaaatcgccctagcggaaggcggcaagggggccgcctgcaaatttcgttgacggccgtcgcccgagagcgaacggccgtctgccacgtcactttcgccgccctctgggatggcgatttttaaaaatagccctcccagagggcggtaggcgaccacttctgtcaatttaaaatgaaaaattacttttgtaaaacttttaataaaaaaaattaaaaataaaaaaaattccgcattcgcgcgaccagtagctatccgtatgactgacactttttttttttttaaattacactgtacaacacatacactcagaacgcacgcgcactcacccctatgaacacacgcacgcaaaccctacccctataaacatcttcgaagactgagccagcaaatcctggagagattgacgaagtcaccataggcgcctcgctgtcgacggatacgtggcctaccactgaaagcacaacgccgaaaaatcctggaaaattcgctcccatggggagtcgaacctaggacctcaggtgctactgaggcttttgtatgactgatattttttttctcgggatataaattgtttcaattttgcacagttg

SEQ ID NO: 12637 - DNA, 4228 bp, Oryza sativa
cgtggactagaatcactggtaccagatcacgcgtgggcgtgattcactttatgtcaacaggcagcgccgaaagttgatagtgacaactcgagctgccgcttttcatgtgtgctgttgtggactgtgcgcgctactggatctgacactaccgtgaagcgccgaaagtgtgttgtcgtgagcataatttgttctagcaccatatgaatgaaaagaactatggtgacgaagacaaacacaagtagtactgcagtagtaatagcaaaagtagtactgctttacaagtttgtaagccaaaagaaacggtcacataaggactgaagaggtagaacactactgacgaggccttttacccctgtccctcctaccctgcgccctaatgtgcccctgggagtacgtgagtcggtccgggggtacggcacggccaacccgtcctgcctgtacaggtgtgacctctggctgctcctgagtgtgcgcctctggagctcctccaagctgagaggagcctagtacgtcgtggtggtgtgcaccgtgcaagtcgtcgtcgtagaactggctagtaggaccagtcctaccggcgtgagacgaagaggccccagtaccgaagatcccggctgcaaatcctgctggacaaggaccatcagtttcatacaggtatttaatagtattaataaaaagtaaagtaccgtgtgggcgagggatcgacgctccgtgagaggaagagctggcgaacgcgcccgaagaggtggcgaacgccactgcggagctcgcgaaagcgccggtcgtgcctgcgaacgcgctcgaaggcagacgaggtcctgcgatgaggaaacgtgcagttaaaacatggtgacatattcgtgcaaaagctgaaccaaaaatgaactaatctttgggctgaactgtaccgtgcgaaaccggtgctgtaggtcgcactgctccgaagctaggggcgctcgaaggcaaacgaggtcctgcgaggatggaacatcaagttacgacggggtgatgttttcgtacaaaaacagaaacaaaacttaagaaacctttgggctgagcagtaccgtgcaaaacaggtgccgtaggtcgaggtcctgctccgacggtaggcgcgcgaggccgtggttgtaccggaccagctggaggtacgacgtccacggcgctgtgacaggagaagacgcgcatgaccgcatgcatcttctcctgcatccggtcgaaggtcaccctctgctcaacgtcagtcaagtgcaaacctctgttcaacctcacttggactgcggtgatatcggcactgatatcccgtgcggcatcagcctatgcaagatggaaataaaaaattcagtaattgtcctatattatgcaagataaatgaaataattgtaagaactaatacaaattcgacgtacccccacgaagtagtctcggtcacggtgcgtgggatacgcgtccgtgacagcggcaacgtgcggctctggggcgtctggagtgaaggtcacacgcgcacgagtgcgaggaaggtaccagcgaaggtagtcacggtagttctcctccgtgtgtgggaagagctcgttgatcacctcctctgtagctaacacccagtcgtcaacgtactgctgtacacgtggagcccaaagtgcgcctgctagctgtccccgtcgagtcaacctgtgaagagaggtaaattatatggctcgatgaagtaattatcataaaaatttagaaatgaacaatccgaactcacgagtggtcggcagggaggacggtcggctgcacgttgcccggaaacacctgcctaagtccgaactgtctcatcacacgctgcgggcagtgaggctcaacgaaaatgtcgaacaccatcggcaggatggtgagccagtaagcctggtcgcgtgtgcacaaggacgaaagtcctagcggtgctctcgcagcgacggcctcttctgtgtacggctcccagatgacgtcgctcggctggagacggtcaaactcgaacacgaagtccgggtaacctcgtctcacctggacgtgagcgtaacgacgctgcaataaacatgatcggaattagacatgttatgtgaagaaaaaaaagaagacgactgataaacttgtaacgcagcgaagttgcactaaccccacgtcgacaccagtaagtccccatcgtgggaccgtcctctggccactgcgcgctgcgaccaaccccgtagggtgcgctgtccaccactggtcgacctatggcaaacctctcggctgcccaaagctgaagcaacatagggcagccagcgatgatcgctcccgcgtcagtcttcgtgcacgcctcacagagggcacggtacgtggctgctagcacggcagaaccccagctccactgcggcacgtcctgtggctgagcatccgcgatggaccgtgcgtagtggaccagcccgaagtccacagcgtgcccgtgggtgctagtgaacatcacccacccgaacaaccacaacaggtacgcctcaagggagcgtcggaccgagtaatcatcagcgtcagggtgcagaaggtccgcctacaattaagaatgaaatgttagtacaaaacactctgttgatcgcaaataagcatgtatgataataacaacttatttacttacagtgaactggagcaaccaagccttgctaggcccgactgtagagtacggaggaagggtgttggccggtcctaggtgtggaaggcgcatcacctgctcgaagcgcgcagtgatatccaccttccacccaaaaacaccgtccacgggaccaactggtgctcccgccagcggtagcccgagcaggtacgacacgtcctgtagtgtcggagccatctccccacagggaaggtggaacgtgtgcgtctcaggtctccagcggtctaccagagcggcaaggagtgaccggtctgcattccaccacttcgctgggtcacggtcgtccgccgccgcctcaacaagcctacaaagtggtagaaggcctgccgcacgtaacctgtatagagcaaacttcaaacataagtacaacacaaagcaaagttgagttgaaatgtgaacatacgcgtaccaaggaacgtgacgggggtcgacacgcaaccactcgcgcgacgtgcgtggacggaaggtgccgagctgtgcaccctcgactgctgacaggaacgagcggtggttcctgtcaatcccacggttgaacagcgccggtgtgtcgtacgccatacctgcatcaaatagattgatcagaaacatataaataattagttcaacataagtaataaatgttcataagcgaattattaacacatattaaacaagagtacaaacaaacaaaagtgtcaccatacggaatatttctgattacaacaataactgcagttacacgatatgagtacttagtccgaacactcatcacgataacattatgatacaacaccgaatagttcgcaatactactagtacaacaatagtcggaggtactcattacaacaacattcaattgaaattacacgatagaagtatttagtccgaacactcatcacatcacaacagcattttatttcctaaatcgatagcattgttacaccatggaatcgcctgctgcgcgacaacgccttggccttgcgcgcctgcttgttgttccttcaccaggtggtcgcctaccatcacttgcctgtccagatggactagcatctgcgccgcttggaacttctgcattcttcgggcatttcttgtaagtatggccgcgcagaccacacttgctgcagcgtaaagtcctcccacctgcttctgactcatccatatcatttctgatgcgtctagtttggcgtcgaccctttttcacccttaacttagatggatctggaatataaaaaacttgggcactcagcgttgtgtaagatcctgagatcccgaacccatatatctcctcactccatgtatgaaagattgcttctttcctgaaataatttgagacgtacacattgggagatatgccacaatcaccggcagcagcaagaacgtgtgagcaaggaaggtgatgaagcttcggcttcatacaactgcaggtacatccaccatccgccttcaagacacattcctgcacgacttgcttgtgatagataccacgcctgctcctatcaacacacattatttcatacctatgcacttgagtgccttgagcaacaactatatgagtgcgcggccttttgattatatctacatggaccttggaac

SEQ ID NO: 12638 - DNA, 5398 bp, Oryza sativa
cgtcatacattaaaatatggaggtagtactacactaattagcaatgaagcatctcaatactacagaaaagggctaaagtgtcaggtcataatccttcatcaatgccagaaatcaaaccggcacagatcatcagtgtcgggttaagaaccgacaatgatgaggactcataagtgccggttcaaggctacaaaacaacgtgtacagtgattttgtaaacacgtgatattttttacagaaatatataaaaaaatataactcaagcctaacaaccattcattcaaatttgatttgaaactagaaagactctagcttagataccagccaagcaatccacacagcaatttttaagaaatcatactacaccgtgaaataattaacattacacaaaagaattgaaaatatgtgcgcaatgggatcaattgactatccgtaatcttgccttgtgagtggcgacacgcaagagctgcgcggaacaatgcaaccagaagtaaaggttggaatattccctgaaaagtgcatctagccctctaagtgggttttggtggattattgacaaaccagttaagggaccaataatattgtgaagaagtatgtgcatgtgttagtcccaaatgaatggagatccccaaatctaatggaacgtggagcaggaacttgaagagttattttaaatttcttttatgttttgtctctcgagttctaggatcttcgtattatcaagaggggttctcaacagatgcctggtgtctacaagtgctcatagacattctctagaagagagacacatgtttcacacacacatacgggttgggccacctttttgtatctgcccagaagttctcctgggaggtgctaggaaaacctctggccgctatttttctccgttgcgcctaagtgttggccggaagttctccgggagccaacccaggattctcaagccctgtgttaagtttgaattgtgagtaacggctagctgatgtcacacgagtacctatatattccggcctcccccacctttgttggctggaaaatccactttcattttcttgtcccctagcctctcccatgatgttcttgctttccgcaattagttcttaaactctactccttgatttgagagttgacgaggaagataggagatgtggtgagtgttaggagattgtgagcgcttgaagatcttctcgggtttgatgctttgggcttgtttctcttggagggcaacctcctagacggataggtttcgcccgcgtgcatccaagtcattgtggattgaccggggaaagtttgtgaaggttttcctcgcctccgcaaggagaagaggtaatttgagtgaaaattccgagcggagctttcggaggttgtcttggtagagcaatccatattcgtggtgttctctaggtgtccaagttgggaatctttttggtcatttgaaacctagagaagcaactagggatgttggattgaaaattggagatttcttcttagggttttgcctggtgagacaaggtgttaattgagacctagatctttggagctcctcaatggagagtaggattcttataatctgaacttggggaaaaaaatctcgtgtctcccctcttgtgcaatttatttctcttttgatttactgctttgaattgttcattactatcctttgtacctctgcaagtcttgggtttccttgagaatcaagactcgagtcccgagaagcgagaaccccggatgtttctagaaagaaccccggaagttccagggagcccttattgtcttcgggtgagagctgctagaaagtttcggtccctataatttaaccgtttcaattgaagaaaatttcatgaaagcctattaacccacctataggctacaccttaggctttcattcctgtccttagcagtttcatgccatgcacagatcttgttgcgcagtgagtcaaaaaccatccttgaccagtacacttttgatatctgaccaaggtcactagcaatgtattcattcatgccaataatatagaagctagtggtggccatcaaaagcttgttcactacgatcatgatgaagaaacatacaagctcagggccattaggcctctctttgatcttggaaatcaacccgtcgaccgttactttgggattactaccaccaatgttgagcttatccaatagattcctgacatgtgggccccacatgtagatggggaagaagatggaaaacgtgatggcaatggcatggttctaattttgtaaaatttgagtggcacgactatgaatagacgaatggaaatgaataggcacatttgcaatggcacggatcaaattaacccttagacaaaacatgtgactattttatacaattgcatcagtgattatagcaaaacatgggagtgggacgttgattatttaccttagtgagctagtggcgaccgtggtgttgtagctctttgcgacaaatcttggcctacaacttctctcggcatatccataacattctccgacatcttcaactaaaaaaggcagtgaaaatatatcaccgtggtgatttttttagtaactaatcaaaatgtatgataagatgaatagcgatgaatttgataaaggagaaaaagccaaacatgtccttcctatgcattacacacatacatgtgttggtgttggtcctgttggagtgacctgagtagcaccccaaggttctgagttcaaatcttcgtatgagcgaatttcagattggcttatttaagggctaagtttcctgtttgaaaggctaagttcctaattttaaaaaggttgcatatatccagttgaatgtagaggccggaaaaatactcttctctaaaagaaatgcattacacacatacatgaatgattctagctaaattgaggatgatgtttagttggtggcgacaatggcgctcgccgtgctgcagctcctcgggggcaaatccatggtatcaccaacaccaatgtgtgcatctagggatgtagttcaatgaaagttaggaaattacttatcaatttaattcaataagtaataattactccctccatactcgtaaaggaagtcgtttaggacagcgacacggactccaaaacacaactttgacttcttttttctataaaaatatttattgaaaagttatatatgtacacttttatgaaaatatttttcaagacaaatctattcatataatttttatattttcaaactcaacaacttgagagttattcatgatttatacttccaaggtttgacttaaacattgtcctaaacgactcccttcgtgagtatggaaggagtaataagtaatcatggcatggagcagcattgaatcagagtaagctctgttttctgtgtagcatgcattcatttgatttgaaccttaacattcagaaattactaaatctcacaatgaagcatattgagtttttagagaatgtctactgccattacatgaatacggttcacaagctaaggaagctaaatgtcgatgcataaaactaaaactaagaagtcctaagcaacagagaccatggagaaattaagtactggaatttcgtcccttcatctccagcaatttcataagcaaagtacatgatagatacacgaatgggaagatcagtagatcctaaatgaatagcagcagaatagaatcaagagtaaagtgcacgggcggtccttaaacttgtaggggtatgtcatttaggtctctaaactctcaaaatgcatatccaagttccagaacttgtcatagtgtgtcatataggtcccaaatcgccacaacccttcaggatcctacgtagcgttgatgtggcatgccacacgtacatgatatggcattattttgacggacaaatggaacccatttaattttttcttttgtctttttcttcttctttttttcccctttcttctcctttctctgtgacccatgcagaaaaaaggaaaaaaaagaagaatgagaagaaaacaaaaaagaaaaagaaaagaagaagaaaaaagagaaaagaacacgtcacgtccatgtggcattgccacatcagcgccatgtaggatcctagagatgatgtgtcaatttaggatctagatgatacactttgacaagttctgggatctggatatacattttgagagtttacgaacatatatgacacaaccctacaagtttaaggtttgccaatacacttttctctagaatcaaaatgaatgaccatgctttggcactagctaaacatttgtactatatttaggctgtgtttgctccagcgtgttcccaaccgcacggataacggaacggtccattagcacataattaattaagtattatctatttttttaaaaaaatggatcaacgtgatttttttaagcaactttcgtatagaaacatttttaaaaaacacaccgtttaacagtttaaaaaacgtgcgcgcggaaaacgaggagattgagttgggaaatctgggctaagaacacagccttaaggctaccacaaactctatcaaggcttgtagtgacaaccagtggttccaacaaaacatgggattgattattttaccttcgcaagctggtggagaccaggacgttgcagttcttctcggcaaatccgtgcatcaccaacactaacacatgcacatgaagctatacaattgttcttatccctcatctgactgtcgtcgccgttgccgttaccttgaccgctacgccaccagtgtatacatgacaattgcccatttgactgtaggatacctccatgagaagaaaaagaagattgggggacaaaaggagaagatgatggagaggaacatgtgagatggagccaagagacagaggaggacgattgagccgtgcttcctcgctcctctagctagctggcagcttgctcaaccaaccactggccgccataggagaggggacatggagaaaatgaaaggattagggttttccagagtggggtttgtacttttatactcaatggaggtaaccatgagcttgtgtttggaccttggactaagatgaaaatttgaattggaccaaaattttttttgttaagggcttttatcttaggttacaccgaaataggcaacttaaagtcgaatatacatatagggttgtcagaaaagctcgaagcatttgagcttgccaagctcgactcgagcttcacacgagccgagcccgagcctgttgtgagattcacaagccttaacgagctgagctcgaatagctcgtcgagctcagcactcatgcatggtagtgttagtcagtaccgtagacccttttgttacttagcttgaactttttttatttgtctaaatgctatgctacccaagacatgtcacaacgaaggcacatgtatgctcaaagtgcctacatgtagtacctaccatgtagcctatattcctgccttgt

SEQ ID NO: 12639 - DNA, 9293 bp, Oryza sativa
aatcaaaggcgatgacgaaatccaccaatcatgaagatgaagaaaatacttgacgacgacaaacgcaaccgacatgatgaagatgacgatgtcggtgatccagccaatagcagtgtagcaaccaatgataatgacaaagacgctcatcagcatttgcatagtaggtcaaccgtgaaggtgaaataataagtcggcgaaaacataatcatccattagcaacagcagagatgtcagggtcgatgaagcagaggtgctggtgatgatgtcagtgacaataatccatcaaattaatgttataactgttgtagatgcttcatttggaggagagttgatgttgttgcccaactcgtctaaaccgaaatatttgaagttgttgaagtagaatgtctgctccgaagcaaagatgaagataatgactcctggagttgactcgtgggttgatgaattgatttcttcagcttgacataaaatttgtcaaattttgagccttgtatttgtgtagcccccgactctttgattagttgggaaacaactgaacatagagtcgagaactgtagtttcttgtcgttgaatagttattgcttgattgaagatatgtgttgaagatgtccaagtagaaatcatgaatgttggagagccacttgttgtagtaaaataatacggcatcgcatgccgagatgtcgagattcacaaagacgtcatggttggtgaagtagcaaaacttgtgaagtagcagcaatagagtttgctggtaccgaagataataaagatgaagtcgctccaccatgatgacaaagttgcgttgccgtgatgaagtgaacacgagtcggcggcaacggaagcaaaccggtagtgaagacgcgcagttgtgaagataaaagcaccagtcggcggcggcataaccagtcggcgacggaagacgatgatttccatcagtagtggtagctgtataaacaagacgtagaggcgagggcactagtcagcagtagacgagacgaccggcgatgaagaagataaagccaatcaacactggcggaatcatgcagccatggaaatgaataaactagtcggcagcagatgttgtaacaccctagcctaagacataataggattgataggatactcatgccaacaagttgcaacttcttttccggaagcccatctccaaagaactctaaagttaagcgtgcttggcttagagaaatttagggatgggtgaccgaccgggaagtcttcccgggtgcgcatgagtgaggacaaagtgcgcagaaaagactggtgttggtttgtgagggcagtctatgtcctatttaagctgctagatgtaagcgggcccggcctcgtgcaggcgggacgttacagtatggtatcagaaccgactctcacggtttcacgggcgcgtgtgtcgcagttgcgctggcatggtgcgcatggctagtgtggacccggtgtggtcacacagcatggcacatgcgctggcactggacatgggtgtgtcgcagttgcgcacgcatggtgtgcatggctggtgtggacccggtatggtcacacagcatgacacatgcgctggcactggacacacggacgtggccaagagagggagttcctggattggggttgatcgacgaggacgtcgatctctttagggggtgaggatgtaacaccctagcctaagacataataggattgataggatactcatgccaacaagttgcaactttttttccggaagcccatctccaaagaactctaaagttaagcgtgcttggcttagagaaatttagggatgggtgaccgaccgggaagtcttcccgggtgcgcatgagagggagttcctggattggggttgatcgacgaggacgtcgatctctttagggggtgaggatgtaacaccctagcctaagacataataggattgataggatactcatgccaacaagttgcaacttcttttccggaagcccatctccaaagaactctaaagttaagcgtgcttggcttagagaaatttagggatgggtgaccgaccgggaagtcttcccaggtgcgcatgagtgaggacaaagtgcgcagaaaagactggtgttggtttgtgagggcagtctatgtcctatttaagctgctagatgtaagcgggcccggcctcgtgcaggcgggacgttacagatgtagacagcttgcgttgaagatgataacgcctattagcggtgacggcgacgtggctagccgtgaagaagatagcatcagttggcgtcataacaggccaaccgtgcaggcggtgacaccagtcggcggcggatgcggcggccggtcggtgaagacgtagacgcccaacaatggcggcataataagccagccgtgcaggcggaaacaccagtcggcggcggacgaggcggccggtcggtgaagatgtagacgcccaacaacggcggcataataggccaaccgtgcaggcggaaacaccagtcggcggcggacgaggcggccggtcggtgaagacgtagacgcccaacaacggtggtgtgaccaaacaaccgtataggcgaagacaccagtcggcggcgaacgaggcggccggtcggtgaagacgtagacgcccaacaacggtggtgtgaccaaacaaccgtataggcgaagacaccagtcggcggcgatgacggcaagccggtggtgatgttctgactgatccattcctggagcgtaagagataagcttaaagccatgaatcccttttgtgcatatctggatctggatcctgcagaacaaacatataggatgagtagtatctgatataaatataatactcgagaaaaaatcaagtattttaaaatatttataaatatgtatttctcctcttgtcaattttgatttccccgagcagatgactctgtacgtttaaacactctgtccgactagtcatagcccccaagcatcgggagtcggcctaggcatttcccaaacatgcatatgagtgacatgagttcgtcattaatggaacaaagtttcacggatcagaatttactactcaggtacttttgcaattattaagagcagaaaataaatttatctcatctctatgcttttgatttattccgaataatacttagcaccttgcgttactcggtccatccaacgagcccccgggtgctaggaatcggcccaaaggcaaccatccattggcaaaccaaacggaaagcataggaagatagaactccataactcgataggtacttttgtactcagattatgtcgcaagcaatcaagataaatattataaaaaatatgatataacatctgtagcctccgactcactactcaatggaagaccaattggtgtagtgaggcagaggaaaaggaaaaatatcatataaagaataaaataaatgatgacttagctttataatattccccttggtgatggcagaggtggccaatgtgggaacaaagtcgtccattaataacaatgaagacaccagtcggcggcgacgaaggctgtcgacggtgaaagcgaagatgcccactaatggcggcataataggccagccctgtaggcggagataccaatcggcggcggcgaagacaagccggtcggtgaagacgtggacgcccatgaacggtggtgtgaccaaccaaccgtataggcgaggacaccagtcagcggcgacggaggcacgccgagggtgaggtcgtagacgcccaacaaacggcggcataataggccagccatgtaggcggaaacatcagtcggcggcgatggaggcggccggtcggtgaaagtgaagacgcccatcagcagcggcgaacggtgaggcgcagccgggtccgcatggcggagccccccgggctcgagtgtgcatgccttggacgtagccgggccaagctcctgtggtactcggactcggtggtgtggaggcagccgatcgtgaacttgttgaaggggtcgacagtgtcagcggatgtagccagccacacaggcgtagaggcccggcagcaatgagcggccaactcgtggacaaatcaagtcgacattctgcagcacggcgacagcctgaccaccacggcgtctcggtagcacatgtaatcaatcaaagaattaatctgatcaacggcagcaaggaattaattaaagataaatgttcaaatatcaatgcgaggtgattaatgggtggcttgaggaggatgcgtgttgctgcatggtcctgttgcatagtcatgtccatgctggtgacgtgccatcgtctcatttgtcggccatgttgccatccaaagccttgttgatgacgacgttttgtgcgccatggtagcgatcgatgatggcgcgggcacagtcccctgcgcaggtctggcagtagatgtagaagccatggaaaatcgggcaatcctcgtcgacgttgaagcggcagagggaacagatccacaactccgggaggacggcggggagggaggcgacgtagtcgtcggagcggaggaggcggaggtcgcagtcgcgggcggcgttggtgtccatcagcacgacgcaggacggcaggaagacatcggcgtggctgcagccgtctcctatgcatccgattagatcggttttgacatgcttcgtgtttgtagatccatcttgcaacaccatggcatcctcgttgggtagattggaccagtaggcttggtggtggacgaggacgaccatcaaatccgtcgaaccgtcgttgccccgtcgttgccgtcgtgctgatgcgaacaagatcaggcagagaatagcagcgacgattcgtcttgttgaagtcgtcggcggcgaggaatcaaggagctcccaaagcgaagacgaagccggcgactcataaagttgattccatcgcactcgtcgtcaggaaactcggcgtttacccctacctggcgcgccaactgtcgaaacatgaattcggcaataataaaacggggtagcgcacgagacctaaaagtggatggatgtggagacaaaggatttagacaggttcaggccctctcgatgagaggtaataccctactcctgtttggggatttgaatccgccgggtgtagtatagatctgacgatctagttgtctcatgcccctagagggagctccctgccctccttatataggttggggggcagggttataagatagaaaccttaaccaatacggtatcggtttcctaaatctactttacaatcttatcaaaccaggactttaggccgttccataatatacagggaaacgtaatacccaagtcatgatctgttacatattttatatatataagttatcccctataactagtcggataaccatgccgtgtgggtatggggtacccataatctccacactaattgaataattaaaattttaatcgatgttccatgtggtatagtaaaatacatgcgtcaacttacggaagagacacctgattgatttgtgaggctatggaaaggtgtacaggaaggattcttcgtgtgatgacgcatgaagcgagcggaactacgtcaatgctatatatgatttttttaactttagtttttcattgttttgtttgtcttgtttttgtttgtcatttaaattaacaaagtttttatcaatgtgaaaattatcttcacctgttacaatgcacatatattttttagtatattgtatgtgcctatttctatgcatcaagtcaggtgttttactcgcgcctattcctcttctatttactagatgaaaccctgcacaatgatgctggagtttttttatgatattagaagaaataatagctacacttgtataattttcaactctaatcaactattaagaaaagctataaataattaagatagtgaggtttataacaatttaaataaaggtggtttgatattgttgtggaaatacataacatactttcagtacgtagcattctcagattaatctttgcatatagataactgatggaagtacctagtaaattgaaattgcttttgcttaaaaataatcgggtgggtctactgcgtatacatgcatttagattgaacccacatgtaaccaattcatttccatgttgaaccaataacctccaaaatggcattggctcggttcagttacatgcatgtgattactgaaaaatctagaagaattaagagagatttaggaggagtggcattaaccatggtacatggactctgatcataaacgcactgctcaacatctcactcggggaccttctcatccaacgattcatatgcaatctcatccaccgatcgaacggctaagaattagcgatgacgtggaacactaaggtttcagctttggatcttaacttcataggaaaaagagattccacgtggtaaaaccaatggtgtaatcagtctctcctgttagattgcacacacgttctttgaactaatcagattggacgaccccgacactagttcataaataatttttttgacgtcctagattctagacgggacgtaagtggccccatttggaaaaactaggcgaacagcgccgggcggtcgcccgcataggaaaatacattatcccgtgcgggtgtcttaatctaaccgcacgggataaacttaagagaaccgcccggagaaatcgattttcgtatgtagacctcttaagcggaccgcaggggaaaatacctctcattttttccctcacccactagaaatttttcgcatcctctcttccttttggctctcacccactttaaatttttgcactattccagcacgaatcgtagtgcaatccaacaaacagaaaagcgtcaaataccaaacaaaaaatcacccgacaaagatatagcaaaatcgaatttatttaccctttaagtgacgggcccttctactaaaaaacttggcccaaaatatttggcaggcctggttccagtcaattccccatgggtgggccgggaatttgaacttgaatggctcatcaccattcaccaatgccctcaatccgacagcatacacaccacaactgagagcaagcaaacggcagcagtccacagtacagccaagccgccgtaatcagcaggagctagattggccatccaaaaagagtaacaggagaccacaaacccaggaaaaatgtcccaagcggaaattaacatgtagaagatgttagaatttcaccctaaatgagcacttttaagaatgcagtaatacctaaacaacaacgagacgcaccccacgtaggtattagggatgagaagagagacaaagcttgtagcttccaccaaagtaacgcctgctgcctgtccctatacttacatatacatacattgctgaagtcacaaccaatggtttgacatccgtctcacatgtgcttgaatagatccagaatataattagcacgactattaccgattgctcgaacagcaggacagggttaaacctaaagctaataatagataccacataatagtcagcctggcataaatgtattgcacaaaacaccaccaggtcgaaaggtgtacataccattcgaaatttggtatataacttttggtatggcatgaactctctgcttcaaagttgggagtttctccaatataatcaatggatgatagatggcatcagttactaagttttaaggtagagagaactattatgtcttctggtgcaccgatggttgatcttgcaatttgtttgagttatctggctcgactttcagggagcctggttcgtctatggccatcgcacttgcatcggtaggctgcagttgtcaaagagcaaaacatgaaaaggcagccgttgttaccacagagatccatgacagttcacttacgtgcaagtctaccttttgcaagattacaagtttgcacaaataaaagagcacttacaacagtttgtttcgaggaaccaactccatcagccgcaggttctgtgcccttggtgttctctgcagcgaccctattaccatcctgcaacatacaaataacaaggcaaactattaccaacagagaatgattaagttgaagattaagttttcactgatgaagatgaagatgaggattaagttgacgtacgtaaaacgagaaaaccattagcacatgattaattaaattttaattattacaaacttgacaaatggatatatttgatattttaaagcaacttatatatagaaagttttcacaggaacacaccgtttagtagtttgaaaagcgtcctaacagaaaccaaggtaaaatctgaatcttaatcagaaaagaacaaggacatctgaagagaaaattccttatttgacatctgaaattaacaagtttccttattcgacatctaaattagatgcttcccttatattaccgagcaatttttcacatccctcataagccactacggacgccaccgttaaaaattgccattagcagagtttgtcagtagtgtaagcaaatggtaaaatgcccctgagcccacttgtcagcatcatctcttatctattatttttcctcatctctacaaatctcgctcctcccaccagccttggataccgtattgagctgccaccgcacttaacatccgtcatgctacactccacctcctgctcgccatgccatggtggattgtgactcaactctggtgccccttcctccagatgaggtcaaccatggtaagggcgatgaagttgtgcagagcatgttgcagcagggttgtgtgccggcacttgtgctgcccgaccctgggtgtagctcctcctggtaggcctgaaatgacaaacttcactgatttggggctcatggaagaacaggatatgaatctccgaatctttggatacatgccctctttgcggtctccaatgtgtgagctgagctaaccacttcctcacagcttgtccatatcttgcaggtccaactacatttcgaaattacaccactcttttttttttctctggtgtttgaaaaacttaagctgtgtggtaatattttttttcctattttgtcatgcattttttttctatattggcattgccaccgagacagcattgctctgtggaggcagtaggcagttgttgcctagatgcaatgatcctgttcggtgcttgtgtagcacccggaagagcacacattgggcctgctaggtaggccaacatgcagcgctttttactgtacagcacagcccgagcagaacagcggcagcaccgcagtggatggtcatcaagcagaactgtaagcgtgtcccgctgcagccactgtagctgctgcggtgttctaccaaacaagaccattgacgagatggataatttttttatttgattccatacgagggaataacactttttggtgccaataaaggattcactat

SEQ ID NO: 12640 - DNA, 9520 bp, Oryza sativa
acaaaagttgtaccagtggattcatattcggaagtgcttccacatgaattggttttgttgccactaacaatatattgtaagagaagttaatggtcaaactgtcaaattatacttttgaagcctatgcaaatcacttatcaaatagaattactattagaaataagtcccaaccgggtgcaaatgtgcatcagaacatttgagaaatctgaattaaatatctgactctcaagaatcaaacaatgctggatcctatatagcttcattcatcttacaaccttaactaaaattaagggctaaggttgaaaaactaataccaacacccgaggaccataaaagaaaccatgatacagacaaacgaatatggtactgatgcattatccagaaaaatgaaattagattttcatgttgtatagtcacatcataatagttgtcctttacttcgctatgatgattcagctcttccaatccttagtgtttaatttgaaaagttgagtatataaatttcagaactgtcgctacagcaaggattaaaattcaaaatattcaacatcacaacacatcaactcacaattgatgtctttcgcagtccacggctatttaatatcaatatgctctctgaagatgcaacaaccattcagaaaggaacaaacagcagaatacactattcatgaaagaaagtatagctgcttacacacctttgagcacacattaaccataacaactgtcaccaccagcacataacattacttcaatgagttttaatagaaaaatacctgatctgcggcatctgtttcagcagactctctcttaactctcacattctgaatactgctcctcctaaaagacaaaaggatatacatcagaccatgtcatatgattctaactgctagaatcccctgaacggttacagaactgaatagaaacaaataccttcctgagtcatccaaaggtttgacatcatccatttccacatcagaatcagcatggtgcctttcatcaggatcctcttggtcttcatcttgctgcacgagacacatagatgtaactaagcgaaaatccttcctctcactttcgaaactacatccataatcaatatgggcatgccactgggcatcttacaacacttgtaaagtttcaaagctataaactgagacacatcagacaactggtccttatgctaggaattagtaatttaaattatatgcattcagcttgaaaattcaaagtcgatttgaacattattaacagaatgtgaagtgccagcattagagcacacatgacagattacttcaagcatgaaaaaatctgcatagataatccataccataatataaagcttttgaccataaaacaaaaaaaacgaacttttcaaaattcaatcatgtaaaaataactaaccacctgtcaatttggcattcctgatatttccggagctgacatttacaattcatacaaattgtgaaatattattatttacagcaactactagaaagacgccttatactcctttatccttgaagctgaggaattctacaggacaaaaaagaaccataatgccaataatttctcactcacctcaggtagctcagcctcagggggtcgctcttgaaattggacgctaggagcatgtcgaagttttgaaagattatcaagaagtcttgatcttatatcatccaactgctggcgtgtgtttttgttctccatgttacttggtgcaacatgaagtgtataatctggaccaaagtactcaaaatactcatttggaggcatcttgtcagtgagctcatgaccaagtgcaactcctgtctgcataaacataaggagaaaaataagaccatacgggaaaataatgattacaataaaagaaacatgcgtctaaaagcattagaagctcaaagtatttcataaaattctcagacaatcattggttatatactgttagatttcagtgattaaaagtacaataattatcaaacaatccatagtagttcatcacagagtgagttgtgcttattagaatagctataacagtttgaaatgattaacagaggtttttttacataagtacttatagatgtgagtcgcttagtcaaaacagttgtccaaggtgctacatacacatgtcaggcatagtgccggcgctaaaatggatgctagaagaactatgccatttcatacatctttaaagttaataaattagtgaaggctcttcaaacaaaaacaacagagaaatgtatgtccaggaaatgcccctgatacatacctcatagcaccaacaccgcgcaacatttcttatggtatacccaccaccaccaagcagcaacagcgggacattgaaggacctcatgaatctcacgcattccgcgtggcccctgattgacaggttgaagcaacccaacctatcacccgacagagagtccgcaccgcactggagcaccaccgcgccagggcgaaaaacctccatcaccttccccatgatcggcttgaacaacgactggtagctctcgtcgtcgataccgtcgtccaacgggacattcagagagtaatacttcccctttgagtgcccaatatcgcgaatgtccccggtccccgggaaataatccccaaacttgtggaacgagaccgtcatcaccctgtccgtcgtgtagaacgcctcctccacaccatccccatggtggatatcgatatccacatagagaacacgctgcaatacaaaaacaattagcacacccaaaaccctaattccgcaagattattaggctctccagcgcgagagaacctggtggtatttgaggagctcgaggatggcgaggacgatgtcgttgacgtagcagaatcccgaggcctcgcacttcttggcgtggtggaggccgccggcccagttgatggcgatgtcgtggccgtggttgagcttgacggcgccgccgacggatcccccggcgtaggtctggcagaagctgtagaggccgtcgaagacggggcagtcctcgccgacgttgaagcgcttgagcgcccggatctggtcctgctgggtctccggcgtgacggagcggaggaaggcgacgtagtcgtcggcgtggaagcggcagaggtcgcggtcgcgcgccgggtggggcttgagcacctgcatctggtcgaggaggccgtagtgggcgagcagcgcgtgggtcatccggatgcggtgcggcttcatcgggtgcccctgcccgtagtagtagttccccacctccgcgtcgtagaagtagcacacccgccgcttggccccgtcggcccccgccgtcggcagcgagttccccccgcctccggcggaggcgtccatggcggcggcggcggcggcggcgaggaggaggagattttttttttatctcttttttttttcttttcccctctttgccctctccttgggtttgggtttgggctcgcgggcggcgttttgagtttggaggggaggggaggaatagccgagatgggatcgtgggccgttggatcgtggagagacgcgacgtgggccgttcgatgctttcgtggtgcgaatgggagagcgtcggtcgggtgtagtagaaagttcccgagcaaacctgggaaactctggaagctttagaccccgttcatttcctctggaaaaggatggattaagttttggattttcgtgacacgcttttcaaaccactaaacggtatgtttcgtgcaaaaactttctatatgaaaattattataaaatatcagattaacccacttttcaagtttgtaataattaaaacttaattaatcgcacgttattaccacctcgttttacgtgaaacacttaattttcatcttcatcttcatctttaggagattcagacaccaccttatactccaaaacttaggtaatcacaaacctcaaattccaaacgagattttggttgagtggtgttctttgaggaggggttaggaatccctctcctccgtataaaaggaaagacggattaacattgattaattagatattagcttaaaaaattaaaaataaattaatatatttttaaaacaacttttttatagaaatttaaaaaaaaacaaatcgcttagtagtatgaaaaaacgtgcgcgcggaaaacgataaagtaaaggtcgcaaaccttgaattaagaacacatccttaaagttttactccatccatctacttttgatagtcatatttccaaatctgaaaaatttatttttgataggcatatttcaatccaacaacctatcatcttaatgactttctcggatttaatgcatgactctctattcttccacacatgattggctacatgagcattgagaaatgtaaatattaataaatcgcttgtttacaaggaatgactagtaccatgtttaaatgaatgataagtagaattgcttatccttggtctgtgtgccaagatgaaatattactatcaaaagtagatggagggagtatttcaattcaaaaaattgtaaaaggattttattttttgaagagatacattttttaaggggggaagggattttattctttcggaaaacattcattgttgcaccgtttgaaacaaaggaatgtctgaatagtactcactaatgtttgaggtcatttcctccgctctgtgttccataggaaaacaaaatcccatcacaactttgtgcaacttgtattgtacaaactagagagaaatatttcctccatcccaaaataaaccaacatcgtacttgaatgtgacaagtataaggttggtttatttttacacggatgaagtaggtcttggtaccctatatttactgtccattagagggaaagaaattcctttatcccaaaaaagtcatctaaatgttcatgcctctgcattttatttcttatgtttcagaattgctttcttgtttctgctctatattctgttgggttcgaaacgggcctaaaaagtttgccttttgctacagtttagaatcaaagtagaaagtgggacaaatgaagttaagacaaaaaaaaaggtaggaagactccaaaacttcaaccagcatcactccgttcgctctcaaaccacaaactccttcctcccaaataatcctatatatatatatatatatatatatatatatatatatatatatataaagttcattccacctaagtgtagttaatgttaattctctcttctcttatgaaaccacatcacctcaattatttttaatctttggatgattcatcaagggtgtaaattgcatctcttcctcttaaaatgcataccatagaacccaatcatttatatcctttgaatgattgtataaaatatataagcacatgaaaaaaaaatcttatggtaggttagaaagaaaattttaaaactcatatatactctattatcacacaattctcccacagcaacacgcgaggtgcccatctagtaataacattgaaggacgtgaaagttatacactccttcgttcccaattaatcaatatatttgtcaatgtcaagaagaaggcataccctctatacacaggtttgtggacggcaataccatattatacgagagaaggtattctttaattaaggaaatacaacagataaaaagaaattatcttaggtatcccttaattaaggacatacgacaaaaaaaagaaattatctttccggaatagaagatgccagagttctatttggggaatataaggtcttctcgggcttgtatcatgctttatctcttcgagttccacttaagatgatctatgctatatatatacaggtccccctcatctagggggacattgagttacaagtcatagcaaaagacatattgagaaacaatccggaggaagccagaccatatttggcgaatagatctcgtcgagtcgttctcgacagcttctagtcagcggattagtctagtcatcctattccccattgtaatccttgtatttacatccatatatccatataaactgtagtagggttattactcatcttgaaggcccgaatcaatataaatccttgtcccatgttccgcaaatccgacctcacgtacatcctagttccaacgatccccatattctatgaatagcatatgcaggtataacccggtgacaatattatagaagtacatcaagacccagggaaaccaataactctcttgctactattcactttcacacattgaccagtgtctatttttcatatatttacgaaggctaaaatgatctcatactattaaaggtgtattatgatctaataaataccagcatgaaacttttattcattttactctaaacatttaagagtaaattgtggtcaaagtttaaatagtaaagtgaaaataatcaattatttagaaacgggggtgtaaatggttctagcagccatgcacgtagtagagcttaacaaaaccgattgaaaaataaatcatactctctcaattccaaaatataaggcacatccacctttaacccaaagactaagaaataattattatcatcatgtagtttggatcatcctaataaatataatgcatgcatccaataggattagataacatgagagtgaaggattaaaaaagtaataatttaatgaagaagatgtcatagttaattgcatgtttgtatgcatgccttatattatggaacacctaaaaaaagttgcgtcttatattatggaatggacaatggagggtgtacatcacaaaacctcttcacacccctgatcctaaaagccaacctgatcatcacttccatggcatggcatattcacagagtgacatggatgggcacagaagcaacaaagaagcaagtaacaaagcaatgcgatatctctatttaccttgtaagctagcagagctgtagctgcattacctttcaactagcaatcatccagttctttcatattgaagaaaacagaaaagagaataagggatgcccaaatggaacgtttgcaatcaacggtttcagacttgagacaaagatagtgactgactgacaacatggtcgttctcatttggacactacatttccagtcagccgcaggtcgcctgctgagttatcctcaaatagtatgctacactgtcacactgacgttttagtcaagttgataaaacttggagaaaatgatgcaacacatatgtacatcatttgtgcttgtgaaccgtgagaggtcatataaagaggaattactgcgagtattacacgagaatcaggtttctaagtcacagcctaataggaaatcattatatcgaaaaaggattgataatagaaaaactgataatgagcatgcaacaaaatatggacttgtttgacggtgagttcagagttctgagatggcaatctctctttcaatgccatttccgaatttgccgtgtcagttactcagccaataagcttataaaggcatgcaaagaggatcaccgaatcatattattcaccaagcatcaaaggtcacaattggcagtggtttacacgtaagtcctgtccttgtcatgctttaccacgactttgagtcttccatcacagcctgcgagcaccatttgaaggttcatgtacttcggtttcacaacaagttatgcacttgaaactcagaagctatttaagacaggtgagttcgccttacctgagatgcaatacattatacccattgtctcttgatcatcctgggttcaatggagctaggaccctgcaaatgcacaacaggtgcatcctgggcagtaagctttcttcttgcagctgctttgctatctaacgccccaagcaccaccgatgcctccatgctcaaagctccaactgcaaacactgcctccaacagctcagatcgccaagtgctcctctcattcaagtcactcataacaaaagacccctctggagcgctcacctcatggggaaacaggtcactgcaccactgcagatggcaaggtgtgatgtgcgggaagcgtgggcgtcgtcgtggtcgcgccatcgccatcgaccttaacaatctcgggctggctggtagcatctccccttccatttctaatcttacgtacctcaggaagctccacttgccacagaaccagtttggtgggcacatcccacatgaactcggccttctcgacgatcttaagtttctgaactttgtgaattgtgctaaaatcagtacggtgtattccaggagagcactagcatatacaatggtatatgggcctcatgggccaacagtaaaataagtctaagactacatcgctatacacatatctaacagcccccttcaaactcaaggtggatttggagaatgatttggaggatctatcacattgagtttgagaatgtaaagacggtgttgctctctagtttgagccttggtaaagaagtcagcaacttgaagttcagatggcacatatcgaagagaaattgttgactgctgacaatgagagcgtgtgaatgatgcatccactccaatatgcttagttaactcatgctttacaggatcattggcaatttgtatagctcctgtgttatcacaaagaagaggtgttggatccttgcattctacaccaagatcagataataaccaacgaagccaaacaatctcagaagtggtagtagcaagtgcgcgaagttcagattcagtactggatcttgacacagcagtttgcttcttggacttccaagcaatgagagaagtaccaaggaaaatacaatatccagtaattgatcgacgatccattggatcactcgcccaggttgagtcagaatatgcatggaggtgaagctgactcgagcgtgcatagaatagttgtcgagatgcagtccctctcaagtaacggagcacacgaagcaaatggctataatgaacagaggtaggtgcactgacaaactgactaagcacatgaacaatgtgagcaatatctggtctggttatagtgagataaacaaggcttccaacaatttgacgatatcgagagggatcctcaagcaaaacaccttcagtagaacgaagttgaacatgtagctccattggagtagtggcagtcttggtatcagtaagaccagagcgtgttataagatcatcaatatatcgatgctgagaaaggtagtagccatcctctgtattagtgacctctatccccaaaaagtagctaagagggcctaaatcagacatcatgaattgctcacttagacattgcttcacaaaagcaatatactctaagtcatcccctgtgattagcatgtcatcaacataaagcaacaatagagtccgtccatggtcagaaacatgaatgaataaagccggatcatgatcacttggagagaatccagcagcacaaacaacggagctaaaacgctcaaaccaagcacgaggtgcttgctttaaaccataaagagcacgattgagacgaaaaacataatttgcaggggcatcaacaccaggaggcggtttcatgtaaacctcctcctttaggtcaccatgaagaaaagcattcttcacatccatctgagatatggtccaggaacgagcagctgccacggccacaagagtacgaacagtggtcatgtgagc

SEQ ID NO: 12641 - DNA, 9488 bp, Oryza sativa
atgttcttgctgaaaaccgcgagcaactaagcgagctttgtagcgctcaatagagccatcagagcgagtcttcaccttaaacacccacttgcaagtaattggaatggcatgacaaggaagaggaacaatatcccaggttcttgttcgctctaaggcagcaagctcctctgtcatagccaattgccactcaggaatggcagcagcctcttgatatgtactaggctcctgaacaccatcaattgctgcacacatatagcgaggatgaggcattatcttgctgcgatctcgaagaccatatcgtggtgtagcagactgtggtgatgacacaagtggatcatcaatgagcggagcaacgggtggatcatcagattgagcattaatggtactagttggaacatctgaaggaagacaagagggaggctgagactcatgtggagttcgaggtcgacgactatagtggaaaggaaaaggtgacatctctgaccttggtgttagagtggatgatggtatatccaaagagggtgaaggaatggaagatggagaaggtgtctcactgatggtagttaggtcttgagaaggaataggtggaagatggagaaaagaaatggactcctgaggagatgaggaggacgagattttagagtagaaatatggacgatcctcaatgaaagtgacatctcgagatatgcgaatacgacgagaagaggggtcataacaacgataccctttatgttcaatactatagccaagaaaaacacactcaactgattgagctgacaacttggtgcgctctcgagatgccaaaagaacatagcaagtacaaccaaaaacacgaagatgatcatagcatggggaagatccaaatagaacctctcctggacactttccttgaaggcgagatgatggctgaatattgatgagataaacagcagtggaaacagcttcagcccaaaaatgagaaggtacaaatgatgcaatcaatagagtgcgtgcagtctcaatgatatgccggtgcttgcgctcagcaacaccattttgaggatgggcaccagggcaagagagctgaggaagagtaccctcggaagaaagaagttgtcgaaaagcagctgagaggtactcccctcctgaatcagaacgaaaaatacgaatagtagcagaaaactgagtatggatcatgcgaataaaggattggtatatggataaaagttgtgaacggtgtttcatgaagtaaatccaagtgtatctcgaataatcatctataaatatgacataatatttgtgtccacccttagaagcaaatggggcagggccccatacatcagaatgaacaaggtcaaaaggacaactagtcctagaattactaatagggtaaggaagttgtatctgttttccaagtttacaacccgtacaatcaaaagtagtatcaatagagacatgacctagaacaccctgacgaattaaagttgaaaggcgggacccacaaagatgccccaatctatgatgccattgtggaaaagttgtagaagatgcataacccaaggctgtggaactagtggtggtggagccaaaagatgaaggtggaagactcaagtgatcgagaacatagagcttcccaggagaactactatggcgatggccagtaccaacgagtgctcttgtctgacgatcctgcacgaagcaagaggtattatcaaaacccacaaaatagttcatgtctgtgagttgtccaacagaaatgagattgatggaaagttgtggcacaagagaaacatttggtacagtgagttgtgaagtggaaagagtgccctggtgagtaactaaacaggatgtgccattagctgtctgaacacatgtaccattgataactggttgacaggatgcaagctgagacacatctgatgtcatatgaaaagaggctcctgagtctaacacccatgactgagaagtacctggtgcaggggccaaagaagctgatccattaggttgataagcattcatgtagggctgattggttgaagttgcactaactgaagctgcagtcacagcgggagcagcaagtgtaactgaagtactaggggcacggcgagatgcaccacgcttggccctaaactcagccaacaattcaggatgtagcttgaagcatttctcaacacggtgaccagacctcttgcagtgggagcaaacaatctgagtggaagaagttgctaaggacccatgctggaaagcatgatcaccagacaaggaggttcccatcaatgaagaagcaaggacagtgtgttgcggtgttgtggcgttgggaagtgactgtagacgagtttcctcggcaattaagtctgcgagagcctcagccatggtaggaagagtagaccgaccaagaagctgcaccctaataggttcaaagtctaaccgaagacgcatcacaaaatcaaacataaggctctgctcctcatatttctccttgcatatacactgtctgcacccacctccagcctttggcaccatagaatccaattgtctagacaatgaggtgaaggcattatgaaactcctcaatggtcatgtcgccctgttcaaggctttgcaagctcttgcgaagagaaaagcggagagctgcactgctctgttgatagcgttgttgaagatactcccacatcttcttagcagaagaaagatcaataaaattcattctaatggggacctcagcgctcatgcacaagaaggccatcacacgctcatcattacgccgccaagctgcaattttcttctcatcttccttctcatgaggtggatcatcattcaagtgagaggccacaccatacgacctgagttgcatacgagcagaggaagcccactcacggtaattttgtccattgagttttatatccaaaggcaaaagaatgacattcccaagtggatctgatgccatggttgcaatctgaaaggctgagctgctgctgcacttgaaacgctgctactgcactgctgcactgggctgccgctgctgcaattagtggctgcaattaggtattgtaatcagcagcaggagatccaacacatggcagatttgttggaaagagtcctggcggcaagtgcgacagcaaaggatggaggctgcgggtcctgcagactgcagctagccgacaccactgcagctagcacaattggataatgcaacctcgagcaggagaaaaagaagcaggagaaaaagcagtcaagcagatccagcaggagaaaaagatgctccagccagaagagaagagggtcgatccccaaaatcaagtagcagatccagcaggagaaaaagatgctccagccagaagagaagagggtcgatccccaaaatcaagtagcagatccagcaggagaaaaagatgctccagccagaagagaagagggtcgatccccaaaatcaagtgaccacgaaaaacagaacacacagcagaaaacttccactgggagaagagatgagggaggacactcgccggagaccaagaccggtgaagagctcgccggcggcggacatcgacgggaatcgcaagagcaacctagctctgataccatgtgaattgtgctaaaatcagtacggtgtattccaggagagcactagcatatacaatggtatatgggcctcatgggccaacagtaaaataagtctaagactacatcgctatacacatatctaacaaacttgagtatcaactctctcgagggagaaattccgacatctctgtctcaatgctcgcgtcttcaaaccattagtttgtggtacaataacctccaaggcagaattccatccaatcttagccactgttcataactccgaaccattgaggtctttgctaattatctagagggagagatacccagtgagcttggttcactccaatgtcttgagctcctcaatctttacaataataatctcacaggaagcatcccttcttacatagggaatttaaaaaacttaatcttgattgatataagtgataatggcctcactggatccatccctcctgaaattggcaaccttcaaaatttgcagttcatggactttggaaagaacaaactttcaggatccattccagcatctttaggtaacctattctccctaaattggttggatcttggaaacaacagtctcgttggaaccatcccgccatcacttggtggactcccttatctcagtacttttattttagcaaggaacaaacttgtagggaacatccctccatcattagggaacctttcttccctcacagagttaaactttgcaaggaattatcttactggaatcatcccccattccttaggcaatatttatggtctgcatagtctccgtcttacggagaacatgctcacaggcaccattccttcgtccctaggcaaacttattaatcttgtttatattggtttgcagttcaacaaccttataggggagatccctctattgctatttaacctctcatctcttcagaagctggatctgcaaaataataagttaagtggcagcttgcagaattattttggagataagttccctctactccagggacttgccttgaatgacaacaaatttcatggtcccattcctttatccctttccaactgttcaatgcttgaactaattcaactagatagtaactcattctcaggaacaattccttcaaatctcggaaacctcaagagattgtccaaactgcgtctcgattacaataaattagaggcaaactacaactctgactgggatttcttgaatgccttgacaaactgcacccaactataagttctgcagttaagtttcaataggcttaggggtgtgctaccacactcactttctaatctttcaatcagcttagaacaccttgcgattctcaacaatgaagtaggaggaaatatacctgaaggaattgggaggctttctaatttgatggcactttacatgggtcctaatctcctcactggttccatacctgcttctctcggaaaactatcaaaattgaatgtgatatcactagctcaaaatagactatcaggagagatcccaccaactcttggaaatctcacacagttgagtgaactctatctatctatgaatgcatttactggggaaataccttcagctcttggaaaatgccctttaggtgtattagctcttgcttacaacaaacttagtggaaatataccaaaagaaattttctcgtctagtagactaagatccattagcttgctgagcaacatgttagtagggcccatgccttcggagcttggtctattgaaaaatttgcaaggtcttgatttctcacaaaacaagctaactggtgagattcccatctcaattggaggatgccagagtttggaattccttcttgtttcacaaaatttccttcatggttcaattccttctacaatgaacaagttgacaggccttcaagagctagatctttcaagcaacaacatttcggggatcattccagtgtttcttggcagctttattggtctcacgtatctgaacctctccttcaacaacttgataggtgaagttccagatgatgggatatttcgtaatgcaactgcattctcaattgttggaaatgtgggcctatgtgggggcattccagtattaagtttgccatcatgtacaaaccaacaagcaagagagcataaattcccaaaactagctgtagccatgtcagtgtccataacatgcttgtttcttgtcatcggcataggtttgatctccgttttatgtaagaaacataaatccagcagtggaccgacatctaccagagctgtcaggaatcaactgccaagagtttcttatactgagctatctatgggaacaaatgggttctcctcttcaaatctcattggtgaaggaagatttggttcagtgtacaaggcaaatatgagtttcgatcaatatagtgttgttgcagtaaaggtactcaagctccaagagaggggagcatcacatagttttcttgcggaatgtgaggcattaagatacctacggcatcgcaatcttgtgaagatattaacagcttgctcatcaattgatcctagggggcatgattttaaagcacttatctttgagtatctaccaaatggaagccttgaaaaatggttgcatactcatatagatgagcaaagtgatcaaagtgtcctaaatatttaccagaagctaagcattgccaccgatgtaggatctgcagtggagtatcttcatgattacaagccagttccaatagttcattgtgatcttaagcctagcaatattcttctagacagtgatatgatggctcatgtgggtgactttggactggcaaggttcacaaatcaaggagataacaatgcatctcaagtctcatccagctgggccgcatttagagggaccattggatatgctgctccaggtgcgcatttatcacttgccaaaaatatacttcttgccttgttaccatttaaaatatatgagacatttacgataccttgtaaataattaatttacttaggtaatgacccattgagcttatgcttgtgctgcattcacattttcagaatatggaattggcaatgaagttactacaagtggagatgtttatagctatgggataatcttactagaaatgtttacaggaagaaggcctaccgaacaaaattttgaggagaatactaaccttcacaggtttgttgaggaagcgctgcctgatagtgtagaggatgttgtggaccagaatctcatattaccaagggaagacacagagatggatcacaacacactcctaaacaaggaagcagcacttgcatgcataacttctattttgagggttggtatcctctgttcaaaacaattgcctacagaacgggtgcaaatacgagatgctgtaatagaacttcacaaaatcaaagaaaaattctttccatgaagaatccatttatgaagaagggaaagtccagtaccagaaaatgcatgtgagcaagcagagtagtaggcagacggagttcataaagcttacttcttaagtagcaaaatagtctggtactagatacatagtccaaaagtggagtttgaataattgaccatttaggcatcaaggcttgtcatattatcttgaatttcacttcatatgtaaatcatgtaatgcataccagtattatcttcctaaagcaataaaccatgttgtatcggtactttgacttcaaggatgtgaacttactaagaaaatgatcaatttttcgtgttggcagtacagtgaataatacaaaaccaaagagctactgcactggtagtggtacctgatagtgtcttggagtgctagcactgtaggtctggcatatgttgatctttctcctttgtattgtgtttgtgtccggtgtatgccatcagtcatgggattgtattactgcattagcacagaaaaccaacaaaattgatccccaaacccaagcaggctgcacttttttctgaaaaaaaaaagaaagaaaaagaagaaaaataaaaaggattgcaggctacgcccgtacgaagcatgtcagcatgacaattgacaatgacaagtgcatcagcatcctaaccatacccttgtgacacacgcagcaaagcttcgggagggctacaggcgctgcagctgcccgagccctgggaacaaagaaaggctcggcatttcatcgaacatcttgtgtgcgaccatgagataaaagtagcagagagaccaccctgccgtgagctaatggcagtgagaggaaaggttgcagacaacggctggtgggatgagacggccctgaccttttataaaaaaaaatcacctacggtctactgattgatttggtggaagtggaccaagtcgcgtgagctcgcgtgggtctccggatccgggctccggcgaggcggcgatcggttttcagccagcgccgctgcattggagagaggaaccgcagcttacgacttctgtagttgatttttatggggaattagctaaaaaaaactatcgagtgtttttttttggaaacattcaaatctaagtatatacttcttccgtttcacaatgtaagtcgttctaacatttctcacattcatattgatgttaatgaatttaaatagatatatatgtctagattcattaccatcaatatgaatgtagaaaatactagaatgaattacattgtgaaacggagtgagtaattcactagaaatatactataataaaaataacttgtatatatgtattaaaataatatatgcaactttatatctaatttatatagagataacaatatagttatagggtagttacactatagttacactataattattaattatagttgtaactacaatgtaactagaatataacttagatgtaactacaatgtaactagcatgtaacaaatctgccataaacatgtgatgatggaactagcttataaaaagagggtctacatccgatagcaaaatatctcagcacaaatgttaacgcggaatcaacagtgaaaataatcgatagttttcactgtcgacagtcagctagcagttccatttttatggtacaagtctacgtgaggagtggggtggttttgcattaaaactgagcatgtggatcgtggatgggtatatgtaacaaaatgatttatgagtggaatttcaaacttcaaatttcatatggatagtttttgtgctttcagggcatgttcattttgatgctattccaaaaaattgccaaaaaaatatctacatttagtttattgtcaaattttatcaatacataagaaatcatgtcaatattacaatcttgccaaaatttggtaaggtttattttggctaccatctgaacaggtccttaaatattactcactcatttttttaataaatgatgcagttgatttttgacgtgatatttaaccacttgttctatttaaaaatatataaatattatttattttgttatgataaatacttttaaatgtttttgtttttctacaacgtttgactatgttatcattaaaagactttagtatgacttttacttttaacatttgtaataatgtacatatatttttaatgaaccaatggtcaaatgttattataaaaaagtcaatgacattgcacattaaaagagattttcaataaggtagcatcaattaaaaagttacaacaaattatttaaactcttaaggtacactacacatgcctttgaatgtaaggtatacttgaacaaatttatagacagaaccccttacatttagtgtcggaaagaatacaccattaataaaaatgggttaattggattcatgcctctataaatatgacaaataagaaaaatgtcaccattattcatgaaatcgggtagatgctactgtaaattagaatcatgccacactactacaaaagtgatttttctatacgaggcctcatcatttttccatgcggaccataactagtggcgtctgcaaaaatcgagggtcatttttccatacagctgcttgagtggcccg

SEQ ID NO: 12642 - DNA, 10387 bp, Oryza sativa
  unsure (1)..(10387): unsure at all n locations
aaattcaaattcaaactgttcaaataaagtcatagggaataatgacaaatgcaaaagttgcagatcttgataagttatacaattttgttgttgacaacttttctatttgaaatcatttactatgtaaaaaaattatttgaatttattatattataaagttcaaattttatatagttcaataaaactcggatggagaaatgaccaaaagaaaattggtagatctcaacaagttctacaactttgtttttggcaacttttttatttgagttcatttagtattaaaaaatttgattccaagttctcatatttttaaattattttttaataactattttcgcatgcggctccttaagtggtccacatgcaaaaataccaccccaattttttcatcttcctccactcttttttccctcccaccacttcaaaatttttctacctcatctcatctctctccctctattaatttattactctcccctctctctccctctctctttctctcctctctctccctctctccctctccctctctcagagcggccaggcggcggatggcaatggcgtcggcgcgggtggcggatctggcggtgccgccctcgggagggccggatccaccgccatagggagcagctacagcagcggcggcgggcggcggcttggcagcctcggctcggtggcctgccatcccctcctcaccgacgacgatgagacggcccttcctcttcctcaacgccgccgcggcaggggtggcttggccgcctcgggtggcgccgcactgcgcggatccggtgcccccgacgacggcgagcggggggggcgacggatcccccgcaagcacgacgccgggtgactagggcaacgcatccggtgccgccgccgacggatccggcgggggcgacgacagtgggcggcgggggagacggatccggcggggacgacgatggcgggcggcgggggagacggaagcggcggcggcgacgacggcgggcggctggggcgacgacggcggacggcggggggcaacggatccgcttccggcgacggcgtgcggcgtggacggtgggctagggtttgggattttttggatttttattttttttgggggttttggattttatttttttttgtttgctgaatttattttcgcatgctgccctggccgcatgcaaagatttgcattttcgcagacgatttggcgcatgcgaagatcgctccggcccgttcgcaaaaatggtttttttgtagtagtgccacttcatcacgatttccgtcctctccgtcacattttccgcagtctccgtcttcatcttttcgtcgtcctcgtctcgacggcggatgggcagctggaggacggcagcacggcggcggatgcaggagtcatccgcatccctagtccccgcatgagacattgcagcattcattgatttctccggaggaagaagaaacaaagagtaggaaggaagcatgccctcgccggcggcggccgcggccgcgctcgcgaccgtccttgccggcggcggcggcgcccgcacccgccaagcgaccgtcctcgccggcagccgcgcccctccgcgacctccccgcgagcgtcctcaccagcagcagctgcgcccgcgcccgcgcccgcgagcgctccgtgacaggtggcggccgcgcccgctcctcgcgctcgcgactgtcctcgccggcggcggcctcatcctctcaccgctcgccagcgcctcatcgtcctcgccgctcgtcttctcactgtgcagacgtgagccgctcgccttctcactctgcagacgtgagtgaggaggatgacgtgagagaggacggaaatagtgataggagtgtcatggtttcaatttaaaaaaattttagtggaatccagccaataacgcgaatagtagtgatattcttctgatttaccacgtttacaatcttatggatccaattaacctaataaaaatactgctcaaaattttgcataacacacaaatttaatagcatcgctttgtgaaattgatggtataaggacatccataatatagcgcttcagcaagtagtaagtattaaatatcttattgtttgcatatgaaaaacatcatgagagctgcaaaagggtcactaacaagacatggcctggtacaaaggtgggctactttcatctcatttttaatcgcaccaaggctgatgataggctaggttggacgttgtcccatcttattttctctccacgcatacgtgtccgttctactagttccgctaccaaacaatggacccaccattgtttcctggtcagcaataaacattaccggtgcactaacggatttttgctcccatagactttagctgtactgaagaattcttaaggtagctagccacttttaccgtacactatatttccaacattccctcgtgatcactttctcaatatgacgggaaataagttggtaatgattttttggtgtaacagggatagggaaaacaaagctatcaattgacatagctgataaaataaaaatgtgttacgacatggatatcagcacaaactctgataaccaaaattctattagagcatctctaacagcctctctaaatcggactctccaaacacccatataaccaactttttatttgatttagctagtcaaactaaatgctcacttcaacagattcaatattaatcatctccaaaataataacagacccatgtgtcagcctctactactcttctttctctctctctcccccttcttccttctctttccttcttttcccctttccttccttcccgttcccttccttgatgccgatggcggcggctcgcggtggctcaatgatgcggggaggcgggaggcgagacgtcgtcaagatcccctcaggttgccagatctagaagggggcggtgacggagctcggcggtggcggctcgcgacgacaatctcgatgacgacccggggcaacgacgacctcgacgatgctcggggcggagcttggcggcggcggcagctcgcgacgacctcgacgactgatctagaggagggaagggggggggcatctcacgacgacctcgacggcggatctagaggggggcggcggcggcttgcgatggcgacctcgacgacgacccggggcaacgacgaccttgacgatgcctagccgctgcgcctgctgcggccaccgtttggcgagtcccctcgggctggccaaatctagccagccgccgagcgagtttggccatccggttagctagtctgttgaacattgtttttgtgcttgaatggccaaaatttgacttggagagactgtagagagcctgttagagatgctattagagtatcgatgcaatatatcttatcaccttattgggtctatgataagcattgcatgtgatttttatgtatcatttttctcgatcttttgcatcaaccatagcaacctatattttaaggcatgcccatataccaatagtcattggtcggtcgctaattcaggatttggttttgctgataaaacttgatcggtccctcatatatgggatctctttggacatacataattaaagtgtttcttaattaattaatatctcatatgctatgataataacataataataacatagttgatgatggattggtcgaggagactaggaagtatatatgttaactaccctaaagtacagtcatccacccccttaaaaaaccactcccttcccattcttaaaaaaccgctcaaaaggaaatctttaactacttaaaaaatgatgtcccttctttaaaaacccgtctccctctccttaataaaatattacaaaaaaaattaactcatgataaaaaccagcataaaaaactgaatcatatcatacttctttctcttgatccctttgcaatacacggatatgtaactaattataataaaatgtctgttaatgggtgaaaatagcacggcatcatacttcattattggaaaaactatacatatctcaccgtaaaaacaaatttatacaaattctctcttgttcttcatctctctcattttcggcttttccgcggtgtctttaggccctatttagatctcctgccaaaattttacactctgtcacatcgaatgtttggacacatgtatgaaatattaaatatagacggaaaaataactaattacacagatcgtgtaaattgcgagacgaatcttttaagcctaattgcaccattatttgacaatgtggtgctacagtaaacatttgctaatgacggattaattaggcttaataaattcgtctcgcagtttacatgcggattctgtaatttgttttgttattagactacgtttaatacttcaaatgtatatcgtatatccgatgtgacacgccaaaactttacacctctgtatctaaacatagtcttactaacagttaatctaatgtagtttttttccccgcaaaaaaaatcaaaatcaactgtagtttctgcacccacaaaaaattcttccaaccttcccctctcccgttcagtcaagtgtccacccagttcttgcatgacggccaagaatagccagagcctctaagcaccagccgatcaaggaatacatgcacaaacactactagaaaaagccactgcaattctctagctcacagctccagagacacaggatcaaaaccacaggcgtgtggctcgcctccctcctcgcttcaccgctccctaacaatgggcaccgtcgatgcatcccaagctatatatatactcatctgatccatttcctcctcgcacaggccgagcaatggagctcatcgtcctaccttcacacagctgaaaaaattccctcatatacaagataaaggtaggaggagggccgggagctcgacggatttcgatcaattgtggtttttttttgtggtaaccgtataagagaggagattttgtttaacgtagctagatcatatctgagttgagttttagcaatggaggtgctgatccggtggagcaagctgccggcggccggctccttggtgctgtacgccgtcttcttattgctgtcggcggcagccacatcggaggccaacatcggggagtacgatgagtactggcagaagcgcaagctcatggctgatgccgccgccgaggctacctacaagcgtgaccccttcgaggtcaccaacagcttcaaccgcgccgtccacaggcacgccgatcgttcgttcaatcaatcaatcgtgagaatagctcagttggttagaacatatgatagtaacgtgtgcgtgcagatcggaggaggagagcgggaggagggagctggcgatgacgaagaggaagaagttcgcggggccgtgcaaggcgacgaacccgatcgaccggtgctggaggtgccgcgccgactgggtgacggacaggaagcggctggcgcggtgcgcgcaggggttcggccggaacaccaccggagggctggccgggaagttctacctggtgacggacggcaccgacgacgacgtggagaacccgcgcccggggacgctccggtggggtgtcatccaggacgagccactgtggatcatcttcgccaaggacatgatcatcaacctcaaggaggagatgatgatcaacagcgacaagacgatcgacgggcggggagcgcaggtgcggatcaccaatggcgcgcaggtgacggtgcagaactccaacaacgtgatcatccacaacatccacatccacgacatcttgcaaggcaagggcgggatgatccgcgactcgccggagcacttcggcttccgcacccagtccgacggcgacggcatcagcatcttcggctccaccaacgtctggctcgaccacctctccctctccaactgccaggacggcctcatcgacgtcatcgccaagtccaccggagtcaccatctccaactgccacctcaccaaccacaacgacgtcatgctcttcggctccagcgactccttcagcgaggaccagatcatgcagatcaccgtcgctttcaaccacttcggccgcggcctcgtccaaagaatgcccaggtcacataataatactaccagtagagaacaccatacataaaatattaataataataatattatattattatatatataacatcattcattattatttatcatgtattgtgcagatgccgatggggatttttccacgtggtgaacaacgactacacgcactggctcatgtatgccatcggagggagcaagaacccgacgatcatcagccaggggaacaggtacatcgcgccgccaaacctagcggcgaagcggatcacgaagcagctcggggcgacggaggaggagtggaagaactgggtgtggcactctgaggaggacctgttcatggagggggcctacttcaccacgtccggtggcccgatccagaagcagttcagcaacaaggatctgatcaagcccaagcccggatcctacgtcacgaggctcacccgcttcgctggctccatcccatgcgtggccggcaagccgtgctagagcgcggtggccggcccccaccggatccacggctagccggagatgattcttattttgtagttgtgtgagcttattttttcttctacacatacgtacttactcaagaaatcttgatctgtggccggccgggttctggtcaatgtgatcctataggttctacatataaaaaagttgtattaattaaaagcatttttggaagcggtggcgatgcaaatttagagggcgatagggcgaggagcatgcatgtttgtgcgtataggtctacttgttgatggtgatcacgaaagagccaatgcattgtcatgatagaggacatgcgcatttatgcagaaggccctagggcaggaattatttttttttcattgattgttttaaatgtattgtactgaaactacattgttgtttcattaactgcacgcatctccaatgcaaagtgctaatgtaaggtgtttaatatatagtgctaatgtaaagtgcaatgaagcatctcactactatagaagatgacttcagtgtcgggtcgtaacccctcatcagtgttggaaatcaaaccggcacgaggtcatgagtgccgggttaagaaccggcattggtgaggactcatcggtgccacttgttggctacaaataacgtgtgcaatgatttgtaaatacgtgatattttcaacacaaatatataaaatataagtacatcccaacaaccattcattcaaatttgatttgaaaccagaaagactctagcttagataccatactagcaatccacaccgcaatttctaagaaatcatgctacaccgtgaaataattaatattacacaaaagaattgaaaatatgtgagcaatgggattaatcgactatccgtgatcctgccttgcgaggggcgacacgcaagagctgtgcggaacaatgcaaccagaaatgaaggttgtaatattccctgaaagtgcatctagccctttaagtgggttttggtggattaatgacaaaccagttaagtgactaataatcttgtgaagaagtgtgtgcaggtgttagtccaaaatgaatggagacatccaaatctaattaatggaatttggagcgagaacttgaacagttattttaaatttcttttgtgttttatctcttgagttctaggaccttcgtattatcaagagggttctcaacagatgctcaatgtctacaagtgctcatagtcattctctggaagagagacacatgtttcgcacatgcacactgggttgtgccacctttttctatctgccaggagttctcaaagagatgcctggaaacctccgggcctaagtgttgaccggaagttctccgggggctagcccagaacttcgggctctgtttaagtttgaatttgagagcaacgtctagttgatgtcgcacgagtaactatatattccagcctctcccacctttgttgcctggcaattccactttagttttcttgtccttagactctcatatgatgttattcttggagggcaacctcctagatggataaatttcgcccgcgagcatccatgtcattgtggattgaccagggaaaagtttgtgaaggttttcctcgcctccgcaaggaaaagaggtagtttgagtgaaaattatgagctgagccttcggaagttgtcttggtagggtaatccacattcgtggtgttctctaggtatccaagttgggaatctttgtggtcatttgaaatctagagaagtacatatataggaatggtggattgaaaatcggagacttcttcctagggttttggttggtgagacaaggggttaatagagacccaactctttggagctcctcaatggagattaggattcttgtaatccgagcttcgggtgaaaaatcctgtgtctatcctcttgtgcagtttatgtttctcctttgatttactgctttgaattgttcattaatcattactgtcttttgcgcctttgtaagtcttggnnnnnnnnnnnnnnnnnnnngtgagtctcgaggagcgagaacccgaaaatttctggaaagaatcgtggaagttccaggtagccctcactgtcttcgggtaagagatgctaggaagttccaaaccctatatattaacctctttaatggaagaaaattgttcaatcaatcaatcatgaggatagctcagttggttagaacatatgataacgtttgtgtgcagatcagaggagttgagcgggagaaggaagctggcgatgacgaagaggaagaagttcgcggggccatgcaaggcgacttatccgatcgaccggtgctagaggtgccgcaccgactgggcgacggacaggaagcggctggcgctgtgcgcacaagggttcggcttaaacaccaccggagggttggccgggaagttctacctagtgacggacggcaccgacgatgacgcggtgaatccgccccggggacgctccgttggggtgtgatccaggacgagccactgtggatcatctttgccaaggagatgatcatcaacctcaaggaggggatgatgatcaatagcgacaagacaatcgacaggcggggagcgcatgtgcggatcaccaatggcgtgcaggtgacggtgcagaactccaacaacgtgatcatccacaacatccacatccacgacatcgtgctcggcaagttggggatgatccgcgactcgctggagcagttcggcttccgcacccagtccgacagcgatgacatcaacatcttcggctccaccaacgtctagctcgaccacctctccctctccaactgcaaggacggcctcatcgacgtcatcgccaagtccaccggagtcaccatgcatctccaactaccacctcaccaaccacaacgacatcaggctcttcagctccagtgactccttcagcgaggaccagatcatgcagatcactgtcgccttcaaccagtttggctgcagcctcgtctaaggaatgcccaggtcacataataatactaccagtagagatcaccgtacataaaaaatattattatatatatgtatataacatcatttattactatttatcatgtgttgtgcagatgccgatggggatatttccacgtggtgaacaatgactacacgcactggctgatgtacgccatcggagggagcaagaacccgacgatcattagccaggggaaccggtacactgctccaccgaacctgacggcaaagcagatcacgaagcatctcggtgcggcggaggaggagtggaagaactgggtgtacatggcacttggaggaggacctgttcatggaggggacctacttcaccacgtccggcgatgcgacccagaagcagttcagcaacaaggacctgatcaagcccaagcctggatcctacgtcgcgaggctcacgcgcttcgccggcttcatcccgtgcactcccggcaagaagtgctagaccgcgcgcggcgggcggctagccggagagacgattcttatttgtagttgtgtgagcttaattttttttcttctacatatacgtatacttattcaagaaatcttgatctgtggccgggttctggtcaatgtgatcctataggttctatatataaaaaaaagttgtattaactaaatgcatttttggaagcggtggcaatgcaaatttagagaccgggcgatagggggaggagcatatatatgcatgtttgtgcgtataggtctacttgttgatggagatcacggaagaaaccaatgcattgtcatgatagaggacatgcacatttatgcagaaggccctagggctggaattaatttttttttatttattgttttaaatgtatcgtgaaactatattgttgtttgattaactgcaggcatctcaaatgcaaagtgctatatagtgtagctacatagtactacctccgtattttaatgtatga

SEQ ID NO: 12643 - DNA, 612 bp, Oryza sativa
attcactgggaacaacttgacaggaacagttccactccctctctacaatatgtcaacactcacattccttggcatggcagaaaataatctgataggagaattaccacaaaatattgggtatactcttaaaagcatcgaaatgttcattctgcaaggaaacaaattccatggtcaaattcccaaatcattggccaaagcaacaaatcttcaattgattaatctcagagaaaatgcattcaaaggtattattccttattttgggtccttacccaacttgaccattctcgatctaggtaagaaccagcttgaagctggagattggactttcctcccagcattagcacatacacagctggccgaattatatttagatgcaaataaccttcaaggaagcctgccaagttccactggtgatcttccacaaagcatgaaaatattagttttgacatccaatttcatctctggcaccataccacaggagatagaacaactcagaaacctcgtactgcttcaaattgaccataatttgctgacaggcaaccttctgactcacttggaaatctttcaaacttactcattctaagcttagcacaaaacagtttttatgggaaa

SEQ ID NO: 12644 - DNA, 688 bp, Oryza sativa
cagcaacagtggaaaaaaggcgatcctagcggggcttcagctccactccacaggcaaaactcaactggggtctgagccttggtcttctaactccgtcttcagctcagaagcactacacttctgaaaagggggaataatagcaaggctgagtacaaccaccgtactcagcaagccacaccaacgatgcagacgtgcaaggggaatacaaggatggtttgaggctatttgcataaaaggcggttgtaaaacgttttattgagcaaaacagtaacactgttgagtaattaaagtagcattaaatctccactgatcaacgctacaccacgttgaacaggcccaaccaaaacacctgaactacagtgcattgagtcgatttattaaggtgggactaatcacggtgaatctggtcgaccgcccataaccgcgggcacggctattcgaatagttttactctgatcagaggtgtacaactgcccacaagacacagccccacgacatgttaccgtgcgctgacatgccaccacgacataccggaaagaggccatgacaggacctttcgcataaccccctctaaccaagcacaccacaccttaggtttcaaccccactcctcgcaaggcagcgggcagtcccctctcgtgcctaggtgaatccggaagctgcataggccgtcgcagggcccatccaaa

SEQ ID NO: 12645 - DNA, 1235 bp, Oryza sativa
atgttactactgtttagctaactaactaatcaggtgagccattaacgagcgacatggacggacacgcgcaggtgcatcccaactcgaacgcgctggtggtgtcgacggagatcatcacaccaaacttctactggggaacccggcgggacatgatgctgcccaactgcctgttccggatgggcgcggcggcgatcctgctgtcgaacaggaggagggaggcgaggagggccaagtacaggctgatgcacgtggtccgcacgcacaagggcgccgacgaccgcgcgtaccggtgcgtgtacgaggaggaggacgagcaggggcactcggggatctcgctgtccaaggagctgatggccatcgccggcgacgcgctcaagtcgaacatcaccaccatcgggcccgtggtgctgcccatgtcggagcagctgctcttcttattccggctcgtcggccgcaagctcatcaacaagaagtggaagccgtacatcccggacttcaagctggcgttcgagcacttctgcattcacgccggggacgcgcccgtgatcgacgagctgcagaagaacctggacctgtccgcgcagcacgtggaggcgtcccgcatgacgctgcaccggtttggcaacacgtcgagcagctcgctctggtacgagctcgcctacatcgaggccaaggggcgcatgcgccgcggcgaccgcgtctggcagatcggcttcggcagcggattcaagtgcaacagcgccgtctggaagtgcctccgcacagtcaagacgcccgccgacgggccgtgggacgactgcatccaccgctaccccgtcgacatcccggaggtcgtcaagctgtgatcgaatccatggtagcctcagcctcgccctcgccggcggccgtcgcgccgccgccgcattacctcccctacacctgtacgtcacccgcgaagcgtgcgtcctcaaactttggagcttcttaatttgtggtgttttcttctttcctcctttcccctccctcgcttcttaattttttttcttgtcttccttttatttttatttttttcgctataaacacggattaaatcgatatactttgtctgatgtgtcacataaggaatgatcattcacaggagattaattattatatatttttttaattttccaatttagcgtggccgtggttgttcgattgttcgtgtcaggatccatgaagagggagagggattggggaattgaggggcgtgatcg

SEQ ID NO: 12646 - DNA, 553 bp, Oryza sativa
  unsure (1)..(553): unsure at all n locations
atctgcaggtcattctcgcgcatggcatcggcataggtccgcacggaagggtccggggtggcctcaccggcggcgaagggatcatggcgctccggcgagatgatgcgggccagccggcggcggcgatagtcatcctcgcggtcgatgatgcgctgcgacttcttggggaggccgtcgtcctcggcggcgcgggggatgtcggcggcggcgacggcgtggccggtgtaggaggcgaggcggcgggcggcggggttgacggccgcctcggagtcgtcctcgggcgcgtcgtcctcggaggcggggatggaggtgtcgtagccggcgaagcggttggggtcggagccgccgccgccgtagagatcggtgtcgaaggtgacggaggagacggccatgggcgcgccggcggcaagggcctcctccatcttcttgcgctcctcctgcgcccgcgcgagctccgcgtcgatggcgtccatggcgacggcgcggcggggggagaggcggttagggtttggggggtgcgggnnnnnnnnnnnnnnnnnncgaactcgaatca

SEQ ID NO: 12647 - DNA, 515 bp, Oryza sativa
cccgaacaacaaacagagacgcagctcagctggcacatacacattccatcgcggcggtgcaacaacgtgagcaatccatggcgccatgacaacgacgagacagcaagatgcatcatgcagcatgtggcgcaagcgtggcatgagctgacgagcactacgcatgcaggcacacgcgcgacggcccggtcggtgaactacggggagagaagaaaagaagattagttacctccttgatgaggtgcggcttggtgatgaggcaggcggcgctccagagcgggtcgttgatgtcggcgccgagcgcctccagctgcgtggcgaatccgccgtcgatcacggcgcacccgccggccctcctgacgatctcctccaccgccacggccatcgctcgatcgatcaatctatcaaccaaccaatcacttgtcgcaccaccacccccaacacgcagcagcagcagcagctagccgcgcgcaagtagatcggactaagagatcgatcgatcgacgagctgaagccac

SEQ ID NO: 12648 - DNA, 850 bp, Oryza sativa
tacaagaaaaaccttaaattatttattgcgcaatatattccagggctgacgtcatcaaggcggggcggagccaacaagcggggcccactggtcagcggctcaggggagagcggttcaccgggaccgggaccacgcgggtggtccaccgccggtccacgggaccgacggcccagatcgccctcgggccgatcggacgggcggcggtggaggcagccgccgggctcggctcggcatcaaagccgaccggccgacccggggctaacggcggcggcacgcgcgcgtcgcgttgccagcgacggcatccggcggcggaggcgacggcgcaaaagcgacgcgaaagcggcatcagtggacggcggcaacgaccaaaggcgacggcgagcgcgggcggcggcgacgcacggggaaatcgaggaagtaaaggaaaggggaaggagtcctcaccgaaggggacgacggcgtccggcgacgaggagcgacggagggaagtcgacacgcggcggacggcgaccgggacgacctaaagaacgaaacgaaagagattagagaggaagagaggggccataggaggcggggatgtcggccgaaggcggcggacatggcgaccctcaccgtcgcacgacgggaacggctctccggcgacggacctcgacgaaagaggggtggacggggtggatctcggccacgcgaacccgacggcggcgacgacgcggtgcggcggcgagcctagcggcggccggagtagcggaaacggcggcggcgggtggttgcacggcgcgggagcaatggggagcacgagggagttcggcgagaaaaggaaaaagcgagagggagcgacgggaaagcttaa

SEQ ID NO: 12649 - DNA, 613 bp, Oryza sativa
tccccctccccccctctttccctctctcccgtgtgcgccgccgtcctccgcgcgcgcaccgtcgtcttcggccgccgccgccgctttttgcgccgtctgccgtcgccgtccgcgccaccggttgccgtcgccagcgaccgcgcgtgccgccgtcgctcgccacgcttggcctgccggctttgaagccgagccgagccaccagacgcgcccctcccgccttgtgccactgccagtggggcccacatgccggcgcccctccctctctctcttgagccgctgactcatggggcccgcatgccggcgcctccccttccttgctgacgtcagccctggggcaatattgcgcaataaatacattaaggcttttctttaatagtaaaaacacaaagaatcttctaaaaatcataactaattcatccgagctccgtttaagcccattcaagtctcagtaaattcataaaaatgtatagaatccattaaaaatggttttggttcctgtttcagtagtcttatagcatgttttgcttgtgtgctttgtttggcgcgtagatttcgcccgtttcgtcgattcgtggtttctcgaagacgttgctgtggttccatcagtgcgaga

SEQ ID NO: 12650 - DNA, 706 bp, Oryza sativa
  unsure (1)..(706): unsure at all n locations
ccaggtcccctcctggatctgcttcagctcagtggacggcaagaacctgtgctcagaagagagctttgcagagtgcctccaattcctcaacgccagcgacaaggtgaccatcgtgggtgtcaactgcacgccccctcagttcatcgagggcatcatacgcgagctcagaagggtntgcaccacttctttcagcaccatngactcattcttgcacacaccccaacatttcttttctgcacgggtctgcaatcgtctgaaactctgaatgtgtttctgacagcaaaccaagaaggcgatcgcggtgtacccgaacagcggcgagatttgggctggcagagcgaatagatggctggtgagcacgacctgttacacttaatctgttctcatcgctggcacgccaagaaagattagcacagatctgttctcatcactggcacgccaagaaagattagcacatttccgtgcgaattcttggtcgtcttgatcatcaaactgactggtttttttgatgcgtcgcatgcacagccggcacagtgctttgggcacaagagcttcgacgcgctcgctaaaaggtggcaggaggccggcgcgagcttagtcggcggatgctgccggacgacgccgtcgacgatccggaccgtctccaaggtcctcaagggcaagacgtcctattcagcaactcagatttgagaccgactactgggta

SEQ ID NO: 12651 - DNA, 547 bp, Oryza sativa
ccagctattcttatgaactgtgacaatcaaacggtaattgtgaaagtgaacagttataaggataacatgaaatcatctaaacatgtgaaaagacaattgtagtctgtcaggaatttgagaaactccggggttataacattgaattacactgaaatagctagaaacctggcaaatccatctacgaagtaactatcacgaaatgtgatagacaatgcatcgaaggagatgagtttgaaacccatgtgagttatactatggcggtaacccaatctatatgatcggagatcccgtgaattagaacctgtgaagaacaagccattagtcaactggaggagagtaccaatctaaatcctctttaagtgaagatgcatgtactctcatgagctgcaaggcaggttggctatatgccttaatgagttctattagctttaattagcaaagatgctatcctgtagagcattcttaaaagaacacacctttgtgagcttgactattggttgtactcttgatattttaggtgaatcttctaggaagcttactaagagac

SEQ ID NO: 12652 - DNA, 2275 bp, Oryza sativa
gcaattgattgctcttcatcttcataaacattggctctaatcattgccttctccatctctttataatattcatcaacactgaggcttccttgcttaaattctgcagcttgtcaaaaagatcacggcgataatgtttagggacaaatcttgccctcatttctctcttcatttcagcccatgaacgcacatcgccttggccagcttcttctctttcatttagcatttgctcccaccagattagagcatagccatcaaactctagagcatccccggcaactttcttccgctcagaataattatgcaaacgaaagattttatccaccttcaactcccatgtaagatagacttcaggatcagatcctccttcaaacttgggcatggtgaattttaatttgccaaatctctcttcattgggctgatttcgcccacgatttcctcggtgacgacgatcatcacgatgaggctgttcaacctcttcgtcagtcccactttcttctagtccatgttctcttccacgatcagcacctctaccaccatttccacgaccaggatgtggaggtcttcttgcatttgcaacaacacgatctctccgtcttcttcgttgttctcttgcaaggcgagcagcagcttctccttcggattcttcatcttcttctccatggtgacttgcatttgcatcttcaggaggaggctctggcaatcgattcataagtgcttgaacattggctgttagtgcctccatgctttgcttcatctcattgaattgtgccatggtgacacaatcctcaatctcaacattagaacccatcttcctgtcaagttagtgatggcttgcaacaaatatttgtggaatatgtggaataggaaaatatatgtgcaatcacacaacctcacctctctaccgaagctcaagtgagttccctgcagattacagaggaccaatgcgaggtggtaacttgagaatgatggttgggagaatgcaagatcagcgttcctatgacggtggattacttgtggagcttggtggggatatattttacaaggaatgcaatctgaattctcgctattgtaaagttaaatcacagtccaaaatgcttagtgctgaccacaagatatgaataacgtaaatagatcaaacacacacgcaaagataattcagttttgatgcaaacaaggagtatgcttaggatgcaagtgttgcaatcagacctaagcaaaattttgcaccaaaagatagataacaaactgattgtgcaacttgatataaaattcagaacatgtgcacataaacaaactgatctttcaacttttctttctcaaactttcctcaactctttttcttctctctttttttttgtaacttttctttcttctctttttttttgataaacttttttttatatatataactaagaacaagaacagatatgaaacttatacacttttctttttgtagaaacaagacacgaccgtcagcgttctaacttgataggatcaaagtttacgcgaaggatgataccggtttctgaatttttttttatatatatggatttgcagatgtatgaaagaagctcaaaggacacgcaaaggagaatatgatcagcaactaaaacaagactctaatggactgaaaattaactaaactcacaagaataacagattgaaacaaagggctatagcagaatatttttatggctttttcagtggataggacgaacacaaatatatatgtagctaagggtaaaaatcctaccgttgcaaccgaggctctgataccagatgatgaggttgttgtcccgatcttcacgacgtaagattgatcttgataactagccgaagaacgaccgataacttgctgcaagcagcgataattagtgcaacctgacgacacgcacaaggagccaaccaccgtctctatacggcagcctgaaccaaggattcgcccaaccacactctcaaagaaccaacctacgcaacctaaactcgaggatcaggagcacggattgggtgccgatgacgcggccgcttctgtaatctccgcgaaggaaaacacaagagaaaaggggtagagaatctctctctggggtttgttagcacacagctgaacaaagggttccgaattggattatcaaaagtctgagtttgcaatggtcttaggggttatttacactagcaacagccctgctagataggtgtgaattcgagatggaaatgaaaagactaaaaatgtgaaagggcctccacgaaatggcttctgaagtgggttcgcgaggct

SEQ ID NO: 12653 - DNA, 5127 bp, Oryza sativa
tgtgttgattacaccgacctcaacaagtcttgtcccaaaaatcccttcgggttacctcgcattgaccaggtagttgactcaacggccggctgcgagttactcagttttttggattgttactcaggatatcatcagatctgactaaaggagtccgactgcttgaagacttcattcatcacacccttcggggcctactgctacatcaccatgccttttggattaaagaatgcaggagcaacttatcaacgcatgatccagagatgcttttcaactcagattggttgcaacgttgaagcttatgttgatgatgtagtcgtcaagaccaagcagaaggatgatttgattacggatctacaagagacctttgcgagcatccgcgctttcaagatgaaattaaaccctgaaaagtgcatcttcggagtaccgtcaaggaagctgcttggctttatggtgtcctatagaggcatacaagccaacccggagaaaatcctcaacatgaaaccgctgagctcctagaaagatgttcaaaagttaactggttgcatggcggcgctcagccggttcgtctcacgactcggcgagcgggggatgccttttttcaagctgctaaagaaaactgataatttccagtggggacctgaagcacaaaaagcctttgaagacttcaagaaacttctcactactccaccagtcttagcttcgccacatccgcaagagccgctgttgttatacgtgtcggcaacttcccaggttgtaagcacggtcctggttatcgagcgtgaggaagaaggccatgttcaaaaagtccaacaaccaatctatttcgtcagcgaggttttggccgactccaagtcaagatatcctcaggttcaaaagttgctatgtggtgttttaattactgttaggaaattatctcactattttcaaggtcactcggttacggtggttacatcgtttccacttggggatatacttcacaatcgcgaagcaaatgggcggattgcaaagtgggccttagagttgatgtctttggatctatccttcaagccgcgaacttcgatcaagttccaagctttagctgacttcgtcgccgagtggaccgtatgccaagaagacacgtctacggagaagatggagtactggacaatgcattttgacgagtcaaagaggctatcaggcactgtagcgggggttgttctaatttccccgactggagagagactaagctacgtattgtggatacatttttctgcgtctcacaacgtggcggaatatgaggcgcttcttcatggattaaggattgcgatttctgtaggaattcggcgtcttatagttcgtggagattctcagttggttgttaatcaagtcatgaaagagtggtcctgccttgatgataacatgaccgcctatcgtcaggaggtatgcaagttagaagataaattcaatggccttgagctaacccacgtccttcgacataataatgaggcagccgacagactggctaattttggtacaaaacgaaaagcagcttcttccgacgtgtttgttgaacatctttatgagccaaccgtactaaggaaagaaataatcgagaccacggacactcaagaagtaagcacgattgaagccgactggagagagcccctcatcagatttttggctaaacaagagctccactactggagagggagaagctccctggtgctaaaaacacccggcaacaatggaaaaacacccggtaatcactgttgccgtgtacctcactccggaatcattacccgggagtgaaaagaaacggcggcgattgcgtagtgcgtctaaaaacacgggaagccttaatttacggagcgtgcgtacgcctggaacacccagcaaacaattttctgttaccgggtgcatagcatctaacacacgataagtctcagtatttgcggagtgcctataaaaccatacgttcatttgatactctgtaatgttcccgactctggcattatttacagtattgatagtgcaatatttgcttattcatttattatttgcaccagaacagcagcatccaaatcacacatcaacacagaagaatggattgaaatgcattgacatccatgttcagttaatcaatttgatgacaatctaatatggaacaattgaaataccaatctcagaaacagctacaattgagatgaatttgagcattacttcctctaccaacaagcttgggcaaccaggaactcttgcaaacagaagaaaacatcatatgaacggcaccataggcagtttgaccactcctcataacatagcaaataagccgattgactaggaaaacctgaacctgagattgcataaaagagagatcaatttcacataaaaaagtggtgacactttcatgtgttgtactaaaacaaagtgatgacacttatgtagaatagcactagcaaaataatatgaatgatgtatgcgcattgaaaacaaagtaatctgaacttgtacatcttttattcaagattatgtaggcttgttaaaatttaggcatagtgtcagtggaattgttgatggcgcatgatgaagcaatatgcgcccacgtgactgatttgccaattgcccaggcattacaaccaaatccaaataaatgattatgcagcttttatttgacagaacatcctgattactagtatataatgctcaatcaagattcaggaacaaaatagtgatttatcatcccagttgaaacaattgccattcatctatcaaaaacttatcttagaatccacaaggggttcataaaaaaattggatatcatgtagccagatcaaaagaattaactagcatatgaagtggcaaaatttggtagtattttacttcactgttattcggattcactattgttggcaaaatggcagcaccatatcataactaaaaacttgaaccacaaatgcagacatagtaaaaatggattaatatagatccatcttcttgctgagaatcaggtgtgagagcttacagcgcaggtgagtatctgatggaactggtgtacatcagatccctctagctggtagcaaaaagaatatctgcagaaatgatgaggtctgatttaggaacacaaatcctttatttcaaaagctccagagctaggagaatgcaatcttcatgtactattatttattgcatgatccttctaaaaatgaagtatgcaacatcttgggaacatctaacctagtggcatttggcatagcaggggcataaacaatgatggtccacctcatcatgtctccaattttgaactacatagtagtacttatatacagaaaacatgaatttatattttacaaagaaggaaacaagagcttgcatatggagctaacaaaatgagctttgtcagactatattaccaaataaaaaatgccaagtggaggaaaaaacttgcaggactcagatacaacccaatggaataattgacctggccaagatcattaattagattactcatcagacctgtggcaatgggtcactagttgatataatgctcgactatttgcgatacacatatataaatgcatgaaagaggggtagtaatttaatcttttgcacaaaactatacaaggatttgttagttactccttacaatggttgtttgtttccaacaagaatagtccagcaatgtgaaggaagctagataagtccacaagaaaagttaaagacctatattaaatgatcatacgtctttggactagactgaacaaaatgatggtagcttacattcatgggacctgcatggccataccattgtctggtacattcaacacggttctattgttgattgcgctcctatcaagaaaaagaatacagtgaaaatattcataagtgtaaatccattttattgttggtcaagctaacatggagtcatacatataccagaaaatgaataaatagttacttctataatcatagaacactgcctttacaaaaacagcttcagatataaagagtgtgacatatgaacagctggacaaaattaggaagtggtataagtttgttgctcgatggctttagataagtttaatatcacttctcacctaggaaaaataatgccatgcagtacacacagatctgaaagataagtgctgaaaggagattattactctaccaacctaataatatttagtgctgaagatttggcaatgagcacccgtcgtcggtatatttaggaagaacttaccgagcactctagcagcagtggcaggtagggaggatgagaggccagcactggccatgggaatgtggtggtggtggtaccaaagtggagcaagaggcaggtcgcagactcagacggagaagtagccatcgcagggtgtcggcgcctcttttcatgtcttggcgtcgcaggacagcaatagaggcaacaggctcgtgtggggaactgcagggacagtgaggatatggtgctgcacggctccttcgtacactaccacctccaccaggatggccgttgcggtcgccgtccctgtctcctcagctggcgtgccctcctccctcacggtagagatgcgcatctctgggcgtggtggaggggagcattgaccgccgaggaggtttcgaccacctcgccgccggcagcaccttcaactgctaaagtcagagggccgagtagccgacaacgatacgaggagcaccccccaactctgattaatcctactccaccccgaggcaccgacaggcacgagtacaattcctccctccccattctccatgcctagccaacgatgccgatgcggatctggtgcggcgaggagaggagagggtgagacgatcggaatcaaagccggcgtcgacgagctgcaggttgcagcctaccgcgcggaggagccaaggcggcggcggcggcggcgcgtgggagaggctgagagggattagggtgcgagtgcgactgtgcgagagtggggactggatttggggaggtgatggtggcacggacggctttggttgtctgtgaccgacggatcggacggctcacgcgagggatggttactgctgccctagaaagatgggggatttgtattcccgcccaccaccggaaattgggaatttggagggaaatatttggtttcattaaccctgattcgttttttt

SEQ ID NO: 12654 - DNA, 3557 bp, Oryza sativa
atgcattttagagtcgttttgggacgtgacaatctgcacgttcacggctggttcacctcccgccctactcgatctcatcatgggcagatctgtggcaacagtttatcaccaacttccaaggtacatacaagcgccacgcaatcgaggacgacctacacgcgttgacacagaacccgggcgaatcattgagggactatattcggcgctttagtgagtgcagaaatacgatccccgagatcagcgatgcttccgtgatccacgctttcaagtttggtgtccgagatcgctacactacccaggagttggcgacaagacggatcacaactgctcgtaagctattcgagattgtcgatcgatgcgctcacgtggacgacaccctgagacgcaagaacgacaagccgaagacagcaggagagaagaaaccagccaaggatgcacctgagtcaagcaagaagaagagtagcaggagtgggtgttaacgaccaaatttggtaatccaaggatcggatgtggaggaggaattgagacggagttcgagatagagattgtcccggaaacagagtgtgcagagttcgagtcggacagggttagccgattgagccgaatccaacaatatgacacgacacgtgttgtcgggttaggttaacgtgcttcatgatggttgccacgcatggatagagtcctgagaaggcaattgtatctattaattaggatatttcatgtaatttacttagagatatgtttgggcaaaagtctgccgcaaagacttatggtatcttagagtttgttagagataagagtcgtgtccgataaggacatatcttgtaattctcgggtataaatagacccgaggcccatgtaatcaaactaacacacgttcaatacaatctcggcgcatcgccacccttttttgctttcattttgtttcgacgagttattgctttcgggttgagctgcatcggtttcgatcttcaacgagagtaaaacttgttatggcggcttgcgttcttgggattagtgtttccatcttcatgatactctaatcttgtttatgtaattcgtcgagttatcatatatcttacataatctctagctatatcgttatctaacctacaatcggctaacatctgtcagtagaaagcagccgattaggttaaatatcgatgttggtttagattatataaggtatccaccactctatgacacatccaacggcttgattgtctagatattgtccttcttttcatacttatagctacatcagttgagtttgatcttaggagtcatgattagaatctcaatctatagcctatctttggttgccgattatggtagtattgatgtttcagccgatcttacatttattttatatgcttgattgacatgttaaatatgccctttatgctaggatcttgttgcatttaagtatattaggctctccgtttggtatattttatttgctgtgatatcttaatatagagtggtatcggagtattagctgatacatgctagatctatctgatcggctatgctatgaacacatatagtctcgttattaatatatatttcgatctaagtgatttatattgtctcggcacggcgaccgatctatcccaatcacttgatttaagtatatatcgatataaagactatataccgttaatatctacaaccgatcgagtagatttagttctttcttacttattaatgaatgccgatcgatgcactatatgacatcggcttaaagatgaatgatatgtcatcggcacctagctgatcggctatcgtttatggatttaaccgcggtttctttgtctttatttattgttgattgcaggatcaaatcagctggcacgctcatacatctaaaggcaagttttggacctacactggagttaagcagatctcctaggccttgtgtttttacatcaatagtgggaaaaggaaggctcaaacagaagtcttcgcagcagagtatgcgaacccacccaagcacccagacccacaaggcgacgacacgaagaaaatatggtgccctatacacaagtcggataagcactctcttgagacttgtttcgtcttcaaaaaggcactcacaaagcaactagcgttggagaagggcaagcgagtaagtgtagtcgagaaggccgcagaagcagctactcaggactcagactcagcctacccagactccgacctccatgtttcgcacatcttcggaggttccacgatgtactcctcaaagcgagagtacaaaaaggtggagcgcgaagtttgttcaacatggcagggggctacatccaagatgaagtagttagagcagaagatcgaattctcagaggcagaccaccccaagactgctgttactccagggtgatatccgatcgtggtcgagcccactattcggaacatcaaggtcgcacaggtcctcatcgatggcggcagctccattaacctactcttcgccagcaccttggacgcgatggggatcccacgaagcgatttgacgcctactgatcaacccttccacggaattactcctcagtcatcgtccaagccattgggcaagattatgctacctgtgactttcggccaagcaaacaacttccgaacagagcagatcacctttgatgtcactgagtttgacacaacgcatataattccatcatcgggaggactgcactcgcgaagttcatggccgcatctcactacgcatatcaagtgctcaagatgcctgggccaaagggaacaatcactattaagggaaacgcgaagctagcggtacagtgcaacaagcggagcctcgacatggttgagcatactcccaacccgcctgccacagctgagccgtccaagaaagtgagcaaaaccaacaagacactgaagccagatggcgcaatcaagattgttctgctctccagtgccaaccccgacaagactgtcaagatcggggcgtcactagatgagaaataggaattcgcgctcatcaccttccttcgcgacaatgtagacgtgtttgtttggtagccgtccgacatgccgggggtccctagggaggtgattgagcacaaactcatggtgcgactcgatgccaagccagtaaagcaaaaactgcggagattcgcaccagatcggaaacaagccatacgagaagagctcgacaagcttctcaaagctggtttcatcctagaagttctccacctagagtggctagccaatccagtcatggtgcgcaaggccaacgggaagtggaggatgtgtgtcgatttaaccgatcttaacaaggcatgtccgaaggatcacttccctcttgtcacaccctgattttcgtcttaggatttataaattatttaataaattattaatggaatttatattaaatgttctttaatttacaagtaaagttaaatgtgggaaataaaattttctaaatataaagcatggatggatttaatttttattaaattctccatggttaattatactctctggaattttctcggatttttcggagctcaattattaattttaatcatacaaagagaagttcagcaatt

SEQ ID NO: 12655 - DNA, 693 bp, Oryza sativa
ttttgggacgcgacaatcttctacctccagccgccggcacaggccgagcccaagccgtcgcccgagccgctttcttctcctctcaaatccgctccaatccggcctcttttcttccggatttttgaggggttttgatcctctcgttctcctctatcttttcccccaagttttggagcaaatcgttgtgtatcttgttcgaatcaaactcgttttcgagtttatctccaaaaccgagttttgattttctcggatcgattcctctcgtttggagtctgatctcttcaatccaaggctatataaagcatcccctcgtcgccctctttcgtttgccccctctctcgtcctctcccgtgcaccgtagcgccgccgccgcgtgcacttagccgccgccgtcgccggccggtcttcagtcgtgtcgcgtcgtcgcctccgccgttaggtgcgccgtggtgaggagaaccccggccgccacctctccttcgccgccggccgccacagctcgccgtcgccgttcaaccgagccgccgccgtcgcccttctcgtcgccggccgtcgtcgttcgtcgtttgtcgtcgtggtgagtactgtcgggtttgtctcgtcgtcctcttcgcgtaggtgctctccaatcgcccggccaaggtccctagctccggcgaggttgccgcccgagtcggccggccatggatgacg

SEQ ID NO: 12656 - DNA, 2255 bp, Oryza sativa
caacttctcactgaaatatgcaacgggctgtccattttgcatgagaacgcctccaataccaatcccacttgcatcacattcaacctcgaaggttttagtgaaatccggcaacacaagcaaggggccttcggacaatcttttcttcaattcttggaaagctttctcttgcggttctccccattggaaggcaacacctttctttgtcaactcgttcaatggtgcagctatggtgctgaaacctctgacaaatctcctgtaaaaaccagcaagtccacgaaaacttttcacctggcttacattttcaggagttggccaatcctttattgctttcacctttgattcatcaacctgaattcctaaacctgaaacaacaaaaccaagaaacacaacctgatctgtacaaaatgtgcacttctcaaggttagcatataattgttctttcctgagtacatccaaaacttgctgaatatgagcaacatgttcctccaatgtcttgctgtaaattaggatatcatcaaagtacacaacaacaaattttccaataaatgctcttaagacatggttcattaatctcatgaatgtactaggtgcattagtcaaaccaaaaggcataactaaccattcatacaacccaaactttgttttaaaagcagttttccattcgtctccaattttcattctaatttgatggaaaccacttctcaaatcaattttcgaaaatatcatagacccactcaattcatctagcatatcatctagcctaggaataggatgacgatagcgaacagtgatgttatttatggctctacaatctacacacatcctccatgaaccatctttctttggcaccaaaatcacagggacagcacaaggacttaaactttctcgaacataacctttatctaaaagtgcttgtacttgcctttgaatttccttagtttcttcagggttggtgcggtatgctggacggtttggaagtgtagctccagggatgagatcaatttgatgttcaatgccacgcaatggaggaagtccaacaggtgtttcctctggaaagacatcttcatattcctgttaaacacgtgcaacaacactaggaacagaggttaagtcgttagctgaaagtaatgtgtccttgcacacaagtatgaataatacttgttctgggtttctcctcacatctctcatttcagatttggtggctatcatcactaagttctctccctctcttttcttgttgtctctcatgtttggcttgtggctctcactcaccgatttgtggggggcactcaaattatttttctgtccttcttttgcactctcattcctcacttcagagctcttttgcaagtgctcagctagaatttgctgcggtgtcatgggtttaagaatcaactccttgcccttccacttgatggtgtattgattggttctaccacaatgtagagatgaccgatcatattgccatggtcttcccaacagcatgtgacacactgtcataggtgccacatcacactccatggtgtcaatatattcaccaatcttgaaaggaacttttactctttgtgcaatcttaatagaacctgaattattaagccattgcacatgatatggatgaggatgttttagcagcttcaaaccaagcttttcaaccatttctttgctagcaagattgtggcaacttccaccatcaatgatcaccttgacaactttatcttgcactttagctctagtttgaaaaagattgtgccgctgtccattttcagcatcactcatttgtacactcaaaatttgagttacaacaagagcagcaccagattcaaattcacagatatccttctcaagattattctcctcttcactatcttcttgttcttcctcactagtagattcatactctccttgatcattcacaacgatggttctattgtttggacactctctagcaacatgaccacgaccaccacatttgaagcattgaattccactactcttggtggaagaacccactgaagtagatgatgtgtttgctgcatttttcctctcatttggagcagccaaatctttcccactggaagtaccataattgctagatcgtgcaccaccacttgagctagaaaatgcacctctatttccactacctcttgatgtgaatttgcttccacttgctgcattctttgtgctgaaagacactcctctattggacttcatgtcttgctgcaattgacgttcagctttgctagcttgatgcacca

SEQ ID NO: 12657 - DNA, 2314 bp, Oryza sativa
cttctgcttcttgggcttggcgctgttcttctgtctcgttgtcgcccatgaaaatgccgaagtagagaggtgtgtagttatcttcgtagccttcatcgaagtcgtcgaggttgcggtggtcgtagcggtagccgaagtcgtcgtactctacgatctctgtcggtcgagagtcgacaccgggggagctaaggtagccgtccaattgttccgtcgaaaccgtgccgagaggctggagtatgatgccgacttccctagagctagactggatcggggccgaggtcgggtcccgcctaggcctacggggagaagacgcccttatggtgaagatggcagccaagtcatcggggagtttcatcaggattggaggataggcgccatcgtcttgatcgggtcatgttggagtagattggatctcgtccgagtggtttggggccggctcggttgtgatgatcctggagtagatctcggccgacttcgggataccgaacggggcggagacctggcctctccccgactgtttcggatctgagccgaggagagaaatcttgccgaagtcgttggtgacaaagtcgaggctgccaaaccggaacgcctgcccgggagggaagacgaagtcgtcgatgccggagatgaaacccatcgcactagtcggcgaagaacttgacgctacccctacctggcacgccaactgtcgaaacgagatttcggcaatactaaaagggggtggctatcaagctggaaaagtggatgggttgagagacaaggaattttatacaggttcatgccttcttaataagaagtaataccctactcctgtccggggattgatccgccgagtatgttattgaccgtatgatctgggagaaaatcgtgcccttagaggcacccggacccctccttatataggggaggggtccgtattacaaagtacaatccatatccctaacggaataggtagttacagataagttacaatcgtaaccgactaggatcccggatatttccttgacatacaagtttgaaatttaatccgagtccctttaaaagatattctatctacagatggcaccccatacccagtcagactatatatgccgtgtgggtatggggtatccataatctctatacatacctcaagatatggagctcattgtactgaaaaaggcaatttgatattggctgtataggggcagagatttgcagtccatactgactactgaaacttaagagtgcctctagaattccgcagcaatgttgggtgagtaaattgtagggcatggctaccagaatgaagatgttgacatactgtcccagcactatttcgaacaggtccaacgccatgtcatccaatgtgtacataatactatacacatgcaaaaagagggcctaaggcaccacgggcatcttttatggaagtattctccctacatgtcacactctcagaatcgcttaatttaataattcattctttaatgcattttttagaaattattttaaaaacctacaagataaaccctaataaaaactagcaaaatcgcacataaaattgagatagatacaattttattaaatactttgcttgtttatctatttcctggatttttatgtgaattatttgagcaagggaagtatttttattaaatgaaatagcatttcacgaattattttaattaggaaaatttttaaaatcctatcctaatctgttgggcccttttccggcccaactcttcccctcgcgcgcgcgagccacgcggccctgccggcccaggccaagccgcccctccccctctctctaagccgccgacatctggggcccacatgtcggggccatcccctacctccggccagtcaagccgagcccgaccaccaccacctccccaccaaatccgccgctggtcgtcgctcccgagttcgattggatgagggaaatttatcccctcatcgtcctcttccttttcccctaagaatcggagccgaatttcgtgtagtttatccaaatcgaattcgaattcgagtttatctctccacctaaccctatagttttacggctttgattcctctcggtgtgggatcgatctcgagcttccgtgcctatgtaaatgatccccttgtcgtcctctaccattgccctgaagccacgtcctccgccgtggtccatagcacagccgccgcgtccgtcctagtggtcgccgcaagcctagccgccccacgccaccgttgtggtcgccgccgccgctcactattgtcgccaatcggttcgccgagtggagccgcacccccgccgcttcttcgtttgcggcgagacccgccggaa

SEQ ID NO: 12658 - DNA, 4027 bp, Oryza sativa
gtcaaaactgaaccctcatggattatatactcccttacctgttcctagtgctccttgggaagatattagcatggattttgttttgggattacctaggacaaagagggggagggattcgatttttgttgttgttgatcgattctctaaaatggcacactttataccttgtcataaaagcgatgatgcttcccacatagcttctctatttttcagtgaaattgtgaggttgcatggcatgcccaagacgattgtttcagatcgtgacaccaagtttttgagctatttttggaagaccttatgggcaaagcttggaacaaggctgctgttttccaccacttgccaccctcaaacggatgggcaaactgaagttgtgaatagaacactctctatgctgctgcgagccttgataaagaagaacctgaaggaatgggaagagtgcttgccacacgtggaattcgcttacaacagggcagtacactctacaactaacatgtgtccatttgaagttgtatatggtttcaaaccactttctcccatcgatttgttgcctctaccattgcaggaaaggagtgacatggaagcgtccaagcgtgcaacttacgttaagaagattcatgagaagaccaaagaagcaattgagaagaggtccaagtactatgctgcatgggcaaacaagaatcgcaagaaggtgacatttgagcctggagatttggtttgggtacatcttcgcaaagaccgttcccacagaagcgcaaatccaagttgatgccacgaggagatggaccattcagagtgctgtccaagatcaatgacaatgcttacaagattgagctacctgaagattatggtgttagttcaaccttcaatgttgctgacttaacaccattctttggactagaagattcagagtcgtcgaggtcgactccttttcaagagggggaggatgatgaggacatcccaaccgtgcatgctacttcaagtaccaagcaaccatcatcaaacacaaaggatacaattcaaggtccacttacaagaagtcgtgccaagaaactacaagttcaggtgaattcattcctaactgattttaatttcagtacttctgagaatgttatactacctaagtgttctactttagttgtgcttaggaacatacaacatgaggaggatgaaagtggatcggtggattctatcactggagtacagaacggaccagtgaagcaaaacggaccaactgcagtgcaaaacggaccagttcaaagaactgctcataactctcaatttacagaagctatggaagtaaatgaggactctttggaaagcttatcaagtcagctttccaatgccaccaataccaagtactttggacttcacaccaatgagaaccaagtacgtttgtgaagactgctctgaaggccaggagtctgctgagtcagcacgttggtacaagttcatgttcaaaactgtaccaatctacaatgtttcgtggtgcatgtatacatggttcaaaacatagtgaagttaactttccaacgcaactgacggtgcatcatttggacttcccaagttggagttattgccaaattactgaacaccactccagaagaccaacagcctcgcgaacccacttcagaagccatttcgtggaggccctttcacatttttagtcttttcatttccatctcgaattcacacctatctagcagggctgttgctagtgtaaataacccctaagaccattgcaaactcagacttttgataatccaattcggaaccctttgttcagctgtgtgctaacaaaccccagagagagattctctaccccttttctcttgtgttttccttcgcggagattacagaagcggccgcgtcatcggcacccaatccgtgctcctgatcctcgagtttaggttgcgtaggttggttctttgagagtgtggttgggcgaatccttggttcaggctgccgtatagagacggtggttggctccttgtgcgtgtcgtcaggttgcactaattatcgctgcttgcagcaagttatcgcacggtctttggctagttatcaagatcaatcttacgtcgtgaagatcgggacaacaaccttatcagttgacggaagaccgaatgcatggcgacggttcacgaaaacggacggcggagattcatccatccaaaacggacggccaagatccatcggtccacaaccggaccatggcggactgcaacgatgacgtcggcgatgacgtcatcaccggcgacggctcggcctcgcgtgctcgccggcgaacgacggcgcggcggcgcaaacggaggacacctacgcgtagcggacggcacggcgaactcactggtgaccaaaacgacggcggaagatcaacggacgacgacagcgacgaggaagagcggcggcgacgatcgggtcaacggcggcgacggtgctccggcggctgacagcgacggcgaaagggcggacgaggacggcgacgcgacggcgaccacggcggtgacctccccgagcgacgacgacgactggagcgatggcggcgcactgctggagtggcggcggcgacggcggcgcgaggcggcacggcgctagagctctaccggcgacgagaggctaaggcgagggtggcggcaggtataggggagcttggggggtcaatttatagggtctagggagcggcggcgaaggcccacggcgaccggtgacgggaaggaaggtttagggttcggaggagacaaatcgatccgaatcgaactcaaatccggcgatttccaaagcgatttagacgatgtttccaaaagggaaaaggtagagtggatcacggggatcctttcccctcaatcaatttcaccggaaacggaaagggatggccggatttggaatggcggcggcggcgcagctcggctagggtttcggcgagaggaagacgacgactgacgggtgggacccacctgtcagcggcggtcgcacgcacgcgcgcgggcggctcggcttgggctgacttgggccgagggagagagagagagagagcggtttgggccggctttcggcccaaaaccaaaagggacttttaaaaacctttttccatttaaattattcatgaaatgcaattccatttattaaaaatacttccttggctcaaataaaccccagaaaaatctaggaactatagaatcaagtaaagtatttaataaaattttatctagcccacttttatattggaatttaacaaattaaaattagatcttctcttctaggcttttaagatcatttctaataattcccttttagacaacaatttataaattaaggatttttaaacaagaaaagcacttaacataattataattagatcattaatgattaaataattactgaactgttctttgtatcatttaggaattgagctctgaaaaatccgagaaaatttcagagagtataattaatcatggagaatttaataaaaattaaatccaaccatgatttatatttaggaaattttatttcccacatttaacttcacttgttaattaaagaacatttaatataaattctattaataatttattagataacttataaatcctgaaacaaaattcaggctgtgacagtttactggaaccgaagcggtgatcatggtcttggtctggttcaagatgttgacgacgtgattggcttgattgagtgcgtcttccttgaggagggtgtcgagaagagtgatcggtgcagccgcgttctgctagggggtgcgaaaaaccgccgtcccctcaacgtcttgttgcccgatgagctctcgtgctcgtcgctcggcctccaaggcacgctgtcgccggtcctcagcctcctttgcagcccgttcgcgctcctgttgctcacgctgcaatcgttctcgctcttgtgcttagcgttcctcctctagtcggcgacgttcggcttcttgtcgcacgcgctgttcttctgcttcttgggcttggcgctgttcttctgtctcgttgtcggccatgaaaatgccgaagtagagaggtgt

SEQ ID NO: 12659 - DNA, 774 bp, Oryza sativa
ccgcgcgaagagataaagagagttggaccgaattcggcccaccaactaaggaagggctttttgaactttttcaataaaaataaattgtgaaatgatgtttcatttattaaaaatacttccattgctcaaataattcccagaaaaatctagaaaatagaggagcaagcatagtatttaataaaattttatctaacccaattttatattgagatttagcaaattaaaattagatcttctcttttaagcttttaaaatcatttctaataattccttttaaacaacaatttataatttaaggatttttaaacaagaaaatcacttaacaattataattagatcatttgatgattaatttaatatttaaataattgctgaacttctctttgtatgattaaaattaataattgagctccgaaaaatccgagaaaattccagagagtataattaaccatggagaatttaataaaaattaaatccatccatgctttatatttagaaaattttatttcccacatttaactttacttgtaaattaaagaacatttaatataaattccattaataatttattaaataatttataaatcctaagacgaaaatcagggtgtgacaagagggaagtgatccttcggacatgccttgttaagatcggttaaatcgacacacatcctccacttcccgttggccttgcgcaccatgactggattggctagccactctaggtggagaacttctaggatgaaaccagctttgagaagcttgcgagctcttctc

SEQ ID NO: 12660 - DNA, 797 bp, Oryza sativa
  unsure (1)..(797): unsure at all n locations
cagcgcctgagcggaggaggggacgcgtggaacacgccgctgcgatgttggtgaaggtggtggtgcagcggggcgacgagccgacgaggaggaagnanaggccggcgcgganacgacggcgttccggcgaaattcgggcgaggaggaggtgatgccgggaaagaaggcgatgccgcggtgtcgaagaagnagatggcggcgtcgatcggcgcaccggcgatgaacagcagccggctggagggagtacagtggcaccaatgtcactggttgccggcgggggcaccgttccggcgagtttccggcgaggagacggtgaggccggtgaaggggacggtgttgcagagccgagggaggcgacggcacggccggacgatgctccggtgaggagggagaggcggctggaggtggccggcaaggaggaatgagaagggcgacggcgggagtgcgcctccggcggtcaccgcgcgaaacggagggtaggccggcgaagaggaggcggctgcgatgctagaggaggcgacggcgcggccggccggcgcacgggcgaggcggcacaggcggctggaggtcgccggcggcgtgggagagggagggcgacggcggggatggggctagagaccacggggaggctcgggatggggttaaaacggtagaacggagtgcggggatcccattttatatgagagaagagggagccggccacgggggaggtcggaacggcggcggaaaagccggccggcggcaatggaaggcggccgggaatggcgcggccgttcccggcgattgggggcaccatc

SEQ ID NO: 12661 - DNA, 12446 bp, Oryza sativa
cacgaatcttcgagaaaaccacgatcaacgaaaatccggtaaccgcaactatacgcaaacaattaaaaacctacacaagacccaaaataaagatcctatttagactaaataatagtgccattagatagatctcaattttatggaattactggaagtggaacgagatcattcggagttacggatcaagagatatgaattttggcaggtcaattggttttctggacaaggaaatgatttatcggaatttttctggaatacgagaaatggtttatggaatttatagaataatattcccaagaatattattgacatttcaatggcatttgggaccaagggaatgaattattggaatccctggattaagaggaaggatttatggaatttggaataaagaattgatttatggaacaagggaaaaatgatttattgagttttctggattaaagaaatgatttattgaatttgtggaaaagaatactcccaagaatattctttaatctctcatagacatgtggggccaatcaaagggtgagggagaggagcaagttggggggggagcaaacatggactttagcttatgactgtggtctcagggtttaggggagggagtacatataaactttgcctgcttttaagaggccgaggaggggatgggccgatgggccaagctcataagcacgggagagagaggaggaggctgactaggtggctgacagggcaggcgtggacttggtcaagcccatgtggactgccatgcaagcgcgagagagagggaggcctggctcgcccagatcggacggctcacggcggccgaggggcaccggcgaacggcggcgaatcggagtgaggcgcggacaccggtggcgagaggaggagatggggaatcggctcaccggcacggattagagagaggagacacgacggcggccggcggtggcggcgaagctcgccggatgtccgacgtggatgcgcgagggaagggccaagaacgcgcggggtcgagcttagccgaaacgattcggcattgcgacgcacacgcgacggcacggagaccgatggttgccggacttgggctcgcggcggagctccgcggcggcggaagggggagagaggagtggagtggccaaggcgatgtcccagggaggcttctagggacacggggagggtgatggcgatgggattcgacgagcggggagccgacagcgacgcacgactgtctgcggcggcggcggaagcagagcatcggcaggggcgcgatttggaggacgaacgcacaaactaccatgtctcagtgctgtttaggagtcgctagaggatgcagacgagaggatttggaccaggagctcaccgacgagcgggaacggcgtcggcaaacggatggcgtcgcggcgagacagtcgcgacggcggggcggcacgacaccgagagggcgcggccggggaacaagaggggagtggtggcgcccggagctcctcgtcatgtgcccacgcacgcaccggttcctccggtgctcggcggcggacggcgacgatgagatcaggtcgagcggcgacaaggcggtgacggtggttcggcggcaatggcgcggtgggtacgaggcgagtgaaaacgagagaggaagggatttggggcggcttgggttttatagtggaggaatgtcggtttgggagggggaaccgacatagagcggtcgagcgctcggccggcggtcacgggcgatgcaagagcggcggacgccgaggatgcaaggagcggcgaaggcggtggatcgggcggctgaaatcgaaccacgggagcgcaggctggcgcggtcaaggtgggggcggcgagctggcgtgcggcgtcagcggtgctctgcctcagcgcgcagagtgacaagggtggagagagaggggtcgagcccgagggaaaaaaggaaaaggggagggtggaaaggaggggttcgaccatgctgctttggggagggagagaaggaggagggcgagctctggctccgtgttttggacgcgagcgcacaggggggggtggggacgacgcggcaacagggcacgggcggcgaccgagcggcatggcgcgcgcgcacggagcggctgggcgtggccgaatttcgaatggcggcggcgggaagtcagcgccggtgggggagcttctacgggagagagagagaaacggagagagagagagagagggagcgaggatgagaagagagtgggcgatctctctctcgagcgcggcgcacgcgcaacacacgtgcggagagaggggaggggaggaacggctgagagaggagatgggccgaggggagggggatcaggcccatccaaaattagaaggaggcaaaatagacttctgcagagagatgatttggaagggatttggatttggaatgaaatttcgaatatgattacttggactcggggaaacagggaggagtcaaggaatggattcaaggtggactcggtatttttggaatcgggacaagtgtttggcgaggattcaaaggaggcgattgaatttcggaatttgatttcggagacttgaattggaagaggaatttcgatgaggatgattttgatggcgacgagagggatcaaggacggatttaaactgagatccacggcacgacttagactcagcactcaaagaacgaaattttcgcaattaggattttgccgaattagtttttaacgcctcacgaaaagcggagcgttacaactgggtagtggtagttgcccaccacggcggtcgttggtgagaatcgcccacggtagcttccgcaacacctcctacgtgaccatggccatgactgtcaaagaaggagaggtgatgctgagccatctcaatttgaagtaaaggggaaagggatttgagggaaggcgttggagtgtcaacctttgtaaggacgacgctcgatctcctgaatttggcgctgcagctcgacctcagcgatgaggtagcacagcatgagctcgacaacgaggcggtccaacccatccctcttcctcgtccatccaatccttctctactaccacatatagtcacccctcctcttcggccaaccaccaccattgccgccttcctagacatgagttgacgagctcgagctcccaaattccctcgcctccattctctcctcctccgctacaccaatggattcccctccccgtcggccactcaccactgctgccacctcccacggaagggctagcaagcttgagctcgccagagccaccactgctgactcctcgtcaggacttgggagaaatggaggagaggagaggagaggggtcgggaaggaaccattttttttaattcttttttctaattggagtgcgacataagcaccttgtagacgccacgtcgagtgaagactggatcaatgcgtccaataggtgccacgtcaaccgaagttgttgtctatactactgagcgattcaatctgcaccagttagggactctctatttctaattctgtggttaagagatatgaatagaactcgtctcacagttgagatatctaaagtggaccttttccaattaaggtttaagaaaaaaaaacttatttgtaacgggtgtagtcccaaatttctaatggtttgtaaccagtgttacaggcgatgggttagtgcttcgagtccaaatctctaatagtttctcaactgttagagattaatatatatcaatcgagaatttttacgatgtttgcaagctacgtagagatgttgggaggtggagactattgattaatagatgggtaaggtactaaataaattaacggtttcgctattccacttacgattgatttttgagcttcagtatcgatttttcgttcgtaggttcttgcatcaagatttgtgtttaggtagatcttgcagttacagctcaacgctttcaagcttgacactatggtcgcggtttatttttataatagattggtcactgtcaattcatgaaataagtttttcaaaaggattaaattgtcaaaattttagaagcatataattctgagcccattctcactcacgcaccaactcccatacctcactaaaatcctattgcactgtcaattctttttaatattagtttgcatttaaatttttaaatcctaatggttagaagtgtgcgcctatgactctactacgagcacaccaacggtgcttatccccaaagcacaacttagatcatttttaaaaagaattatatctataattaaacaacacaagttattaaaaagagatgccataatgtcaattatagtaatatagctttcatgtgtccaattttgctgatggcaattgataaaaactttagatctctaaccccacaccaattataaagtgtggaataaaaagaatgacagtactctgatagttgtggttgtaggtgcatagctccatccattaaaggttcaaattcttgtcttcataaatataatggagggtaattataagttggtgcagagactaaaaattatattttctttgttatgaaaaaaaaaagagtttaggaaagaagcatacagctaattcggagcaatttgcactcaatatggatttgctgaaacactaaagtacagacttaccttcttcagaaaaaaacttaattaaacaattccactggcaaggttagctggttaggtaagagctggaatatctcagttactatcagtgggcgagctggtcgtacgagccggaggcaacagcgttggctgctgatttcttttcaccgctgcgttgctatcatcaagttgggctgtccaccagaccaccaccactcagcatcgcgtagccgattctgtctttgacctctgttattaatttaaattgttttttgctcccctctgaccagcacagcgtctagctacactggtttcaactttcaactcattcttttgtatacaaaaatacggcaaattttgtcatgatccgatcagagctcacgtacgtacgtacgcgcttgataacatcaccagaaattcagaattaattcagaaaggacgcacgcgtgcacagtttaggaatgtgcttcagttgcttgttcgtgtgcaagagtggacaacactatatatgttgccccgtacctttcgatcaagctgtttttaatatcccgatctggactgttgctggtgcagggcaacattttcttctatgaagatgtgacttggctgctgctgctaggggccggagaaccgagaatctgtggtttctgtactcgactggtgatttctttggcgatggttttctgtcaccaacagggagctaggtggagttttgtccttgagaggaccgctactcggtttttacatattacaaaatgttatatttttttcttaaaagaatgacaagatatttagtatattatacatctttacaaacatgtaacttcatattccatctatatgttatcttatcttaactactttaaaaaaatgataaatttccaaacatcacattgtttttcgtttgttcgtccgcttagtacgcgcgatccgattttcttagtgtactggaaaaaaatacccgtgcgttgcaacgggtgaaggctattttaatcatgttattgttatgctagaaaaatgcacgtgcttcgttatgggtaaaggaacagttaaatgctataaagtctagagttaacatgtatatagtaatgtttcaagatagataaattattcattaggctaatgataatcacgatggataaaaacacacactctctctcaacccttgtgtgacaaactgtgatatcattgcactggtaatggttaggtgaatgaaatttaacctcaatgatttatcgaagcaccttcatagttatcacaagtgcatatttgtgcttggacaattaatccgctctacgcgtgtaggatgtgaataatgtccctaacacatggtcccaatgattgtagcattggagaaacggacgtccgagcaatgcacctttacgtataagtaaataatgaatattttgggagttcattaattattttaaactacatttttatggcacttttataatcttttttcataattgataattgcaataacattgcattgatttataatcacaatgcaacagtatacagctatgctctaacctacaaaacctgaacagtgccagccgtaccatgccgttcctttttcttttgtagaaaacctcttagcgtatgattaattgagttttattattacaaaaattaagaaaaaatatctagtattttatatcaacttgtatatagaaagtttaaaaaacgcgctaacaaagaccgagatagaaggaaaggatgcatggtgtgaagtttcacaccatgcacatattcaattttcatgttttaaaaaaatatcggttggttcacgtgtttatactgatttttttatataatataattataagatttcagaatcactaaaagtctgttgaagaaagaggtgctgaacttttgatttttcatccatcggatgtgcatggtccgtgctagtggttgagagaaaaaaaaatacacgcaaatatgatttgagagagggaaggaaagtagacttattctagggcctaggtaaacatatatttatattgatttttgtgtacataatctaattatttttaattttcgaattaaaaactaattcattagaagataagatttcataataaataaaaatctgtatgatttgagagagggaaggaaagtagacttattctagggcctaggtaaacatatatttatattgatttttgtgtacataatttaattatttttaattttcgaattaaaaactaattcattataagataagatttcataataaataaaaatctgttgaaaaaagagaaaaaaaatcgaaggcaaatataatttgacatgagggaagcaaactgtgcaagtaataatagatgtacaaatgagagaaaaatgggagtcgaacccgtgtggccgaaatgaaaactttcatccctcaccaagtgggcagactactacatgtgagaagtgattacatggcaagtacatatcccgtatcaaacgtggctttggagtatgataaaaaaatgcccgatcggactgttaaccggattaaatccggatttagcgaagcgcgtggtaatgacggacgaaaaaaacacccggaaactttacatattttttaattactagcaaaaatgcccgtgcgttgcaacgggtgaaaaaattctaatgataatatacgtttttcataaataatcatgtcaatgacaatgtttgtattttaatgagcggcttgttttttacaaacggtgtttttttcttgcgcgattttctcaaaccattcagaaatgacgcatttctttctaaaagatttttctaacatgatctttttgcttttttatttacaatgaaaaccatatttttctccattttttgcttttcttttctcgtgtgttttttgcctttttttgccaattattttctcgcgtgtttttttgcttgtttttttttcaaatgttatttttgttgctttttttaaaaacaagagaatatagacgaaataaaagccgtgtagtaggtggcaaaaaatcgatggatcctatccgactcagagcgatttttttaatagacggtgtttttttcttgcgcggttttttaaaaccatttgttaaaatggcgcgttttttctaacagttttttccttgcatgttttatttttttaaaaaagttaccgatgatggaaataattttcctcgcgcgtttttttatttatttatggaagatggaaaacctttttagcgagtttttttcgctttttctgacttttttctcacgcgtttgtttgaaccgtttctattctctcgtgcattttttttaaaaaatagttagattatattagagatagagaagagatatatattgattagaaatttcgccctttccatttttttcctgtgtgcattttttattttatacgaacaagcgttttattttttacgaaccatttttttcgccactttcttatggaatcgaacaaacttttttagattttttttctgttttttttcgcctttataggaatccgactttttttcctgtttttaacggaatcgaatctagtatttttttttcacttttttttgccttttataggaatcagattttttttcgttcggatctacgcttttttttttgccacataggggaaacggaacttttgttgttgttgtttttcttttttttttcagctttcctttttctttttatgcacctttctgtttttggactctcttttattattatttttaacaaaaacggcctcaagtaccttattgcaagattataggaactcaaatataaatataaaaattatagggactcaaaagcaaaagtacaaacccaaaaattaaaatcatataaaaatggaatgctctcgacctgtaggttctgttttattaaacagatctctaatccggcacatcattttgtttcaccaagatatgtgagatatcacggtatagattaagaatcggatctatagtcggactttttttctgtttctgagagggaatcggataggagtccgacctttttttttaacttttttttttacagacgaaggaaacatcttttattattttttaagtagtacagacagagacagatatagagattttttttcgcttttttgacatggaatcagattattttttcgccctttttttgggatcagacatttacggttttttttctcgctcgtccgtttttttggggcggtttttttgtcgccctttttcacagaatcggacttttttttttgcccttttttattggacagttacggtttttttcgccggttttttgtcgccctttttttcacggaatcgaattatttttttcgccggacagttatggttttttttgcccggtttttttcctcgctcgcccggtttttttgacggacgatggaagcatatctttttaagtagtagagaagagatagagatatatggttttgatctcctgatgtgtgctgaataggacttggtacgatttaaaccaactcctgttcggttgatttacagccaatttggagtgttgatttttttttctatagtcagattttttttatgttatgctgaaccttttttagatggaaacttgttttttttgtcatggtggggtatcgaatcggttttcaaaggcggttaatttttttccgtgttgaatagaaataggacttttttttttgcatttttctgccctttttttaaattttatggtacgataggaataggaatcagatgattttttggggcgcttctttttttttttttgccttttttacgttttttttgccgcgtcggaatcggtctttttttgccgctttttttttctcgccgccctttttttcacccttcctattttttttcgcgctggccttttttttttttacagtcggactttttttacacggacgaaggaaacactttgtatttttaacagttccggtttttttcatccggtttttttcgacggttttttgtcgccatttttttcacagaatcgaattatttttttcgccggacagttatggttttttttggcccggtttttttcctcgctcgccctgttttggtttttttcctcgctcgcccggttttttttcgccggtttttttgacggacgatggaagcatctcttattttttaagtagtagagactagcaaaagtgcccgtgcgttgcaccgggtgattacggagtgtgtatattgaccaaaagtgttgtttggtctagcaaaagtgcctgtgtgttacaatgtgaagcgtacagattagaaaaatatgcaattaattaaaatacaaattcgctgaaatatttggtatttttaagtaggtatgtgcataattaaataaatttacaagtaaagcaagtgtgagaaataaaatgacatggttaaatttaatttttttttaaattctccatgattagttacgctctttgaaattatatttgaatttttcagagcttaattgttaattttattaatacaaacgtcatttaacaattatttacttggaaaaaagaaagaaaatacttccttttaggtttgcttcgaaatgaacacattcaataacttataattgtaatgcttctgaaaaaatgagcactaaaaagaaacttattctctttttttggcctgagggacctaaaatagacttatttccggcccttgccggtcggtccacggccttttgtgcacgcgcaagtgcacttcccatcccaggccacaacctgggcttgggccagaaaagtggcctcactctcgatccctcttgggctgatttcggcctggacgacaccgatcgtccgatctttagggttttgatcggacggccgagcgtcgatatcggggaaacaaaacccctccttctcctcagctgccgaaactctagcccatttccctccctcccatctcacatcgccgccctcccctccgcgcccccgagcggcggcgacggcgcccctcttcccgcgagcggcggcggcggcgccctcccccacaaccaacggcgcggcgccctctccccgaacaacggcggcgtggaggcggctgcggcccggcgggagcgggaggggcggcgggccggacctcgcctccgccagatctggcggcatggaagcggctgtggtccggcgagggcaggagaggcggcggcgtcgtctctttctctctctctctctgcatggtggggaggtgcggcagtggtggtggtggcggacgtcatggaacgccggtcgggcctcgcctccgccagatccgacggtgtggaggcagttgcagcccggcgggggtgggaggggcggcgggccggacctcgcctccgccagatttggcggcatggaggcggctgcggtccgacgggggcgggagaggtggcggcgtcgtctctttctctctctctctgtgaatggtgtcggttctcctggtgatgctaaccgaataggacttggtataacagatgggagtttgtttcctatttttgtggaatcggacatattctttttttttcccgatttttcttttaccgcgttgatgaatcggattcgttccggttttttttcacccggtttttttgacggacgatggaagcacctcttattttttaagtagtagtagattaggtatatatatatagaggtatagattttgtcatcgcgctcatgtacgtctagaagtctaggtccgtccggagtaggccatgagtccagctccgtccacaagcccaacctacgtcctggagtgcagatctgtctacgtcgtctcctactccgctctttttcacgggattttacagatatcacttgctaggcaaaatatacaaatatgggcgcatgcaagccaaacattacatatcggaacatacaaatagtagaaacacacaagaaaaaacatatcgcagcacaagacaaaacaaaccgcaaggctctttctttatgacgtcagtttaccttcgatcagtatcgatttcacgttatcattcaactgaactctaaatgcagttacaagtacattagatttatataagtcaagacattctattagatttataattacttagtgtccacacaagctagaattactgtttgcataaatcagtattaatagttaaaataacattatgggaagggttatgaaataactaatacaaatagaagaaaaataaatttaactacatattgtttatagtcaaatttgtttttcccctacttatatgtgttacatttaaacatacatgtttatggagtaatatatattaaattaatttatactattattttcttaaaagcatttttatatgacatgtaaaaatgaggaacagacttcccaccaaacactataattgttgcttactccctccgtccaaaagaaaattaatttaggactggatgtgatatattctaatacaataaatcagaataggatgtatcacatttaatattatgttggttttttatgggacgaacatagcagtagtttgtttagaaggacgagtagaacgatgcagaaaggaaaatgctcatctgcactgcactgcaggggtggcggcttcttgccttcttgttgtgtactactagcaggctagcagcagtagtactttgaccaggcagagacgacattatgaaactcatatgtcgtttgccgcgctatatgaagccagctcggcgtgcaccagttcgccgcggacaaggaggagccacggacaaggaggagctagctagtgaaataggtgtgttccgtgcatggcggccaccgcggcttccacgatgtccgcagcggcggcagtgactcgccggatcaacgctgccttcgcgtggacgccaccagcggtgacgtcgcggccggcgccgacgggcagaacgggcgccggtcgcccgtggccaagcgggtgaacgacggcggtggcggcaaggatgacgtgtggg

SEQ ID NO: 12662 - DNA, 17282 bp, Oryza sativa
  unsure (1)..(17282): unsure at all n locations
cgagttgannggctgattcggcttctactgcaagtagctcatcaataaaataatgggtccaccaacttaaatgaaaattaacagtgagattagactgtgccacgtggcgatctaggagcgtctgtaggagcgccatatggcggtttgagagcgtttgtaggaagtttaatggacttttagtatataatagatagatagatagaagatagatagatagatagatagatagatagatagaagatagatagatagatagataatagatagatagatagatagatagatagatagatagatagatagatagatagatagatagatagatagatagatagatagatagatagatagatagatagatagatgattagtgcccttttgaaatgtttacatcaaacataataacatttttattcatagatttgcatggagatatatttcataataacgtaactttatcggatataaaacatggttgtgaaattaatctatttcagtcttcagagagcatgtgttgatatccataaaacacaattgatcataagtaaaaaagggtgaagtgtagcatattgtgtactccattggcccaaacaattcagatttgggaaagtttaattgagataattttgatctcacaaatataacatgcatatgttcctaattaaataggaaaagttttagtttgagaaagtagaggcggtgtgggacgcagttccatgacatgattaatttctcaactactatcacataagccctgaaacatggtaagaaaagttgatagtgttgttattactctgtctaaaatataataatttttagctataagtctagataaatatctaaattcattgctaaacttgttatattttaagacgaataaagtataaattggtataacatggtaggtgtgccatgtcgttctattgatcggatgagaatcataacatgtaattcttacagcctctccgcgcgacaccgagcggtctcgcgtatttaccccgcgacaccgtgcatattgtgctaataatattgtatcctgtatatttttgagaaataaaaaaaatgagtagtatatttttaaacttaattcctctgttttcgcgatcaatcatgctgatctccaatggaacagtgccttccaccttttgtgctgcaagtcacatgacacgatccggaccagatacgtgcgtacgagagcgcatcgatcgatcgcctttgctagatagatccgcccgttgaaaatgcccgaacacccgcgcctacccgcgcgccccccgcgtaccagttcatgcgtgcgcggcactacgtttcgatcgtacgcgcgtggcttagcacgtcgcgacgcccgcgaggccggccggctagcggacccgcccgctgcgcgcacacatgagacggtgggatcgcgaccgcgacgcgtactaacgtctctcgatctctcggtctctcgtgcgaatgcaggatcgagtggcacagagcgtggaggcggggagaggggggatcgtgattcttgccgtggcccgtggtcctcgcgtcgcgtgaggtcgtttcctgcggttgcgcgcgtccgtcgtccggtcgatccggtgccgtcgcgtctgcacgtcccaccaccggattcggtcgcacgcgcctcgtgacaggggccactgcgctgccagccagaccagccatgcctctacgtggtacgtgtacgtccgtctcgtcgacgattcaacacatatcgtcgagccatccagatccagtcgcagtgtgtactggagcatatatgtgtgcgtatcagtgcagtatatatgtgcctcttaactttactgtactctagtacacgtacgttggaggtaattatgagacggttgggttgggcatcgtgtcgtccgcgggcgggagaaaaagccaggaaacacggggatggagagaaaggcgcacgttacgagcagcgctccatagcttcgcgttcccgtcgcatgcatgctgctacgctataccacactgcccctgccctgtgctaagctaacctcgcagaactagcagccactgcgtacgccacagccttacgcgcgctcccggggtggtgggtgggccgcggccggtggagtggtgtggccatgcgcgccgtgtcagcgcccccccggtccagccaacacatgcgccgcgcgcgagatcgtgcattcgtgcgtgcgtgcgcgcgcgcgcgcgcctgtgccgctgtggccaacccggtaacccgagcgagcgagcgcgccgtggcatccatccgctgcggcaactttaactaccaccagtccaatcccgcggcctgcgcggctgcgcgacgtcatctcggctgccctgcagtgcgcagcgcgcggcatgcagccggtgtgtgcgagctgatctatgcgcgccctgtacttgggtgtccgggccgcgcggagtccattggccaccgccgattcgccaatcttcgctgccgcacgcctgcaactgcaacgcatggacgtacgacggacaccatccccgacatggccggtctccgtccattacttcccttttattactcgcatctccccttctcacctgatggaggttttgattggaccaatttccctttcagctttggagtgatcgaaaactactgaacctggttttccttgcactggcagtaaaatgaaccaaaatgcttggcaaattaactagagggatgttacatttttacttatgtggtcatatatagccggggcccctgtcatgtttgtaaggatccatctgacggatgtagcagctgatactgtaagatataccccataccccagtactgctcttcaaggactcaagcatgagttgctgacaagggcggagcaacttgtgtctaggaggtaccaggaacccgattccgaaattcttttaatcgatcagttcttctattttcatcctatcatatgtacacctctcagctaaaacttagatacccgtatcaatttaaactcagtccaaaataaagtaaaacaaatgattagaattctctccatttgattctagctccgtacctggttgaagggaacatgtgtttgtgctgctgagcagatgttgatgatgttggaattaatgaataggccttagcccactcgaagattaattctttggaaaatcacaaaagcccacctcatgggatggcatgcatgtggagtttagtaccaccttgcttattctaggagagggggaccttattaaaagggaggatgccctcctagtcacttgaagcatgtgtggtggagagaagaggggaaacacacgcgcgcgctcgctcgcctcgcctggcagggcaggcggcgcgcgtgcacgacgtacgcgtcgaatggtccgaaaaattggctcctcacccttgcgcagatgcagcctccttttgcagttttgttttgctgcaaattcggattcgtttttgttttggaaacgttccgaaaaatccggtgcgtgcaaacggcgtggagtccggataagttacgcgcgacttatccggttcggttacgcgcagtagagatcgtgcgggcgccctgatcaagcgacccttctctatataaaccgacctgccgtcttcacgcagcacacgcaaaatcaatctagggtttgcctcctactctgtactgcgccgtcgctcgtagactactccatcccgctcgccggcgtgcaccagcgatcgggagagcaggtctccggaacctctgtctttgacgtcctgcaccgggagaaggcggcaataaggtttttgggaagcgcttcgcgcgactgctccctgttcgttcgcgacggctcgccttcctcttcgctcgcgtgtttcgtgccttcgtagacacctgcgaaaagtttcgaccaagcagccggtcttttcgtcacctcggtacgtgttcaatatgttgcgcatatttgatctgttcatgttatactgtgtagtttacatgtgtagatctaatgatgcattcatgctagttttcatctgtaatgtcatgatttatttatggaacagattaaatcattatatgtctataatctcaacaatccaaaaaccttattataggcactgtgattttactatggctggttttgccgatgcactgaggccggataaattcaccggtgtgcattttaagagatggcagatcagggtcactctgtggctgacagctatgaaatgcttctgggtgagtactggcaaacctgaaggagttcttactgctgaacagcagaagcaattcgaggaagccactactctctttgtgggatgcattcttagcattcttggcgatcgtctggtcgaggtgtatatgcatatgaccgacgctaaggagttgtgggatgcactgaatactaaattcggtgctactgatgctagcaatgatctgtatatcatggagcagtttcatgactacaaaatggctgataaccgttctgtagtcgaacaggctcatgagatacaaaccatggctaaggaactcgaactccttaagtgtgtcttacccgacaaatttgtggccgggtgcattattgcaaaactacctccatcttggaggagtttcggtactgcactcaaacacaagagacaggaatactccgttgaggggttgattgcgtctcttgatgttgaggagaaagctcgggaaaaagatgccgcgtctaagggcgatggtgggcagtccagtgccaatgttgtgcacaaggcccagaacaagagcaaggggaaatacaaagctcagcagaccaccaacttcaagaagcagaagaagaacaacaacaatcctaatcaggatgagaggacttgctttgtgtgtggccaagttggtcatctggctaggaagtgtccacagcgcaaggggatgaaggcacctgcagggcagacttctaagtctgctaatgtgaccattggcaacactggagatggaagcgggtatggtaatttacctactgttttttcagttaatcaatctactaattggtgggttgatactggggccaatgtacatgtttgtgctgacatctcattgttttcttcttatcaggtcgcacggggttccaccgtcctaatggggaatgggtcacatgcttctgttcatggtgttggcacggtagatctgaagtttacttcgggaaagatcgtgcagctgaagaacgtgcagcatgtcccttctatcgacaggaatcttgttagtggctcccgtctgactagagacggatttaagttggtttttgagtctaataaagtagtcgtgtctaaacatggatattttattggtaaaggttatgagtgcggaggcctgttccgcttttccctttctgatttctgcagtaagtctgtgaaccatatttgtggcagtgtggatgatgaggctaatgtttggcattcacgtttatgtcatattaattttggcttgatgtctcggctttccagcatgtgtttaattcctcagttttccattgtcaaaggttctaagtgccatagttgtgtgcaatcaaagcaacctcgcaagcctcacaaggctgccgaggagagaaacttggcaccactagaactcctacattcagatctttgtgaaatgaatagggtgttgacgaagggtggaaaacgatatttcatgacattcattgatgatgctactagattttgctatgtgtacttgttgaaaacgaaagacgaggctctagactattttaaaatttataaggcagaagttgaaaatcaacttgacagaaagataaaaaggcttaggtctgatcgtggtgaagagtttttctcgaacgagtttgacttattctgtgaggaacatggcatcatacatgagatgacgcctccctattctcccgagtctaatgggattgctgaaaggaagaatcgcacactgactgacttggtgaatgccatgttggacaccgcgggactgcctaaggcatggtggggggaggcattgttgacctcaaatcatgtgttaaacagagttcctaacagaaataaggacaaaacaccatatgagatatggattggtagaaaaccatcactttcttatttgcgcacatgggggtgcttggcgaaagtcaatgtaccaataacgaagaagcgcaaacttggacctaagactgtggactgtgtttttctgggatatgctcatcatagcattgcctatagatttttaatagttaaatccgaggtaccggacatgcatgttggtacaattatggagtctcgtgatgctatcttctttgagagctttttcccaatgaaggatacacatagtggttcgaaccaaccatctaaaataattcccagttcaatcacaccaccagaacaaactgaacatacacatgaacttgtctctgaggaggatgtcagtgaagctcctcgaaggagtaagagacaaaggacggctaagtcttttgatgatgatttcactgtgtacctcgtggatgacactcctaagtcaatttcagaagcataagcatctcctgacgcagactactgtaacaaggctgcccgcagttaaatggattccattatcgctaacgggacttggaggtngacagagcgaccctatgggtgtaaacctgtggggtgcaagtgggtgttcaagaaaaagcttaggcctgacggtactattgaaaactacaaggctcggcttgttgctaagggctatactcagaaagaaggcgaagatttctttgacacttactcacctgttgctagattgaccacaattcgtgtgctactttccctagcagcctcacatggtcttctcgttcatcaaatggacgttaagacagcttttcttaatggagagctggatgaggagatctatatggatcaacctgatgggtttgtagttgaaggtcaagaaggcaaagtgtgcaaattgttgaagtctttgtatggtctaaaacaagctcctaagcaatggcatgagaaatttgacaaaacattgacatctgcaggctttgcagtcaatgaggcagataaatgtgtgtactatcgccatggtgggggtgagggagttattttgtgcttgtatgttgacgacatactgatatttgggacaaaccttgaggtgataaatgaggttaaatcattcttgtctcaaaattttgatatgaaggatttgggagtagctgatgttatcttaaacattaagctaattagaggtgagaatgggattacactcttgcagtcccattatgtggagaagatcttgaatcgctttggctacattgatagtaagccttctccaacaccttatgatcctagcttgttgcttcgcaagaacaagagaattgctaggaatcaactggaatactcccaaatcattggctcgttgatgtgcctggctagtgcaactaggcctgatatctcctttgctgtgagcaagttgagccgatttacctctaatccgggagatgatcactggcgtgcgcttgagcgagtaatgcgctatctgaaaggtactgtggaattggggcttcactatactgggtatcctgcggtactggagggttatagtgattctaactggatctctgatgtggatgagatcaaagccactagtggatatgttttcacactgggtggtggtgctgtttcatggaggtcttgcaaacagaccattttgacgaggtcaaccatggaagcagagctaacggcactggatactgctactgttgaggcagaatggctgcgtgatctattaatggatctgcctgttgttgaaaaaccggtgccggctatccttatgaactgtgacaatcaaacggtaattgtcaaagtgaatagttctaaggataatatgaaatcgtctagacatgtgaaaagacgattgaagtctgttaggaaattaagaaactccggagttataatgttggattacatccaaacagcgagaaacctggcagatcccttcacgaagggactatcacgaaatgtgatagacaatgcatcgaaggagatgggtttgagacccatatgagttatactatggtggtaacccagtctatgtgatcggagatcccgtgaattagatcctgggaagaacaaaccattagtaaactagaggagagtatcaatatatataccctctccaagtgaagatgcatgtactctcgtgagctgcaaggcaggttggctatgccttaatgagttctgttgactttaattagcaaagatgttgtcctgcagagcattcttgaaagaactcacctttgtgagcttgactgttggtcgcagtctatgaagattttgggtgaatcttctaggaagcttactaaagacctagaagtatgacttatacgctccacccgaggggtagtctacagacggtctagtaccagataagactttgagtgaaacttgcttgcacaagacttgcaattcaaggcgtagtccattgttcaagttgtgagtaagtgtagcttggaattctaggtggatgttcaaccttaattggtctccatcgaaccgctggtatataaacagtacattggaaaaggcaaatctcagtgggattttgagatttggtgggggattgttggaattaatgaatgggccttagcccactcgaagattaattctttggaaaatcacaaaagcccacctcatgggatggcatgcatgtggagtttagtaccaccttacttattctaggagagggggaccttattaaaagggaggatgccctcctagtcacttgaagcatgtgtggtggagagaaaaggagaaacacacgcgcgcgctcgctcgcctggcctggcctggcagggcagggcagggcaggcggcgcgcgtgcacgacgtacgcgtcgaatggtccgaaaaattggctcctcacccttgcgcagatgcagcctccttttgcagttttgttttgctgcaaattcggattcgtttttgttttggaaacgttccgaaaaatccggtgcgtgcaaacggcgtggagtccggataagttacgcgcgacttatccggttcggttacgcgcagtagagatcgtgcgggcgccctgatcaagcgacccttctctatataaaccgacctgccgtcttcacgcagcacacgcaaaatcaatctagggtttgcctccaactctgtattgcgccgtcgctcgtagactactccatcccgctcgccggcgtgcaccagcgatcgggagagcaggtctccggaacctctgtctttgacgtcctgcaccgggagaaggcggcaataaggtttttgggaagcgcttcgcgcgactgctccctgttcgttcgcgacggctcgccttcctcttcgctagcgtgtttcgtgccttcgtagacacctgcgaaaagtttcgaccaagcagccggtcttttcgtcacctcggtacgtgttcaatatgttgcgcatatttgatctgttcatgttatactgtgtagtttacatgtgtagatctaatgatgcgttcatgctagttttcatctgtaatgtcatgatttatttatggaatagattaaatcattatatgtctataatctcaacagatgaagggaacatgtgtttgtgctgctgagcagagaacacagaacacagagacacacacgcgaggcatgctcaggcacaggcacagccttaagtgataatgaccttacattcatggcattacacaaagatgtacggtaacaatggtggctctaaaggctccagggtgcttttaggtaagttcagccctttcggcaggttttcgtgtattcttctaggcgacaagcctggctccgaactgctcatcagtcatcaacggaagttttgcttcccatttctcctgcttactgtcatcctagatttggtactttgtactacataaatttcttataagatagactaagaccaaatgtctatctatagatcactcaattattgtgattgtctgcgctatcatggtgtgaaagaaattgaagagtaattttaatactcgtcgttgaaggtagtcccttttaatcaagaaaaacatcttcaatctttgctctacagcttataaactactgccaaatttagaattttaaaacttaattaatttggagacttattattgtagtttttatattgactctttaaattgctaagaacatatatagatataaaaattttattcataaattaggtactgacacggcttattaattagctttaggccaaacgattgattagcaaccatcacatttttatttagagctgtaaatcgaacaaggtaataatggtaattcaagatacacactttgcgacacaattctaaagagatctccaacacaatcattcatacacggcgccactcaaacataggcatgcatgtccatttcttacgtacagtatctacagcagaacgtgccgggcagcacgagcaatagattgcactcgagcaaaaagcccctcccctcttctcaccccgtctaacgaagaaagaaaagggaaggaggaaaaaaaaacatgaaaaagaagcctcctccgcaccgcacgtcaacgattgctacgaaatctcgggtgttcacggagcaggcaagatgggggaggaaagaccacatgttacacgtacagcggcacatgcgacacggcactcattgtcactcataggagtcaaatgtcatgtcgtaacgtatgttcagcaagggcccttcctatcattttggatgcactatggtgagacaaaaatggtgacccttcggagaaaaataagatacgatattttttttcatttcaattacaagaaatatagaaacagagggtacatagacaagccccacgaatacgctctaacacacgcccaatgagataaaaatcaacttgttaagtttcttgtgatggaatatactcaaccggattctaagtcttacactcgatatggttgcttacatttacatctaattataccgtcaacaatgaaataatcatgataactccatcaatctcaaaatatatcggatcagacttttgaaggtctgatcattaaggtagattatgtgggcatacgtgtatccaatggttatcgtgtgtgcgtttgtgttgtgtttttgaaaaaatagacaaaaatcaatgaatctctaacctcactaaattcctactccctccgtttcataatgtaagactttctagcattatccacatatatttagatgttaataaatctaaacacatacatatgtctagattcattaacatctaaatgaatatgggatatgctagaaagtcttacattgtgaaacggaggaagtacttaacaagactacccgtgtgtgcatatttatggacaccaaaatttaaaacaaaatagccgaaagtcattcacccacaacttcttctaggtcccatgatattgccacttgatgatattaggtgatacccttaatctagggagaaagaattttgggtgggagagagggtcgtgatgagaattttttttttatggtgatgaaacaagacaacatcgaatgggttaggacatgtagaaatagcacgttatagagctttgtatgtttgaacttgtatatcaaggtgacgttagcatttagaaaacgggtgctactacacatttcttcactactgtcgctcgatcttgccaactggcattttgtgcagaaaatgtgcagcgccacgtcaacctactctgctttcctcttgcctcacaccacacctacgtgaaatcaacccaccgtgaaccaggccaacaaccccctagcgaagccagacatgcggggcccacatgtcagcgtgcctgcgctttacgtgcgacgtcaggtgggttcgtgtgcacattaatgcgtacactggatggctacgtgtatactggagtatatataccagtgtacgtacgtagtattaccagggaggggcagtgtacagcaccatgcagggcgcatgcacgaggcgggagcccacgtggggacaaggtgggaagggcgagatgcggccatacgcccacgtggcgcgcatccagcggctggtcacgcgggaaaggtaaagtacaaggctgcctccctcgggcctgacacgtcgcattcctccgtacctccgttgaccacatctcgttggatttttctggttttattattttatttttctgctgtaaataaccaagataaaatggtgaggcccctgatgctcgcaggtggagctaatttgtctgttctacctccgacgttattaggcctaacactggattacaaaatcgcacagatttcacttcgaaatatttatgaaggttgcaaaaggatttgttctgtaatacaaaggacaaacgattttactttttttttctcgaagtagaatgcttctgacatttacatttacaattttctctttttttttctaaggaaaaaagggtggtactatattcttaagaggaattatgcaaccaatacaaagaacacaaacaatgttctgtagcatttctgaagcaatgaaaaattgcattttaacagaaaaatccaaaatgcaccggtaatgagcaacaacattttttttattttccgcaatatcacattatccccctctccctctcaccacaatatattcatcgcccttaacatccagtacttctgaacaaaaacaaaactagcctaaaaaaagacgagcaaaaaaagcaattaaaatgacagctaccaccaccaattatctccattcctgctttacctcgaaaagattaaaatagagggaaaaaagaatcggaaagaaaaggaaaggtgaatgaaagaaagagcagggcaagagcaaatttccagctcttccagctgtcgtccgagtcgtcaccctatctctcgctcacgttgcctcatcactcatcagggccgcctaccccccactgccgaggtgggcccatgcagcgcctcttcgcatcggcgctgttggccgccgatccgacggtggtggtgcgctcgctctcggagctcgcgctccggtggtggccgagcaccgtcaccggcgtctcggcgctcgtcgccgccgccgcccagctgggcccgacgccgcaggccgccgccatcacctcgccgcactcccgcaacttctcctgcagcagaaaagtccaagcaaaatgattatagccagcttccaggccacggggggcattatgagtggttctaattatgtgacaattaaggtatgattaattaactccacaaatgagaaaacaaccaaagtttttacagtgcggtcaattggctgagcttgctccatatcacgaggtaaatcattttttaaaacgtaaacagtattttttttttactccaaaagtcgcctctcacagagagccgggctatgtgtgactgtgtcagacgtgacaggggttgtttcgtaaataagtggtgattaagggggtaattttagatgaaacaaaatttattaaaaaaaaaagaatcatgctcacgctatttacaaaggggcaagcggcgacgccagcttcgaagccgaggaggtgggcgccggcgacctctccggcggccgcgaggagggccgcggcggccgccacggagggggagaactccgccatcttcacctctgcgaaatgcaccggaggcaaaaggtgagcgctcgctgaatctaacggcgaggacggtggcattgggcgtggcggcggcttggacgtacccggctggacgcggaggaggaggtcgacggcgcgggccttgatggcgtcgagcagcgccgggtgccgcggctgcgggaagcacgcggagagaaagaagccgaggaaggcgagcggcgtgacggagcgcgtccgccactccagcgcgttgagcaccatctgctccatgcgctggattttcgcctcgtcgaacatgaactcctcgcccctctgcaacagaccgacgcccacaccaacgacacgaggtttcagcaaatcggatggacgaatccccccccccaacgaaatcgcaaccgcgcaacgggaaatggcattcgtcccgtacctggatgtcggcggcggagatggcggcggcgcgctgcatcttggcggcgagggtgaggcagctgatggcgagcagccgcggcgcccatgggttgcgctcgcactgcacggaaccattggggaatcagatcagaagcgaatccctgcacaaaatccagccagagaaaagagcccccgtatcacgcgttcttacggccaattggcgcttggagaggtagcgatctacgtagttgagcgcgaggtaggcgacgcgggggtgcacgtccagctcgccgtcgtaccgcacctgggcgcgccgatcaaaaacacgcccgatcagatcaagaaaacaggggaaagaacctcgaagaacccccccaaggaaacaaacccaagaggagaacgcgtcccggataccttggagatgaacccggcggcctcgcggcgggcggcggaggcggcggcggagacggacggcgagtggtggccctcggcgtcgaggaggctggcgatcggctcgtcggcggggctggtgaacgggttctcgaggtcgaactcgtactcgtacgcctccaccaccaccacctccttcgcccccgtcgccatgtccatggccgccgcccgccgccgcgtagtacgaggaaggcccaggaacacgccaagaaaccaaccgcgcgtggtgcgtggctttatgggggagagggagaggaggaggaggaggaggaggaggaagccaccattgctgctacgcagtgctactactagtactagcctctgtctagttgggagatggcttttaataggaaggggtcggggacagtggtacaaaaggtgtggatttggggttctttttgtgaagatcgggaggaagaggaagagaggaggaaaaagttccctccgggggtggggcccacctgtcagcgggacgcaatgatgccgccctgtgagagggagacctgtacccgtactgcgtcaatactccatggcttcatccggctttgacagctcacaaccaacatggaacaggggaattggtaaatttcctgctggaaatgtttctcctcttgctattttccccccttttttttttcttgtttgtctcatgggttgatggaaaatgaaatcaatccccgagaataagatcgataatctttttttctctcttttgattacactaaaatagcatacatacactaccgaacatacgcactacactcacacacctacaagtacgctgtcgaacactagttcctttaaatttattggcgatatttttagtacagaacgttactacttactttcgtatccagctaatttacatcttcaatagtcgacaaagggtctgttcggcaggccgactgcgacggctgcgactacggctgtagctgcgcacagtgactgtggcactattcgtgcgtagccgcggcgctggacagctgaacaggcccaaaatttattaacaaaggtgacatgaaacgctaaaccaccaaaagatttatataaagggaatgataaatgtgaaaatattgctacattaaccgacaatataaagtggatctcactactcaaatttccaaaggctgagaagtggcagctcgtatgaaatttctaaaccactcatcacactgtctcacttcattacacagaacgtccaattttcagaaaacccttacaaagaaaaaaaaccaagaattatcttactagagcagcaaacaaatcttgttagttttttcctcgcaaaagaaacaatttctccagaattttgttggatctttgtactgtagtggtggcaggtagagcagggggtaacatgtaaattcctggctgtgtggaaacgaacccgagtacgcgacatcgacggcatctggcgggagaaaaacggacagcgctgcatcccccgttttgacctgcggccgtcgctgttgcaaagaggacagtggtcaacagtgctgcccgggcccacgcgcgcgtgtttttaccgaaatgccccctctccatcctcatcatgctgtttgctgtgtcccgggcccaccgtgcaaaatgtcagattcaccccctggcacgccaaagctcatcctagctctctcgtgaaccttacctctgttcgttcttcggagacgagatttgtgttgaaattttgaatgaatttcagaaatggtaaaaagaaaaaagaaaggtgattagctcggtaaaaatcgcaacatgcagacccccttcagctggctggtcacgattcgatcgtgttgttttgcttgcacgcgtcgcttcctggagtattatttctgaaccctatggctacacatacttcatctcctacactaataatctataggttttccagatcgtttagttgattatcttgacaaaactgaactgtggccatgttaattatgagcacttaccagttacccacgggatacgagttaaagatcaccttcttttggaagacaagatttcacatgagtttttgcagggttatcaaagaaaagttcttcagttattgccggagcgatcagttgattggcgtaattttgggcaggattgcccgttcggaaggaacagctcgtgcagctgatatgaaatggatagtactggcctgcgttgaagggctcaagattgatgtgatgattgaggggacggatcataccactcagtcactccaatgtctctcaactcgttaatttgttccatgtacagtatacatatatatggacacggtagccctggttgtaacccatgttctacgtataacatatcggagtccttttcttgttcatcacatctcaacgtgtctttgacattaggccaaatctaaggtcaagtgtccatatacacatatcaagattaccgtagagtttgatgctataactgtgggtgtataagtataaatctattcaccagtagttcaagcgtgtgttactacattcgtagacgttcaataaaatatgaaatcttgatcactgctcttgactacaaatgtgtagtgcgctcccagaaacctcgtggcattttcataatcgttacagtttcacctcaaaattctctgttttcaaaaaccaaagcctcaaattaaactttcatgtgtctgcagagtctgcatctgcatgcacctgtaaaaaatctacacgcaacaaaacagctagtttaacgattaccaagcgagatcccggtctcccatgcaagtgtaacagctacggctgcacattaatccccgttttcttttctcccatgaggcaaccggctcagtacggcgctacatatcgtgagcatatatgtatccgtgcttgctcttggaccagagcgcttgttcttgtactacctcaaaaggctttgttttttttttctctttctaagatgtaccgcctcaaagatctatgctcgt

SEQ ID NO: 12663 - DNA, 601 bp, Oryza sativa
  unsure (1)..(601): unsure at all n locations
cactcttatggtcttattgtggatgccctaaacagaaactaaaatgcaataactctgtctttagatgttggaaaaggaataaattctcgcttcatgcgtacgttacgtacctgaacaatcccagcgtgttgccctttccggtgattctccgccggctcaaaccatgtgccgggccaatgcgtcccatcagccatccatgtcgcgttttcaccgtcatctttgccatccttcgctctgttgtacgcgtcagatcgcttgcgaatggtgctgaacagcgagtcgatcctgaccttgaactcctcgtactctcgccgcacgcggcggcgatcgctcatcagctcgccggcgacgccgcccctgtacgcctgcgtcttcatcgcgaagtagctctccggcgccctcggctcgacgcagtgcttccggcagaagggcacccacagctcagcgaacttggcgacctccaccatnggccttcggttaaggttgggggaaccccaaggcccggttccccccccgggccccccgggttttcccggggttttttccgacaggtagaggcgacctgtcaccggtagtcggcggcgaggatggagaggatgga

SEQ ID NO: 12664 - DNA, 5185 bp, Oryza sativa
ggcctcgccgacctggtcacggagagttccttcatctacgcttacggtccctacacaagcaggctcccctcctgggacatttgggccacgacggctctcacccctcagagccgcccctcccctccgctgctgcagccgctcgagccctggctcagtccaccgatttcaccttctcgttcctcccgtccccctgccgatgagttcaacaggattgccgggatggccgcgtcctcctcgtacacagcctatccgaaagcccccccccccccccccccccacgttagcctttgtttttaacccctgcgtcagcagaatcctagatggaaagaggcgcaatttggttactagttaaaccgccgtgtcgtcgtattcttgttttgtgtggccaaaaatatggtgcctctcggacctcttgtatatatatttaggtgctaaatagttgtgtctatcatcgatgaaacgagtaattagtatgcataaatgtcaatggcttttcatgtaacgagttgcgttgttgatttctcatggattcagcaatttgctctctaatccaaacaagagggctataggatgggcctccgaatgggcgatcttagggggtgaaccgaaccctatccgccccactccatctcctaccctccgccttatcgttattggagcaagccgtgcgtcaagcggaaggagggtgacgacgggattgacttgcggcattttttgtttgcacgacatgtcgctgtaaaatctaggtgaggtgaggcagttggcatggcacgttggaggcggcggctccaccgcgccggagttgcccattgggccacctttaacatctgtctccaccgcttcccgtctcctccactgctaatgccatatggatatgaaaaacggaggttcagacaccacattgctagccaccatctactgacctggttccgccatccatcttcaatgttgtgcttaggaaagccaccgctgccaatagctaatcttacatgttatttttattaatatcataaaaaacttttgtagcaatgcacagagttttatctagttatttttaaagtgagtgtatttaccgttgaatgtctttacctacacaatagtacatgttacctcaaaccatgatagatagaaaaggtacagctcttgcatgcgccttggtctgtacatccggtgtgcggtgtgtgccaactgctagtgacaagttggcaatcttaaactttgcagagcttctctttggattccttcctcaatctctgaaacttttctacttattacaacagtgctgcgtctgtatgcgcgcgccggccatcgcgaacttcaacctcaacttcttcagagttcgtaataacttttttgcaagcattgaggttggcaaacacagtaataaaaagaaccaggagcaagtgatggatatgatgcattgttaccacttaccaccaccagacagagagagacaagcttggtagagcgtcctggcgtgcttggcatcagcgtaactgctgctgatgaaaggtgagactatgaaaggagtcaaatgtagtcacgctgcacgtacgtgtaccagtaatccgatgagatgaacaacgaggcagggttattgaatttctcggtcggatgttttctggcactgcacgtcggctgtcactctcggggcactgttattatagtgtgcaaaatatatctcaattgggccaaaaatacgacttctgtaatgggcgctatctctaacggacataaatagaagcccgacactaacaagagtcatcggtgactggcagtaaggccatatcaatcgggcctttgttgggcctagtaattatgcccgattgagacataggtagtaatctcaatcgggcctaactgtgagcccgtcactgatgagtgtcatcggtgacggactatagttatatgcaccttgcttatatctgtacgagtacatctacaacggtattaaatttaggctcaattgagatgacttcattctgacggcccatattgcccaggcatgtgatgggccgtcacagatgagagaatctgtactagtcaatgatgtttgttttcgtctagaggaacgcgctgaaagaataatactcaaatggatcgtttatgtggttcagttcccctttctttccaaatagattgttttctatctttataacatgttatttatgcctagcacattgatatctctatgtgaaaactaaatctcacaaagaaaccaggatatgccatgtcatctaacaagtattaaccgtcggatgcacttaaagacaaaataagtcgaatcaatctttacgattggatgaaacttaagtatagttgtaaaaaatgtactccctccgtccaaaaaataaaggcaaatcttagatttctgtgtccaactttaactgtccgtcttatatgaaatttttttataattcgtattttcattgttgttagatgataaaacatgattaatgttttatgcgtgacttatctttttaatttttttcataatttttttaaataagacggacggttaaacgttggacacggaaaccatggtttgttttttttgactaatcagtttcatatttagttcttcacgtacttgaactgattatttttcactgcaaaaatgcaggtacgaataattcagcaagcaaaattctggtaatcaccttgccgacagtgacagttgccatcgtagctgcaatttccctttgtatctggaatgtgcgtaagaagagaagtttggcgagatactccagacgtgagtcctctgcacataattttggcatatatattcttgttaacattcttataccaccagcgtccattaacatttcgtcaaattcatgcaaatttgccagctgatacaactgaggattttgaaagtgtcaagtcaggcctgttatctctggcatcgctgcaagtggcaaccgataacttccacaaaagcaagaagattggtgaggggggattcggtgaagtttatcaggtagtaggcccgtagtcgttacgtctacttctgaatcattgttgatttcttttgagaaaaaaatgttgatttgatggtgtgaattggcaatggtcaaaatataacttctaaattaatgactagaagtatgaatgcactactgctcaattgtgagtgagtcgcaaattttgtgtcctcttgaaacaaatggcgaagctcctgccccttgttttagaaaaaaaaactattagtgcagattatttatagtattttattaatagtgaaaatatattacatcctcgactttagccacataataattagctaacaagttctttaacttaaaaaagacataggtggtgagacaaatcctcaaatacctttgaaagaaaaccaatcgatatacttaaaaaacacaaattctagcaacaagtaagcctatatgtattaggccacacatagaaagtaaaagaccttcggtaactagctctaagaatatatagcatatccttgcgcataacatactgctccacccatcgtaataacatagaccaacatttgaaccagttggacagataacctgcattgcagagttagacaacattttttttgttattaagacttttatcattttctcaatgccaaattgacgaatttcaagcgtctaggcactcccgaagtgagttactaaatttttttggcacatcaggaggaggcatattgtaaggagaagaacacattgtcgtgcaaaatgagcaacatggcaatcaaaataggtgttgaattgtttcttgcacattgtagaaactatattgcttgtgtcctctccaattccttttagggaggttatgtttcattaagattacttttctataatttctataaagaaatcacatacaaactttgatttttatagtaacctttaaaattagttatgttatattattaggtttttaacccattacaaaattttgtatttctgtccatgtctccatgtataagttagtaagaaaataagatactaagctaaattatttagggactactgtccgggcaagaagtggccgtgaagaggatggccaaggactctcaccaggggctacaagagctgaaaaatgagctaattcttgtcgccaaacttcatcacaagaatcttgttcgtctcgttgggttttgcctcgaaaaaggggagagactgctcgtctatgagtatatgccaaacaaaagcctcgacacccttctttttggtactattagcattatctttgatcatttggtactcctgtaatcatttcactccaccaataatagtgacttttctaacatttggtgaaaaaagatacagagcaaaggaaacggttagactgggccacacgatttaagatcatagaaggtaccgctcggggactccaatatcttcaccaggactctcagaagaagatcgtccaccgtgatatgaaggcaagcaatattttgctagatgctgacatgaaccctaagattggggactttggcctcgccaagctcttcgagcaggaccaaactcgagaagtcacaagccgcattgctgggacattgtaattaagttgatggaatactttatatttttatgcttatattaactagcaaagtaatacaatcatcattgtggatgcagcggttacatgcctcctgagtacgtgatgtgcgggcagtactctacaaaatcagacgtgttcagtttcggcattctcgtaatagagatagtgacgggccaaagaaggaacagtgggccatatttctctgagcaaaatggtgtagatatattgagcatagtgagtatccccggtagttcacataggaattcatgatattgctttgcattgcaatatttgcgtatttgtgtatagccgcacatgtctatcgtaataactactgactgctgaagacatacatatttgtgactattgctaggtatggaggcactgggaagaggggacaacagcagagatgatcgaccattccttgggaagaaactacaatgaggctgaggtggtaaaatgcatcaacatcggactcctatgtgtccagcaaaaccctgtagatagacctacaatggcggatgtcatggttttgcttaacagcgacgctacttgctctcttggcgggttcctggaccttagggcaacattctttgattgatgggaagcctctggttactcaacagggttctcaacaaaattggtt

SEQ ID NO: 12665 - DNA, 19363 bp, Oryza sativa
  unsure (1)..(19363): unsure at all n locations
gcggcatggtgactgcctcctctgcaagnacnncatcatgtcgagtcataagacagaattgccctcaccggcaccttcgccctcggcttcctccgcgtcaactccaccatgctctacctcgtcgtgctccacctctcatcctcgttcccactctggtgctcctcaacacctccaacctccaaatccagagcggcgcctggtgcgagtgcctggccaatgcgacggacggctcggtatgcgccgctgcatccgtcggcggcggcggcggccgcacgagcggcgaggtcggcgggctgtactgggaggtgcggaggcagcgcgtggagctggcttacaaggagctcctgccgtttcaacacttgccgtcggcggactgcgaccccacctgaatctttcatttatggaaagcgaacttgcatgattgctgcaaacaaaacacaaaatgcaaattccaatgcttattcaatcgacatggtccacaagaccacaacttcagccaacacttactctgacagacaacacttattccgacattggttcgggccaacacttaaccgacggactgggtaccgcccaacactatccgacacactcggttttacccaacactctcattctttctttttcccgaggcgcccaactctaatttgacaaagactgggtttagcgacagcttgttttgattacacgcactcaggaaacaagtttgatggaggctctgcctgctagcattgtagccgaacaaaagtacaacaccaatacaccatcatggtcccttcaccaacaccagaactccagaaggatgatccagagaaaggccagcgtccatctgtccctgaaaatgcactcagttaattagatgtcactatgatggatgcaacaaaaatatttactccttagtttcaagataccatgttcgaaatcagtctgatttaatcagaaagtgtagtttagttcagacagttaagataacacttgtgtgttcattctccattcatacttccaagttccgatgttcatatttgaagttcaacacttgagctcaggcagctcaagataaatactaagtgctcaatcttctctttacttagtcattgtgttcataactaaaaagtgcagtttagctcggatggctaacattcaaaattcagggaccactaagccaatcagatggatctagagattacagatttacagggcatcagcataacaaacaaacatacaagttgtaaaccgaagtagttttctaattgctgacatgcatacaaagtcctgaacctgacattatcttcttgatttcctgactttcataaggtatctaacaatagataaatctaagcaatgaaagctatcatggacaacaataataacctaaagccttaacaatttgtcaaatgcatccgatttacatgataaccatgctgggcagaatataatgaatgcttaatacaataacaacaagctgatcatggcctaatgcaatgcataagcataacaatggagattttctccctcacaaaagaacatggcagacaactagacgaagcaaagattacaaagaaaagcttaccatttcatacgcttggtggcgacaaagatggggcgaatccagcaaacagatcagcacctatcaaggtacgcctagtttcacagaacatctcaaccttgaaagtcttgagctccaccgtaaagcacacctgatcttgcacaggcccctgcactgaaatcccctgaacaaggaggtaacccccagctgctcccaccaggttgtaccgaaactccactggcaacttcatcagcctctccaatggccacttgttcgcgccctcgggatcccaaaccacatagaacatgtcgaatgtgctgtccaatatctcgtcaaccatggcaaacatcccaatcccgcctctcgctgactccacgattgcaacctgctggatttcaatcagttcactggatgggaggttgatggtggatagttccatcgtgaaggtgtccagcacaagtagtttcttcgcccaacgcaagaaccagaagatgcagccgtgagcatggtggcgttgggtcaatgcggtttcctgagatggagttgctgcgaccaaaatcccccatccgtcgtaggaggtggagctccattgttgggtatctgaggagaaggtgaacacgactagcttggactggcatcgcgccatgtacatcaccctgaatgacgtgccgccgccgccgtcgtcgtcgtcgtcgcgtggcggagcgaagaagggctgtaaatcgaggaggttgtggagctgggcggaggcggcgaggtcggcggggacggcggggagaaggacgtagcgtctggacaggggatcgcagacggcgaggtccatgaagccgggatcatcgtcctggccgtcgacctcgccgccgccgcccacggcgccgcgggagaagaggacgcggccgtcgaggacgtcgcggcggcgccagggatccggggacgaagggaggaaggggcaggcgaagtcgacgacgtcgcgggcggctgcccccgcggcggcggcggcgctggggtggggcggctccgcggggacgaagccgccgccgacgtcgatgaagccgagcagcgccggctggttgtcggcggcgcggaagcggcggaggaaggagggctcggtgatgacgcggcggaagccggcgcaggcggtggcggcgcgggcgaggtcggcgggggacgggacgcggacgaagatctccctcaggacgtcgtcgctgagaaccgccagcggcggcggcgtcggcgtaggcgtcggggcagaccgcgccgccggcgagggcgtggcggcgttgggcttggccgctcggcggcggcggcggcggaagcaccgcagtttggccagccgctttaggagaaactgaaggttggccattagacagattggtgtgtgtgggatgcgtctaggggtgtctattgtagtacgtcactgcgtgcaaccagctagccatgttaaagaaaccgggagtaaacctaagtacctaaccggtcactggttcagggttgggatctcttcaacttgaggatatgaatttatattcaaatttttatttgtaaatttatcagctggttagctgccaaagtgttagatttgtaggtatgtgatttgatatgatagaatccagtaaaatcataattttagaacctagcaacactagaacttcttgtgagctttttaaatggcggtgccgattgttacaagaggggttgaactttgatgctaatatgcattctattcactcgaaaggttagaaacccttatattcatatataatttataacatgaaatttatatgtttgaattagattactcgtggtattgaaaatcacgtaaatttatgtcgtatccacttagaatgtgtcataaaacacacgcctacaagtgcaaatgcatcatcattcatctatctatccgtttatctatctatctatctatctatctatctatctatctatcttggatatgactcaccattcatctatctatctatcttttagtgtgacgcaccattcattaaatggactaaatcaataaccccttactttttcataaatgattagtgtaggtgacgtgctcctttagcgcgcaatgccaacttaacccaagtttgcgtgcccgataagtttttatcaacaaaagcaccttttcttctcaccgcatataaaagcaccatttatgtgtttctataatctctttctcgtgcaatgtttctttgtacacacactttaactttatgacgatataagatttctatatgtgtttatccgtagttatatttatgtatcattataattgcatatatgattggttaatggtatgatctatatatatgtgtgtgtgtttggtctgatttagtatcatgctagaattttcacaatgcacacatatccttatgtttttagctcatgcccatacatatgcggtctctttagatgcaattggcaaccttcaagatggtgcccatccagacaataggacactcggttttcacattgcgtgactcgccgagttgctctgtgagacagcccacgaggccagatggcgtcagagtccatcacacgataaggctaatcggtgtgccacagcaactagatatgcagttatactacaaagtaaagtaaagagaagactaagacatgttcgagatgagtatgatctcttagacaatacaagattagattatttaaagaccgtgcttttacaataattgacgtaacaaatactctaaccattaactcaaaaaaatattattctattgctattctttcctttttcacccttatacaaccatgtttccaatagaggttatgagtcattattgagccgttgttaccatatagcaacggtattttgtctctcctatttatctctcttccatattaacaaatattcataattagcaacactaagagacatctattaatgaccattataaatgccctaaaatgagctagtattactttgttcgaatgactaaaaaattaccttattaagcaggtaaacaagagagttttatgctgcctgttgatcatggtggacgtagattataatggtttataaaaatatacaattgtacttttgtagatatatagaagcaggcgttgtatattcacgattacggttgagtaggatatttggctatttccattcatatagaggtgaaaaacgtgttctcaacccataatccaaattaaggaatcaactttgcgctctctctttctctctctcaacacaaattgaaaatgcaatatattgtgtttcacatgatcttcattggaaaagagaaaactatcctgaaagaacatttctattttcaactgagtgccattccatgcatcagcacctgtcatcctatttcattgagtactacctctgcccaaaatacagtactacctccgttgcaggttataaaactttctatcattgtccatattcatatagatgttaatgaatcttgacacatatatatatctagattcattaacatatatatgaatatgggcaatgctagaaagtcttataacctattaagataattttattgtcattacctacatgccattgccacctataaccaaagttgatgaccactgctacatataaaagttaaaaacactccagaagtgataagtattatcatcgtagcagcatagatatttagatatctgatgtatcaaccctacattgtataataatataacacagcaatttgaagctcttataaacctccaagatgtagtgtgacgtcagtggctagaagctgcattggtttgtcagacgagaccgagaaacttacagacaaccatgcatgttatcaatccccattgtcacgatgtgttcatgtgaccagcactcatctacatgaattatgtgttgcgcgctgcttgctacatatggattaattcaacttccaaagtgaattctggaatgcaaactcgtaagtattatctctcctctctttttttttatccccagatgtaacgaagcatatattactggtgtaacatgaatctcccgatcaagaaatttgtacgagccgtgggatcaagatcatagcaacatttacacatcttctggctgaaattcttctagagatgaaccgtgatttcctatttggacacagacatctaattgcagcagaaagaagcaataaaacaaaactaggaagcgatttgctcaccaaaagaagtgaggtagttagataccagatatctaatggaaactctgagctccacacgcagcacattagcttggaaatggaccagagctctgctacgaataccagcacagcattcgcatcatcagtgcatatcagcgttcagaagaaagaaaatagtttgataacataataagctagctagtacctagcaagcagcttagatcgaaacacaacgaaagtgtattataagtctggtaaatatacctagccatggattagtgcttaacaagtgtttgacaggtaacgtgaagtacttagcaaaagcaggcaaaggtgaactagactagcctagcgcgagtgcagacgcagcaggaccacagatcacggctattccccaacgaacagcagcagaatagtagaattcctgcaaatacatatagtaagaaacaactgttatgaacatgataacagatttattaatcttcacagtttaatactcaccgaaaaaccatacattcaagatttatagttaaactataaatcttttttttctgaaggtcattaaactgtgtattaaaaggatagaaaaaaaaatggacggcactgcatacttttgaaatcttgaaaccaaaatggagtatgataatttcagtattacatgcacaagcacatgtatttgtgtgaactgatgcacactgcacgatgacagcaccagttatttagcaaacatggcaagacctatatgatggaggttatttatttttaaacgggggacctggattgcaaagggaacactgacttctttctgaacatcggaacactaccttaagctttcaacgataatatcatgccaatcattttcccaataacatgacctatatgtgcccaactgttgccctacaataatgaaaagaaaaggtacataagcttatggcaattttttagatgaatattctgagactaataacttctgggggtctgggaataaatttactttcatataaaaacttcagttggctatttgtagaacaagaacatcaagcttaagggaatttgttgggagtacagacaacaaacagagcctataaaaactcacagagttaaggcaccctttggtgtaatacaactacatgaggactagctaacaataaggaaaatgtattttcaaaaaatgaatgtctgcagtatctcccaactcccaacttttagtagaacattgccagcgtatctgttatatgaaggctaaatgatttgcaaatttactttatcattcgaattaactcaaagtgtgatgacaccagtataattgttcaacaactcaacaagacattggtcattgtcgtattctgctattcagggctttgataagcaatcagcaacacaataatttaagcactaatggctggcataaactaaaaataacctaaagcagtaatgcatcgtaaaatgcatacaagctctgtgatggccatgatgcgcagaacatacatatataatgttgctgcaactgcaataaggtctgtacaagattaagtaccagtacagactagattctaatacctgcatcacaaaggataacttctttgcatgaagcatatgccaaacaaaaataaccaagaacatgagcctatgagacaaaagaaaataccatttcataagcgcggtggcgacaacgatggtgggtaactggtaaacaggttagcagttttgatggcatggttagtcccacaaaacctctcaacccgaaaagtcttgacctccaccgaaaaacaaacatgctccggcacctctgacgaagattctgaggcctgtgatgatccattttgacgcgaagaggcctgccatgatgattttgaaccctttggaatcccttgcaggagcacgtaacccccatcaatccccaggagattttcataccaataatttaagggcaactggatagcctctattacacgccattgcttcactcccttatcattatcttgccaaatagcataatagaggtcaaagctggtataaaaattgttgatgagaacgaacagcccaagctgaccttcctctgtctccaggaatacaatgtctttcttccagctgccgggaaccatctcaattgtggacaactgatttgttgtggtgtccaggatcaggagcttgttcgcccaatccaaaagccagcagatgttgccatgtacatggaatcgccagaacatctcggcgagccaagtcgatgtcccgttgatcagagcagcccaaccatcgtactccacggcgcgccattccccagcttcccaagggaagataaacgccatcagcttggtcaggccgcgcgccatgtacatcacccggaacgaggcgccgccgacctcgtcctcgtcgtcgtcggcggcggtggcgggggcgaggaagggctcgaagcaaaggaagctctggccctcgagatcgagggggtcgattaggtcttgcggtatttcggtgaggatggcgtagcgccctgagaaggggtcgcagaccgcgagatccatgaggaggacgtccgcgccgtcgtcgtcgggggcgtagtactcctcctcgcgggagaagaggatgcggccgtcgcggacgtcgcggcggcgccaggtgtggcggtcggggaggaaggcgcaggagaggtcgacggcgccggcggcgggggcgctgcggtggggcggctcggcggggaggaaggcatccgcgtcccgggggaggatgccgaggagcggcggcgggtagagggcgcggtagcggcggaggaaggaggggtcagtgatgacgcggcggaagggcgggcaggaggaggacgcgcgggcgaggtcggcgggggtgtcgaggcggatgaatatctcttccaggaggtcgtcagtgaggatcaccgaaggcggcggcggcggcgccggtgcagggttttggcgcggcgaggccatcgcggcggaatgggagtgaggagtggggaggacggggagtggggtctgaccaggtcaaacgtggttaggggtattttgggtactttagactgaaaacaagagaagatgaaacgaattatgggaatctttgagaggtaaaggcataagcgccactttaatcctgttggataattttctatgaaaacttttaaaacaaaatattaaatcatgtcatgttgtgtgaagtttcgatggaatgaacaaccatatagaaattttagagaaaacttaacaagagttctaatatattgaattttttttaagtctacctctcttattcgatttttgttttttttctactatccaatcaaatggtctatcatgtattttataatcctctattttatactcctaaattataattacattcatgttagaattgtttttatcctaaattgttcaaatcaacaagaatttattgaatgtcaaccgatacacaccccatgaattgaactcttgacacaaattcttagagaatattgtgcaatattattgagtttgagtctatgtaatgtttatccaattctatactctcacaagttaaaaatccacaatgcctactatatatacggtctatcaatgcaatcgttttgttcatgtttatgtgccaaaatttaaatttttaaaacttaattttaagtagattatatgttttaaaaataatttattttaaaatatttatttttaatcaataaggacctatatataaaatttttactcataaattattttttattagctaataagccatatggataagcatagcataccctacactgcgggtggttgcgattgccatcttcctaagctgccgctgacattctcttcaacgccggtttatttgtcgtcccccatgctgtggcagccacgctcaccgtctccactgacgtcactctagatatgcctcctattccaccttctgccgctcctatccaatttatacaacgaggctagactcggacgagtcgctcattgtctccccaaacatgaggaaaggaaggagagtggggaaagcaagagaaaagagagagaggagggtcactaacatgtggtcccacatgttgacttagcggctaaaccaggttaacgtgccacgcaactgaaaatcatcgtcaatactactaggagagttattcttcattggtttaaatagttagagggttgatatgtccggttttacggtttaggaattcaaattagattcctatctgagtgaaattggactctttgcgctctcttcaccatggcttcctgccacacgaagccgagcttgcgacggtgccatgtcgaagagtggggagcttccctctacctcgcggaggacagcgccgatcggcgacctctgcgtgccagttgccggttactgggcgccggcggtgggcaccctcgaaaactgacggggcaacgcgcacgaatgaaggcgatcgagaaaattccttatgtaccctaaaatttaagctaatcccttctatgcccttgaattttgtttacttccttgtatacccaaaaatttaattttgatcccttccccctctcgtcagttgaccgtctaatttctagaaaaattaccattttaccctttggatgtatatacaaatttatgaattatattattggaaatgtaaaagtttgtcgcattagactattatggttatgagtttgatgtgtgatacattatttattaaaaaaactatttttagataatgaaataaaaaataatgtatttattttattttaaaagtcataaaaatgaggagcattcatacaaaaaatactgcgaatgctcaccatattttttttatgaatgatcccgataaagaaaatctattgtcatattaaatttcaaataaaaattttactttattacatttgttttcttttcaaaatttatgtcaaaattttccgcactaattatttagtctcattttctacctaaaatgcatatattgtgcactcaagcaaaattttcaatcatttttcaagcttatattcaaatctaaatcatcaagggcattaaaggcatttgccatcaacttaacagttaaataaaggaaaatgtgatggcaggtcggcaggggcatggaagagataagttaaaatttcagagatatagaaaggatcggataaattttagcggtataaaaaggattgagcgagttttcaaggatatacataaaatttactcaaatacgaaggcctccagttcctcgttgccttccgccgccgagccctcgccggtagaatgctgcagcttctcttggattcggagggtagaaatgctcgctacaaaatactctgatttttaaagtttactcccctgattgaaaaaggaaatctgattgaaaaaggaaatcatgcctctcctgatcaatcgtgtttgtgctttggaagctcgagcacgtatacgtgcagagtttgggatcggatggagaagtccaaagtccaaaccaaaccggattcatctcgttggcgcgcgttggggaagcagtccaatatgcaagcggactcctccgcttgtccttctcttcctcatcgtcttggtggccgctgagtggacggctcgacgccgtcgccggactcagtgtcgtcccaactccggcaccggtggcagtctcggcgttgagatggcggctccttcgaatcgaaagcggaagcgtaggtcagccggagccgcgggagcacgaaagagggctcgcaggcacagcgtcgttaaggtaaaactacaaacccaatcccctgtcgttttcatgttgaggtgtactccctctatcccataaaaacaaatcttgaaccgaatatgacataatttagtagtacgaatttgaacattttcagattcgtagtagtactaggatgtatcacatccagtaatagattgattttttatgggacgaagggagtatgctagtaatagggaattttgcttctccaattaatcctacatcctagtacggcataatgttgttcattagttgatcagttcggcttattgttatggttgttttatgagtgaaattcgtagccggtctttaaacttgaactggtttgttacttaggtccgtgatcaaataaattgcatatttagatatatataattctagcttaaaatatcataatgggtcgaaagtgttgaccgatcttaagtgcccacgtggttgtccacgatagccaaaactttgcattcaacctcctctgaaaaccgcggtgacaaaaaaggaaagcatatagccccttctccctaccgtgtacatccaaatatccattcaactccttcttccactacatttcaccacttcgactctacacatgcagtcagtagggagggcggcgattgggctgacgctgacaagcgtcggcaggccaagatgctttggccggagtgataggtggcacacgataggcggtgcaacatgttggaatagtcagcgggaggggttgggggttccgagttacaaaaacgaattcaaatgtctatattttggcttcttgtcttaacttaactctatgggtaacaagtactccctatgtttcatattataagttgtttaactttttattagtcaaaattatttaagttgatcaaagttataaaaaaatatggtaacattttaaatagaaaataaacatattatcaaaatatattcaatgttgaatttggtgaaattaacttgacaacattgttttttttaacgcaggcaaacttacaacattgtcaaacctaaaaaaacttagtaagaaaaaaggtgaaactacttataatatgaaatagagagaatagtaacagatgttttttttcctaccacgcagctacgaaaacagcatgaaagcacatgccacgataggataagtgaactacccgatgacctcttgaccaccattttgggccatttggacacaaggacatcagctgcaacaagtgtgctctcaagaaggtggcaacacttacggaaaagcgtcccaaagcttcgattctcacaacatgacatattgccacaaacagaactatctcattttctgagggcccatgaatatgtttttttcaagccatcgctgtgcccatggaagcggcgggtacgagctaatccagagcgccttatcaggtactccctccatacttgtaaaggaagtcgtttaagacaacgacacgatctctaaaacacaactttgacttcttttttctataaaaatatttattgagaaataatataggtatacttttatgaaagtatttttcaagacaaatctattcatataatttttatattttcaaactcaacaacttgaaagttatttatgatttatattcccaaggtttgacttaaacattgtcttaaacgacttcctttatgagtatggagggagtataaaattgaagctaaacttggtaccatctgtcagcgatcttgaaatgaggcaaatcatattttgttttattatgtttcagcaatacttaagtaaggtaggcagtatgtatgaaactaaacggtgatataacattactattcactgattacttggcaggctagttggcaggtatagaacacgtatattcttgagtttgttaactggctatctacacaaatcaaatgctggtgacaagaacggcacaaaaatctcaagccttgtcttgtgttgcaccatggaggatttttatgccaacttgattgacaaattgatcagcattgcaatctgccgaggagttgaacatctgaatctggaaacatacttgtattctgctaatgatcaaagacctagcccagctccgtacaagtttcctttatccttgttcgctgatggtaagggattatctgtaacgaaactcatacttgccgagtgcaccctcagtattcctgtcggctttgctgggttcaaatctctggttgagctatcgtttactgaaatgcatatttctgaagacatgattcagacacttattgaaaattgcccaaatctggaatgcttccgtcttagactttgcagtggtgctagacatctcaagattgcatcgcctcatttgcagctcagagaaatcatggtaaagagttgccttcagattacacacatggagctttttgcacctaagttgcagcaatttacatacagagggccatgcatatcaatggttctttcctctgtgcccttgatggagcatgcgtgcctggattacgaaggtagaagggacggtgaatctgtcaagtatattttagggaagttgtctcaagacttttccctacttacaagcttaagcattgtgcttaacacttatcggttgaaggtgtggagatatatttgctcttctttttagtgttcattgtggttgttggtcacacgagttacttgaacattctgatttacactaatgctgtttctgcagaatccagtaattccagaagttgttcccacgccatttaagaacctcaaaagtctcacgctgggtgcgataatgcactgtaacgatgacattggttgggtaactatgctgctggaggtggcacctgtccttgaaagttttcagatagaagtatgatgaaaacttcgctttactagtgattgcatttattagtttgaattactatctattttcattgacagtcgattagttcgataagagttataaatttacatgcatgtgtactccttttgcttatattttaaatatttcttgtacatttttactagggtcttgattcatgatacataatgcctgaaacagttagctacaagtattctgaatcaccaagtaaacaaatacaaaactaacagcttgtggtagctcaggcctctttagttcccaaaaaagtattttctaaaaacatcacatcaaagttttagacatatgcatgaagcattaaatttagatgaaaaaaactaattacatagttatgatagaaatcgcgagacgaatcttttgagcataattagccataagtgctacagtaacccacatgtgctaatgacaaattaattaggctcaaaaattcgtctcgcggttccaggcaagctatgaaattagttttttcattcgtgtccgaaaactccttccaacatccggtcaaacgtccgatgtgacatctaaaaattttcattttgcgaactaaacagagcctcagtctcatatgtccgctcgctctagctcaatttcatgtttgaagaccttagtgtttttttaggaaaaatactaccagaccttgcttagcagtgtgattttataaccaaagaaaacataatagttttatacatgtatataccttagtttttttttgctttgaaattcatttattagcttggatagcaaaatggtgtattttccctaatttctcgtaacactctggacgtactaacccttgtcatatatttttttctgggaagttatgcatatatattgaagtgcagcgagaacaatgtatatcactaattcaccatggaactaacccatgttttgcaagtgcagcttcttaccaacgagaaacgagaacacccaggcggcgttctgtgggagccatcagacaacgcgcaccgtcatctgaggcaggtgaagttctaccgcttcaggatgagacaggctgatgttgcgctggcagggttgcttctggcaagagccccattgctgcagaccatgacgttttcccgtggatctgttcatcgctctcccggtcagaccgctcagtacgttgaggccgccgccgactggaccgcggagcagcgatctgctatcacacggcggcttgagacatgcaatgcttttggtgcaagattggaattccggtcatgatgttggatccccgtcctaaaatacactacctcaatgcatatatgtataaggttggctagtataaatttgaactagccaatgtcatataaaaaaaactggatagagtagatgtttaggaaatggcacatcctaatataatatgaatctatatatcattgttgtttagatttataatactcggatatattgttatactttagaacatatataataacttagtagtctagttgtataattttgcgtcattatttcttcgtttatggttgggttgtctttacgtcgagatatgtgctaattatcagatatacgatttcacatactatagtatgtgccgtttgaatgcagaggccggtattatatataaataatgtattatatataagttaaattcgtgttggtgctgcactgcaccagctcctcgctgcgtgaccattccgtttctcttcctatctaaactatggaaaaaaatagagtaaattttacaaaactacagatgctataattaaattatcacaaaactacagatttaattcggtgtatcataaaactacacatttaacaccaaatttatcacaaaactagatatttaagatgaagtatcacaaaactatatgtttagtaactaaattatcataaaactacaagtttagaactaatttagttacaaaacaataatatttatagctccagtataataatggtgctagggatttaaactctaatgttgtagttttatgataattttaatattaaggggttgtttggttggctcccaaagtttgccaaaggttgccacacctcatgttagtcaagtttgaccaagttagcctattgtttggttcataggcacacttgtggcaagattccttctcatctatttaggcccccacatgtcatcaacttagtaaaatgtgacacaatccaattttgctagctaaggtgtggctcattttttgtaagccacaacttagggcctatttggggagctttagattctgagaagcagctgtttggtagccaacttctgagaatctagaaaagctctgaaacccagcttctccagcttctggcttcttagttcatttttcagaatctgtaactacagattctcaaaagctgtggactgtttggggcagcttctagcagaagcagcttttgagaaaagctgcagttgggacaatctcccccaaacagggccttagacaagtgtggcacaaaagtatggtgaatggtggcaaacttagtatagcatccaaacatgcaattttgtgatacttaacttaaatatatagttttgtgataaatatgatgctaaatatgtagttttgtgatacaacgccttaaattcgtagttttgctatagtttgattaaaaaaaatatctgtagtttcatggaatttacttaaaaaaatcaggagcaatagtgcctcatttagaagacacgatatttaaattaagggaattcgatttcatgtaaaaaaaatcagagataccataattaattaaataaatcctgagaggattaaactattttcatatagaaaaaaaaaatctgctactaacaaattcgtgcgtggcaaggacggaaagagcccaaaacgaccaaaaccggactctcccgttcgcgtttgaggagcacttcaaatttccgaaggactccactgcttatccttgtcttcccccaatcatctcgcccacgctgaattctccaattaattttccgcccacaccgtcgcgcacccagttccgccgccgccgccgccgcccgccggcacagcgcccgcagccagcgatggcggctctaccgaggcgaaagcgtaagcgcgggttaggcaaagccgcgggagcacgaaagagggctcgcgagcagcaccccggtgtcgccaaggtaaaattacacgcaaaaaagcatctaatctgttactgctagttctgaattttgttttatccagtccaataaatcctctgccccttctagttcagtttaaccctgcttttacgcactttgatccaatgcaactgttttttttttgtaggtaaaatattttggtcgtaatatattttactaatctagattttgaccaccgagttaatccaatgttaacagagagtatttggaacgtggtgtgtagcaaagtaacaataacctcttctcctgcagcacagctacgaaagcagcatggaagcacattcgaagataggataagcgaactacctgatgacctcttgatcacaattttaggtcacctggacacaagatcatcagcagcaacaagcgtgctgtcaagaaggtggcaacacttgtggaagagcgtcccaaagcttcgattctcacagcatgacatagtgccacaaacagagctatctcgtttcttgagagcccacgaatacgttttcttcaagccgtcattgtgctcatgaaagcggcgggtccgagttaatttagaccgtcgtatcaggtatgatattgaaatgctaaacctggctttatctgacaacataaatctctttagtaaagtagtctatgggctaaatggtgatatgacaataatatttgctgattgcttgacaggcttactgacatgtatagaacacgcatattctctagctcattaactggcttcctacacaaatcaaatgctggcgacaagaacaacacaaaaatctcgagccttttcttgtcttgcaccatggaggatcgttatgtcaacctggttgacaaattggtcagcattgcagtctgccgaggagttgaagatctgaatctgacaacgagtttttattacgatggtcaaagacgtagcaccactccgtatgaattccctttatccttgttcactgacggcaagggattatctctaacagaactaaaactttgcgagtgcaccctcaatattcccataggactcgatgggttcaaatctttggtcaagctatcattaactcgaatgcctatctctgaagacatgattcacacactttttgaaaattgtctgaaactggagtgctttcacctcaaccattgctggggtgctaaccatcttttcgccgggccgggtgctaaccatctcaagattgcatcacatgatttgcagctcagagacattatggtaaacagttgcgaacagatcacacacatggagcttgttgcacctaaattgcatcagttcagatacagaggtccatccatatcaatgatgcttggctcagtgccctccattgagcatgcctgtctacactacgaagatagcagggatggtgaatctgtcaagtacattttaggaaagttgtctcaagactttcccctacttacaagcttaagcatagattttgacacttacgagttgaaggtgtgaaaaaatactctcttttttcttttagttttcattagttgttggtcacatgagttacttgaacattctgatttacaatgtttctgcagaatccagtaattcctggaggccttcccacagcatttaagaacctgagaagtctcatgctgagagtgacaatgcactctaacgacgaccttgcttgggcaactatgctgttggaggtggcacctgccctcgaaagttttcagatagaagtatgatgaactctgctctagtagtttcattctgtattatgaccttttagttaatattttttccgttgataacttaggtcagttcgatataagaacatataaatttactcgcatgcactccttttgctctcattgcccaaaagaatgcttaatgtttcgcctacaaggtcacatgtaacatcagttaaactgcaaaatgaaacaagtcctaattccaagataaatgttatcataagtaaatctttataagactaaactaattcacctgaatgaatcttgtgtttgatgaggtnctgtaccattggttaatcaattttcaaaggggggcat

SEQ ID NO: 12666 - DNA, 739 bp, Oryza sativa
ccgcgggtgattcgcgttttctgctagtagctcatcacgaccatacagtgcttcgtaagaagccatctgaagactagcttgataactgttgttgtacgaaaattctgcatatggttgattcttatcccaacttccaccgaagtctaaagcacaagctctcaacatgtcttccaaaatctgatttaccctttcggtttgtccgtctgtctgcagatgataagcagtactaaagttcagcttagaacccatctcttcctgaagcttcttccaaaaatttgaagtaaactgactacctcgatcagacactattttcttagggacgccatgcaaacacacaatccttgccatatacaattccgccaaccgacttccagaataagttgtctttactgggatgaaatgagccactttggtaagtctgtcgactatcacccaaatagagtcatggcctgatgacgttctgggtagaccagtgatgaaatccattccgatttcctcccatttccattcaggaatcttcaaaggctgcagcaaacctacgggtttctgatgttctgccttgactcgctgacaaacatcacatactgctacgtattctgcgatttcacgcttcatacttgcccaccaaaatctttccttgagatcctggtacatcttggtactaccagggtgaatggagtataaagtatcatgagcttctttcagaattgcatcttttaaatctttgttgtcggggacc

SEQ ID NO: 12667 - DNA, 10345 bp, Oryza sativa
  unsure (1)..(10345): unsure at all n locations
tttgactatcanttgttcagtattccatcatctattttataataatctttcacaataatctatctatttatttcaaattactcatgataatttagattataataatcttaagttgaaccaaacaagtccttagacatgtccgtatttcctagttctttaaacataacgccatcttattgcgctaatataattgctatgtctgtcaatattctaatactatgtaattatgcgagtttaggagaagcatccacatatggtcatgtataggagatgtaggccctgtttagttcctaaaataaaaattttcacgttgtcacattgaatgttttggcatatacatagagtattaaatatagggaaaaaaaaccaatttcacagactgcgtgtaaattgcgagaggaatcttttaagcctaattgcgctatgatttgacaatgtggtgctacagtaaatatttgctaatgacgaattaattaggcttaataaattcgactcgcagttttctggcggaatctgtaatttattttgttattagactatgtttaatactttaaatgtgtgtccgtatattcgatatgacaactaaacttaaaaattttccccaactaaacaaggcaaacaaggctgtagtattcggttgaacatcataataaataaatattgtgcttatgtgttactagtacgtctggatctaatctcctaaagcgactgcattgtctgatatcgatgttgatttcgatgccggttttgataacaaacatacaaagtttcttagtaactaaggatattattagtatgatggtgtactttaggggattaagggtgtgtttttggtttgtctgagctccaatatcatacctttcgttttttatgctgacgttttttaaacagttaaacggtgcgttcttttttaaaaaaaattatatgaaagttgctttaaaaattcatattaacctatttttctaaaaagattagctaacaattaattaattatgtgctaatgtgtcgcttttgtttttgcgtgatggagggattaatgactatataccgatcagctacttattgaagtctccgaagctttattaaacatggcaaatgttccgtttgaaacaagtcctaattcctgtgacaattaagctgatttctgtacaactatttatagaactcatccgatctaggggtatttggatggggctaaaaatttttagtccgtcacatcggatgtgttgacactaatttagagtattaaacatagactaataaaaaattaattttataaatgagagataatccgcgaaacgaattttttaaacctaattaatccataattagcaaatgtttacaatagcatcacataggctaatcatggattaattagtctcaatagattcgtctcgcgaattagtccaaagttatggaatgggttatataattaatctatgttgaatactataaattaaagtcgaaacatccgatgtgatttaatccatatgaaccaaacaggacaatttacagaagaggttatctagggactgaaacactacaacaaggttggatagtcaatcatactcataaagtcataagcttacatctagctagctagctactccaaatctctgctctgtcaaactgtaggtaagacatgtacttcattcatatcataaccactgttacccatcctgtatccctaatcaagttgaaacagtcctttcatggttgtatgatctgacaacctgcctcgcgacgacgacctcccatatgccgcatacgctaaccgtgcttaattgggcgctgtttgcagagcagaaccagtactctgccatgtccccggccgtgctcctctgcttatgccgccaatatacaatcttggccaggacaggccagagagaaatttgcaagatctacctgaatacctgatcatttgcaccggtcaaaaatcgtttttaggtcaaccaaatacaccaagatgatacaaaagcactgaacacacttccggcatttgcatatcggtatttgtataattaggatgcacacagccaaaccggtaaaaaaatcgtggatatataccatgcattcatgggattatttgtgttgttttcgtgtccggccttgtgatccaatcatgctcatgcagaactaatgtcaggtcgatatcaggtttgtagtagtaggcatatggttcgatcgggtgtaacgtacgtgcgagtcccgtgatagagcatggtcctgtatattatgtacagatgtgtaaacaaaagttagtggtgcccaagtatctggataagatttgtgtccgtttgttggctcacgtacatgacaaaactgataggttcagacaaaatagtgcacgaatacaatgttggtcgatcaatgaaaggacggcgcgtgtcgtggaaaacaactgtgcataacgccaaataaaccaagttaatatccatgtgtggtgtgtgtgatccaaacgtgcgtgcatctaggctcgtcccttttttttcctcactagcttgatgtctcaccaagatctggtccacaactctagcctaacgaagctagctgttgcatcctacgagtgctttttggaacgtggaaattttataggattttcatgtgaattagtttgatttcttaaaacctctaaagttccatttttgcaaaatgaaaaagaaaaagaaaaggcccaagggttattcttttacgtttattctataaaatatcagaatgtaccgtgttttctgctgcctacaattacaagacaacaacgtagtgaaccattttttcctcttatgcaagtaaagcaagatagaatttgttcctcgtagagttagccattgggtcagaccgagcgatatgatctcggtcttcactctttagggaaattttggccatctaaaacttaagaccgaaacgcgttacgaattacaaaaatcaatatccgttatgaccaaaatcgtcaacaatgttagagatgaaaaaaattacagaaaccatcaacaatttcaaagatgcaaaagaacttacataaataatcaaataacaaaaaaccgttagcatccgctctagatctccacctcgcaaccctccacatgtcgccagcaccagcgcccttctccatcaaagttgcttgctgcctgacccctcagtgtaggaggttgatggagagcatgttggcggtggaagggtgcacccctcacccatggggggtttataacctgaaatgaagcatgttggagaggaagtgtgcccgatgtgcggcctacgccaaaggtggagaggaatgtgtcgagccagaaagggcatcctcttcactgagccggcggtcgaggcatcaccggatcttggagaggtggaggtcatgcgcgactagcgaccacgcagtgtcagggatacaaggagcattggaaagggggttatggtagggctgtcaacgagccgagctcgagcgagctcgtctgcctaagcttgagctcgacacgagctcgagccgagctcgagccgagcctattgcaccttcgagcttttaggcaagctcggttcgagctcgttcgagctcgagctcggtgccgagctcggccataagtagtataatatatattttaataataatctcttgataagtataattattttctagttaatcacactaataaaagagtagaaaatgattaaaataaatatattgtgctaacacatgctaatttattgtgtaaatagatacaaatatatatatttatctattagtttattatattaataaggtgaacatgcaatatagactatacacagccaagctcggtcaggctcggtagaagctcgagctcggctcggtaaagctcgcgagcttttgctcaggctcgagttcggctcgtttggagcttgagccgagctcgaatcgagcctaggacgagccaagctcgagctgctcgggagtctcgagcttttttgacagccctaggttagagtcttaggattcattgtgctctattaggctattttagttaatgcgataaccgaaaggtgatgaataaattagccgaatataattccgttagtaagaggttgaaaccaaattaatgttcaaaattttctctatctgtcttgtctctcccgtttcttttggttttggtctgttttgcacacccttatttgtcgatgcaatatatgcatgaatgcttaatttgtatattgattatttgagtcaatggtactactagctagctagtactatggaaatttggtgtatctaattgtctgcccttgcaagtgatgcgaaaaacaaacgggaaggtgacgacgggtttggttggctttgtgtttcccgaagccattggaaggcagccaaggtcttttcactaaactgtgtgtgtgttgttgtgtactgtactatagtgttctgcatcgtttgcctgcctgtcttggactttggtttttccctgctttctttccttgtccttcacttccctgtagagtatcttcgaagtcagagaaggagagtaactaaaccaaaagttttgtacttttgactgcacttacgataggcacgttgtactatagcatgcaggccctaaacaaaacagagcagtagttggattacattgttaacattgctttgcttgtacgctgtttactgtattattaagacttggggcaattctaggatcacaaatttcagagaagatggaaccaatactgtcatgcatagcaggacaccggtaaattaatgtactgcaaatagcaactcatcagccatttcaactatctccgtacttagatagcaaccaaattatcaaattactagtacatagtaatggtaactatatttggaaacagagacagtaacttttagtgacaatcatggtgatcacctaacccatgacaatgagatcatccctgcatgccaaagaatgcagaagcactagtttacataggcattgatcaaattttgggagtatatggtttcaggactgtgcaactagattcatagtccatgatgtccacaccgcgcagcaatgtcaagaaaagcatagcgtcaactcgacacaagtgccttttgcttgtagtagtagcatactatacaccttgcttttggggctcagcactcatgatgtagcatccgatggtgagggtggatttaaagaagaagggttggggaaagcaaaggtcttcatgctactaagccataaaagcgtgcaagacccatgcaaaggtgtgtgtggtcacgccatggaagcaaaggggggttaaactgaaaatgttttttgcagggaccaaagtgcatttataagggtgccaagacattcatattgaccttgggggaatttagcatggacatattaatttgaccatagtttacaatgctgacagctcagatctctagtaggctttcttttacatgtatgttaccctaggggttcttgctctgttgctattctaaggatgcaaaccccactgtatggtgagattgaggcgtgaatgaaatccagacaaaaatgtttcactttcaaattgtggtccaaaaaggataaggtccatagtgtgccaattcttttgatttcctactgttagatttgtcgcaatggcgcgcatcgatggtcggtttaatatagaactccctccatccaaaaataagcgtagccataagttttcgtcttcaacttagatcatctgtcttatttgaaacttttttatgattagtatttttttattagattgtaaaacatgaatattactttatgcatgacttatattattttagattttctaaaaaaaataaataagacggatgattaaagttggacacgaaaactcagggctgcgcttattttgggaatgagggagtacggagtactaatatcaaaccacaatgcacggacaaaaccactccaaaagctaggtggaatccaacccagattcatacttataaatacatatgcaccttcatctcacaaattcatgccgttttaggcataaatagtacatcaaatatccaaatcatttttcaaacattttggacaacaaggaaggtagcccgtgcattcgcgcgggcatgtatcgtaggttgtatttcaaacactatatgggtggaatataaatcaaaaaacattttcaaaatataaactggaaataaagcccacatagatgcattgacatcttatttgttgttcaagaaaaagaatagtaacataaatcatatatcattatatacactgtaagggaatgtaaattatcttacaataaaaaagaaatatatttgctgtaaaatagatggtatattttaatatactactaaatataagaataagaatatctctcatatttaaataaaaatcattttgtcgtggtcatatataaactcccctattgttattgttttaaatgctatgtgcatttttaataaatgaaactgcattaataccactaaaataaattatatattattaatacactaaaaaatcatctacactgcttaactcgatgtccatcacttattttcacatctatgtataaatagtctaaacataccacttctaccggataatacgataacaccgttaaaaatagtcataaatgtctctctaacggatgaagtcgataactactaaagctttcttatgtaatgcccctgaaacaggggggttcctaatggggcgatcgatcagcacaccacaacaaaattttaaaaaaacaaaaagttagaaaaatttatgtgtaaaaaatttgaattcaaattcaaatttgaatcaggtatgtaaacttttgacttataaactttggatctataaactttagatatatagaaatactatatatagaaaatatttgaattcaaattcaaatttgaatcgggtatataaactttaggtctataaactttagatgtatagaaatactatatatgaaaaatatttgaattcaaattcaaatttgaatcggatatttgaattcaaattcaaatttgaatcagatataactcaaattcaaatttgaatcggatatataaactttaggtgtataaactttagatgtatagaaatactatatataaaaaatatttgaattcaaattcaaatttgaatcggatatataaacttttgatctctaaactttagatgtgtaaacttgaggtgtataaactttagatgcataaatttactaaaataggaaagtaatgcggtgccaaaaaaggaaaccaggtggagggagggagagggaggggggggaatcgatcgccctcgctcgcccggtagcatttccgcctgaaacatgggtcccacattgacatagccgtacacttaaagaccagcctatggcaccattttaacacttagtttactatgggcacacctacaaaggattgcattagtatgccacttaactcaaccatatgcaaatgcctgcgatatttacgatggcatagtaaacactacaccctgcattgaaaggacagggatggacaaaaaggaggaggtgatgaaaatagttatattttttgccccctagttatttctgtgtggtattatttttttaacaaaatcatagtttaaagatgatcataaatataggcagtttggttttccatctaataagtgagaaagaaaaaaaaggaaaaaaataattatgtgggacgtacttgttttttttgatacctatacgtgcacatacaatgcgagtttttgagataaatttaattgcattttttataatagatctaatggttataaatttgggcccaccgcattctaaaattttttaaagcgccacgtgtttaatggatttttagtagataatagataatagataattgatagattgaagattaggaaagggaagagaagatgaggggagagagggagtacgtacgttacgtaccatctggaggagaatgggaacgtagaggaggtggggaccggtgtggagaggaggattttattttttttatttgatctaatggttgaaaatattggacccaccaatttaaaggaaaatcaacggttagatttttagactgtcacttggcatctttggagcgttcgtaggaggacatgtggcggcttaggagcgcttataggaagtttaatggacttttagtatataataactaggaaggtagtccgcgcaattgcgcgggcatctatttatttctaaatgttaaaatcctttatgatgactgaaaattgtttgtatctatatgaaaagattttgtaaaatgttcaatatatatagttagtcagtcccatatcatgcagtttgttttgatacttcaaagcttgattggaagtaaaaaatttaaggcctagcttgtttcacctatgaacattgatgaataaatctatgactgatatcttcagataatatagaactaattattctttgaattttgatatcactatttttcttaatgactcaaggattttatcatgttttataatggtttcaaattgatcgttcataattttaaatttaactaaatgtgttggcactgattaatatgatatctatagattggttaatcttttagcgtgactccctagcgtgttaacagcctatagaagtggtgcaattgaggccatatatgctagatctttttttataattggtggtttaattgaggccatatagtatctatgggttaattattttacatgaaataagatgaatggcttggtactgtaaaatatcaacaattagtttaagctaatttctttcggtctttggttgttttatgtaaaacatatttttttaaagatctaatgtttaaaattaataggtccatttatttagaagaatttttttagagatgtaatggtctaggtccaagagtcatgattatttagctatctaatattgttttatatagttagcgctagttagaaaataggagaagttaaatagaaaataggagaggaggggagagtgggaaggtggagggaatacataagtgcgcacatacgtggttaatatccatgggtattctgttttctcttacatattcttctattttctgatatgatctagacaacggactgtaaggaaatactcacaggagagaatggttaagttggtcacgtatgtggtgttgttatgagaaaagtacgtattatcgtacttgtatgggagattaggagaggtttatatacatgatattaggattgctatttcaatagatctaatgtaatggtctaaaataacacgtccatcggcactaatttaattgaaaatcgatagctggatgatattttgttactttctatgaatttttatgattttctgtaatttattagagcaccacatgacaatgttggagcatttaggagcatttgtataaagttaattaacttttacttataacaggtgtatgatgcaataactttttgtgtatttatagacctaagttgaatatcctagtcgagccacagaggaggcctcatatgtaagttcgtactcgtccagtttttatatgtactcgtataaaataggagaggatggttaagtcggtcgagggagtatattcgtttacacatatgtagtgttgttaatgaacttttacttatatataacatatatatgatgcaatatatttttagtgtatttatagactaagttagatagatttagtagcgccgcaaaggaggcctcatatgtacatacatacagatataacgatattttaattttttgtttgagaatgaggagggaaggtataatatcgttacttttcagcaaaagacgtcgctttttagctttttttttaacgaattttacatacttattttttgtccattctaatagcacagtatgaaaccgatatctatgcaggaatagcatcgagaaagttcgtttgcatagttacttattaaacctaatcaccaattatagatggtaaaatttcgttgagctgctgctgcctatggattgtacaccaaatgatcaaatgctgctgcctgtggattacattgccagctactgaaagtcaaatgcttgtgcaatcccagtctcatgtagctcattttccccgattaatctgtgtggaggctttaatttgaaacctaatccaagtctaggcggcagcaggaaagctttcctctatcgaggccttgagcccaacacggacgaaaggcaccggagtaggcgacaggaagcgtgatcggatttggggcaagaatttgggtcaccaatttaattaaaaatcaatgacaggtatagatctaatctaacggtataaaataatgggtccactaacttaaatgaaaattaacggtgagattagactgtgccacgtggcgatctaggagcgtttgtaggagcgccatatggcggtttgagagcgtttgtaggaagtttaatggatgac

SEQ ID NO: 12668 - DNA, 619 bp, Oryza sativa
tggccgtcccgcactacacttacatgatgctgaagatgcctggtccccgaggagtcctatccctacggagcgacatcaagcccgccggggcatgcgacaaggagagctgggacttggcccaaacccgcgagatgacttttggccgagaggaaattctactggctgtaaccacagccagcgaacgtgaagtgcccactaccaaaacttcaaaaagtggataaagcgatgccttgacttataaaatttccctagagacttgtgatcctactaaaactgctgtgatttgcgccctgttatactgtctataagaaagcgcgctcatcacctttattcccaacaataaagatatatttgcgtggaaaccatctgatatgcccggtattactagagaggtgattgagcacttcttacatgtcaaagaagacgccatgtctatcaaacagctgactacggcgattcgcacaccacaggaaggacgccatcaaagaggaattaaccaagctggtagcagcaagcgtcatcaaaaaaatacttcatgccgactggatagcagacccgggtctacatctgaagaaaacagggcactggcgcatgtgtgatgattatactgaccttaaca

SEQ ID NO: 12669 - DNA, 668 bp, Oryza sativa
gcaaattacaagtacaaggaaaattactttttctcatctggagttgacaaaaatttaaataaatgtaattcagtgctggagaaaaaaaaaatcatatgatcatctaaacagatgcagaaaaagcatttgacacaagtcaacattcttataaaaactttcaacaaattaggtatagcaggaatacttctcaatataataaaggttatatatgacaagaccacagcttacatcatacccaatgatgaaaagctgaaggctctttcctctaagaccagaaacaagacagggatgctcactctcaccactgctattcatcttagtgctggaggtcccagccggagcaattagacaagaaaaagaaaatgcattcaaattggaaaggaagttatgaaactgtctctgttttcacatgacatatatcttatatacagaaaattctaaagactctaaaaagactgttaaaactaacaaatgaattccgtaaagttgcaggatacaaaatcaacatgcaaaaatcagttgtttttctacacactaacaaggaactatccaaaaaagaaatttagaaaaccatactatttacaatagcatcaaaaataataaaatacttcggaatagatttaacaaaagaagtgaaacatttgtacactgaaaactgtgttagtcat

SEQ ID NO: 12670 - DNA, 697 bp, Oryza sativa
gtgttggtagaagttatgctatgattgccccatatgacgtagatggtaaccgtattacgtacccttctcttgggggacgaaactacaactctactacccctgttaaatttacaaaactagcaaaaccacttaaagtcggggatacagaggtttttgtagaagatgttagtctatggaacggacaggcaccgcaagactaccaacgtagtattatcatgtggggttataaaaactcgttcggctatacttatcccgatggaacgtatagtcagctaatgcagatgaggacatatgatattggtgcagttgacaccacagctaacaagattacgttaaacaagccatgggcagttgcaaacccaaatagttcagatgggattttcccagtagggcatacacttagcccaacttctgacggctccacatatttgtatttgaatggtcacgtaaatatacaagtacctactacgtacaccaagtacagccatttgattagtggctcttctgagtttgctaatacaacgattatcccagtagaaacaggttttattcaacttggattcttgttgaaccgtgatacaacaggtgaaaaatcttggctaaatggtttacgtctacgtgactatacagatacgtataaactaaacgatgacgttagagaaacacaagaaaacgtagacaaagctcaacaagatgc

SEQ ID NO: 12671 - DNA, 550 bp, Oryza sativa
cccaagacgaaaagtctaatttgcctccctcaacagtgtagatcttctacctctagcagccgaactgagaccgatttggctcggtttttctcctccaaatctgacctttccccttgtgtttttctaaaatagttgaggggaaatattcctcttatcctcctctatctttacccccaaaaatcggagctaatcgttgagtatcttatccgaatcgaactcgttttcgagtttatctccaaaaccgagttttgattttccggatcgatttcttgcgggaggagtccgatctcttcaatccaaggctataaataggaccccctagtcctcctctttcgtttgcccctctcccgtggtctcccgtgcctcgtagcgccgccgccacgtgctccaccccgccgtcgtcgccggccgagctccatccgcgtcgcgccgccgcctccgtcgtcgccgccggtcgccgtcatcgccgtaaggtgcgccgaggtgtggagaagcccggccgctctctccccgctgtcgccggtcaccggaaccccgtcgccaccgccga

SEQ ID NO: 12672 - DNA, 659 bp, Oryza sativa
tgttatatatataattgcttagcaatgcttagaaacattagctcactaatgggatgaatcatatatactacattattatttatggttatatttaatggtagctcacgatggttaatcgtgttatgataattaattggtaattaaaatatgattaatggtgggttgtgagcacatggttttgaaggtcgtgctcatgacaattaaggaccggttcgcgagctactgttgtgaaacatttatcgtgctaaccacaagccagcgtgggcaacggctttatcttttgtgtagcgtgattcattatagtgcgccagactgagaagtggcgagaagtccacgggggtcgctggggagtccatgccttgtttataagggggtgattatgatccaggaaaggtgcgctgtaatgggttatgttgtgcaaggggtattgtcacaactcctttccgaggtaccgtggtggtattgaggcacatggtgacatgatgtggggttgtgtcttgtgggtacagtggtacacctctggccagagtaaaactattcgaatagctgtgcccgcggttatgggcgggttgagcactgttcttcgtgattagtctcacacctctcacaataattatggatgttatacctggtaataatttgcttagcgggctgcagga

SEQ ID NO: 12673 - DNA, 5230 bp, Oryza sativa
aaccgcctcgcctccgtctcctttctgacttcgccatcgccgctcgcctcgcccacgtggtcgtcggacaggagcgaagcagcggcgagcacctgcagcatgcggtgatgcggaggaggacgacctcctcagcacccgggtgggagagggtagagaagccgctgccaccgctcggcacccaaccgccgctcgcacccgcccctgcgccgccctgcctcgccgccgccgcctcgcctcctccgcccccaccgctcgcctcgccgccgcgcctcctcccccaccgccaccacgctggcctctccgccgccgcctcgcctccttcgctcccgtcgctcgcctcgctgccgccgctgcctcgcctcctccgcccccgccgctcgcctcgccgccgccgcgctcgcctctccgccgccgcctcgcctcctccactcctgtcgctcgcctcgccgccgccgcactcgcctctccgctaccgcctcgcctcctccgctcccgtcgctcgcctcgccgccgcgcctcctccgccgccgcactgcctcgcctcgcctcgctgccgcattgcctcgacttgctgggccgtgtgaaggaggagagagagagatagtagagataagagagagagactgacaggtggggcccacctattttttactaaataaattgctgactggactgttacgtacaccaaaaacatcgcggattgggttgaggggggtaattcgtccggtttgcatagttgggggtgaagaatgtctggttttgtggttcaggggtgtaattcagacgaccgcgatacttcggggggcggggtaattcgtactttttcctatattaaatattacactatactacaagcaaaatatcacctcagtggctctgtgtcacagcattttaagtgatacttctatgacacaaagtattcttgctgttttatctatgcatggcatttataatgatcatgccaaatcgtatgaaataatttgagtttatcgattataatatggcacagatactctataagtacatacaagaactgaaagtaataaaaattcaaccagcatttgctgacttgtcatgagtcagggccaaagccaagtggtgtccatctggctccatcacgctgtccatgggccatttcttacaggtccgtgttaattatatgtataactgtttaaaaaaaattatatgtatagcaaaaattgatctcgtgacaagttgttgatgatttttttgatggatggatggttattatttttagtacaaattaaggtggcttcatctcatctgtagaaaaatatgcaatgacacacatttggccaactccactcaacatagttttgttgcgactacactaaggaagttgacaaagtgaatcaaagatatagcttgacgttacaccgagatgacctggtgaagtaggttgcaagctgcacggtatcatgcatctagggctcgcagatctcgatcatgggtgaagataagacatggacatcgagacagtttcgcctctgtacgagaacatcaccgaaacatagaagaagtttgatacaaaccactggtatgtcagacagtcccgatgcctcccaaatctaccactgcacacatgtcctaataataaacgagttctctgaactaaggagcgaataagctttgtcatcggaactttatgtatcattgttacacatgcatggggctctgaattttatataggcaggcattgtacaaacatagctaggcaatgaattgatcagctatataatgtgaataaatttcaccctcatagatagcaacatggtgagaactgacatttacaagcatatatatatattgtcagtcataaaacggtttgtactatgcgtactatacagccgcataagtttctactaaaatgagcagttgctgattattgatgtagcataccgcagttgctcatatataatgtgaataaatgagcactgcatgtggaagttacagtaccagcctaccggttaccaccaacgtgcattagttagagccaacaaatgatttccctacaatagaagtactccctctggaattttttaatgtacgacgccgttgactttttgacaaacgtttgatatttcgtcttattcaaaaaaaatatgtaattataatttattttattatgacttgatttattatcaaatgttctttaagcatgacgtaagtatttttatatttgcataaaaattttgaataagacgagtagtcaaacgttggttaaaaagtcaatggcgtcatacattaaaatacggagagagtatatatatatatatatatatacacacacacacaatttgcaaccttaaaaaaagaactttcactgaatatacatccttgtttttccccagcgagaagagtattttctaaaaaagcgtataacgcaatgtaatgatgatctggagtgtactacaacattttacatgacgtatatataactggtgctaaaaaagaagcaaaattatcgttcgtagggcgctgccaagctaaaagttacagtaacaagagcagaactacatgctgcgcagagatcatgtttgaaagagagagaaaaaaatatttggttgatcagaaaggcatttagaagatgagatgcacattgtcgttgtcatgttaataacccattctgccctgcatatttgtgatcttgacagaatgaaagaagatgcagttatttcagcaattcagctgccgcgcctccaatctctgctcatccaaaatgttagtagcagagagtttgcgagaaagctggttatgcacggtcttctccattacacgaaatgcagtcctcggtaacgtgcgaatcgcacgcattgagaggcagaagaaccatccggtcgtcgtgatggggatatctccgtgctactgcattgcttttttctctgcaagccccgaagcaaagttaaaatctcgagctacatatgtcggacaatcctgttgcctcccaatccaaattttactttggttttcgctcttgtttggatggatcttaatgtcgactcatcactcatgcatcgctcatcctcctggcctttgatatatatccatgggaactactagagaaaggctttgtagtctcgcttgggaacctcctgactacgaatccgggactaaagatgaacatttattctcaaatcacaacaacattctcatcttcaaatcatagatcgaatgaaaaaatcattctcaacaaacaatcattctcaacaaacaatcatcacaactcttctcaacaaacaatcattcacagattaacaaggaaaaaagaaaaaaaaagggaaaaacgcccgcgtgccggcccctccgcaccggctccattggccggcccctccatactggccccgctggtcgccgccgggatcgcgcggccccgccggccgctgcctaccgccgccgcctccccagcccgactgccaccaaccacggccagaggcagccgccgcatcttccgccgccaatccaacctgctctggcacgcgcagggcgccgccgccgtgcgccagcctctcgctccttgatctgcggcagaagaagataggataagaacgccgtaagggataagagagagaggggagatgagatgataagaacgatctgctgagagagggaagacgaggagtttggaggataagttttagggattatatattgtatatggatttttagtcctggttgataataataccaaccgagactaaagatccccggccccctgactaaatctgactgtaaatgaaccggaactaaatatgatctttagtcaccaaccgagactaaagatcatctaggaccgatagagttttaaacctggactatttgttttttatcgactggggaaatatggtttctccagtagtgtcggttgcagatccatatacatacatgtaccatggaagggcaaaattgaatagttttgtgtttttcagtccatagcaaatgtgtagttctatttgcatagatccccatatataaatcagtttgtactattccctccgttccagaaaaacacaacctagacaaggatatgacatatcttattacaataaatctagacaaccatttatctagattcgttgtactagaaaatgtcacatccctttctatgtttaattttttttggaacggagggagtatgtcataaacggtgagcttcctctgaaaggactgttaatttcgaattgtaacaagtattcctctgaaattgtgagctaacaaatttgttttttccctcgcacatgaagttggtttgaacataaaatttggtggtgacatattaatgcctatacctgttagcgatttttgcatgaatttagaacttggaaaaagtccaaataccccctaaactttatatggtagtccgtctagcatcctgaactttaaaaccagatatccaaccccctgaactttaccataccattcatattaccccataaggtggttttggatgatggttttgcatattttagaagcttaaacaaataatttttactaactaatataacatatttgaatatcatcagttataaatcatcaatttatttttatatagtggtgtcatactattattatattggtacttgtttgtaagtgagagctaataaggagcaaacagaaagatttaagtcaaaattttaatatatatgtctaaagcgtatgacatgtgatcaaactcatccaacttatatacaaattagataaaaaccacgatacaaaaccatcttaggggttataaaaacggtattataaagtttagagggttgaatgtccggttttaaagtttagggtgctacacggactttcatcctaagtttaggagggtaatttggactttttccttagaacttatatgtcaggttttcacttattcgatggttttcatcatctattccccgttttaacacatgcatggctcatatttttctcccgcacacgtagaattattttaaatttatatttgaaattaacgtatttgcatataatgtctattttgtcattgtcgatatattatgtatgaaataaataatatgcatccatgcatgtatcgaaaattaaaggtcagcatttgtcacttctgacaatcgtgcactttgtgcaagtaccgagtagcattattggacttatatctaaaattaatgcatattattatcacattcattttgtgcttgttgatacattatacacgcatgaaaagaaactagcaattaatgta

SEQ ID NO: 12674 - DNA, 4625 bp, Oryza sativa
tttgtaattctatgaatctttctacgacttgcagttgagaggttacgtgaagtcttcaatatagtctgtttagaatctcaagttcagatatttcagaatatccactacgctttttacctttatctcttggtaaattaatttcagaatgttgttgtaattcagtttagcatggattatggagatggtgtttaataacatggtagttcaggagggtttttgaagtcaggcatcgtttctatgctaatataaaaccatttgaatgaaccatcaacaatggatgacctaagaataatagtatgttgggccactaccattcaattatttttttaccatgacaaattttagatatgcataatgattttaagaaagtcaaaattcacaaacttgcactcgaggcaattggaaaacacaaggggaagtgtgtgcttgttcaagaaaattaatttcatactccatgtgtgggttctggctttttgtgccgaaaccatcatcagatggaaaaataaaaggcggaaagaagtgaagtataaactgaaatcttgaactttgactcctaactatatgaaaatatacacaataagatgataaagccagagccccaaagatatcaccgaactctggtgaaaataccatactcttctatctccatttctatcccctgaaaatctgcaatgcatggtccttctattcatcttcatatatatatatatatctgagtttagaaatagctccatatcaaatccatatgttaaatttctttcctgggagaacaaattagtgtatgccatctggtgggaaatcttctctcccctcttagaactcacttttgacaaggtcaaattatagacttgagtgtttgtcaatgatgaatcgtaaatttttttaaagagttatattttttccgttgcaacacacgggcacctaactagtcactgattaattagtgattaattatcttaattagtgattaattaaatcaggataattaatcactaattattattaattaatcattaatcattcaattttcaaaacgttctcgcacactcaccatgcgagaccgctcggtctcgcgcctctgccgcgcgacactgcgcggtctcgcgtcttcttcgtgcgagactgcccatgtcgtcagtccacgtcagtttcgcgcagcggtttagcgataccggtggtatatttgtgccaaaaaatttatatcaagactatttctaagaaaaaaaatatgaacggtatatttttaaatttaagtccagaaaaaagaagcacgagtaaagtttgattctacgcatgttctgtatttgtgttgtgttgtatagagagatcagacgaacttagtgttgcgtaccttgcagcttctacgaagattatggtggttgcataaaggaaatcttcatcgggtcggagcaccgaggggtagccgccgaggagaacgacggtagcccatgtgaaggccagcgtgccgatggcgttgcccgtcctctccaccagcgccaccacgcgaacgaagcaattcagccatttttctggagcagctaacttaccttgcccgccggagttgcctgctatcttggactcgatactcaccgccggtgatgtcccccatactgccgtataccggccgctcgcttcaacgggccggagaccttggcgcgcgttacaatataagagcaggtacagtaacagcaagcataaatgcataatacggagtagtgaactataataaataagctatatacttatatatacttatgtgaaagagagataaataaaagtgaaaagtgttaactctcatacaaaagctaactatacacaagcataaaaaatatgcattaaattcatggtgagagaaagagagagaatgaaaaaaataaacataacctggagtagctaacttattatacatgttagttttaacattaactaatagtaagtagtgagctcttactctacattgattaaacaggctctaaaattataccacatcagcctattgtatatggagtggagagaattgacgagcgagaagaaagcggacgacaaatttatcgccgggcgattgctctcctcgcaatgcgctatcgctcgactgcagcccaactcggcgattaaaaacgtcatttgtgggtggccccgcacaccacaacggatccccttccccaccgagcaagatcaatctcttccctctccaccccaaccgcgcccgctggatctccgcctgcccctcccgcgcgcgatttctgccctctttcccgtgcgccatctccctccactccgctttccacgagcgtgaaaaataatcctattttaccggtcccaaaaatccggtagattgatggttgccaccctcactatctgccttcccctcatccaccttgcttaatctctcctgcccgcagtcccgcacgctacaaaattgtactgaaaaccctagttccccaccaccaaaagccatgtcccgccggaggaagacagattgtgccacagttcctggtgttcctagttcctaccccgtgtgtttcaaaaaaaatagttcctaccccgtcggcggaggtatgtttttttttttgaacggtgggtggcttggttcgtcacaccaccgtcagcttgatttgcttctccaccgtcatcagctggatttgcttctccaccgtcgcgataataataaatattatttgtgtttcaaaaactgtgatacatgtgcccacaagttttagtacctagtttttttaggatcagtggtatttgggttgtttttttttagatcagtggtatttgagttatgtagtaactggctaggtggcccgtgcaattgcgcggctagcacccatacaaaatatcttttatctatgtatgattttacttaaaatttgttaaatagctatctcgttggcttaggactttgaaagactgagctttaatatctatgttttttttctatagttttaaaatatcacactgatcactaccccttattcctttgttgctcgatctgccatggtttttattcatcctccttgagcctttaaaaaatcaaacttgtagtttttagaattcattgtcatgttgggttttgtttttataattgttagaagtcccgtcaaacgctaccactgtactcctctacggcttgtctgctgcctactctctttattgtctttgggattttaaaaatcaaacataattatcgttgcggttcactttttactttttataagtttcgtgaaatcatcagcggcttcgccactatactcctctacggcccgccaactgcctcccctttttattttcattgggattttcaaaattgaacatgattaatattggggtttacattttactttttagaagtcccatcaaccgctgtgaccatcatgcttaatggcatgcccgtcgtcccaccttttaatcgctattacaattttatttgggctttgtttatagtttttatatgtcctatcaaatgccaccaccctaattctttaggcaattatttacggtactgttgcctctcttctatttattgtcatttgttatcgttgtgttctagataaactttttctttgaaaaatccatatttttcattccaatattttttatttgtaaattgtattcatatttgaactcttatattttttttctatttttgaaatttattttattttttattctgaattttacttaatctcgtgatgtgttctaggtggtcccttccaatagtctttatttttaatccaaattttagttatttataaattgtattcctagttgaactcttatttttctttttctaattttgaaatttattttattttttattttgaattttagttaatctcaagttatgttctatatggactattcttttaatattccttattttttatagcttgccaggttttcttttatagctattagaaattccgtaaaacgtcgccacactgctcctttacgacccatccgttgccactctttttttattgtcgttaggatttgaaacattgaaattgatcattgttggggttccttttttaagtttctagatgccccatcaactgtcgccaccccactcctttactacctgacctgccatccctcctgtttattgctattgagattttaaaaatcaaagctaattgtcattggggttctattttatattttttaaatgcctgttcaatagccgccaccttactcctttacggtcagaacattgttactcctttttattatcattgggattttaaaaattaaacctgatcattgttggttttctcttttgtatagtttttaagtttcgctagccatcatttctctactcctttgtccttcttggcttggcttcttaataattttatataatttattttatttgctattttgaattttaattagtcccgagctatgttttatatggtctcttttttttaatattcctcatttttatttagaatttcagtaattttttctaaattatatttctacttgaactctcatttttattttgctgatttcgacatttactttacttttgatttggaattttaagtaatcttctgtggtgttctagatagactattctttcgaaatatatttttatctgattaagttattttgatgaa

SEQ ID NO: 12675 - DNA, 1496 bp, Oryza sativa
gcttgtgctaaagctttgaatgatcacttcaatattaatttgacttcagatcagattaataatcacattaggacttggaaaagaaaatattctaagatagctgatctaaggaagttgagtgctgctctttgggatgatgagaattttatcatattacttgatcataaacattacgcagaccacatcaaggtatgccacaaccacacttacaccattttattgttacctatagtggttgctgaaatttgtagtggttgctgaaccttatagtggttgctgaaatttataatggttgctgaaacttgtattggttgctgaaatttgtattagttgctgaaactaattttattattaaaccatgttgtaggatcacaaggctgatgctgaatatctgaacaaatctattcacaattatggcaagatgcttgtgatatttggcaatagtttggctacagggaaatatgcaaaagggtcaggtgatcctctagccaatgaatctattgccattgatgatgatgaagaagaagaaattggtattggaagtgctgcagcaactggatcagctagtagagttcatgcccttaatgaggagaatggtgcatcatcttcagcacccaaacccaagaaaacaaagactgctgctgcaattgaagaggaagggctgataggtgcatttaaatctgttggtgacaagcttgctggagcaatagttgaagctggaaaagaggctgcaaaatctaacaaagagctgcccgataacctgtatgagagtgtgcatagcattccagggtttgaagatacatatcttgctcattatcatgcacatctagttgacaatcctccaactgcaagggtgtttgttacccttgaatttgctcacaaggtcacttgggttgcaagatatattgccaccacttttaatgggtgaactgtgctgtgatggttgtgtgatgctgttggtagttgccctgtgttcaaccttcttttgcatactcagacaatgaactatgagtattgagtgtgatggtagctgttagatggtagtaggcatgcattcaaccttcttttgcatactcagacattaaactatgagtattaagtgtgatggtatttggtagatggtaataggcttgtgttagcctacttttgtccctaaaccagtcacttttatggctgtatggttgatggtaaaattcagatgtggtggttccattggatgatggttaattgatatattttttcatatttcatttctgggagcatatggcgtgttgtatgtgtgtgctcctctcctggtatgtgtggtaactggtaacacagatgcatgttaaaaatttctgaaaaaaattgtcttgggctcatgatccatgtacaaatatgtagacaagtaacatgaatgctcatgagcatcttgtttaattttaattttctgttctcaaggtagacaacaaatacgttatgcatttgattatttgtacatgcaactatccaatttt

SEQ ID NO: 12676 - DNA, 10877 bp, Oryza sativa
gggctgacaatggggcccacttgccagttgacggaatagaaaagcagctagaaagaaaagtggtgttttgttttgtgaaattaaatgcctctgaaccagtagtttaccattaaaactaaaaatattactatctccgttttttaatagatgacgccttgactttttcttacatgtttgacctttcgtcttattcaaaaattttatgcaaatgtataagatataaatcacacttaaagtaatatgagtgataaaacaacccataacaaaataaattataattacgtaaattttttgaataagacgaacggtcaacagccttatcggatggcctaataagccaaagaaaaagccaaatttaaaattttcaagcttaattttaagattgattttaacatattttcaacgtagttttttttcaacgttggcttttaagtcacaaataacacatttataaaagttttatccataaattcatttttattttctaataagccattttgccttattaggaaataagccaaacgatggggacccaaacatgtgagaaaaagttaacggcgtcatctattaaaaaatggagggagtacgtagtataacttaccaaaagtttatctcctggagtaacttttatgcataagagattacattgctggcatgaacatcacttgcacgttggaactaatctccaatacacataaaacagagtagctcattagcatacaattaattaactattaggtattttttaaaaaaaataaattaatatgattttttaaagcaactttcctataatttttttaaaaaaaatacaccgcttagccgtttgaacagtgtgcacgcgtaaaaagaaagaggtgagttgggaacctcaacttagccttaattatattgggagtacatatattggcatttaataaagtaggaatattctaatgtttttgttttttattggaatgtgtgcggtggatttaaaaataaacttattttgtgatagaggtagtaggccttttctttatgctggaatggatatatataataaacattacatgcacaatgtacgggatgtttaatccactggaaatcatggtggacaacatgtcttaactcaagacatcaagatgtcatgtactacccacttttcagaatagtttgataatgaatgtacaggtaacaaataaaatgtttttttctacagtttgtacgtgtttagcttataaatagccagaaatgaaaagcaagtttgaagaatatatactaacgtgagcctctcatgccgtgtgataagattcaagtagagtactacaaacaaacttatccatctcaagaaaaaaatatatcattcatgttatagctttggatggcatcatgttttcatgtgatgatcaattttccttatcaacacagttctgacaactacccagggcttgggaggcatatgggatctacatacaaccctgatccgaaatactcggggcacatagttatagctcggttacgatgacgcgattgaatgttatgagatgtttagaacaccgctggaataatctttctgtacagctccaagcattggcaccgattctacaatttatgatgcttccaacgtacttttctccagtgttttatttgatgtgccaaatttgagctgatgtaggattacaatgtccgcctttcaccaaataaggtagttttgcatcgtctctatagcctgttagggcatcggttaccgcaagggacatgatgcatagttgcggatgcagagaacactgcaaaggctgtgttcggtggtgggtgttagaaacccatcatccacgcacgaaaaaggagcggtccattagcacgtgattaattaagtattagctaattttttttcaaaaatagatcaatatgatttttttaaacaactttcgtatataaactttttgcaaaaacacaccgtttaaaagtttgaaaagcgtgcgtgcgaaaaatgagagggggagatgggggaaatttaactatttgccactcttgtgacctggcaattaataatttgccacatcctgtcaatgacatgtgggccctcatgtgtctatgatatgtgggcctagtggcaaatcgttaagcaacatccgtaagagtggcaaatagttaaaatccccagagttgggaactcccggtaccgaacacagccaaaatgtgcacaataacaaactacaatgttgctttgaatctgtgtgataaccttttctttaacactagcgaaacacctgtacgttgcaacaaggtataatgatattagatgatctaattaagactaaaccatcactcttggactctaattaactaagagtgaattaaaataaataaatagattattcggtaagtgtgttctacatgaaacaaattgagattccaacatagtactaccaccgcatggccactgccatattggtcaacaagaggtgactgatctatggtccccatttatctacgtccatcaccattgcctttttttttaagattgtatagatatagattagtagaacgtattggcatcagtcgacgctgagagttaaaacaacaaaatttgggcatgaatttgccatggttatccgtatggcaaaacctagttactttcatgaaaaacaatcatggcttagataatactggcaggatttcaaagtacaggctattttggtttgatgccaaaatgtgccctgttaaattgatggcattttgaatagtagtttggctagtgcttagtttgctaccaaaatatgccaataaaacacataagttgccaaaacatttggcactaccaaaatttacctatggtttagcattgataatattttagcatggtagcaaaccaaacaagctctacatgttgcaacatgcaaagtatggtgcaccaatgagacataaaatgcacatctcgcaataaagtacatggatttatgatatattctagtagaagcacttatacagcacttataaagtcaataacacatggcccatttattcaagcacagggacctcaggcattcctgctcactcgtgatccaaagttggtgtgaaactgtcctgggtgattgtattatttacagctgataagttgaagatgtaaagattgaatatttcagatataggacccggtgttaaatgtgtcacggtttattcatctttaagagaaatcaggggtatgtggaagaaccatatacatatgacttgtgaacatgtctatctctgtatgaggctgcacagatagagacagagataagttgccattcatgcatctttagcaagcacgccaggttgcttcatttgtcaaatttcaagcaagaagtttgctcaaagttttaggattgacaggcgtcagtaatagcggtaatcagcttagtttggtcggccactatattttctggacgaatctgggggaaaatcgattcatctgaactcatccccctataccctggttttgtatggggagaagacatcctaggatcatccgataatcacagaagactagtatagtagccaatttcaccatggctgagaaacattgctgcaaaggaaggttttcttggtccataaaaatttgatcaggactttgaaatgtaagacattcagaaccaaaatgggcaaaactttctacagtatctagacaatatatacttggcaatgaatgcataagcaaacaaaccagtattgggcgcaaggataccatagtattcgagcaatcggaagcaatcgggtaccttattcttaataaggtaggcaatttggctaagggaggttcgcccaataacctgagcgtttggatttgctacgatggtgttcccgaaacgagtttacattggtgacctgcactctgatggtatctctgtgcaattgcctgactatccatccagctttccttctagtacactgttgacaagagcaagttgatggagacatcgatcattttagtgccacaaaatatctgaaaagaacaaacactatcattttagtgccacaagtccacaatacatgaaaagaaccgacacaatcgttttagtgccataaaacatctcaaaagaaccaagaacaaagtaaggaaaacaagattggcatgctgatgaataccttctcaatatttggattaaaacaaactgtaattagagtgtggatatacgggtataggaagacttctctaaaatatgtataaaccagcaaagcaaggtaacaatgaattgttataggtcatggttccattgttgcttcacaaacatcctcctaaactctttcagctcacaagaaaatgtgctgcaattcaatttgcaaaatacattacatgaaactgtcccaccattcaacgcaatggcctttaatgtaggaagtagttatatggactggtttagatgcctgaatcagtacttttggtagctccaagaacatatgttgcaactcgcaatgcaattagcaaacacgtgatcagaatatctgatataccacaagtacctcaggaattccacattcctatgtcctttatgtacaatactgtgtggatttcatgtccaactgtaagcttgttctaatctgcactcaacatgcaatggatgtgcatgcgttgcaggaatttaaaaagggtttgtttacttctgtcatattgtattgtaacacagtgatctgttcatcatctacatggctgaaccaaaactatctcccttcacatgttattacgattttgttctagtttataagggaagaaaaggattttacacaaagaaacatggcataagaaaacagaggtacttgcatattacccaaaataactcattatacatgctcagcggaaaatgtttctgaagaatctgaattaagcagcctttctgcttcgtcattagcctcagcttgtatacgccattgctaaataagtattagaagcaactgttagtccttacgaaacattttctgttgaatgtaagctgatgaacataggatatacttgcctcttcaagactatcaatctccattagttgctgtatttgttctgatatcctttcctggaatcaggacactgattattagtaatcatacttcatccacatgatgcataaataggatagctaaataacttgaacttactgcactacttgctgcttcagcaacaataacatctgagtccatctcaacttcaatttcaatcatagaacacaactgcagtggcatatccaacatttcactatttagctataataaacgtgagttatacataccatatataaaatttgctctattacttttgcataactttccatcagctcaatctttgccaggagtgtactttccaagctttcaagtaccctcttcactctacctcgacgagcactggaaataagtttgatcaaaacttcattattttcaaaaagaaaaaaactctgtagtagaacaagttctaacaaacaaccatgttatataagtatatttgtgaatagataaagttaaactagaacaataaaataaactgttggaactgtatgaaattaccgatatgatggttcacctactgctaatatcttgttctctagttgagacattcttgccagcatccacacctttgaaaataaatttaggagtttaggagttcatgattttcaggactttacttttagcagaaaataaactaattagagattacagattttaacctccttttcggaaagttgtttcagatcctttagacgagtctgaagcatgtcgtactgagataaaagttgctgccgaacagcaattatatctactgtcttttgtggaagctgaaaataacatcgaatttaggtcagagagaatataatggacaacgtagcttctaaccaaaaactactaataagataataagatattgtctaaaatatgaatatttggatatataaaaaattgagtaaacatgtgaaaaaaatacttttataaaatgcacaatgataaaattttgtggtcaaagtgcatcttgttggctttgcaaatttgaaaatagcatgtccttttaactatggaagtataaggcactaggtttctctaaaaaagtactgataaaaaaatatttttgaaattatagtccctcttatccaatatataagacattttagatttctcaactcttaccaaaaatattttttaggaacctttgtctcttttcttcctgatttgccattgctatataaatgctagtactctcatcaatattttttgtagataatggatagaaatccagcctctatatccacaattggatatacacagccaagtctttccattgggagtatgattgaagagaaacaaagtaaattagatactctagctatgtaatggcatgccatagggtaagcttgatcgaacaaggaagcaaaacagagcaggctatagacagttgcttgcatgatctattgttggtacaagactccagcaccatacgttggtattacatgaccctattagcattccgactacctgcccatagttttcaagtttcctcctagtgaagaatgctaatccttgagtttacttacctttcgaatctctggcaggatcacttgatttagtgctgttccaacagcagctgatgcaaaagcagttgctgtaataaatctagggaggcttgggtcgatgaatgcagaagcagcatctccagaggcaagaagagcaagagcaccgaccaacaaatatggattaaagacgaatggtccctcgttctttgatggagctcttagcaatcttgagacttgtctgttgatgtgattggtgagagacatgggttctcctggtctaaacccttgtgagcgtgcagaaatcttaaggggacccatttcacgataaacatttgatggggcagccaaggaaatggtcactctttctccttcttgagcaggcagttctacagtctgcgtagcaaatctatgggtacgggctgttcctgaaggtgtgcgaatctgcaaaataaataacttacaatttacatgaatatggctcatgttctgaacaacattgtcaacagattataagaactgtgtgatatcacaaaaaatagattcagctgaatttcgtcgtggaatgttttgttggagcactctagaggaaaatttggatagccaatccctggcccaactatcttaaggggggagtgagaaatgacagagaaatgttggtgatcaaatttagcattaatggattgaacgatatttggaaagaaacacatgaagaattctcgatgactgtttggtcctaagtcaacagttgccaaatattcaaactaaaatgtgaatgtgttgacctcagttagcaagtgttcgacttgttcccagaattttggcaaaatactatacatgctgctaatgtggggccaaggttcaaaccaaacatgtgataacgcttggtcatttttggagttttccacagattttgtgaaaatatatcatgtttactttcaaaaaacttctatgaaaaaacacttctgcctcacatggtgcatggggaagcatcttcttggttgccaagacctgaagcatcatactcttaaactctgggaaatttggaaaaagtacaacaaaagatttttttaaggaaggcagctgtaatcacatatggatacactgcttggcgtgatggcatctggtagtgcaagaataacctctaagatgataaacatgtccatgtgtgtaattcccttctaccattgatgaacaagcagttatcctacttgtcataaagaggaacatttttttacctcaattgttgaacagaaaacagggagagttttacctttcagttctattatatggagtacatctagtttaatgtgaggcatcttcatatcttgatatccatcaagagcaacgatgatttattcaaaaatttgaaaagtaaagatctttgaaataaatgatggcacagttaagatctattgtgcggtttttgaaagggaaactaccacaatagagtgcacagcagctggaagaccgtcttttatcacatttataaatcgcaatgccttgtccaaagctgaaatgtccatgctgcgttcggcaggaggagatccttagagaagtaatattagaagcagtgtcatatatggaaccattgagaaagtaatagaggtgtgcaaaaatatcttctgatataacagatgaaaacaatatcaatcaagttacttcagataaactacaaaatagtacaaagttgcataatcattggaatgtaataaaccatttctgtgagagagttatacagaaggacaatgtgtacctatcaaacactaaaataaattatgtataaatctttttgacatcacagaaacccaataatctgcagagtaatacctaagcactcaggataagcagttcatagacctatataatagccaatcgtaccactggatctaaaggaaacattagaaagtataagtcgaacgatgagatcacagacatggctaattagtcaaagctaactgatatatcaattattttaattgttctaatgtttactttttagatgtcactccctccatcccattttaagtgcagttatggatttccatgtccaacgtttgattgtttgtcttatctgaaattttttttatgattagtatttttgttgttattagatgataaaatatgaatagtactttatgcgtgacttatttttattttttttataagacgggctgtcaaatgttggacacggaaactcacaactgcacttaaaatggaacggagggagtatcttctaagttctaacaaaataagttagtactggagtccctccacagttaatggcaggacacctgttttagaagaacattgctccaaaagttactagaaacaacaccataatccatagctacaaatataaccgaaaaaagaataagatcatggcatagcattgacagtttacaactccaagcaactgctccaagaactaacctaacttcttcagactcgatgctcatgatatctccagaaaatagttcgtactgatatcggcattttgaacaagaaacagtctgtaaagtaataaaataatgctaagatttccattacagcattaaaaataatctatattttcctaagatgtcatctctaaaaatttgctcaaactgtaaaattttgtttcataaatcgcatcatgcgagctaagtgagtagcttaaacaattagattagaggtacaagatacttgtacagcatcaaacctgagttccatgctggggctgtgcaactgcgactgctaccatgcagcttggacagcgaataatcatcccaaatgggacctgtaacaagtaaaatctatcatttagaagtgtagtgacattcattcactgtgttttcctttagaagtgtctcaagttttctctacatcaaatatacttccattcaacaagacactcttatgtaaatttttaaaattaaagtatgatgcaccagaattatcaatactttgagacaggatcagaaccataaggattgttgccaggcttgtggatattaatgggactagattattcaaagttatatgttacatcaaaccaaaagggagtttcgttggaggggcactgatattgctatggcaagactatccttgttgggaccttttgcactaattgttttgataataaataggatttccgtagatgaactgattgtacttacctatctccagaaatctacgtttagtactattcctctgcaaattcggttctagttagaattaagcttgaattgccttggacaaatgaaaccagtaattggacaaatgatgaggtaccggtaggtgacaaatcatgtttgcagatcaaggttttaaagcaagaataaaaagcttccatcatttgtcaaatgccactaaaacatccaaacatcatgcatgcaaaccaaacagcaaagcaccatacacatcgtcagacatgctagtctgcgacgccaaagctcacctcctctgccgaagaaatgcctgcgcgagatacataatcgattatcctaagagcatcagaaacacgcagagcagctgccaatcgctggacaagcaatgcgtacgtccgcacgtctggcctcgcccacctccaggccccagctgcaagccggcactccacaccacagggactcagtacgctcaatccaaaacataattcactacatttcgtgataaaagaaaaaacgtaaggagtgatacgatgccctcacctcgtgcaaagccggatcgcatcgcctcgaacaccgagagcgctagctccacgttgccccggtcaagcgccgccgcgacgatcgcgttacagtcggacgcgtccagaccgcccgtgcctcccgccgactccgcgacgatgtccagcgcctcgccggcgtccgcggcgccggcgacacgcctgagcaagtcggcgtcgagggaggtggcccccgacgcttctggctcgcttgcgccgcccgcggagctggccctccgcaaggagcaagagccggaggacggaggggaggagcagagggggaagaaggaggaaccgatgctggtggccgaggcggcgcgcccgagcggcggggagctgatggggcgcggcagacggtgggcactcgctgatgagggggagaggagggcgagcgccatggccgacgcgcgtcgtctcacgggcaaaccgtcgaacacatgtcgggcacctggtgtggattaggcgcgggtggcggggagcgtgggaggcggacgtttagccgacctggcggccacctgtggactgtggtctgccgtctgcgtctgagagcaagtgagcaactttaggctgtgtttagttcagcgcctagtttggattttggttgaaattagaaatgatgtgactgaaaagttgtgtgtatatgacaggttgatgtgatggaaaaggac

SEQ ID NO: 12677 - DNA, 14506 bp, Oryza sativa
atatatataaatgtgggcaatgctaaaaagtcttataacctgaaatggaggaagtacaaaacagcaaatagggaagggcttatatgtgccggaaactctatagtcggcacatatgagacgtttttcaccttttaatacaataaaattaagaagcggcacctataaccacttattggtaccggttcataaaaaaaccagcaataatagttccccaagtcacaagtgccagttcttcttataaagcggcacgtaccgacattatataggcgacggttcttataataaatttgcacccactagtgtggcgcaaaatgtgctggtttttactgtgaactggcaactatggacttcacatatctggtttactatataaaccaacatctatgagtccttaggtacccgttgacaattaaaaccggcacctataatgacgctacttatatatatatacatatatatatatatacttatatatatatacatatatgtatatacatatatacatgtatatacatatatacatgtatatacatatatacatgtatatatatatatatatatatatatgtatatatatatatatatatgtatatatatatatatatatatatgtatatatacatatatatatatatatgtatgtatgtatgtatgtatgtatgtatgatttttacctaactttctcatatgaagttggataaatataaagtttgtatcaaatttgtagaggtcgacgagatatacaactttgtgtagttgatgacattttgatttgtggttgtcaggatgtctaaaaatgtactataagttctcaaacctatttggaaaagtggatatttaaaatttctaaacaatctccaaaggagagaaaatctatatgaaagttatagatctatatgagatctttgtaattgacaaaattttcatttgagcacgtctatggtgttaaatatggattataagttttggatgagagtagcctcaaaattatttgcttctaagacatgtgtttttaggtgagatcgtaaggaggcttccggaggagagggaggtcataggtttgaacccttcttaccccgtgcgtatggaaatagtgttaaaatcttgggacttgtgggacttgagggaggtcgcacgtttttttttattatgtttgctcccactaggggtaaataatgagctagctcggcttgttaaggcttggctattttgagtcgttaggctcgttaaagagatctattcattttctctactattataaaattaaagatgtttccactagaattttggtacgtcaaacttgtttgaatcggttttaattttatgtttttgtcaaatccttttcttttttcttgcgccagagtgtcactcttatctgagacgcacacgaattaattgggcccgcaccttttcatgcgccccttgccacacgcagcaaccgggcccacatctgagtccattttccacatgtccctttgctcgctgccgccattgggcccacaacggcatcgtgcacgtgatttttcatatgcccgattgggcccgcgatgtcctcgcgcgcgcaatttgcccttgccgcatgtttgatttgggagtgcgtcaccctcacccacgatttaaaaattatagatgttttgtggtatatcatccgcatccgatttccgtcacacgtaacattcattgtgaagtcacggctcacgagcaaactacaaaagagagtttgtgtgatgtggatagcaagcgaatgaaactcgcagagtccacgcagatatcacgtatgccgttgcccagttcatcaaatgctattcctttcatacggcacgattcatgggacatgttagcatgatttcaattcagtctccacaatgctcgtacgtactaccaggcatgccattacaataatccataagaatcggttttactttcgaaaagaacatgccaaccaaaaataaaagatgatcgaagatgctgattttgtctattatcaatacctacctgacttgagataaagctggacgaaaaatcaagcttgtgtttaaagacctcgttgtttggcttatgcttattcctataagccaaatattaaattttagaacataattttgaatttaacttttggttttttaacttactttattttaccatatttgcttttgagtcgctaagaacatgtatataaaaaatctgcatataaatagtcttttatttggtaataagcgattcggataagcacgtgaaaaaacgaaacaatagtatgtgattatttatctaccgacaaatatgtacaaattaaattggttttacccgttgcaacacacggatatttttttctagtcatattaataattttaaattaccattttatcataaattaacataataatggacactaaataatgaaaaaaatcacaaaatacaaatagttttgatataactaaaagagtactccttccgtcccgaaataactcaacctaggatgggtaacgaatctggacgattgacccatcctaggttgagttattttgggacggagggaatacacactaatgagcttcatggtttttgtctacccctagtttccaaaactaaaaaaacgggtgctcccctacatgtgccgattctaaattggaactggcaccaatggtcgttaacagtgttgcctgaacagtcattggttgtgaattcgacaccaaggactgattccgaaccgaaatcaaagtgcttttctgtagcagtatgcttcaacgtgatcgaccacactgaaatggagctttgggtggttgccagcttaccgggtagcttcagccttcagctgtgcctttctggacaaataatttcagacccaagtcatccgaatgccgagtgagaacgcacgctgacatatcttagggacaaattcgagttgggttcagacatattattagccaactacctaccataatatacaacttcacacaagtagtcaaaattgtaagactcttggagactaggagttacggggaccgatgatactagattacgtactgttgcaaaaggttgtcaagtcagacatgcctcgtgtcgattcagaccatgatggatcgttttttttggaggtcagggatgaaattaaggtcgtttttagatggggaaaatttttaatgtttggttgttatatgagatatacggacacacatttaaaatattaaacgtagtttaataataaaataaattatagatcctctcgaaaatctgcgagataaatttattaagcctaattaatccatcattagcaaatatttattgtagcaccatattatcaaatcatgacgcaattaggcttaaaagattcgtctctcaatttagacgcaaactgtgtaattgtttttttttcatatttaataatttatgcatatgccaaatatttgatgtgatgggtgaaaattttttgttttggaaactaaatagggcctaagtgtgtgttgagagggaaaatcccaggcgacaatcttttctcccccaagaagtcttctacttctacctgatgcacatcgtcttctctcccttgattgctctctatctttgactgaaactctgaaagaacgttaggtggacaatgatggaagaagaaaccagcgaggcaatctaacaaaccaataattaacgttaccaatatctatagcaaattgcgcattcaaaagtaatttgaaaggagataccgagttaggcaggtatcagcttatacctttcccttgtataaatgctgcgtgtctcactagctagagcaggcaacataggagtattagacaagaagcacacaacatgtgtgacagacaaagaagacctgtgcctcctttgggaactctccgatcctcgtggctcctaatcttggttgtccactcctgtctttcgagctttgcagtacaccctgctgctgctgctgcttcttcttcttctccatccaacaccgatttccaaaccctcctttgcctgaagctccatctctccaacgaccccggtggcttcctaggctcatggaagcagaacgattccatcggtttctgccgctggcccggtgtcacttgcagcaagacgaacacatctcgtgtcgttgcgctagacctcggatcatctggcctcaatggccaaataccaccatgcatcaccaacctcactctcctcgcaaggatccacttccctgacaaccagctcagtggccagattccacctgaacttgggcagctgagcaggttgggctaccttaacctcagttccaacagccttagtggttcgatcccaaacacgctgtcttccacttaccttgaggtgattgatctcgagagcaacaagctcactggaggtatccctggagagctcgggatgctccgcaatctttcggttctgaatcttgccggtaacagtttgacaggcaacattcccatttcgctcggaagcagcacgtcccttgtttctgtagtcctcgcaaacaatacactcacagggcctattccatccgtgcttgccaactgttcatcgcttcaggtgttgaacttggtatcaaacaacctcggtggaggcattcctccagccctgttcaacagcacatcgcttcgaagattaaatcttgggtggaacaactttactgggtccataccagatgtttcaaatgtcgactcgccattgcagtatcttaccttgtcggtgaatggtctgacaggcaccataccttcatctctgggcaacttttcttcccttcgcttgctgtatcttgcagctaaccatttccagggcagcatcccagtaagtataagtaaattgccaaacttgcaagagcttgatatatcttacaactatttgccaggtactgtcccaccctccatattcaacatttcttcactcacttaccttagtttagcagtcaatgatttcactaacacccttccatttggcatcgggtacacccttccaaacatccaaacattgattttgcagcaaggcaactttcaaggcaaaatccctgcttctctagccaacgcaaccaatcttgagtccattaacctgggggctaatgcattcaatggtattatcccttcttttgggtccctttataaattaaaacaactaattctggctagtaatcagctggaagctggagattggtctttcatgtcctcattggcaaattgcacacggttggaggtattgtcgttggcaacaaataaattgcaggggagtttgccgagttcaattggtagtcttgcaaacaccctaggggctttgtggctgcacgcaaatgagatatctggtcccataccaccagagacagggagtctcacaaaccttgtgtggcttagaatggagcagaattatattgttggaaatgtcccgggcacaataggtaatcttgcaaacctgaattccctagacttatcacgaaacaaactttcaggacagattccacattcaataggcaaactcggtcaactgaacgagctctttttgcaagacaataatttcagtggacccattcctagtgcattaggtgattgcaaaaaattagtcaatctcaacctttcatgtaacaccttgaatgggagcataccaaaagagcttttctcgctttattccctaacaacaggtttggatttgtcccacaaccagctgtctgcacagattccacaggaggttggtagcttgatcaatataggcctactaaatttttccaacaaccatatttctgggaaaattccaactactctaggtgcttgtgtccgcttagagtcccttcacctcgagggtaactttcttgatggcacaattcctgactctttcgtcaatttgaaaggtatttctgagattgatctctcccgaaacaacttgagtggggaaattccaaacttttttcaatccttcaattctttgaagcttctcaacttgtccttcaacaacctagaaggtcaaatgccagaaggggggatatttcaaaattctagtgaggtatttgtccaagggaacattatgttatgctctagctccccaatgttgcaattgccactttgcttagcatcatctagacaccggcacacttcccgcaatctaaagataattgggattagtgtggctcttgttttggtctctttgtcatgtgtagcatttattatcttgaagaggagtaagagatctaaacaatcagatcgccattcattcacggagatgaagaacttctcatatgctgacttagtcaaagcaacaaatggtttctcttcagacaacttgcttggctcagggacatatgggtcagtatataagggtatacttgactctgaagcaaatggaattgttgctatcaaagttttcaaccttgatgaacttggagcaccgaaaagctttgttgctgagtgcgaggcctttagaaacactcgtcatcgtaatcttgtgagggtgatttccgcatgctcgacatgggacaataaagggaatgatttcaaagctcttattattgaatatatggctaatggcaccctagagagctggatttattccgaaatgagagaaccgttgagtttagactccagagtaacaatagcagtggacatagctgcagcattggattatttacataaccgctgcatgccccctatagtccactgcgatttgaagcctagcaatgtgcttctagacaatgccatgggtgcccgtctcagtgactttgggttagcgaagttccttcccactcacaattccacaagtattactagctctacaagcttagggggaccaagaggctcaattggatatattgcaccaggtaaccacattttacatgatttgtctctcctcttgaacaggaaattattattttaataggtgcggtgtccaccagcaaattttcaacttttgggagtgttttccctccaaaagtcacttcgtgccgtgtcctaccgcaaaaaccgcgaagtcacagagtcttgtagcaaaatttaccctttttttttctttcatcctaagggctgtaatttttttctctactatatttaatgaaatagcacaatcttgtacggatttatttttaaaaaaaacttctgttatgtgcatagatgagctggtttttatcaagtctatggacttctcttgaaggggcatatatagtcaatggaaattccttcatttttgttgtcatctacaactgatgttcatttatcttcttataattgtttaaaatataagcacatatagacttaatttatttcataaataaagaaccacctcatacgatctagacatctatactagaaagttacatatcaaacatgattgagatgtcatgatggttctggttctcttgcataagggagagcagcatgcatcgcacttacgacacatggtaccagatgttgatgacaatatatagcatcaaaatatagatgaaggtgagccatggtggacaaacagtaaccagtcacacggagcactcccaaataccttatcaccctctcccagtggaggacttcgaggattatagttctggagacttgctctccgggtagccgatgcatactaacaggaaggataaagtagactactagcaactgtgtagcacagaggaggaggcaaaccctaggagagctaaggcccatactaaccagattttttgccatccatactaccacataatcgaaccgaataagttgtgcataacttatttgaaatttctgccaccctcacaatggagaatccaatgagtttgcaaacactgcattatgtagggaaacaaaactacaaaaaggaagctgtgtcggtgcaaatctccaagctaaacttgctcaaaacttgaacaatagactatgccttgaattgtaagttttctgcaagcaagtttcacgcaaagatttgactgatactaggccatcaatagcctacttctcagttagagcatataatttgtactccttggatttttaatgaatttcctatgggcttcactcaaaatttccatagattacgacaaacggttaagctcacataggtgtgttctttaaacaatgctctgtaggacaacatcttcgccaattaaagccagcaaaacccattatggcgtagccaacctaccttgcaactcatgagagtacatgcatattgatttagagaatatttaaaaagctactcttctcaagttaactaatgacttgttcttgccaagtcctaattcacaggatttatgatcacctaggttgggtttccaccatatatagtacaactcatatggcttttatacccatatcctttggtgtattgtcacattccgtgatagtccctttttgaagggatctaccattttctaatatttggatcttatcaaacattataactttggagtttctcaatgtcctaacagacttcaatcatctcttcatatatctagacaatttcatgttatccttgaaacgcttcaccttgtcaatgatagtatgattgtcataatttatgaggatagtcaacacaagttttttaaccacaagcggatccatcattagatcatgttgccagcctgcttccatagctaacctcgtcaaagtggtctgtttgcaagacctcaacaaaacagcatgcaccaccacctatatccactagtggcatttatctcatgaccattggagatccaattagaatcactatatccctccagtaccactgggtactggtacaatgaatccttgtgcgaaaatatatccactagtgagcacacggatgtgtttccctggttctctccacccctcattgctcaagtagctaaaagagcactcatcctttaaaggaggtttctctatcctagaagtagtaagatgatactaaaggtttacatgcatcccttcacttgagattgggtcttttatcattttttaggaattatttttcatatgggctaaggcttatactacaattccgacagttactgctagagtatatatcaaatttaagaaaagcgtaatcgtctgttttacttgctatatcggggaaagtattttcatctcccaaggatatcccctatttcttgtataccacctaaatagtttgtaacactgtgaaaatctagtgaagaaaaatcagtaaaattctgaactttttaaaacttttgcatcatgttgtgatctttgctaagttgtgtggaaactcacttttaaacaaaactatgcataattgaatcacgaaatccaccaagagacattataatttaattagagaacttaaaacaaagaatttggaaaaagataacacaaatttagagaaattaaataccaatttaatttctaatccaattatactacaaaagtgtgaccaagagcttaatctggcaacaaaaggtcatgaattaaagtacctatttaattctctattcctaatatactaatacaatacactcgagcaatatattaagaatacaaatatttatgaaaggtaagttaaaagtatttccaagtgcaacaaatatcatgcaattacaatgcaagaattatatttcactgtaatcagcatggaaggaggaccgggacttgtactattcttgactagacttacaacttttaatttaacttgggggttggggcatggatgggaatggataatgaatgatagaaccacataggatgacggtatgatccagtgacagaaatatggataaatgtgcctggaggtaaactgttccaagtgagacttggagaggtggccacaaccatcagtaaatggttaaacaagagaacataatgtagtgtttatttaaaagggctaggttataactttgtgaaaatatttataaaaaccggcttcgtccaaaaagaaccttgacctttcgtcaaccctatgtgcattaatcatattatagtgggggcttatgagtactctagtactcaccattgttattttcccctctttttagacataaaagcgtgagaagaggaaactctactggcatgattctgtacttaattagcacatgatcagaaggctgatcgagaactaggttgtgaccctagccatctgcctgtaggcatgtgagttggacctactactatttggtttcagctgttgtttgtctaataggacaagatcctatttgtcctagtaaaggtattaaactcctttggcttaaattcatctctatatatgttttgtattggttatcaatttgtatcagctgcttatctaggattggtacaagaaaacacatgaggttcccgatatccaaaatcgggagctgacatagtgatccaaaaattttaaaatagttgacaagatagattaatattacatacatcactatacaaactcaatttttaattttacaagttgtaacaaaaaaccaaatataactgtgaatttacattaactattttcagtttagtttgtattttattataacatgtagaagtgatatactccctctattacaaatagaagttgaaattgatgttatatgtgtgtgaactgatattactcagtatataatactgagttttaatctatctggtaaattctttaaaaaatgataaatatttttttagtaggcaaatatattaactggctttagaaaaaagcctagagaacaaagaagtgtcttacacagaaaaatgaaagtaaaaaaaaaagaaaggaaaacaacacagcaagtatcactacaagcacaggagggaccggccggaaagcctagcccccacacaaagggtacgtttaaagcgatgtgtaaagaatctgaaataatcgggagtcccggaccactataacccgtgtgcattgtatcagcagcagaagcctttgaaaaatcagccccatgcatgtgacggcagtgttggatggaatcttggcgcatgcacggcgtcggatggaaagagataacggtgggaaaaacaagaaaatgctagatgcacgcgcacaatgcaccaagaaatcctacccttccatcgatggccttgcccacggttacagccgaaatttatttatttttatttgagtacgattgacggaaattagtgaacaaacgagcaagagcatagtagtgaaaccaatattataaataactggggatagttttggttcgataaagcaaacacataaatagtactcccaccgttttagattataagacgttttgactttactcaaagtcaaactacttttaagtttaactaattttgtagaaaaaagtattaaaatggcaccacatgaagcattatatggaagaaaatgtaggtcactagtgtgttggtatgaaactggtgaaaataaattggtaggacctgaatttgttagaacaaaacaaagcactattgatataatcagagaaagactaaaaattgctcaaagtcgacagaagagctatgctgacgagcgaaggcgagaattggagtttaatgttggtgaattagtatatctgaaggtttcaccaaatcgtatgacaaaaagatttggaatacaaggaaaattaagtcctagatatattggacctttcaagattattggtagaaaaggagctgtggcttattagttgaaactgccagcaacactatctacagttcacaatatttttcatgtgtctcaacttcgtaaatgtctaaaagaacctgaagagaaaattaagcaggatcaagtgtagctgaaatctgatttgtcctatgatgagaggccaagtaaaattttagcagaagattggaaacaacttcgtaatagaactatcaaattctgtaaggtcaaatggaaaaatcattcagaaagagaggccacatgggagaaagaagagttgacgaagaattacccttatcttttcaggtataaatttcgtggtcgaaatttttttaaggggggtaggatgtaacgaccctaaaattttaatttgcttcgccgcactgttggcaacctagttatagtaaactcactgtgttgagctgaacgactagttgtgtcatgcgattggcttggatttttgcgttagaggatcgattcatatgcatatatcacagtagaaaacacaaattagacacataagtaaattctttatttcttcacatatacattatacagtgttgttgcatacatcaaacgcatctcatacattattcatctaaaatagaaataatgaaaattaaataaaaatgttggtgtgatctgtgaccacaccttattgctttaggagattttaaatataagatttaggcaaaagagaaaatttagagttgcttgatgtcacatattttgcaatcaaaccattttggggcacaaaattagtaacattagccatctcttagtagcttccaaaactatttatttcttaggtaaactgtgagtttttgggcaattgaaaatcagtccctaaactcaaagtaatctccatatttttaaagtctatggtactataatgcaaaagttacaaatatcatacttttcactagatttttatttaattgcaaatctgtgaaaaattatgctgagcctccaccgaataaaccatgcttaggtgtcaaacagggagaccaccagtaaaaccttagtaggtgagtcacctagtagtcaaccatgtccctgtgacaaaaaccatatcagtgtgaactccatcctgaccgagcctcgttttcctcgtagagaccaaaaccagtagcaagaagaaccaccataaccagagagttagagaagaaaagaaaaatacaagagggcaaaatcacccaacaacaggtggagcaggggctccagctccattaggaacaggtaccccagctgaaggaggagacgctgattcagtagaatcaaccaaccaatagaagctgcagtagaagcaaaagaggagttcaaccatatattttcacaaccactgaataatcaacaaagaagtaaactagtttaagatttaggaaagagtaaataatgtatatattatatttcctgatcacacgcattagcaatttcagatttttattcatgcaagcatcatccatggcatataatcatgattgaaatcagattatttacaaatcaagaatttagagaccatatcatttgcattacaaggttacagtggcacacatccaaccaatacttttattgtgagacattatgagaaatagaacagaaaaatagaagggggaaaagggatatggagttactggtgagggttgtggctgccgcagttgccattgaggtattggccgtctccacggcgaccaccacaggagttgagtaccaatagtcatgaaggacagcaatgctcagattacttgagagaggagaggtggtagtagaggatggaggtaaagcaggatatgagctcgtgggaactagggagaacaaatcactgcaggggcagctgctagggagatcgccggagtggggagtggcagccggcctgagggagagcgttggtgttgacggcactgtttggggatggcggcacaggagagaaggcgtgagggagagaaggagataacgagagaagaagatgagaagaaagaaagtgggctggttgggctttggttttgtgggctggactaaattgatcatatatagtctccaggaaattagatttagatttagaatagaatgtgagcaagtttatatagcatacaaattgatgattctaaatttttggcattagtgctaaaataaaatctgagcagagaaaaataaatttatataacagcacctgatcattatatttgccattcataatacacaattcatatgcattgcatgcggtaaattaagcgttcggaatatgtccttattcggacttcagtattttttttccgaagttcaagttcctgaggaatcattcatttcgactgaatctgagggtattcatggtgttttctatccaggcaagtccatctcttgatcatattgcttagttatttcaaatatttgcaacctatatatctctccccattgcatagaaaaccagaaatttatttttgaatgttaatattgtacatgtgaatctgtggatcagttctttggtgatcttgataattggcagtctgaacttagttgttgtgtggttcagctgtatatgcttaacatcataaggttaattaacaactgctgtaaggtatgcaagcgccgtagcgatcatgtcgaccatatgacctggaatgggacaggctggtttagtagttctttcttaatggctttatcctgcgggcttaaggacttccgcgaatcccgtgagcgtgggctagcgatgagggttgccgttgttgcggaatctgattagatgatgtggatcgccgttgttgcggaatccgatgattcgccgttgttgcagaaatcacccgcagagattattgccaaatggattgatgaaaagcttgtgaccttatccttgccggcatacaccatgaagtgtgcttaggcgctggcgtggtggctgtgtagcgcgggcgttaaaaggtttaaggcgtctatgggtatagcgacacacctctgcagagtgtatgaattgtgatatgtcactccctgtttcgggtagcaactgcgggctgcagga

SEQ ID NO: 12678 - DNA, 674 bp, Oryza sativa
gtatcttggagtttgttagagataatagtcgtgtccgacaaggacgtattttgtatctcgggtataaatatgacccgaacccatgtaatcaaacaacacacgttcaataacaatcttggcgcatcgccacccttttactttcgtttacttttgacgagttcttgctttcgggttgagctgcatcggtttcgatcttcaactagaggtaaaacttgttatggcggcatgcgttctcgggattactgtttccatctttatgatactctaatcttgtttatgtaattcgtcgagttatcatatatcctatctaatatctgacaatatcgttatttaaccttcaatcggctaacatctatcattgaaaggcagccgattaggttaaataccgatgttgatttagattatatatgatatccaccatcctatgaaacatccaatggcttgattgtctagatattgtccttcttttcatacttatagctacatcagttgagtttgatcttatgagtcgtgattagaatctcaatctctagcctgcttttggttgccgaataaggtttcatcggggtttcagccgatttaactactctatatcttatatgcttcattgacacgttaaatccgcccttatgttaagatcatgtcgcatttagatatatcaatatggagtagta

SEQ ID NO: 12679 - DNA, 1153 bp, Oryza sativa
agaaccacacggcgtcttggctcgtcgagccctttccccttctttgctttgctagacatgtccttcacgtagaaaacatacgttacatcattggctaggacgaatggttcatctgagtgtcctaccttgttaaggtcaaccgttgtcatcccattgtcatcaatcgttacgcctccaccagtcagcctaacccattggaaccgaaacagagggatcttcaggggaccataatctagttcccatatgttatcgatgacactgtaatacgtgctagttgtaccatcgtatctcatggcatcgatacgaacactcttctggttcatgctctttctgtcttgggctcttgtgaaaaatatatacccattgatttcatatccttgaaatgtcgagatcgagcaagatggtcccctcgccgagaaggctagttgtcggtcaatcatcccgttacccacgagatgttgttgcagccaagtggggaaagtataaatgtgatggcgtgtaatccaggcatcggacatgctgatgttttttgagtgaacaatcacccggtgctcctcgacgtaaggagctaccaacaaagattattgcaaaaccgtgaaatgtgctttacggaataaatcattgtctacattcattattgctttcctgccaagagtgtcctttccccgtactctcccctcatggattgattatggtaccccgattcgacgaaggtcttcaataaactcaacacagaactcaatgacctcctttgttccataccctttgcgatgcttgcttctggacgagaacggttacaaacgtacttctttagaacagccatgtacctctctaaaggaaacatgttgtgtaggtacacaggaccgagaatatcgatctctttcacaaggtgacatagaagatacgtcattacattgaagaatgacagtagaaaggtcatctcaaagttgataaggcattgcaacacgtcctcttgaaacggtgttgatggtcgttatataccaatgacgaccataaatataactaaaataaaggagatttagctatgcttgcaatgcatatttattttagaataatctacttccacttccacttgtagtattatttgtttctagggataaagcaaataaaatggacaagaaatgaggaaaac

SEQ ID NO: 12680 - DNA, 740 bp, Oryza sativa
gcggacctcagtctgccctacaacgcggtcctagggaggcccgcgttggtgaagttcatggcggcggtccactacgcctaccttcagatgaagatgccgggccccggtggccccatctctgtccatggcgacctcaaagtcacgctcgcttgtatggagcagcgcgcggaccacctcgccgacgcgtccaagcccgaaggtggcgacaagaggcttggcaccttccgtccccgccgccccgaggcagcggatgatcacatgcgacgaggtcccggtcaaggaggttgccctggggcgacggcccgtccaagaccacacgaatcggtggtcttctggacggcaaataggaagacgcgctcgtttccttcctgcgggcaaacgctgacgtcttcgcatggagaccggcggatatgcccggggtccccagggaggtgattgagcaccgtctcgccgtgcggccgggcgcaaggccggtccggcagaaagtgcggcggcaggccccggaacgtcaagccttcatccgcgaggaggtggcgcgacttctggaggccggattcatccgcgaggtcatccatccggagtggctggcgaacccggtggtcgttcccaaggcgaacggcaagcttcggatgtgcatcgactacaccgaccttaacaaggcatgtcctaaggacccttaccccctgcctcgcatagatcagattgtcgactccaccgcggggtgcgaccttttgtgtttt

SEQ ID NO: 12681 - DNA, 694 bp, Oryza sativa
  unsure (1)..(694): unsure at all n locations
tatgcagnagttcatacgcctcctccgcgcgttccgggcgctggagcggatcgacctctccgcctgcgcctacctcgacgacgccttcctcgccgtcgcgctctgcggcgcggatctcgacggggtgcgccgggtctggctcgcccgcgccagcggcgtcgggtggcgcggcctcaacgcgctcgtgggggggtgcccaaggctggaggccgactacctgtcgcactgcgtcggtgccggcgaccgcgaggccgccgcgctggccgcggtgacggggctgagggaattgagcctagagaagtgcctcggcgtgacggacatggggctcgccaaggtggtggtcgggtgcccgaggctggagaagctgagcctcacgtggtgccgcgagatctccgacatcgggattgatttgctctacaagaagtgacacgagctccggagcctcgacatctcctaccttaaggtatactatactcttaccatatgagctaatgaaaagtggtctttgctttatatgctggtaaggcctcttcttgttgataggctgattttagttagcactaggaatgatatgcgacagcacggagacaaataatgccgtgaagtgtgacttggatagttcgttgcgggctgattctgacatgagaaaatgacagtcatcggagcttgggcgtactgatagataactcctgtt

SEQ ID NO: 12682 - DNA, 635 bp, Oryza sativa
aataaataatggtgcctgactgacatcatgggtgtgaaacttgcaggagatgatacagtcgtttctgtcaaacttggcaaatatgaagtataccttgaaagtgcttagactagatggtcttgaagtctcatcatatgttcttccggccattggtggttgtaatagcttggtcgagattggccttagcaaatgcaatggcgtgacacatgaagcaatctcttctcttgtaactcaatgcagccacttaagggttattcttctcacatcctgtaacctccataccaacaatgcccttgattcaatacctcacatctgtaagatggttgaccatctccgttaggaatcttgttcttccataatccaaaagggcctgcaccagattgaaccctccggccccaatctaaaggagatagacctcactgactgtggagtgaatcatgcaggtttgtgtcacctcttgttgcttcatttgcacattttcattacaagccttctttttatttgagcaatatcatgtacaaccaatcacttgttttgcagcattgcagcacttggacaagtgctttgtacagcttgtactaaaattaggcctgtgctcaagtatttctcacaaaggtcttgctttaatcatgatg

SEQ ID NO: 12683 - DNA, 529 bp, Oryza sativa
ccacgaacggcagcacatccgcggcgcctaccggaggggtggttcagttcagtgagtcaaatccaagtcagatccaaagtaccggactcgaagcacacgctcgtttaccgcgcgtacctgggccggcgaggccgacggcggaggcggcggtgggcttggcgttgacgacgacgaggcggtactgcggcggctggccggcggcggcggcgaaaaagtggcgcaccgtacactgcagcgcgttgtaactgtgctcgctctcgttcacccctaccaccatagaaatactgccctccgccgccgacgacgcctggggcggtttctccgccatgtcctcctgtcgatcgctcacggaaacaagtcacgaagtgtgtgtacgcttcgcgaaccgtgtgctttctcctagtaagacggcagccattggctgacaggtgggcccgggggaggtgggtggggacgcggcatctccaataatggtggtggtagtaggtccgtgtgtgccacgtcacttcgtgggtgttcaggttcagtg

SEQ ID NO: 12684 - DNA, 726 bp, Oryza sativa
atgctggcttgtgggctcttgcccgatatgcactaaaccttaaacaggtaatttttctccagagttttagattattcccttgaaagttctaaagaaacaacaataatcttataaggttgttcttctgcagcttactatatcatactgccaagtcactggccctgggcctgtgtcacctgttaagctccctgaggtgcctccaggatgttaagatggtacacctctcatgggtctctatagaagggttcgagatggcactgagagcggcttgcgggaggctgaagaaactgaagatgctgagtgggctgaagtctgtgctgtctcctgagctgctccagatgctgcaggcctgcggctgccgcatccgttgggtcaacaagcctcttgtctacaaggactaaacctgctctcatatcatcatctgtgcagtgttaatatcctcggatcatacaccatggagcccttaccaagtctagcatgcttacaagccatgttagatacccgcaataatcgtcaattttcatacccaagatgtactgacgatggtgtctctgcattgctgcagtgccatccttatgtttggcaactcctagaccaatgttgtcatcttcagattaaaatccaacatttgcaaacatgaggcatcgaaacagttatgttctgagcaagtgatccttgtaccagactgcaatgaaatgctctacactttcaattggtatatgcaaa

SEQ ID NO: 12685 - DNA, 5201 bp, Oryza sativa
ggttttttttttttggcccaaaaaagaattttgctggcggccgatttaacaatgccgccagtgataattcattttcgctggcggccatcttaagccaaccgccagcgaaaatgcatatttgctagcggctggcttaagacgaccgccggcgaaaatgaattatcgctggcggtcgataaccgctagcgaaaatattgatcttcactggcctttgctctgtgccggctctaaattccgtcagcaaaaacccaaaatggccgccacgaaagatggttttcgttgtggtgggaggaaggagacggggcgctccgcgtcggccgacgccacccgccgggaggcagacggaaacaatcatgtcataactttcgcagtaaatcaccattatacgataattcatttaccgacgaaaacgtcacttacaacgtagtagtaactcaattactgcattatgcgaatcacctcatccagaaacaacaacacatttaccacaaactcggtcaccataggtactaaacgagtaacccatttattagctatggcaaacaatttaactacccagtaaatcgattaccaaaagcctggctgtgacaaggtatccctattaacccacagaaattgatttacctccagcggagtatcttcaacaactaccccgaattcaaatatatctaatctatatagtaacgaacgagctgagggcaaccgaacacggattttgcggactctgggcgcaacgtgcggtgctcggaacaatattgcacgcgcaagcgctaccattaacataactcctttcagcccgatctaactcttttaccactcatccgatcaccaattcaccactaccccttctccgtacatcgatagaaaaattagtacaatttcatgtacaaataattggggtctgtcttgaaccccacgacttattgaacctagactaaaaatgatctttagtcacggttggtaacaccaaccgggactaaagatcaaaaagtacctctcaacttttaaatagggactaaagatgctttttagtcctggtttttattaaaaccgagattattgtgaaatttgaccgaccgaccaaagatggtttctccaccagtgtgtgcttttgacacatgtataaatgttctatatagatatttgcaaaaaaaaaatattgatatttcaaaattttaaagttcaaggaagttacaaagacttgaaaaatctgaatacatgaaaacctaatctaaaacaacattttatttgttagtggagagtaagtcatagtgcatttctgtttcgtaggtatgactgcaaccaaccgtccgaatgggattctgttgtataacatccccttttgaaatacatcaactccataccaagttcacataaaatactgatttttttaaaagaaaattcaaactttttaaattttatttttaaaggaagactatctcaaaagagacctaggatgtagaagatcataacatgagcgattcggcagattctcattttcaaactagaaccaggtttaggaataaaatttgggagagtatattaaaaactaaaagttactaaaaaggttttttaaaaaaatctaaaattccatcaaatttcagatgggccggattactcgtgggcccacatgtcagccacacgccacctcgcacgtgcgtcacgtgacgggctcctcggcccattacctcgcgtaccctcgcacccgtctcccgcagacagatccgcctcgattcttcgccgccgcgacgagctccctccatggcgccgccgcccgccgccgcgacctcctcgtcgtcctcctacaccgacacctcgggctcctcctcggactcgtcctcgtcctcggggagcgaccgacgccgacgccgcgcccgccaccgcagcggccaccggaaggatgccgcggcggcggcggcgtcctcgtcgtcggcgctgaaggcgcgcaaggaccggaggtcacgccacaagcggcgccggagggagcggcggcggtccccgtccgacgacgacagctacaggcgaggctctccccctcctcctcctcctcctcatccttcctttctaggtttcttgtgctagggttaggcccagatcgatctcgtgatctgtgaggtaggggatacggcgatgttggtggtggattacatccagatcaacggtttgacgggattcgatgggtggattagcatcggtgaatgaattttgctcgttagctcctctgatagttcatcttgacccatgattgacgctacatcaggagtggtattaaggggataacgaattagttgcacaaggacgtgaagaattttcggttgttttacaactaacaaaggatttatttgttcagtttggtttggtcgtgccttacttgagcaacgagagccctaaccgtgagaaaaattttaggatttcacttcaacttgatacttcatccgtttcataatgtaagactttctagcattgtccatattcatgtagatgctaatgaatctagacatatatgtgtgcctagattcattagcatatgtatgaatgtggacaatgctagaaagtcttacattatgaaatggagggagtagtaatgagcactgaatgctagctcgaatctacatggtttggagaatttctgtgatgtactttttcaatgtgtaacaatcgcaacagtagtaggacaaagcctcattccttcctagtttaatagtcagtgatcggttctatcagcagtaggacaaggatttcttagatatgatttgagctcactattgaagatgagtgttcgcatctccatttaaaattccttttcagtcagttaaatattctgtaagcctgagagggtggcaatccatggcatttaccggagctatgatgctttgttcttttgaattcaatttatctgtgattaggagctatcatggcatcaagtttaggcagctaaagcatagttcagaatctaggtaccagggaaattttgaaacaaaaaatgccatagtcttgcattacattgttacggcttgaatcattcaattggatgacattgatcggcatagcaacaagtttttccctagttttagccttcaagctgtcttggctttctctgctacactgaaaaaaatagagatattttgcttcttgcgaaacttgtattcctgtttgctttatgccaccactgttattttgaagtttctggtgctttttgtagtagctcaagctcttacgacagtgaacatgagggcaaatcatgcaagcacaagaagagcagatcatcaagaaggtactgccccatcaatgcattcatatttgatttctcatttagattttttctccatgcgtcgaatatgtggcctcattgtatttacttacctgacagtctagggagagggagcgaagcaaggataggcattctaaacgagacaagagcaaacataaagaggtaaaaatcctatttattcagaaaatacctttttcttggtttaacttttcagtgaattgaatctgtgttgcatgtaataatcactctctagaaatcagcaagtgttggttgcatacttgcgtttgattgctgttacagtgccatgctatatctattaatagaaatctacagggtcatgtcttatgaagtagatgtgtagacttaaaatatatgtggtttacatttaaatacaagaggtccttatatatcttgctgcctgtttctgggttggctctttgacattggagctgggattcgtgaacgggtgacaacatggtggattggcttgctggttggcttgttggttgattggttggttttgttctcttcaatgcgggagctctacacagaagaaagatagtgaacgtactagtggccctgtgcagctctccaaggtatattagatacttggctttacatttttcttttctatttgttttatttaacatatgaaacattctttattctgtaaatcagtttcttggacgtgacaaggatgaaggtgttcaaaggagtgcaatctctggtaaaaaggtgagaatagtctcttgacctcttcaatgtacaccttttgaattgtacaatagagggggggaggggggggtgcctgttgaaataaaaaatcttctgatcaaagtaaggttatgaaatatgaacaattttacagtatccaaactgttccatcggttgttaaattcaataaaacagaatgggctacctcgcatatgccccccctcataacaaattattttaggaaagcaaaagatttgatgcatttgcattgacagataatgatgaaacttgagaaatccaaggaagacaagcaggcagagagcaagcgcaatgaattgttgaagtttctgaatgcaagttatgattgacagtttgttggaagtgctgtcatttgctgccttttggatttgtcttgatactaccgcttagtccaccagtgctgttggttatatttacaagttttttgttccctgttattctagttatggcatgaccgtctgtgttcatgccagcacttagatagttgtcgcatcaccgttgtcactaaaaactattacatttgatcctgggctgataatgttttcaattttcatgttattactagcatatgcatttgagtgtttcccgatattttttactcaagtgtaaatttctccctttgctgtttctgtatggttaagctttttttcactagggattagctgctcgtttagctgtttactgataggaaagacttccaattggtcttctcacatgaaatcgcactcgtttagattcatgaaaattattagtcgttgaaattatggctgagtggtaaacacggtctatttgagttgttcaacgtatggctcgtatctctcgatgacctttttgcaacagggcaccttcaaatattgacaacttggcattgagggtgcggttgactacatcaaagtccagacttgtaggccttctggaatcataccaaacattgcaaagagcatataattccgcagaaaatttcagatcattttgaaaccttcgagtcgatcagttcaaccatatttttttaaaaaaaaaaatcgcaaagaaacgattatacgatcgcttgccattggtagtctggtagagaccctcatcacttgagtttgtgccgctgattatggctgacaatttcacttgcgtttcttcttgttcttttagggagggtgtttttttttttggggggggggggggg

SEQ ID NO: 12686 - DNA, 2569 bp, Oryza sativa
cggtgctaacaatttcttgtctgtttctggtaaataataaatatatttgtttgcactgaacaacacaggtgatgaacaattttagcaaagaattattttacatgctttgccactcttgtccagacttgtaggcaatagcctataagtactacctttgttaaaaaatataagagattttgaccatataattatgtgggtactacatagtttagctacatctagcatttgttagagtacatgatgaacaaactggccgtgattttcttttattttctttaaattctgtagccagaaaccatgtaataaatctccctgaaaaaagagatatcatcataatttagaaaaagaatatagtcacgggaaacgggatagtgtacaaactcatgtctgaatctacacaagaatttcattttcagtgctgaagaatgatggggtgcgtgtatgcgtgtggctaatcccagaaaagtacagaaacttattgtagggttattacagatttacatgaaaaatagctgcttttatcagatgatgataacatcagataaaatgggtagagcttatcaaaagaaaaatgtgttgactatggcagcaggcagctacaattgagcagccaggatctcattccatgtgtctggaacaccaggaaggcaccagtgcaagcaatcctggacccctactctacctctgatgctgtacctggatatatgcccttcatccctcagccgcgaaatcgcggtgatatgcaagagcttgattgcggtgcctctcaccgcttcctcggcttcggcatcgtcagaacgattccgaaacaccgaattccccttggataaagggtttttgttgtcacatgttcctccagtgttccactcaccattgaagaaatgcctgggtgacaatgacctgtagaagaccttagatgggggtaccttggaagctcatcatccagccacctgacaacattgtggatggtgaagttcttcgccttccagatgacggcgatatcccggtcatggctcggtgccccggagacgtacatttgccaccggttcgccttcatcttcccccggttccagtggtgcccggtgttcagaattatcacatgaaacctgtggaggttcttctgaagaaatgcaggagggcggtctaggtgcattgcatagccggttgcctgatcagacctcctgagaggctccagatcacagagcgttgctgaccagtagtagaggatggtggtgttggttcttcggaaccggtatgcccaacctttcggtctcttagcgtggcgcgcaacgacaaggctgtagcgtttaccgacatcttcgacatgcgagtgatcatccccacctgtgagcatgcacatcatggactggaacatctgcctccccaaggagtcacctacaaaagcaatggttttgtcctgcatcctgaggcatgttaggattagcatgacctgaaagacagagaaaaggatgcagaagaagaagaatgtgttgattaactgtttcttgcagaatgtagacttaccttttcaagaactgggaggcttggaattctggcatgtcacagccttcaggctgccatctgaatttctcataagcgaaatcctttcgttgtgtcaatctgcaagcccagctatcagagagccattttttgcagctgagaccagaatataatggtctgctgtcatcaggaacccatcttccattcctgtagtcacattctgctagacagatgaagaaagcatcagaagaaacagcattgcattagagctgcagaaacttctgactagtaaccggttttgctaggcaaatctgtgagttgagtaggatttaaaggaacattgtcctctttgagcaagtttataccaatttagtaaaaaaaattatcttatttacatttttaaggggatatttctataacagacattatattggatcataatcagagagatgttggccatgacctttcttctcaggaggtgatgcttcccttttaccagtgacgttttctgcttcatgaactacagactgaggtggagatgcagcagtagcttcccttcctacttcatctactaactgcactaatggatccaagctagaaaaaatttcttccttggagatatcatgatctatatacttggattgaactgaagaaatttacagaaaaatgtcagtgcaaagaacaacacatagaaaaaaactcaattagagaatggatatcagctgttgagcttgcaaaatgagaggacctggatggctcaaagccaatggctctgatcggaggagctcgccgcgatttcgcagcgatcccttctcccatttccatgtcaggagcaccacaaggagggcaagacagacaagcttgagctgcttgaacctcagaccattcagattcaccaatctcatccctttactgtgctctgaagcaaacccctgttctttttcaggactgaattgtgctcacaagacatcaactgcagataaaatagaggttctctgaattctgttggtcagccaatcaggcagctgcatcatacaagaagaatgtagacaataagtaaaaaaaggtg

SEQ ID NO: 12687 - DNA, 1757 bp, Oryza sativa
agtaatggcatgcgtagaaggtaggaggcggtggtggcggcggcggcggcaaggtcgccggacgccggcggaggcaaggtcgcctgcttgcgccgccgcggcggaggttgtgggagtgggagggccgagggaggtgttagaaactccgaactgagagtgatgaagatccaatggttgagattcggagatgcctctttagcccaccgacggctgagatcatactaactttgtttttcttttttccttttctaggtgacattcttcgggtgtgtttaagaggagcaaaaagaaaaaaaaagattaagaagaaacaagataaactattgatgcatgattatttgagtattaattattttaaatttaaaaaattaattaatataatttttaaaaacaacttttttataaaaaaaaatatagaaaaaataccatttaatactttgaaaagcatgggtatagaaaaccagctacttttctcccgactgcgcttgtctcaaagacaacctcgagttgtctgagcatctgattgattgcttcctgactctgaaatacactactccctccgtgctaaaaatagtcaacttaggagaggaagtgaccactcttattcgttgtataaggaggagtcacatcttcacctaggatttttttttttaacagagggagtaattcagacatcttgcacatcgtctgagaaaatccaagtactaaaatggctaactcatcaggcatttctaaattaattattctattgcaatatgcagattgcagaataaggtggtcgctctatgtcacgatttattcacacacacacacgaactaatacgcaatttagaaataaaattagaactcgaaaacatgtagaaatggcactagatcttcttgatgacgagtgtgattccgtttttcagctatgcgtgttatgcttgggcctcttcacgatcatcacggtcaagtgcgcgtgatggctgcagtagtcgctcacgctcccaagaacagccctgcaaatcaaaccgatttgatcaaatttcaggcaaattcaaaatccagaagagaataaatcgagtgacggatgaacgtaacagctgatcctacaaaatttctgcagattcttacaacaaattccatttcaatgatcacactaattatcaactttggtttttcccgtaactgcttattgcaaattaatatttttaggtaataaaaatagtaacttctaattgattaatttaccttttccatgccccatagccatggctgcccacaaccagcatatctgcatgatgcctttcaactgcctcacagaggatgttcctcgcgtctccctctaacacctcatagctcgcatcgatcacctaatcgatgaaaattggagattcttcgagggttgatcaatgcttgattataggagatatttttttctgctgagtttggattcaacaagcgaaggattattatatcacctgggagcacatctcctttgccttctcaattactctggcggcaccgcgcttcagatccaattctaaagtcggcaacagctccgtcgtacctatatttattacaagtcctcacgtgagtacgatccccgattctataatcaatacattcataatgtctaagagcgtgcatccaaggttacctagaccggcaatgccgatgacggccgatgcggggggcttagaggtgagcaagacgaggtggtactgttgcggctggcccagggcgaaaaaaagtttgagcgtgcactcccgcgcgta

SEQ ID NO: 12688 - DNA, 2747 bp, Oryza sativa
agttggcattcaatgaagtatatttctccacctgaaacaagcgagatggttgtcagaaaagagaatgtaatacatatacattcagataattgtcagaagagagaatgtaatacatacacattcagatattaatacttaagatgtcaataccaacatgataaaagaaaaatagcagagcagtaattcttaatccaaagatcgtttctcaggggagaataactgtacattatattgcctgtctgtctgatcatgctgaattccagttttagatgtgtgcatgtagcactagaaagaaagaggtgtatgtcccacataaactgcttgaagtggcaccgtaatgagtataaatgggttacttggggctggtaattgtaggttttcacttcaaagcacttcaccagaagtctccgcatgaacagcttccattgttaaaatggtgaaatctgtagacatctcgtaatacaatttgtcttcccatgacgtcggaagtaaatttcatccaagtgtggcaatcgctacatacacgaagatttttaatgacttgaaggggcatacagggaggcaaactcatcaacccaaaagtcacagctaacttctcgctgtgcacaagatcagtaggatctctcccttcttgctctttatcatggaagagatgatatttctcttgcttgtatcctactttggctaccctatcatttataacagccaaaaaattgtatatctgctcagccaaggcgtgtaatctgtcaccaacaaagaatgcatgaaccacattctttacttcaatccaactccgggcatggtcctttctgactcctctgtctctcatcatctttctgacctgatccatatttgaccacttctcggtaacagcatatgcatttgagagaagaacatatgatgcagaatcatgaggctccaattccaatagatgtttggctgcaaactctcaaacttctatgttcttgtgtactaaacaggcgctgagaagggttctccaaaccatagcatcagcagcaattggcatttcctcaataaatttctttgcacggtcaagttgcccagctcgtccaaagatatcgataacacaagcataatgatcaggccttggacgaatttcatactcatcagacattgatttgaagtaactaaggacttccttcaccaatcccacatgactgctagcagctaaaacacctatgaatgtaacatcatttggtttaataccttctttcttcatttgatcaaataaatccaaagcctccaagccacgtccatgctgtgaacagcttgtgataatagtattccatgacacctcatttctctcagacatttcagaaaattccatcttggcatcctcaaagctaccacacttcccgtacaaggaaatcagagcatttccaacttcagttttgaaggaatgacctgttttaataactctggcatgtatttgttttccttgttttatttctgcaaggttagctgaagcactaagagctgatacaaatgtgaacacattatgcttgacacctgattgatccatacgcataaataccttgagagcttcttcatgtaggccactttgtgcaaaaccagataccaggccgttccatgttatctcatctttatgttcaatttcctcgaatgaagagaaagcttctctgattcttccgcatcgtgcataaaggtttaccaatgcattccaaattgaaacatctcctgaataaccagacacataaatccgagcatgaatctgcaagccttgcctcattgcattgattccagcgcagccacttatagcacttgctagtcctatgttatctggccaaattccacatttctgcatctctttaaaagctgcaagagcgtccttacaacactcatgttgcacatatccagcaatcatggaagtccaggaaaccacgtctttctctttaagcatttcaagaacacgtcttgccttttcaagccacccatatttggaatacatatctatcaatacaccactaacatacatatcagactcgaagccagtttttacacttaatgaatggatctgctctccaaggtcaatttctctagtgcaagtgcaagtccttaaaatgcatgggtacgtgaattggttagggcgtatacctgcagcctgcatttgacagaatagctcaaaagactttgctagatcattgatctgcccaaatgccacaagcatcaggttccagagtactacgttagtcctatcactcgaattgaagatcacaagggcagtttcaacatcaccacatttcacatagaggtcaaggagtgaaccttccattatgtaatccgaagagatgcctgctttaaacagataggaatggagttgcgtccccttttgaagatcaccaagcgacgcacaagctgcaagcagactagaaatggtcacacaatcagggcttaaccctgagaactgcatctcctcaaatatctctaaagcatgctccccatgtccacactgagcatgtcctgagatcaacgtattgaatgttactgtgtcacggtgtggcatgtcgcaaaatactctctctgccaatctgaatgatccgcaccgcaagtacagcgtgataacagcattccccacaaagatttcagagcagaatccgtgcttgtaaccttgggcatgaatcaaccgtccttgcgcaaagagctccgctttagtgcacgaactcaggacgctagacagaacataaggtgtaggaacaaccccagct

SEQ ID NO: 12689 - DNA, 1438 bp, Oryza sativa
tcatgctgaagctgactagaagtgtcaatacaatgtcaatttattcacacagatacgtgcacaatttggtggtagatatatacatgaatgatactgttcagtccaggctgggccctccgctcatggactcagtgattgagcttcggcttttttactatcatcgcggtgcagtgcgcatgatgagaacagtagtcactcacgcttccaagaacagctctgcagggaagttcaggcatgccagtaagaccaatgtaggtgaataacatgaagtagggaacggaaaaagatgattgggagtaaagttgatgcatcagccagtaatgttgcatgagttcataagattagctttggttactgtcttccatgaaagaccaaacaaaattaagttgcaggcagcacgattggtcatttgtaggtcgatacaatgaaacaacaatgcattgtaatctgcctgttctaaaaaaaatctagtctagtccaggtcataataaatcgtgttaatccacttttgaagttatttctttccggtaagaccaatatcagttttctggttctatttttgacaagtgtaataaatcatgaaaagcaggaggattcacagctacggggccaagccgccaagtgaacttcatgacgaatgatggccataaaacatgtatagcgagagaaaaatgatgtactctattcgaatatacaaagaggctacaccaaagtatcagaagagcattatgttgtttatggaaattcatcaactcataatctggtacagcttctactatagcaacagataagcttttaatttaaatcaatgtccactgcttgcgcacgtgttactctatcaaatgcctagtcagacaccattttatagattctcctctttttttttcacagttctttttttcgaaacattttttttttcagagatgaagaagaggcagcagttttcaacaaattgaagaaattctttgtgggaaacaggggtcagaagaacaaaagtaggaaatggcaataccgtttaattgctccatagccatggcttccgacaaccaacatctccgcctgatgcctctcaacagactcacaaagaacattcctggcatccccttccagcacttcaaacagagcatcactcacctgcagcaaactctcatttgtatcatgatctaaatcatcaaaaatgtatactcataactatgataatacacactaataaaataaacaaaagacatagacaaatgaatgagttaagtcatggtttgattccaacagctggcaatctccctgttcttcagccaagcccagctgagctgatctcaattagctagctttttttagggcttccttaatttagagcaagtgtgacgtcttgtatatagtaagctaggttgccagcttaacttgctagtaactactactcccccatttcatattataagtc

SEQ ID NO: 12690 - DNA, 2423 bp, Oryza sativa
ttgtaagtctttgatgttttcttgcatttacttgggagtgttatgattagttaggacttagcgttcgcgaaaaaaaaagttaggacttaggacgatattaaaaaccggtggacataagacgagagccacatcagaatttattaagaggagcatggcttgaaccccgggacggctagccgacaccttatggggctagtaggaaggccctgggcctttctcttaagacaatatttggctatcaagaattgacatccagtaacaacacctcaccgaactaccgaagtctagcacgatggaagaaaaataggtaggaataaagattcgacaacattgacgtccaagtaaaatttgacaaccagtagcattttctacagtattaaatataggtaggaaaatacattccacaacattgtcgtccatacatcacaagtactattgattactgtacctacattcttaatgtatgactctactacctacacccttaatgtatgatgctggttagttcaacatacaaaataattcggaaggagtaccataataaacttttcttgttcatagttggcagttgttttggcagcaaacacaaagaaactgtaaaataatcggctaatcttagattattgattcatttccagaatagaggataaactacagactactaacaagggtgatatataatgataagagagaagaataattcgtataaactgcatgttgttcatcacaatttcaacatagttttgttgctggttgccctgtcgcaaccttttttgatacttcagcactgaagcagtgacataccctacagaaaagaaagactagcagtctacctcttaggagaaactctatgatctgaacatactatcttctttttgcctcttgatactaagccttgctactacaggttacacctggcatttaggctatccaatgagttataattaactcatactagtagaggcttttttcccccttgtacaattcgactccgttattttttgccatacatacagttcagaatttgaagtgatcagagaagaactccgttgcattttgcgaacttaccgtgggttcatctaaagatcatgttgcttgcagaggaacatataggcgcacgacgatagttatcgcgatggtaactgcaactataagagcaagaatggccatagaatcaggcctacgagccatggtcaaaacagctcctcccattgcggtagctcctgctttggtcaggtcatgctcattcagctcaccgttggtgcaatcttgctctagcttcatccctgtctcattccatctaggattcacctgccctttcttcaccgttcgcttaagcagagatggcactgaggaatatgccagtgaattgaccggtttaacatattcttccttagaattctcttcctcatgttcaaactcatttttcttcatgactttttcttctgctagtttcacttctgctgtttctgccattggtatggtctctgtttcttctgcgagtttcacttctgctgtttcagccattgatgcagtctctgtttcttctgccagcttcagttctgctgtttcagccatggatgtggtatccgtttcttcggctggtttcacctgtaaagtttcagccactgttgaggtctctgtttcttctgccggcttcacttctgttgtttcagcaactggtgtggtctccgtttcctcttccagtttcacttctgtttgaaccattggtgtggtttctgtttcttctgccggtttcacttctgctgtttctgccatcttcacctgctctgagacttgttcttgatgcatcaccttctctgtagttggtgttgtctctgttgatgcagtatcttgatcaacacagttgttgttgtcatgttcctcaagggtgatgtcagggctgctgaagctaaaagtgttttccgcagaattttcttcaccttcattttcctagcaatcataattcagaagaaccagatagaataaataaggcccctataaacaaatagcacatggatgatcacaggaagcagatttccacaaatgttaaagagttgtagtaggaagacagtacatttacaattatctcattctcggcatcatttttgcctgaattatcatcatcctctgtcacattttctgtgtcctgaagcgaaaacaaaaatgaagttacagaacaagaagtgcaatagggctcctagaaaatggcatgctttctatagcaaaatgttttacatggttgcaacaacactcaccataacatgtgcagtgatctcagcgcagtccctctctgaattgtgattatatgtctcaacagcttcattaaccttagacccaaaattggcataaggaatatgaatttacagagcaaaagtgcaaaaggtccctagaaaatcaaacatgctgctcaaagctaaatg

SEQ ID NO: 12691 - DNA, 2911 bp, Oryza sativa
acgtgggccccggcccagaacgagccaaatgagcctgccgatttggaggagtgggccggagtggggcaatgggctgaatgggccgacctgctccggttgtcacttccgagctgcttgagcgtgtgcttggagtggtggtggtatgagctcatgacgatcgccgccggctatctccgggacccgcacaccgcattggcgacggcggccatcgtcatccagaccacgtcgttgttatacacaattccggtcaccctaagttcagccgtttcaacccgagtcgcgaatgagctaggggcgggccgaccgagatcggcccaagtctcattcgtagtagcaatgggaattgcgatgatgggctcgtgcgtagggctgacatggactacatttgggcgaggactatgggtccaagtgttcaccactgaccccacaatacagtcactcacaacaagcgtgctaccggttatcggattatgtgagcttgccaattgtccgcagacaaccggttgtggagtgctacgcggcagtgcgaggccggctgtcggggcggccatcaacctatactccttttacctcgtcggagcacctgtagccctagtgcttgcttttgggcttgatatgggctttctgggcctttgtcttgggcttctctcggcccaggtagtttgccttatatctgtgggctttgctacatttcaaaccgattgggaggcagaggctttggaggcctttcatttggttggtggtggagatgagaaatgtggtgatgacctgccatgtttggcccataaggtaaatgtatagattgtaaaaagttgcatggtttgtgtaatttgattttaaatcttttgcggtgttgcaggtaaaaattgtaaatttatgatcccagaaagatgactacgagaagtacgtttggatacacaaattatgtctaaaaatgtagtaaagcataatttatatattgactctccatatcctaaaatatagcaacttagtgtgagttcttatattttgggatgaagagagttataacctcagaaaataatttaatgcataaaaattagcaacattaatatcctaattttgtttattgaattattaaagaattataattgctagggaacatacaaaaattaaaaaaacccggtgcagcttctttaaattccttttcgccgggcaaacatggccggcgcaagcaccggccggtttcttgctgctcacaacctcgttcttcatcgccggcgatatgtctccggccggccatcgccggagcttgataggttcgccggccgtgcttgatgtcgatctgaaatgctagctagctagcatcctgatccgcgaacggggtattcatagtatgtacggcgacgcagcttgcatgattattgcatcgccgccaattcttgggccctatctctgttattcaatattgatcgatgctggggttcaatccaacgtgagcttgacgatgatgttttcggagaaggtatatgcggtcttggtttttactcacctaacagtcatttgtttgactgaccagtagcaaaagtttgtttttggataagttcaagtttggtttcccaccatgcaattttttactgtttttcatggtagttaattaagcgttgtgcattctctgaatcttactggccataatttgtacccaagttcttttacctgacggttgatcgaccatcaagaaaaatctacaccctgacaatggctactccgtccgtttcatattatctaagtcaaaactcttcaagttatagtatgaaaatacatctataacactaattattttcattataaattcaccactaaatatatttttatagtatattttttttgtatggaaaatgttgctctgtgtaacttaatcaaacttaaagaaatttgacttaagctgaattctaaacagcaattcgaaacgtctatttcctcattatccgtggacacgcttcctaaactcctatataaatgatgtatcataccagagttttctacatttaagttttttttaaattcaaataaattggtttttcgagtttgtaatatttaattcttgattaatagttataattgtgtcgttttatgtgtccccacaaattttgcccaaacaaccattgcgaacttagctttagctctagcccaaaatgtttataacatgaaccggagggtccggttcagtacgagtcagtcattcatgagattgattgtgtttggcatcagtctttactttgttcgtgttacaagtagaattggattgtattagtagcattttttgcctgtcttaagtaactgctacacccgctcgagatagaagacagggagaggatcaccacaacgttgtctgtaatagtctcagtcacaatctcctgctactgcgggacgatgttgatttgtatattgaatttaaacgtaacctatgtctagattcatcgttgtgaattataaattttatatgagggagtatgtctcatataataatactaattaattctatactagttcaatacattgcatttaataacttaagaaaataactcaagtcatacaaaaattagcacagtaaaattgtaaaaacccgctgagcaaacttggcctgcaccggcttcttgtctgtttgattaaggactaatattgccacacatttttaactaaggtagctaagtttagtcttgccacacttttgtggtaaataaaatgacaaactaagcttaggtaatgtttggcaaaaaaatagagtgtatgacatgtgggccaggtgtccaggtggttaagagttagacaaaaaaaaaagacctgtggtaagaaccaaacgctatctattaaaactgtggcttgccttagggtagatatggtaaatttagggcaggtttggtttgaggcctaaattaggcttaccaatatt

SEQ ID NO: 12692 - DNA, 688 bp, Oryza sativa
ccgtgaatctgatggttagttttgaacttgttgaacaaattggtgaccttcttgaagctcgtggcaagttcatgccccttgccctttatcatgaaggtgtcgatggcatcttcgatgtcgtaagacagctccctgacatcgctggcccagatcttcgccagcttatcaagtttatctgcaggcgtctcagccaccttgtggagggctgcggtcatacttgtcagctctttctcaagttcttcgatctctcccttgacacccttttgtagcttgtattcgcctaccagcagctccccaagcttggggagtagggtgttcattgcccctgtggcaacgttcatattgacctatctatcttcaagtgagctcttgctcgaaaatctggggttgaatgcctgcacgggtcacacagctgcacttaatcgatcaggaatgaccaagcaacacaaaaacatgggagaaaacatctggataagagaaaaagaactccatccatatctagcatgtcaaatcgaaactagaatactagattgagcaggcaacaaagtaacaaccgagtggctatctcacctaatcggtcgaagcaagctttgctactaattgttatcaaggcccacgctatcaccaatttcaccatgagtagcgtaagcgctggctgcagcgacctctcaacgctgcagtcctactc

SEQ ID NO: 12693 - DNA, 683 bp, Oryza sativa
tcatcacatccaataggtaaggaacgtccaggattaattgtctctgctccctccttttagctatttgaacatgaaatgttttctcgttttctttatctcaactttctcaaatttaagagaaatcaaatgtagtttataaacaaaatgcacacatacttcactcaataatattttgcacaattgtacatagcactgacaaatgagctagtgagtttaacttttccctgtgtttgggaataatgcatccactgagtcaaaagaaaaaaactaaactactactccaaaatcttcccgtaaatcagtgtgaagcttctattctttgcatataccaattgaaagtgtagagcatttcattgcagtctggtacaaggatcacttgctcagaacataactgtttcgatgcctcatgtttgcaaatgttggattttaatctgaagatgacaacattggtctaggagttgccaaacataaggatggcactgcagcaatgcagagacaccatcgtcagtacatcttgggtatgaaaattgacgattattgcgggtatctaacatggcttgtaagcatgctagacttggtaagggctccatggtgtatgatccgaggatattaacactgcacagatgatgatatgagagcaagtttagtccttgtagacaagaggcttgttgacccaacggatg

SEQ ID NO: 12694 - DNA, 694 bp, Oryza sativa
aattccagatcaatagaacttgcaatatcttgacgatgcatatgtgtaatagacatgaaatatttttcgcatgaatattaacacgcactgttttaagatatcaaacataaattatttaccttctcgatccaggatccaagaggtagaaggatatacagtgcatgctatatggtacatgccttcatgctgaagctgactagaagtgtcaatacaatgacaatttattcacacagatacgttcacaatttggtggtagatatatacatgaatgatactgttcagtccaggctggggccgccgctcatggactcagtgcttgtgcttcggcttttttactatcatcacggtgcagtgcgcatgatgagaacagtagtcactcacgcttccaagaacagctctgcagggaagttcaggcatgccagtaagaccaatgtaggtgaataacatgaagtagggaacggaaaaagatgattgggagtaaagttgatgcatcagccagtaatgttgcatgagttcataagattagcttttgttactgtcttccatgaaagaccaaacaaaattaagttgcaggcagcacgattggtcatttgtaggtcgatacaatgaaacaacaatgcattgtaatctgcctgttctaaaaaaaatctagtctagtccaggtcataataaatcgtgttaatccacttttgaa

SEQ ID NO: 12695 - DNA, 1772 bp, Oryza sativa
  unsure (1)..(1772): unsure at all n locations
tgaaatatgcctttttggatgatgaattatattatcaaacaattgatgaggtgttacttaaatgtttcagtgccaatcaagctaaggttgtgttgggagaggtgcatgaaggtatatgtggtactcatcaatcggctcataaaatgaagtggttgcttctgcgtgttggatatttttggccgacgatgttagaaggttgtttccgatactataagggttggcaagattgccagaaattagaagtaattcagagagcaccagcatcggctatgaatcctataattaagccatggtcattcagaggttggggaattgatatgatcggtcagatcaatacaccttcaagcaatggacataagtttatattggtcgcaacagattattttacanaatgggtggagggcagttcctttgaagaaggttgattctggagatgcgattcaacttgttaaagaatatattgtttaccgattcggtgttcctcaatatatcacaacagatcaggtatcaatctttctgtccgatgaagttgtccattttgtagacatcatgggcattaaattgttaaattcttcaccatactaagcgcaagctaatggacaggctgaagcatctaataagagtttgattaaattgatcaagaggaagatttctgatttccctcggcaatggcatacaaaattagctgaagcgttatcatcctatcggatggcatgtcatggatcgattcaagttccttctttacaaacttgtttatgggcaagaagcagttttaccatgggaaagtgtcaccggctcgaggattatagatttacaagattaattgacagccgatgattattacatcttatggtagatgaacggaagatctggtccattctagattacgtgctttggaaaaagtaacgagggataaggaacgagttgctctccattacaataagaaagttgtgcctaagtcattttcagaaggtgagctggtttggaaattgattctgctgataggaactcgtgacaacaaattcggcaagtggtctccgaattgggaaggaccgattcgagtatacaaggttgtgttgaagggagctgatatgttgcaagggcttgatggagaagtttttggacgagctctcaatgggaaatacttgaagaaatattatccaagtgtttggattaatgcgtgaccggctgagttttgtcgatacatgttagccgatgtgttaacatcgcctttagatggccgatataagttatatcacccttagcattgtttttatcatagttggttgtgttttaccaatgtatgatggccgatataagttatatcggtggtgtcgtgccgatatgtgatagccgatatttgtcatatcgcccttagcacaattataattttatcaatgtgtcctcagcatggcaaaattaagggggcatacatatatgtaaaatgacggatttcaaaagcaaaatatcaatgatgggtttctaaagcaaaatatcagaacaaactatgtttttgtctgcattacaagtattgcacagttggtttctaacttgatacaagcttgttaatagccgatatggcccattgcctaatttgttctatatcgttatggcttgggcatcggtagcatcggttccagggatcacttttaaggatttgctcagatctgacagatgcttgatggaattccttaactttgatctcggcttctttcctagctcagctaagagttctgctctacgagacttcagccgatcaatgtagatttgta

SEQ ID NO: 12696 - DNA, 739 bp, Oryza sativa
gtgcttatatttttcttgtacaaggttaaggcattatctattgtccaatgaatgcactgtcatatgcaaagccgatgtcgtcaagtgcatgttatcggctccaattttgaaaggaagggttggaaagtggatattttccttaacggtgatcgatcttcggatgagtcaccgaaggcggtcaaagggaaagctatagccgattttattgttgaacatcatgatgattcaatcggctcggttgaagttgtgccatggatttagttttttgatggatcagtatgcactcatggttgtggcatcggcttgattataatttcccctcggggggcaagttttgagtttgcttacactattaaaccttatgcaactaataatcaggctgagtatgaagcagttctcaaagggttgcagttactcaaggatgttgaagccgatgctattgagataatgggggattcttggctagtgatcagtcaattggcaggagaatatgagtgcaagaatgatacattaatggtttataatgagaaatgtcgagagctaatgaaggaatttcagctggttactttgaagcatgtatcgcgatagcagaatattgaagctaatgatttggcccaaggggcgtcgggatataagccgatgatcaaagatatcaaggttaaggttgctgcattaatagccgatgattggagatatgatgtatatcaatatttacagaatcaatctcaatcggcttctc

SEQ ID NO: 12697 - DNA, 654 bp, Oryza sativa
taatttgcgttttgtaacagttgaagatgtgagtgacttgtggctcaatgtgaaagaaagtttcgagcaacgcttaccagtgaagaaggcctgcctcaataacaaggcgaggaatcctgtttttgtggaaaacctaccagctgagtttatacagaccactgattcgaggctacgtagtcgatttccacaagatcaatacttggtttggttccgggaaccatatgcaactgttgttcttgtcagttgcgaggtactttcgtgtcctcatgcatgctgctctttctaattcttctcaagtaataatatcacttctcaaacggaccatgtggatgactttttgcattcatttctctctattgaaatctccaggatcttgatgagttcaagaccattcttaagcctcgcctcaaattgattgtgcaaaatgatgagagggaatggttcattgtatttgtgtctaaggcccatcctagcaatgaccaagcatctaagatggcaaagagagtatatgctatgcttgagagcgatttcaacactaaaaaaagagaaaggtatttgtttgccaattctgcataacagtattggtaatattcatatctttgactttgaaaaatgtaaatgttttggttgattcagttcaacatgctatttgcg

SEQ ID NO: 12698 - DNA, 645 bp, Oryza sativa
  unsure (1)..(645): unsure at all n locations
gtacagttcatcaccaccttgaaaggctttatcttcgtatttggaccagcctaaggaggggtggcttaaatgatttaggtttggagaatctccactcccttcggcatgcaaccatttattcaagcagcaaggctgttgttagagaggcacttaaggactatcctaatcaagcagcgctcgaaatacgatggtgatgaactaactcaggtacttagctgatttcttcccctaatcaacaaccttttttttcatgtactagccattatataatgctaggtccaccaagcctcccactcaacgtttaatatgatgtatctttatgaacgttatttttttctatctttgcttggcgtacagtaatgcatgatagcctatgtacgtctttgatgcagctgccgcgttattcattatcttaaaaaaaacccaaaaaactctttatgaactttagcatatcagcatgcaatcaacttcttactcctagttatacattctttttttcccctccccctatatcgntacgtaagagaattgttatattgagatgatttcttttatgccattgcagtcaagtgtcaactatgttacgtaatttgacatctcattggaaataatgcttatattaataaaaacaagatttggagggag

SEQ ID NO: 12699 - DNA, 975 bp, Oryza sativa
gcgggccaccccgtccacccatctcccgtgggattccgacgtcggaacccactctgcaccatgcgccggtgagcaccgccatggccgccgcttccggccggcgtcctcgccccttccatcttcctctctctctaaccccattcatcatgttcgctaggtggttccggagctcgtcccgttgccgtcatcgccctccgtcgctcgcgtcgtcaatcgccgtcggtgagacacctcctccccctcctctttctctcccgcgctgcttagccgccgcgccgccgcctagccgcttagctgccgccctctgcccccggccggtcgctgccggtcgccgccgctgcgtcgagccgcgtcgccgcgcgccatggtcgctgggccggtttgagccgtgcccgtgcgcgccggctgcgagccgcctccgccgtccgatctatcgggcggtagatcggggccatctaaccccaccgcccgtgtggctgccacgtggccgccgcgtgtgcgccacgtcagcgccacgtgtgcaccacgtggtgcactgcctctttcccggtccgtggacccagtccacctcggaccgccacccgagtcactgccatgtgggccccgcatgtcggcgccgccccctctctctccctaggaatttaattattgcgcaataaatcaattaaggatttttctgtttatagtaaaaacatagtgaatcttctaaaattcatatctaattcatccgagctccgtttaagcccattcaagtctcagtaaatcaagaaaaatgcatagaatccattaaaaatggttttgttctctgtttcagtagtcttatagcctgtttgtattgttaactttgtatgttgcttagattccggctctcttgtcgctccagtgtactttgaaatagtcgccgaggttcctcctgcaccagagcaaggcaagtcatgcttgtcacttaaacatgttgatcctatattgcaaatg

SEQ ID NO: 12700 - DNA, 1297 bp, Oryza sativa
atcacctggacactatggaatggtttgatattgtggaattggattcacaccttcccctctattcaaaacccccaaaaggttttaggctgggctcggggtgcatggttttgatagtagcacctcggccatataaggaccggtcttcgggcctctggtgcaaagcactaccgtacttccacatgtttagttggttaggcttagtttgtggctcagtctggttataacaaaagtacccgaatgagattgacgaagtcgggggtcgatgaacatctctaggacaaatgaaggctacacgagctgcggcccggtagtcgagatgtcatggcacagggccggtgtcctgctgctaggggctcagtcctgcctacctgtcccgggggttccggccgtaggtgggattgggtcggtactcttttctatggctaggatgggttggaaactatgtcacgtcttccgtctgtataccgtggtggtatgtggcacgtggctacacgtgaggaagatgtgtcttgtgggtaaagatgtacacctctgatcagagtataatctattcgaatagccgcgccctcggttatgggcaagccgagcaatgtacccaagttagtgttttaattcttaaaacctgcttaacaactaaaatgtgaaatggttggcctgggttggcttaggacgagctgggacccagggtcgggttgccagttcggtctgaatcatcataggccttgggttaaggcaggttcgtgtgggttcacggccttgattaataacattgtttagttctaggatcgtgtttacaaaatagctttgagcaactaaatgtcttttaatgctgtttactgcaactctaaccccttatgttataactcccttgtactcccttgcatttattatgcatttgtgggtgtgtcttgttgagtacggtggttgtactcagtcttgcttaattttcccaagcccagatgaggagttccctgaagatgaaggcttcggtgtctagctcgtgcctgccgtcaagtgcctgtggtcgtcgccctagtcttccgctgtttttcgttgtctttgagtgtgctgggccttcgttgcccatgtaataattatatttacgcttccgcttgttaaactctgaactgtatcaacttttggtgtaccttgcctcctgggacaaggaataatacacgcacgtcaggaacgcctgttgggtgatttccggtcgtgacaagttggtatcagagcctcccttgaccctaggacgagccgtagatcccaagccttagcaatattttcaaaaataaaaatc

SEQ ID NO: 12701 - DNA, 1369 bp, Oryza sativa
ccaccaccaccagacaccaaggccattctcacccaaatcctggcccagcaggccaacatgatgacggctttcctccaccacctccaaaatccgccacaacagaatgctccaccaccacccccacaacactttaaactcgccgagttcctccgcatccgtccacctaccttctctagctccaacaaccccgtggatgcgttggattggttgcatgccgtggggaaaaagctagacaccgtgcagtgcagcgatgaggagaaagtcgtcttcgccgcccaccgactgcaggggcccgcatctctatggtgggaccatttccaggctacgcagccagaggggcagcctattacttgggcccgcttcaccgccgccttccggaggacccatgtgcccgccgaagtcatggcccttaagaaaagggaattccgagagttgaagcaaggcaaccgctccgtgatggagtatttgcatgagtttaacaacctggcccggtacgccccggaggatgtacgggaagatgaggaaaagcaggagaagttcttggcaggaatggaccctgagctgtccgtgcgtctagtctccggtgactatccggatttccaacgtctggtggacaagagcatccgcttggaagccaagcacaaggaactagagtcgcacaagcgccgcttggcgaatttccgcaatcaacagggtgctaaccaaagggtccgctacaccaatccctatccagggggatcgtcctcgcagcagcaacagcagcaacaacctcgctccgcgccccgacctcaattcgtggtgcgcgtcccacagccgcagcaacagcagagtcaacaagggactcgtgcgacccgtcctcctatgccagccgtgcagcctggtcaaggccgcagggacgttcaaggtccgcagcgtctgtgcttcaactgcttcgagcccgggcactttgcggataaatgcccgaagccgaggcgccagcaaggccaaccgcctccccgctccaacaacggtggtaaggatgtcattcgggatcgtgtgaaccacgtgacggccgaggacgtgctgacaactccagacgtcatcgttggtacgttcctcattcattccatccctgctaccattttgttcgactctggagcttcccactcgtttatatcggtgccattcgtggggagaaatcagttgggggtagaaaggcttaggaacccttgctcatcaccacccctggaggggttatgacagcaaagtattatagtcctgccgtccctatagaaattcaggggattccttttccctcggatctgattcttctagacaccaagaacttggatgtgattcttgggatgaattggttggctcaattccaagg

SEQ ID NO: 12702 - DNA, 902 bp, Oryza sativa
taatctgtacatcatggagctgtttcatgactacaagatggctgataaccgttctgtagttgagcaggcccatgtaatacagaccatggctaagaaactcgagcaggcccatgtaatttgtggccgggtgcattattgcgaaacttcctccatcttggagaggttttggtactgcactcaaccacaagacacaggaatactccgttgaggggttgatagcgtctcttgatgttgaggagaaaactcgggaaaaagactctgcgtctaagggcgatggtgggcaatccagcgccaatgttgtgcacaaggcccagaacaagagcaaggggaaatacaaagctcagcagaccaccaacttgaagaagaagaagaacaacaatcctaatcaggatgagaggacttgctttgtgtgtggcctacctggtcatctggccaggaagtgtccacaacgcaaggggatgaaggcacttgcagggcagacttctaagtctgctaatgtgaccattggcaacactagagacggaagcgggtatgataatttaccttctggtttttcagttaatcagtctactaattggtggattgatataggggccaatgtacatgtttgtgctgacatctcattgttttcttcttatcaggtcgcacggggttccaccgtcctaatagggaatgggtcacatgcttctgttcatggtgttggcacggtagatctgaaatttacttcaggaaagatcgtgcagctaaagaacgtgcagcatatccctactatcgacaggaatcttggtagtggctcccgtctaactagagatggatttaagttggtttttgagtctaataaaatagtcctgtctaaacatggatatttaattggtaaatgttatgagtgcggaggcctgttc

SEQ ID NO: 12703 - DNA, 874 bp, Oryza sativa
agccactcggtccgcgagctgaaaaagctccgcggtagtctggggctctttggaagtcatcttttcgagcatgcggtggggccgcacgccccccctgaacgcgtagatcaccgcgtgtgcagggatgcatgggatagtgttgcggacttggcaaacccgctgattgtccgagcgaagcgactcatattcgccttgcttgactgcatgcaagccgcttctttgcctgggcgcggatatgtgccttggaagttcatggtgaactgtgggcacaaatcttcccaggagtggaccgacccgggtggcaggttcattagcccaacccgcgcctgtccttttagggccatgggaaagaagttcgccatgaccctgtcgtcacccccagcggccttaatcccgggcgtatagacctggagaaacttcggggggttgacgctccaatcgtacttctcggtgatggggggccggaaccttgggggccaacggacattccgaagactcgccacaaggctctacagccaacaccaccggtcccggggcacggagggctgatcttcacgtccatgtcgaggtgacactctggacgaggaggctccctccgttgcacggggagtacgccggctattacgccggcgcccgatgttgaggcgggcatccggctccccatgctgatcctcccgagtcgacggtgtagacgagggagtggcagccgaatgacgtgcagccgccgccgctcgccgcgccctccgccttgatgacacggagccggtggtagcagcgccggaggtcttggtggtggtggcggaccgtccaccagcacccaggcgctgctgtgccgtcatgaccaagttggccacgtcttccagccatcgttggg

SEQ ID NO: 12704 - DNA, 546 bp, Oryza sativa
tatgattctatatgggtagttgtggatcgattaaccaaggtagctcgatttattcctgtgaagaccacctatggagggaacaaactagccgagctctacttcgctaggatcgtgagtctccatggcgttcccaagaaaatcgtatctgataggggaagccaattcacctctcacttttggaagaagctccaaaaagagctgggtacccgattaaatttcagcaccgcatatcacccgcagacggatggacagaccgagcgtctaaatcagatcctagaagatatgcttcgcgcatgtgtcctaaatttcgggaagacctgggataagagtctcccctatgccgagttctcctacaataacagctaccaagccagcatacaaatggcaccttatgaagcgttgtatgggcgcaaatgccggacaccgctcttgtgggaccaagttggggaaagtcaagtgttcgggactgatatcctgagaaaagctgaagcgaaggtcagaaccattcgggataatctaaaggtggcacagtcccggcagaaaagt

SEQ ID NO: 12705 - DNA, 3197 bp, Oryza sativa
ttgctgatcctcgccatccagtaagtactattgcaaaatatttgtgcaaaacacacttggtggattctttttcaattaaacaacacacggcacttttatcatgggggaggaatgaactctgcagatttctaatacatatcaatgcctattagatatatagcattaaacataacatgctagtcttattgcttgcatcatgccccactgttattgaaatgttatctaccacaaatgtttgaaagcaatagcggtatatgcagttaagttccaaacgatttgctaggacccttgttgatctttcaccttgtcctgcaggctgaatcgaccagcgctaccaatgagtcagttttgaaggttgctcttgaccatggcaaagcttccggtgtgatcaagtcgcatgatcgcgttgttgtctgccagaaagtgggtgattcctcggttgtgaagatcattgagctggacgattagacgaccagcttgtgcttgttgatgatactacggcaagtcatggtttgccagattttgactaggccaaaaacgatgcttcttggctatatgtataattcctatataggctttccaatgagcagtttttcctatggtgtaatcataggatttgccttactatttgaaacaactacgttttagttatgtaagttatcagatttcaatgcatcatatcacttcgatgggcaaatggaataatgaaatcggtactgtaccctttggtcttttgatgttcgttccacctttgtcaatgtgctgatgtgatttgcgtgttccctagaaaaatgtgatcatgtgatatagcaagggttaagggacatgacatggttgaagatctcaatgctccaatcaaattcgcagatctaattttggttgaaatgtaatctcccttgctattcaggcatgttttccacacaagaacttgagagaaaataactgctaattttggttgcaatgtaatcttccttgctattcaggcatgttttccacacaagaacttaaacagaaaataactatgttaaaacagcaaaaacagataacctgttgtggtcggcgacttccaggtttactaacttattacaaagcaactggggtcagctagaatcatacacattccacatcatttgcagatctcatttgctgaaatgggctatgatgtctgaacaaacctgacgttgctgaaaaggtcacaacaaacagctgatttatatagcttgtaatcagctcaatacagcctcatctctccctcctctataccgattatttaagcttacaatctatacacgtttattactgcattgcatgcacccattggatttcgcagtttgtacacttcaatgtgctgtacttcagtccagtctaaacagaatgtgtagctaaaggaacattttggcttcccatactagtgctgttgccaagcactacgtaaaaaatggtgcaaaatgctacttgcacaaaagaatgatcattgaccaatacccttaaccttccagaagcagttgtgcaggagaatctttagcttccgatggtcctatcataagtagtcaagttttctcttaaaaggggcaatcccgttcccacgtcattgacaggttgcttgatggacaattgttgatttccttgctaatttaagcaacacgagagactgaaaactggggagggtcagaagatatctgattagcccacagatttgcaactttaacaaagtagtgatcggcatcccaaatgatgacctccattcctacatcaggtgaagaaaataattattagttggttgatagaagcatcccatagttgaaaagtcctttgcggggaagaggtaactgcaggataagtatttaccaggtacaagactagtgggcaagagggtaagtttacatgccatcttgtcactgggaaggaagctttgaagattgggcacctcaatgtcattaatattgatgatagactcgagaagaactttagcaacaggtgcatgtaagttcttgctgtcgacaaccattgtaagagccattcctaaaccactagtccatgaattaacgcagctgttccaacaaaccaacattttactcaacattccaggatctgcaagaacccaaggcttgaaagatagcatggatatatgtaagatctgtgcaactctgtagatctccccaagagcaataaagtaatgagcacctgtgcaaccaacagaaggcatgttagttgatcatctttctgcaagcaaatgattaccgaaaaaacaaattatacagctctgctcattattcagagtcccaccttgagaaattactgtttcgccaacatttgcatgacaagattcctgccaaatcatcgcaccatgctcaattcttgggcacaggacagaagcatactgtaccatgcactgacataatcacattgctcctctttggatgctatttccaaggtacgaaggattgacacgctgtgcttatagactttaacagctgaactcatgtcttccagtgcctacgttgagtatcatatcaagaaatttcaataacccaatcaagatcatgtcatgactcatggaaacaagggcagaaggtaatggcaaacagaaacattaagtgcacatacgtatactgaaatcaagcaaaatgacatgtcatctatgaatcactttgcctggtacaatctatatatcactttggaggcaagttcaatgcagcttatagaaaagcacaatatcattttcacatttaattatgtttatcatctacaaaagaaaatgtgcatgtgactactgaagactatccgccaaagaatttaagaaaacaagtgtactgatctaaagtaacttgatataaattacaagatttgacagtgtaataaaaaaaacattttttcttttttgtcaaaaagcaggatatataaatgcctaaagacaataaggtgtatagagtctatagacaatgagacaaaaattatatttcctagataaggatgcttaccattgctattatttctgttaaatggtattctttatcaaaatccttcaaatgatcctctttggcactgttaagcagctcaaaaatgcaaacatcctttgaaggatgttcatctttgcaaaaacctttcgcaagtgaagaatcttgtaattccttgcaaatttcctggagattatggaaaatgattaaacaaaatattatgtttaattcatgttttgc

SEQ ID NO: 12706 - DNA, 894 bp, Oryza sativa
actacatggttggtcggccatacatcccatcaaatttctgaaaggtagttaaggtcacaaggttagcatcatcaacagtaagaaaggctcacctgagtaagatccccatgggcttgtctgccgccatcctgtacagcatccgacgaagaagaaggcgccgcggccttgaattcccagccatcatcttcgaatccgtcaccatcctcctcctcctcctccgccgccgctaccgctgacccctcctgtgtacccacctccgcggcgtcggtggaggagggttgcgggtgagatccatagaggccggcgatgaggtccttgagatcagccggcttcgatccattggaggacgcgtgcgacgctccccgctgatccgcagccgtcggcggcagctcggccggtccctcctcctcctcctcgtcctcgtcggcgccgaacagggagagggggagcgggccccgcggcttctcccaggagggcggcttctccgccggggccgccgccgacgagccaccatccggattggatccgaggcggctgtcgacgaagtcaccccagtcgtcgtcgtaggcgccgaaggcgtcgaaggcggcggcggcggcgggctggggatcggcgaaggcgaagtcgccgaaatcgaggtcgtcgtcgaggaacggggcgggcggcggcgggaacgcgacggcgtccatcggggaggtggggttggggggaggtgcaatcagcaatggcgggtgcgtgcgtgcgtgcgagagatgagatggtgggcggttggaggagaagaggacggaaagcaagagggaggctcgatggtggagccgttgatcaagtcgccattgccaagctgtattccatcgtcagcgccagcaaagagaatgtgtctttttttcttatttt

SEQ ID NO: 12707 - DNA, 2548 bp, Oryza sativa
attcgagctcggtacccgagagagagagagagagagagagagagagagagagagagagagagagagcaaccaatcgaagaggcatatggatccaagagactgagaggaaaggagaagagaggcagaaattgctgcagtcgagcgaggccaagaaagccacccgagtccccttcctcccatagatccagctcccgcattctgattgatgatggagtgaggagattgcctgaaccgatggagacattgccaacccgtggaaggagcaacacgaagaaggtgaaggcgagtgggggcagcacggatgaggcgaggcagctggaggcgaagcgcctgtccttgtactcacggagaaatcacaagcgtagaaccacacaagagatcactttctttgggctcatatggaagagaagcaagaatgacctacgtagcagcaagctcaaggcagatgatgttattcttagaagcagggatggcgtaggctcgccgatgaaaccgacctgctttctctgcttcaagccatatcgatcagacttgatgtatatccgctgcgagagttgcagaagtaggtatacttgtcagttttgcagaatgaaagtctattatctttatttgtgtattgttgttggttttgacaatttgatgttctcctgtgcacagattggtttcatggagatgccctggaacttgaggaaggaaggatagctcaattgatttcgtacagatgctgcagatgtcggaggaggccgttgccgaaatgtcctcattcagatttttactattccaaagtgcctgaaccacaacccgtcagtcaagaaaatgcagatgacatgctctcgagcgaggaagctgctggagcagatggagatccaccgctcgattcatctggaggagttgaaccaactgtagaagaaactgttggtgctaatttctcagcgaacatgaaaagctctgtcccaggaagtgttcaagagactatctatatggatggttcttcccatcctactcatcctgtcagcaagggggttgcgaaggtagaacttgtgccaaccgttaagtctgaaattgggattggggtaccgagcacaattatagtttgtttttccactactaagttttgtagattttttccagaaccaaaaagaatagttgatagaaatttcaacttgctgtccttgtatgatcctagaggctagataaatcgatccaatatttgtacttctttttgcctatcaactgttcttttgctgcataatctatgtctttcatatgtgcgctgtgaaaacatgatttcaagattgagaacgaaatcattgaagttgttactcattagaagatcatgcatttctcgtgcacttagttcaaatgggcatatatgataatctttgtttacaagaactaggttgtttagcacatgcatgataaaaagtgaaacttcaaaggcatctaatcaagtcaaggatcttgtagtgcgcatttttagttctagtgagaacagaaactctaatacatcctatattcctatgatagatgtggtgttttgtaacaaaaaatgctggaattaagttcaatggaggcatatctattgcaaaccatggtttggattgtacattccatttttcagcaccagatcagcacaaaatattcccaaaacaaggtttttcatgattgcatctaaatcttgtttgcactttgtgatgattttgttcgcatacaaagttcagagcttcctgtatcacctatatacatttgcaaagtcttagtcttttaaataatccaggaggtccggccatatgatgcatgcgttgcatggtatgtacctggtacctgccgaagatcggcccctgggggatgatagccccccacaagctgctacagtggggagcaactttgccaacgaccactctgtcatacttcaccaggctgtatgttccagaattgtgtatagtttatgattttttctgtgtgacgtttgctatcttatttacactttttgcagtatgatggtttccgggcaatagctgcggagacaggctcattgtatgagcatctaaggcaaaaagaccatcagacaagtgatgatatcatgattaccttggacaaacttcagcagattgctttgcatcatatgaaggatattgcctgccatcaagccaacaatgtagttcaaccatctgatcagagtaattctagggctccagtgccagacacagatgctgctccaccatagttaacggtgctaccaagtgagaaaccttttctttgttgctgatacggcatttttgactaataattactatatcagcgaaacctttctttgtaggagctgtaaactaagcagggacggaaccaaaatatgatcacgcctagggctatgagttattgccaaattacattaccgcttaagagttttcacaatgtttttatatattttattgggatgttgtgctaagcctaggacttaaagccctaactaccccctgccactgaaactaagcatatatcaattatcatttatgtttctgtgcaggcaattgatggagcgcgagga

SEQ ID NO: 12708 - DNA, 730 bp, Oryza sativa
ggagagctcctgaactgccttgcagcaatcggagtcattatggatttccctccagctatacttggcatgacggtcttggcttggggaattcggtgggtgacctcgttgctgatgtagctttggcaaagtctggccagccgacaatagccattgctggctgctttgctggtccaatgttcaatatgctggttggactgggaactgcacttgtaatacaaacagccagggtgtaccccaaagcttatgtactcgaattccatgttggaattgttgttgcatttgtatttcttcttttgagcctgatgggcaccctgttgatggtcacctggactaggtttcgggttcccaggttttggggttactgccttatggggctttacatcttgtttacagtagtgagtatagctatagcgagctcttctggatgatacatatttttatacataaatagcagctagtcgtttgcagtatatataagtgtttgcaatttttccagttgctgcagagcaatggttcatttcgatggggatggttcacgaggtgcaagatgcctccaggctgcaatacaacttcttatcttggcagctgatgcatacagcccttcacactgaattggcttgtactggtctggcatgttcctgtggattcttctgtaccttcattttacgagttcatgagttcaggccagaggggagatcttgctggcgatgtgcatcagtgcatgcactgt

SEQ ID NO: 12709 - DNA, 1503 bp, Oryza sativa
ctttcagatctgtgggtatcaaaaccggatagagtcttctggtaagcagtagccaccaagtgctaagtgtcctacactcctactatgaactaagccatgtgaatggcacaacaactaaaggaaaggcataaacaaagaggtttttaaaagcaacctagtagcttgccaaatactgtcatgtttatcctttttaagtttttataattaagaaataggcttgacaaaacaggtttgtccattttcttaaaactataattagtccaatcattagccgcctgatgaagaatatgaggcccgtttgttgtgaagtcaattgaaacctttgtatctgtggaaggtggcttgatgtggacatgcaaaataacaaaaggtgatgcggtggccttctttcatcgaaatatatgtggcaatgttcatgtaaacattgatttaactttctttcctgtcttgttctcctcttgtttttcctatggaagcaccaatcatttgaccgtaaagagatctaggtaccatagcagcatggcaaactacacctctttgacagttccttttcgtccattttcttgttcgattagctttctaccttctgaaataaataaacgtatgccatagttaatcacctaattatcagtaaaatcccgatgatctcagtcgtgtggtctatagataaaacaaaaaactatagatgaaggaggaggtttggtagccttgcctcctcacctacagaaatggattagagagttgtatctattactctgtcttccgaaagcaaaaagcctttgtacctctccaattattgactcaagccacaaccaaaaaaccaggcttaagttattgaagaaaccagtttattatgtaaaataacagtttaagttactgtacataaacttgtttttcagatcgataattcattttaagcatatgtttttaccaaacctgagaatttttttttgtcagatcttgtgagttgtgagacatgtccacatgacctatggtactaggagagcccacctcatcactcaaaccatttcaggtgggcacaaaaaatcatttcagcaacatgtcctcagatttttttttccccttggatgaaaagctgtcgcccaccacgcagtgactagtgttgccaagaacagtgagcctgttgcaacttgcaaaagcttatctcaaccaccaacttagattgtcttcttgcagagactaactattaaatctcatcaccatgagacttcaccgagacactaactgaagaacaaattcagagtaaatgactctgtctcagcctctcaggatgaacagttaactgatctagccacagagagcaatcaattcttggctctgttcttagctagatctcgtgaaatccaggacttggggagttcagggtaaagaaaacggcagatgttttttcagcaatttcagctgaagcagagtagaagcagcagctagtataccttgggcggaggaaggattggttggcgtgggactaggccaggtggccaa

SEQ ID NO: 12710 - DNA, 3428 bp, Oryza sativa
  unsure (1)..(3428): unsure at all n locations
caaaacggaaataatccacatatccggcaatcatcactgttgccatcctgggatgcatgtgttgaagcagattctggattatttccgttttgggcagtttccagattctgtaaagcgtcgagctttttgcaagctggagcctttgagcctctagtcaatactgatcttgacccaacctccgcaaaagtactagaatccatctcatattccatttcttcactgtaaccttcccgttcttccagttcagtcttgagttcttctgaatcaatgacgtgatcacatagtagttgcaggatcctaagcttcagggtaacaggaagcttatagtactcaatggctaggacacttctaccaaatctccggcctcctagatctttaataatacccatgacatagaggtactctagcaagaaagctggccaagtcaatgaatctagtaatgtccagtctaaatacctggaattgattcaagagaagtgaaaaggtcagaattgaaataacaagatataaacactcatgagaacaatagtggaaggttgaagaccacatacttcaagcaatttgaagccagttttaatccttcagaagatttggtctcaagatgccgcctaagtgcccgcagtagtgagacatgaacagcatccaacaatgtattctgcgtggtgcaattaacggatgaaacaaaatcatccagcccaaatggactgaggaacagctgcacactaaacgatcgcaggaagttgtatacagaaaaaagataacttatggcctcctctggcacagcaatgtcccctgaagacggaggcaactccaggacctgaactggtggataatgctctactggcagttccttagtgcagtttgatgaattgcttgaagattcaacatcctcagaagcatccgagccagacccactctcttgcgactcatcaggcctagtggacacctcagattcattgaccctctgcctagtaattggtggccctttcacctcagtggcgccaccggatgaaactagcaagtccagcttcctcttccggcagctcaccttcatgccaaatgcaccattctcttcaccaacaagttgtgactggagctgagcaagctctaaatcctcaccctgcccatcctcaaacaccacactgtagatcccagtgctgccatcataggatgcaaccttcccaagaagaattcgaccatgcccagcgacactccggctgatgtaacggcccacaaggcactccccctcctccttcatctgacaaccatcggcaggagtcgtggtgggcttctgatccaccaccccgccctcacatccttccatctttacctcacttgccacagcagccaccgtatgcacttgctcttgaacgccgttctcatacacctcggtcttcacttggatcggggtgcacgccgccgcatcttgctccttgtccgggatactgcccccgttcacctccgccttcacctcccctgcagcaggcgccacggccgggtacgcgtccgccgtcccgacctcgtcgacgtccatcttcgtctcgctcaccggatgcgccgcagcacgctcgtgctcgaccgcgatgacgccttcgcccgccgcctcactcgcggggggcgccgaagcaggggggtcttccaccgccgccgacgccgacgcgatgccccctgcgatctccgtctcgcgcgcatcatctgccgtcgccggggccgcggcggccgcggcgggagaggcgtggagcatccgatcagaaacctncatgggctcctccatattctcggacacccccgaaaaccctaagcgagtgcggctacagaaagcccccgcatcgcgagatcacgagcccggagtcgagattccggcggggctcatccaccgggacccgaggcgccgcccgacgcagatgcgaagccgggcacactcgcgggctacgaatctggagagagagctaaggggaaaaacgcgcaaccccccacccgattccgcggcgagatccccgcgcgacgagcggaaccctacccgatgattggattcatccgccggcagcccctcgcgtggtcgcaaccctacgcggcggcggtggcggcggcggcggcggaaggcgaggaggcggaggagaggagatgggggaagaggagatgacacaggagaagggaagagaagggaagggaaggggagcgaggcgaaaaggaaagaagtgaaccgcacgagcgagaggctcgcacccgagcctggctcgcgtcggtcggtcggtccgtgccgcgctgtggaagcggagttcgggtccggtcggttgcgcccgacccgcgtggggagacgtggagcggtggtgggatagttgtgggggggaggtggatggaccgggtggtgggtgcggggaacgaacttacgaaccgacccgggtggcgacgtgtgggggcgtgacctgacctgacctggctcgaccgcgcggggaggagtagcgtagtacgggtgtccactactagtagcacacgcacgcacggcggcgagagcagaggcgagggcgaggaggaaaatggagggagatgtgggagggagggagggagagggtgatgcacttttcaaattcaaaagtgtggagggagtcagccaggccagggtggtcgctcgcgttggcgttggcgtttgcgtttgcgtttgcgtaggtggatggatggatggatggagaggggaataccggagcagtgtgtggcgtcgttttccccgggactccgcgaggcttttgctcgcaacacacttgtgcactgtgtggaggtgtacgggtgtgtgtgtgtttctcagcttgcgcgtctcctctccttggcttggccttgggctctccttgcacgcacgttgttgttacacggggagtatgtttttcaatgtgctcaggtgttacgatttacttttgtcgatggactgtacattgttgcgctatacttctaggtagctgtcgatcatgcatcttcacatgcaggtactaattgttttattgtctgtgcctccaggcttatggtttggtgtttgcaccccgaaacaacggtgatcaagattgtaataatgcaaaacagcaagaagcatcgttaattgcagccttccctgcaggcacgggttctgtagatcacgctaactgtcaggaagacgcgtaaaggcctacaggatgcttagtgctatagacatgaccgtgagtaatggatggaagtagtatcagatacagcaacattaactatacacatctgtcccaagttcattagacatcagtagtagcatattgacatggatcagtttagttcgagtcatgcggcaaaagaaaatcaaaatcattcgtcagatgcaacaggaaaacaaaattattcgtcaggtgccccagcgctgatcacaattcacaaaaaaaaaaaaaggtgcatccagcgaagcagcctgcatc

SEQ ID NO: 12711 - DNA, 2033 bp, Oryza sativa
ggacaaaaagagtcaatttttttcacatagcagatgctacaaattgcggtgacgtaatggtaacatacaaaatttctctaggaaacagtcaaggaccgatctgattgcaacaaaagtaaaaacaatcataatatttcatataaataacactgaactactgaaggtataccttagcaagcccggagaagttgatgggcagcaattcggaggaggcctcctgcccctggtcaggggtgagaacaacagtgccattcgcttcaagggagattgcagcctcactcttgttcaccacctgcaactccgggccgacagtgtcgagcatgacctgcgcaacaacgagaggactcccaaatgttagtagacagcaagactaactagtagatcatgaatgaattgtcaggagaactcacagcacagagcttcttggtggacttgatggcgagcttgaggttttcgagggtttcctggtggtactcagcgtctccccacgagaaatcgaacctggcaactgcaatttccgccacacacgaagaaaggattagattagaacagtgcgcaatgggtggaggtaagaggagatcgaagctggctgatccgttacccgacatgccggccttgaggcaggaggagatggtgtcgacggcgcgcgacttgggacccagcgtccccacgatcttggtcatcgccgggaaaaagctcttggaggcgaaattaattaagcgagttagggttccattcaatccaattccaaccagaaccaaaaccagcaaaaatctgaggcgaaatcatcgaaggcgaggaggaggaggaggtcttaccggcttggatggctccaggatggatgccatcctgatgggctcctccagcagcagattcgtcgaatgcatcttgcccctgttcgcttcgctcctcggatcagatcgggaggtagacgacgagcgtcagcggctgctcgatctcctcctcctccttcttcttctccaaggaatcaatcaatcaatcgaggcagcgaggcgtgtgggttgtgtgttcctagctttcacctctggaatccaatacaataacgaagacgcctttttatttgggagaagaaaaaaacgtggaatcgcagcatatgccttgcctgcctccagcaacacagttaatccgcgatgcgaaacggtggatgctgacatccgcgggtttggaccggtcccctccaccaccaccaccggtttcggccgcaccagggaatgatggcgtttggatctactcgctcggttcaaaaacatcttcactttggtttttatatctaacgtttaaccactagacttatttaaatattttataaaaaatatttaaaaaacataatttatacataaagtaattattcgtattttattgtctaatggcaacaaaatacttatcataaataatttttaaataagaaaaaggtcaaacgttgtatataaattcctacgaatgaacttatttttaaacggagggtgtatagtagatctttttttttttaaatttcaaaaaaactataactatagtgcaaaactatcagtttgcagcaatattaataacctattttcggtttgttgcaatgatattatacaaaattattacaaaactatacttttacgtggcccaagcttactgttatcacctacacatactacgcaaagttacagttttatgatgatttcctacggtataattacaacaaactgaaatatgatgctaatgttgcagcaaactaatagttttctcactataattacagtttttctaaaatttactttttttttctcagttatttgtaagtaattattacatttgagtttataatattagagacattttttattacatggtaaacgcatacgcacacacatcactacccggataacaccatacttacattctataaagaagccccctaattcatgcttaaaagacgaaaatcaacaatacattctttgatctcactaaatttataggacaaaaatagtaacgagaattctaatcgagattataaaaaccaaggg

SEQ ID NO: 12712 - DNA, 2275 bp, Oryza sativa
ccggttcgaggagatgagactgagaagtcaaacagttgagaataccacgagagactccagcagcagcagccgccagcgagacgtcgccgtccggccgccgcttgatgcgggcttcccttttcgacgcggccgtatcaaggaatccccatgacgccaagctctacgctattggtccaacttcatgaagaaattcttattgcacttaagaatttatcactcgtaatccctccgtactcgtaaagtcgtttataacagcgacacggtctccaaaacacaactttgacttcttttttctataaaaatatttattgaaaagtgatatatgtatacttttatgaaagtatttttcaagacaaatctattcatataatttttatattttcaaactcaacaacttaagtgttattcatgatttatattcccaaggtttgacttaaacattgtcctaaacgacttcctttataagtatggagagagtaacttataactcgtggaattcttatatattcatgatatgtggattcagtgataaatacttaattgtcattttaagagtgacaaatagcaaaatttctctttcttacgagcctcattcaatttctgttgttcttttcacggttcaattaaataattatttatgtactttataatcataatatgttttgtaattaaatttctatcataatcttatatttatcccctttttctgttttcttaatattgtgcttcgaaggaaccttaagttcccaacaactgatgtaatatactaccttgatctaaaagtcttcttcgtatttctttaattactaagaccaagaagaaactacctcatccgattaatactccatatttagcaaaattctcagcatacatgcaatggtgttggactgttggaggatggctggtcggttccgaaataaacttaattcattgttgctaaacaaagatatactctcttcattcaagtcttggatacatagaaattacaaataggaaaataaaatagtaagaaaaatttaggtggagggaatatatatttcactacaactagacatctcttgttagctgaagtaacaagtataaaaacagaccagaaccagtagtacttgttttttagataatagatttatattaaacccagcctatacacaagtagtacttgttagctgaagtaaccagtagtgcccatcttacagtgcagaccaaaatccataactctacaactaaacttggtagtcggctgcagtgaattacagaattgcgtcaaccgggacaggatgccggcaagatggggcagcactacggcagcgtgccgtgacagacaaacgtgctggctccattcatcatcagacaaacgtgtaagatcgggcagaaacgatcccaactggccaactatgcgttctatccagaggcagcagctgaaataatgcacatgctctgaaacagtcacagctactcacaatgctccccttgaatcgaaacagtcacgtttctcgcggattgtagtagaattatatatttacatcattcattgctggagctcctagctagatatgctcacctcataacctctctgtatgaaataccaagatagcatatcaccttggcaatacaggctaagctactacagatcagagcagagcggtgcagcttcctgccaaccaactctaaaatgttccaaaaatgtgtccactcactaggataactactattacctactcgttgggaagtgaatggatcagctgaggagcagcatcacccaagacactggatgaagctttgttctgtcctgatgagctgctggatttacttccctcttcaaattgtcaagttgtacttatttagctttcgccagccagctttcagtgttttggtgccaacaagaggtacattttgacctatcatagattgtcttttcaacaagaggttgtagacaagctcattccaggtatcagggactccaggcaagcaccagtggctgcaatcttgcctgtagagagggacagggcctgaaggactcaggtgtactgagacgtgcccatctttccgttgagccgtcatctgagtcacgttcagtatatccaacccgagaagcttgggcctgaagctgttccctagtacatcatttacggggttaagaaaatcagcccattgctccaatgatttaactggtgtcacatccggatgagtttccaaatgacaatttcctccagtcttccagtcaccacctctgcacaaaatatggattactaaagttgagtttgacagatcattt

SEQ ID NO: 12713 - DNA, 898 bp, Oryza sativa
gccagagaaggaggaagccggcgagcgcggcagctccactccgtcggctgcttcggccgccccgcgctccgcccgcgatgcccagcagaaaagaggatgaggcagcgggaaacattgtgtttatctgcatgataaacaacaattgtttatccttatatttcatcttgctagtgggaatttgatcctgacagtttagctttgaccatcaaatcaattgttgtttcagcaaatcgagcttggagtgcagcgacgcgccgaagtcgccgtctgacaccggttcggggtcgtccgccgccgctgcgccgcgcgggcgcttggggtcacggcggtagtcggcgtagtcgtcgacgaggcggtcgagcacgtggtgtgcctcgcggagcttcttggcgaaggcgaggatcgatgcgtccttggcgcgcgtctcacgggcaaggcgggcgcgcgcgtcctgcaggtcgagggtctcctgcagctcggcgacggcctcgaaaaactgcatctggagcgtgttgagcagcgacaacgcttcttggtgtaggagagtcgccttcttggtgtaggagatcggggccgggagtggcggcggagaggagagtggagatggggagagagaggaggaagaagaagagggggggtgagaatgacatatggggcctacgtgggtcccacctttttgaattaatttgtgtgaaagtgacgtgtgggtcccatggggtttattattatttttagatcgaattgccacgtaaccgccacgtcaatgacacgttagatgaagaccgagtcaatagcacgtaggcgccacgtcagccaaaaccaccgtccaaaccgttaagggacctaatgtgcactggttttgacatttgagggacgtgttgaatctggttttctagtt

SEQ ID NO: 12714 - DNA, 1469 bp, Oryza sativa
ctcttgctgcaatccaaacattcagaatggtgcataagcattgttggtggatcgagtatgaatttcggatgcgcattgttttcgagtaatggagatatgaatcgttggctagtttgggtgacacctaatttgttgggcttggagaagtaaagaactcaagatggataaacttggttcagtctagcactcatacatgtagcattgttggtagaatgattgttaatttgcagatgtagttctgactttgggcccttttagcaggatacctggtgagattggatcggtgagtgtgcatattataatctgaacccttgtgagcattagattatttgcacaggaaatgaggttgacgaccaccgcacttaggaactgtgcaccgcgattggaaactcgatgccttatgctccccactgggttagaaaacaatgttatgcgcatggttaggcctccgagagataaattagttaaactagtgttgtttaattagtagtctgtctgtagctttcatggtgttgccatctttcacctttgttttgccttgatggaaatgtgacctcgtcttgtttgttgtcagagtccagtgttctatatgttcggttaagctgtctttcttacagaaaggaaaagttgtctcttctgtttcagaaaagtatagctattctcagattgggtttctgccttttgcagaagaaagaaaaaatactgattcttgttatcatcactatcggtagcttttacatgttggaaaatttgttatccttcataattgcttactgtaacacattagactgtattacatactatggtaaacatataaatattttttatgagaaaacagtggaacatctgattttaacccttttttttaaaataaaaacttttggggcacctttgatttctcaataaaacagtccataaaggaaaaaaaagaagatgattgtgaccttgtaatttcattttcttttgagcatgtaaatgatgcctcactgatgcttgtagatcaagaagtattgttatgaataattcacatatccaattaagcattactgatatcatattctgatttcaccattattttctttgatttcttagatttgatgccagaaatatgctggagaagttgagaaacaaaagagtagtatttgttggtgattcaattgggcggaaccagtgggaatctcttctttgtatgctctctgttgctgttcctgataagagctccatcttcgaagttaatgggaatcccatcacaaaacacatgggtttcttaattttcaagtttagagactacaattgcaccgtggaatattacagatctccttttatagtccttcaagggcgtgccccacctggagctcctggggttgttaaatatacaattagggtagatgccatggattggttgtctgaccggggccagtggagggatgctgatgtattgatccttaacactgggcactggtggaact

SEQ ID NO: 12715 - DNA, 3407 bp, Oryza sativa
gccctgttccatcggccggaaagagaagggatagagagaagaggggagagaggatagagagaagaagaagtgaggatgacatgtggggcccacgtgggtcccaccatttttcctctatttgggtgtgaaactgatatgtgggtcccactggttttattttttttcggatcaacttgccacgtaagcgccacgtcagtgtcacgtcagatgaagactgagtcaaattagccacgtaggcgacacgtcagctaaaaccgctatcaaaaccgccgagagaccttgtttgcctggttttcataagttgggggatgggtcgtacccagtttcgccgggccgaatgggcttgtatttgtaataaactcaaatgtgtcctatctaaggaataagttcatccgaggtcccttaacttgtcaacgaatccgattttcgtccttgaattttagaaatagaatcgaatagcaactgcagcaagcagtttccaatccctgtgaagtcgtggagactggagaggggggaaggagaaaatggcgacgtgctaaccgttcgcttccggaagctggcggccgaccagatcaagggcgcccgacgccgatgacgccctcctctatggcgccgcttacgtcccgccgccccgctcctgcgccaccgccgccagtcactagtcactaccgcttgcgccctggggccccgcgcgccgccggcgccctccttgacgccgccgctacttgcaccttgtggccctgcgcgccgccaccgccatgctcccgcgccgccgacacccaatcgccgcattggtggctcggtgccctcctcaaacccgtcgccatcggcgtcgtcgtcttcgacagtggcggcgggaaagcaggtggagagaagcgggagctcgcccgccaccgcccataacgaggacgccgtcgaggtcggtgagcggcgcgaaggacagtggaaacggtggcgggggccgcgatggtgaggtgtgcgtccttctcctcgcggaggacgctgctcctttctcgtcggtcgccggccgcctcctgcacatgcgcgccgctcctttcctccctccggccggcgcctgtgcgccgcttcttatttctgccagcgagaggaaggaggagaggggagagagatgaagacgacgagagatggggagagatcaagaggaagaagatcaggggtgagaatgacttgtggggcccacgtgggtcccaccatttttattaatttgtatacgaaactgatatgtgggccccacggggtttattattattttttgggtcgaagtgccacgtaagcaccacatcaatgccacgtcagatgaagaccgagtcaaattcgccacgtaggcgccacgtcagccaaaaccacaatctaaaccgccgagggaccttatctgcaccggttttaatagttgagagacccgttatatctggttttgggttcaaggacgaaaaccgaattcgttgacaagttaagggacctcagatgaacttattgccctatctaacgagaggcctgggtaacggattacggccatctgggcccactaaaaatactcgtagaaatacggctacggtgtgtacgcggcgtcgtcagcccactcgccgcacatcctcggcgaggtcgccggcgatggcgccgccaccgccagggcggcagcggctgccctgcgacggcgaggaggacgcccccccccctttccaccgccgccggtgagggcctcctccgtccagcgatcgcttccggcgggacgtacggggcccgccgcgagcctggtgagggttttgttctcccctccctctctgacgatatgctctctcttgcttcgctttgattccgcaagccgccgctgggatccagtaatttttttttcacttaattccactcgcgcgtttcagtttgtgcgggaattcgtggatcattcaaaggattgtgctacaaattcccaccatatcatcactatatcagtgttgtcttttactgcaattttttttttaagaaaatgggataaaccgggcctctaaatccatccggatgtacgcagccgattttatgtgttacttactactacatgttaataaataataacctgcatagtagtatgcaatctggatgaatttgtacaaaaaaagaaagctggattcccatcatatcagtgttgttacttactgcatttttttccattgtgtcacatactacatgttaataacctgcatagtactactagtatgcaatgtggatgatttttgtacaaaaataaaactggattcctatcatatcattgctgttacttactactgcactttttccccgtgtcacttattactacaagttaataacctgaatagtagtatgcaatgtggagccaccaagcgacaccatgtggagccaccaagcgacatacaaatagataaaaagccctttctaccagttgggtttgtccaccagcatgaattggcttatacatgacttaaaaacattaataataacgtggtttacatattagtgcactggaatttgccaacatggctatcaatcttactgcttacaaaataatccactaatatgttcttgatacggaaagaaatctaatactaatacatgctgcaaaatgcatctggtttattcgcagatatactggctgctgatgtagcagaagaacgttgattcatgagaaagtaatatggcagaaaaggtttgatttcagagaatcgtaattttgggacaattggagctgcatttctcagcgcctcctggctgcagtctctctctgggcattgaagtagacagcagccacaggaaggccaagatcattctcctcggcgaaccggcgggtgttgaaatggtccctgaaggatggcacaattacagtttgcctgcgcttctgcttgaagagcacaaaaatgaacctatggatgccaatgttcggctttggactctcatagcttatgacctcgcgtccttcaatcggaaagtggtacagttgtttattcacaaggagaaactcaatgaataagatggaaaaaaaaactgacacaaattagaggaaggacctaccaaaagaagcatccgttgtcccaggtatatcagtaacaatcctgcgtaaatgttaaggtgagatttgctgataatttagccacattactattcatgttaagactagtcagattatgtgttgtttgtatgcatatgaaagctaaagtaattgtcctatcttccctagaaacataactaacatgtctagctaatcggtaaccacccacaagaaacaaatatatagtatttagatacaaatgttcatggttggttaccaatgaaggtgctcccttagataaggatcacttggtcctggcacatctgggtctgtcataacctgaaacatgaggagttatggttaaccagggaaa

SEQ ID NO: 12716 - DNA, 890 bp, Oryza sativa
catagattgtcttttcaacaagaggttgtagacatgctcattccatgtatcagggactccaggcaagcaccagtggctgcaatcttgcctgtagagagggacagggcctgaaggactcaggtgtactgagacgtgcccatctttccgttgagccgtcatctgagtcacgttcagtatatccaacccgagaagcttgggcctgaagctgttccctagtacatcatttacggggttaagaaaatcagcccattgctccaatgatttaactggtgtcacatccggatgagtttccaaatgacaatttcctccagtcttccagtcaccacctctgcacaaaatatggattactaaagttgagtttgacagatcatttgaagcacatgttgtttgtgcatccaaaaaaaacattatcaacatgaagctaaagcactaatttccagccaaaagtgaatggccaagagattgcagaatagttctgcttttaaagcatctttgtcaacatgacgatggtttattgttgattgtcttactatatatggtactcagtcaagcatttcaatggaaactatgcacatatgttgctattattgtgaaagcagacactaaggtacctgactacaaaatttaagcaagtatccaaatcatattcttagaacaatatcccaagactgtcaaataatgcttgagcaaggaaatagttgaacaatcacatcactgtcgagtttgtgttttacggacctgaaatgcacaggagcatatgtacggaagatgacatgggtcttgcttgagttaacctcattgtgaagccaaccaaacaatgtctgtatggatcttttgtaagcatctccgacagtcatgtccattttaactgcatccccttcttgaaaata

SEQ ID NO: 12717 - DNA, 819 bp, Oryza sativa
actactatagggcgaattttttctcggtaccccactgtcgagtttgtgttttacggacctgaaatgcacaggagcatatgtacggaagatgacatgggtcttgcttgagttaacctcattgtgaagccaaccaaacaatgtctgtatggatcttttgtaagcatctccgacagtcatgtccattttaactgcatccccttcttgaaaataggtgccactgatacaagacataacagtaagagtgtaaggcttatgccatgtatattacagatatgcaattatgttaacttaaaattttgctcaaaagcagaacaaattgctcagaaccatctatcagtcatcatatatgaattagagaacataactacagaactatagtttagatattaatgcttaccttctgattgttttctcgtagttccaccagtgcccagtgttaaggatcaatacatcagcatccctccactggccccggtcagacaaccaatccatggcatctaccctaattgtatatttaacaaccccaggagctccaggtggggcacgcccttgaaggactataaaaggagatctgtaatattccacggtgcaattgtagtctctaaacttgaaaattaagaaacccatgtgttttgtgatgggattcccattaacttcgaagatggagctcttatcaggaacagcaacagagagcatacaaagaagagattcccactggttccgcccaattgaatcaccaacaaatactactctttgtttctcaacttctccagcatatttctggcatcaaatctagaaatcaaagaaatatggtgaaat

SEQ ID NO: 12718 - DNA, 2944 bp, Oryza sativa
tgctgcaaggcagttcaggagctctccagccatggttgagatccagaagacactcattacaaaggaaattgtggtgcttgcaatgttttcagttattggggcttctttctcaaaaatgaagtgggacagggctaaagaaatgctcacgaaaagcaccacggaccagatggggaaacgactttgagggagaagaaatactattcggctatcaaatggaatgaatgaactgaaagaatacaggagtaggagaggacatagacagatgtttgcacaaacataaaatttgttccattcagtaggaagcgttgatggtattgtgagcttaagaagaaatgctacaggccactcccaaacttttgtcacctgccaggggtagatgacaatcagtgtcatgaaaatgcagatgccgagaggaaaatattcatgttttagcaaagtctaataagaaacaaggagctaaatgtcacaaaaaattggaaatgagaacttaggatttgccagaacatgccatcgatttcctcataaaaacaaagttaaacaatcagcaagtctgttaagtttaaaaatcttttgatcattaagcaattgtatatattcaatacagtagtcgatgcattcttgtcatagtagcaaagctgacattactaacttcaaccattactataaatgggaatatttatcataagctgcctaatcacatacagataaataaactcatagcgaattgatcccagcaaggcatgatgttggtgcagctaaaaggacttagcttgtttagcatgatacattattcagtacactgagtaatcctatttatatcaaatgtacattagcactcagtgtgctgagtaattgtatctatgttaaaagtacattatcctgtgcatatagtaaatcagaataggttgcatcatgaaaaaatctacttaaaattatcaaagtacacaaacacaccatgaattgcagcattgttaccagttacctttctgtcaaagtgtactactgagttatcaaagtatttaatgtttgtttctacttaatatctacaattgtatgggtattgtataaaacaactattttttcaggggaacattggctcactactaaagtttctactagccataaagtaatctgtttctcgctgttgattgcagccagtaattgcaaactaccagggtgaagttaacactcttgaacataaaccaatcagcagcttatagcactgttcacattagtactgtattttcaagtcaagtgcacttcgaaagtaactatctatactagaatcgtttgtacaaattgaaccatagaaaagcataacaaacaagttggaccattaaactaaagcttaccctaaatgagtacaatacagtcagtgagttcaaactagaagggtaagtcaacaatcttgcacagttgtcagttgcacataaacaaattgacggtttacgaccatcttcaaatgaataccaaagaaactatttatattagaatacttgtccctgactactcaatactatattaaccacagtggagacaaaacaaactaacgggagccactcattggagcattaccttactgaacatcgtgcacaaagtagggtgttgttgcttgcgatcctccactgttaccggcaagtccatcaccacgcgaccaatgccattcaccacctccagctcggtggtgctcaccgccttcccctcagcatccaaatccatgtataccactaagcccacgaagaagacgtagaagagcacgagcccgatggcctgccagaggtatatctcggcgctaaggtagatgtagaagaggccggaggcggcgaggaggtagaagaagacgtcgcgggcgaacgacgcgggcgggacagcgaacggcgcggcgatgagcgcgacggccccgacgacgaacgcggagacgaaggctccggcggagaggatcgcggcgagccccgcacgccgcatcccgccggccccgccgagcgcggcggcggaggcgaacgcatcgggggcgccgttgccgagcgcgaggagcgtgacggcggccatggacggggagaggcggaggcgggccgcgaggcgggagaccgcgggggagaagtgggtccccgcggcggcggcgaggacgcggaagtggaggaggaggaggagcgcgagcgccgggagggaggcgcggcggtccccgcccaggaggcaggcgtggatggcgccgtagtcgaggatgcccggcgggtcggcgcggacggaggcggcgcacgcggcggcggcggcgggcgccatggcccgatgcgccgcggcggcgcggtggtggtggaatggcgagctgccgagtggggagtggagggaatcgcgggggaatgtggtggggaatttggggagtgagtgagtgcgtgcgtagcgaacagacgggacgccgacgcggagagggaatggggcggtgccgaacttggtgggtcccatcgcgagggaggaaggtcgaagcgcacacgtgatggtttggcgtgagggacaatcggcctggcctggtttggcccaagagctggttttagttccatgggccagcaccgacaattttgcgtctggaataagttcactttagatccctctatttgtcggtcagtctgattttcgtcccttaaccgcaaaaccgggtacgacccatcccccaacttacgaaaattgggcaaacaagatccctcggcagtatggagggcagttttggttgacatggcgtctacgtggagcctttgactaggtctccgtcccacgtggcattgacgtagcgattacgtggcaattttatctcgaaaaaataataaaaataatgggacccatatgtcagctacacaaaaaattaataaaaaaggtgtggcccgtgtggtcccacatgtcagcctccctcttctctctatcccatacattgccaggagagaagggcgagcgg

SEQ ID NO: 12719 - DNA, 815 bp, Oryza sativa
tagggcgaattcgagctcggtacccatctctcggatgcctaaccatgcgcataacattgttttctaacccagtggggagcataaggcatcgagtttccaatcgcggtgcacagttcctaagtgcgggggtcgtcaacctcatttcctgtgcaaataatttaatgctcacaagggttcagattataatatgcacactcaccgatccaatctcaccaggtatcctgctaaaagggcccaaagtcagaactacatctgcaaattaacaatcattctaccaacaatgctacatgtatgagtgctagactgaaccaagtttatccatcttgagttctttacttctccaagcccaacaaattaggtgtcacccaaactagccaacgattcatatctccattactcgaaaacaatgcgcatccgaaattcatactcgatccaccaacaatgcttatgcaccattctgaatgtttggattgcagcaagagatttcgcttgagatgtctagatttctccttcacgagattgctaaagtagacaatcgagtagattcatctaaacccccaaacccccaccaaatccaaccgagcggaagcgtacaagcaagaacttaatcgaacaaaccgaccaacctggggagatcgcagcgcgacggcctccaccgccacttggagtaggacgcgtcggggcggccgttctcggagcaccggaacccgacgtccaggaaggggcagtccgtggagtggtagagcgggtagctgtcgttccacacccactccccgtagaacaggtcgcactcctcctcctcctccccctcggcg

SEQ ID NO: 12720 - DNA, 2406 bp, Oryza sativa
acgagatttgagcataccggtaggggccaaatttcggaaatttcgaaccacgggcacacaggcacatgggcgtgacgtgacgtggcgggctctatcctggcttcatctagaatgtcgccttccacctcctgccaccttctccccctttccagactccttccactcctcctgcaccgcccccgccgcctatatacacacccgctcgccgccgcctcatcaccaagaacgagaaccacatcgagcgagcgatccgtcgcgcaccagcttaatctaccaaccagttcgccggagaattcaggtgaggatatatggcgtacatgcgggtgactcaccgggacgaggaggggaagaaggtgacggagaaggtgccgatcccggagacgcggcgtcccgacaccgcgaggcacttcgagcggaagctggaggagcaagggttccaccgcctggagcgccacccggcgaacgggcccgcgcgggccggcatcggcgcgccgccgcccaagtccggccgcggcggcaagttcacctgggaggggcccgacggccccgtcgacgcccaactccagcccgccccgcccgccgtcgatcccaacgaccccaactacgacgagggcgacggcgccggagtcgacgaggaggttgccaaggaggtcgtcatcggcgaggtggaggtcgccaaggtcgccgaggccagggacggcgtcgacgtcgtcgcgccggcgccgctgctccagcaagagcagcagtagtcgagtctcgcgccgcgccgcgcccgccattagccatttcggagctgatgtctaatggtcgttgtgcgttgtgtgtgactgcgtgtgttttgggttctaaactgctataattactagtctcctcagtcctcagtggtttgcatgcatgtaaaaaatcgtgtctcgtttaatcaataacggtaaacatggattaactgtggattagttttcaactccgtcacctgacggcggcgccggccgccggagcagattcgcgttcggccggcagccgggcacgggcccaacgaataagcagatgggccgtgtacaatattcggcacgcgagtaattgggcctttgagaaagtatgatattgcgggctcaattttataacggacgagtccagagacgtctctttatcttatcctaaactacaatagcagaaattttcatcaacttccaaaatcaaatcgggttaaattagatctcatagcatcgagtttaaattgtatcataaactgcaataccataaatcttcgtcatcttctaaaaccgggttaagaagaatagttaagaagaagacgtagtggcgttctagttaagaagaatagttaagaagaagacgtagtggcgttctagttctagttaagaagaagaaaataaagaaaaatgagacccacatgtaagttatcacctcactctacttccctcctcctctcctctctttcactttgtctcaacggcaaacactgggggtgagcttcgatcttagcctcatcggcgagctgggtaagcaggagcaccacgaccaggcaccggaggtcatgcgcaagtccgtcgtcctcaagaacagcttggcgacatgccgctatccaaagaagtctcactccatcctcattgccagcggcgccgacgacatcggtagccagtacggcggctagctagaccatcacctggcaagtggcaaggcctcgctaggaataacctcaccgccgacaccacaatcgagggtggtgatgcccgcggtgaggttgttccccgtgaggccctgtcaggtgatggtccagtcgccgcactggctgcagagcagctgccgaggtcgtcagcgtggtaggtagcgatgaggatggagcgagtctttttgggcaacggcagcagcgccacgtcgtcgggtttgccgttcttgaggaagatgagggacttgcgcacagcctcctgcgttgggtcacgatagtctttcttgcccagctctccaacgaggttgaggttggagcttaccaccggtgctcgacggcatggaggagatgagaggaagagaagagaggagagggtaacttggaagtattggttgaagtgaggtggccacttacaagtgggccccatgtatatttttaaaattttcttcattctgactaggatgccatgtcaataaagtcatctattcataatttcatattgctatgaggtctaatttaagccagttttgtaagttgaggggcgatttaagaatacggtttaaactccgatagaaagatgaggaatgtcaggtggacttattccatttacaacggaagtattcgtgtcagttgggcccactcaatacgggcacacattttgctaagctcgacgtagtttttgggccttcatgctaagtgggccttgacattagtaatggagg

SEQ ID NO: 12721 - DNA, 595 bp, Oryza sativa
aattcgagctcggtacccatcaaaattttgaaaatttcggtaatttctggcaaaaattatttgaaattttgattgattttgaataaaatttgatcaaattaaaaaaaccaaaaaaaatggacgagatttgagcataccggtaggggccaaatttcggaaatttcgaaccacgggcacacaggcacatgcacgtgacgtgacgtggcgggctctatcctggcttcatctagaatgtcgccttccacctcctgccaccttcttcccctttccagactcctttccactcctcctgcaccgaccccgccggctatatacacacccgctcgccgccgccttatcaccaagaacgagaaccacatcgagcgagcgatccgtcgcgcaccagcttaatctaccaaccagttcgccggagaattcaagtgaggatatatggcgtacatgcgggtgactcaccgggacgaggaggggaagaaggtgacggagaaggtgccgatcccggagacgcggcgtcccgacaccgcgaggcacttctagcggaagctggaggagcaagggttccaccgcctggagcgccacccggcgaacgggcccgcgc

SEQ ID NO: 12722 - DNA, 672 bp, Oryza sativa
tcgccatcaagtccaccaagaagctctgtgctgtgagttctcctgacaattcattcatgatctactagttagtcttgctgtctactaacatttgggagtcctctcgttgttgcgcaggtcatgctcgacactgtcggcccggagttgcaggtggtgaacaagagtgaggctgcaatctcccttgaagcgaatggcactgttgttctcacccctgaccaggggcaggaggcctcctccgaattgctgcccatcaacttctccgggcttgctaaggtataccttcagtagttcagtgttatttatatgaaatattatgattgtttttacttttgttgcaatcagatcggtccttgactgtttcctagagaaattttgtatgttaccattacgtcaccgcaatttgtagcatctgctatgtgaaaaaaattgactctttttgtcctttgcaggctctgaaaccaggtgctacaatttttgtggggcaatacttgttcactggcagtgagactacttcagtttggttagaggtaaaaatcttcagcatgctaaaactggtgttctgtgtttgtgatgtgtaatgtgttacgtccttgttagtaggatgtgcttgctgtctacattttctgatacctaatctccattctgcttgatataggtttctgaagttaaagg

SEQ ID NO: 12723 - DNA, 986 bp, Oryza sativa
ttcaacaagtacaatgaaaattcacttcttgtttttctgtctatatcagtctgttagtaacatgatttagtcatatttgtttgtccattgtttcacaggcagagaaggtattcaaccaagatttatacttcaagcggactgtgaaatatgttggggagcccatgacccacttggagtctatcgcttcttctgcggtgtgtttcttctcttgttcccaaaatttcttaacgtttattgtgcacatataaaatatttttgactattccattgttttttgcttcacaaagtctttatatgaaacaagggtttcttagtctgaaattgtttcttgcctattttgcaggtgcgagctgctatcaaagtgaaggcttctgtcattatttgcttcacatcatctggacgcgctgcaaggtagaaagatgtgaatataaacaggataatggtgtagtttaatcaaaactaatttcatatttcatctggtatctgtaatgtctgcagactaattgccaagtacaggcccaccatgcctgttctatctgttgtcattcctcgtctgaaaacaaaccaactgaggtggagtttcactggcgcatttgaagtatgtaatcagtccttcccttctatgtttatgatcttttttctgatttttttcatgtaacatgctttctgttatctggtttatgcctgactattgtatctcatatttctcgatgcttttctttcaggcaagacaatcactcatagttagaggtctctttccgatgcttgctgatcctcgccatccagtaagtactattgcaaaatatttgtgcaaaacacacttgggggattctttttcaattaaacaacacacggccttttatcatgggggaggaatgaactcttgcagatttctaatacatatcaatgcctattagatatatagcattaaacataacatgctagtcttattgcttgcatcatgtcccactgttattgaaatgtta

SEQ ID NO: 12724 - DNA, 4531 bp, Oryza sativa
agtaatgatttactaatgttaaaaaatggtatttaaaaaatggaaataaaagttttttaaaaaagtaatgatttgctaatgttaaaaaaaagaaaaaatggtatttttttgttgtgttgaaaaatttaaaaatatagattgtgatttattattttgaaataatttaaagataaatccacacttgcgaaaatattgcaaaagaatttgttaaaaatagtaatgacctttattgatgtttatatcattacaggatacaatgatacatgctgcctcgttaaaaactttgtcatgtaaaaactcataggggaaaatgagaaaaccatgacaaagaaaagagtacagctcaaaggtcagaactacttctaacaaaattctactggggttggtctggatccaggtagagttgctcgaactgggcggccaattcttggttgtccgcagtgtattgggcatgttgtcgagcaagctcccagtctttaacgcttagtagcatttcgacgtggtcgctgcgcagagtcgtcctccggtcttcgatgattcggccgcatagactgaaggccgattcggaggacaccgtcgacacgggcaccgtcaacacatcccgtgctagttttgaaagcacaggatatgttatcttgtggtcattccaccacccgaggacgttgaaatcttgtgcttcgtggtggatggcgtcgctgtccaaataaccggacaactcttcggccacaacatgcgaagaggcgtctccacttgtagccgacgaactgccaccaccttggattgaagacgatccaccccaaatcctaccccactgtatcttcttcttacctgtagtggggataggagggggtctctgctggcgaacttcctgaaactttacttcatatcttccaaaaacctcatataatttacgtctaacctcagtataaaaagaactataatctacacctatagtatctccaacaagtgataaaatagcagataatccccttaatttacacctaggatctaaaacaaaagcaaaagcatacaacataggtatatttttccaatatttcaaatatttttgtttcatgtgaaagacaggttcagttagaacgtcatcattttcgtattctttaaataaagtagcaatttcaagaaggttgtgcaaaattatattagcagttggataataaacttgtgacaaagttagagtacaatcataaaaagtttctagaaattggtgaaatttttggacaattgcccaaacatgctcgttcagtactgaagacccgtcactgtttcttgggccaccacgtgactgaacaaaatcagaaagtaaactactataaggtaaaacaacttttaacattaaatacgttgcattccaccgatgctctgcatcggtggcaaacttacgagctttcacaccggccgcattgcaaaacctcttccatgcagcaatccgcgggttagaagcagttaaccacgcgattgcttgacgaacagcatcgatgtggtcacctaccctcttcatgccagtcttaacaatcaaattaattatatgacatgcacaacgctgatggagtagaaaagattgagcatacacacaaaataaaggttgcaatatttcaatagccctagaattagcagatgcattatctagggtgacagcaaatattttatcagcaagattaaattcattaattacttccctaattctttcagctatgttttcttctatatgtgagacatctattaacctaagccctaaaactctcttttgtaattgccaatcatcatcaacaaaatgaacaactacgctaagataatcctctctagctctactactccatatatctgaagtaacactaacagagaaagtacatgtactaaacagttccttaagtgcagttgcttccttgtgataaacattctctaaatctctagttgatgtttgcctactcacagctttaaacctagggttatgagattgctgaatgtaatgttcaaaagcaggggactccccaaagttcaggggtaaatcttgcctggcgattaaccggacaagagattcccgagcaaccatgggatcgtactcccaactgcgtaccgtaccgtctgggtttaccataagttgctgctgccggagttgtattccttgcttattggcacacgactccgcatggcgcttgaggtgacctgtaccaccagaagaacgagcagataaaatttgcctacatattctacaacgggctttcgatacctcccttccgtcggggcatgtttcctttatctcgtcgaagttttgccacacaccggaggttctcgatctcttcgagccggtgtgtgtcgaaacacttccgctcgcggttccggaaaatccttccgaagctgtcgccgtctgaaccggtaccttctctacgacaggcgtatgaaccggtacctcctacacagatgggggagttggagccgatccggaggtatcgtcaaacctcgacatgtagttggggtcgaaatcacccaaggtgaacgacggcgactggtatggaaagttcggatccattatgaaaatttaaaccgacataaacaaattttcgaatatttattgaattcacaaacacaatacaaataatacacaaatttgaatattacttacatctttccaaccgcgagctcttcaaacctctgcgatcaaactgttgaactacgaaactaattttgatttttgacaaaatttgagcaaattttgtcaaaataaaaaaaaatgcacacttgagaacaaagagagcacttaaaacacttgagagcacaagatgaggagtgtgggatgaggagaaatggctggggttcatgccctatttatagggcgaaatttgagatttttttggaattttttcgaaatttttatgaattttttagcctcccaacggttattttcaaatttgaacggtcaaatagccgttagtgccacgtggcgccttcccattcgaccgccgcccgccctgtccctgctttcggcctggcgcgtgcgccgctggcccgctttcggcctgacgggccgccggcgaaacgggccgtgccgtgccgcgggccgtgccgtgccgctacagtagccgtgccgtgccgtgccggcccgcgggctcggccagcggcccaagcacggcacggctactcgtgccgtgccggcacggcccgttactgtagcaggccgtgccgggccgtgcctgctacaggttcggccgtgccccgggccgcccgtttggcccggcccgtttggccacctctactctgaacattgcttatttctgcactctgttcttgctactagttgaccaaagttcatgaaatgcagtgatctacaacatcactacatcaaacagacatccatagtaacaactgacaaggacaggttatttgcaacagaactacattcaactgatcacagccggcctggagttcattcctgcttgaacaacaaaggtacagagatcatactacacacccagaacactgaagcacttgccatgcaggcagtacttctcttttatgaaaagatgatacagatcagttgcaactatgttacaccaccaccatgtacaacgaccggacaccgaaacatcatcctagtgcagagctgtgaggattgcagtggcgctctcaacctagcaatgcatccagaaaggtcgaatgagttcagatcaaatgcaaatgatgaaaaaaggagttctgttttattgagtcaagttaattaggatcccctcgagggatcaaaatagtttccctcaacattatattcttggcaagaaatcaatttcctttttaccttgaaggttgcaccacagatctcttcttcatttgcaggaacagcagtcaccttgttctttgggttctcatagcacttcaagcctccaagagcattggaatagaagcaacctgcagtcagaatgcatgtaattagtgagcataaccaaaaatggctctttgcacatatttgagcagtgaagattcaactgacccacaattttatactaaatgccccattttaaatgtcatttgcaatgattggcaacataaaaggactatgattcaaacattaccttgtgggaaaggtgcaagtgacttgccacatgatcctttaagcaggtcaatgtcgttagagaaggcaacagatccatcagcagttatcccccagaacagaggcaccttgccctctggatcctgagacaacaattgccagcacaagatcacgtcataatcagtaagctaaaccaaccaaatcaccaagcactgtcaatgcaagtgtttgagcaacagcatgtaactgtcggttgcctcgagatgaagaactcacagaggccacaaggagagaagaggtggacttgtcgaagagcacaaaggcgtagctgccggtgagctgcgagagcatgaagctagcagggtaaggtgctctgtctctcagcgtcttgtacgcctcgataaccaggagcacctcattggcgcccttggacaggccatactgctggctcagcctgcccagattgtccag

SEQ ID NO: 12725 - DNA, 1078 bp, Oryza sativa
ctactatagggcgaattcttttctcggtacccgatccccccccccccaacacgggaaccgtccgatcgagaacgtgcggttgaacaatcaagcggacagaggcgagcacagtatatggtgcaagctgcggatgccagcgacgaatatatgaagcagaaattttgatttttgagaaagagcaggtggtctatcgatcgatcacatccaaggcaatttcttcatacggatatcatgtcccaagacgtgcatccagctccagcttgctagctcccgattccagtcatccagtgtctcaaactgaatcagaccttgtttaccgatttactgaaccaaatataagcagaaggaaagaacaggtggttcagattccacaatcagaataactctctctgaacattgcttgtttctgcacttttgttcttgctactagctgagcaaagttgatgaaatgcggtgatctacaacatcaagacatcaaacacacaatcaaagtaacaactgataaggagaggttatatacaaaaggaagcaaatagaggagcaaggaaggaacagaaggttcagacttcacaatcagaatttagaactctactctgaactataggtgtccaaacgggcggcacggcccggcccggcacgggcacgggtccggcacggcccgtttcggcacggcccgttaggcacggctgatgaaacgggccgtgccgtgccggcccacgtgccgagccgccggcccaagcacggcccgtggatggccgggccgtgcccgtgccggcacggcacgcctgcggcccacgggccgttcggggcacggcggcccgtgaaggcaggccggcagctgagctgcactggccgccaggccgccaggccgccagccgccaggccgccagtgcacagtgtttttttttaaaaaaaaagcaaaggaaatgtataaggaaaaaaaattaaaaatggaaataaaatgtttaaaaaaaagtaatgatttactaatgttaaaaaatggtatttaaaaaatggaaataaaagttttttaaaaaagtaatgatttgctaatgttaaaaaaaagagaaaatggtat

SEQ ID NO: 12726 - DNA, 692 bp, Oryza sativa
ggccacctttccggccagagccaactcggcctgctgtttgttgccccagaggaggacaacatggagacgatcgtcgcgcaggatgcgcttgtaatcacgtggaactcgtcgccagacaccgcagatcttgcccgtggcattctgatagacactgagagtgcccgccaaggtggtctccagttgatgctcctccaggattacacccgcatcatcaacgaattgaatggcacgcggacgaccgattcgcgatgaggtgtagaaggagtagtatagattcttcttgtggaacaggaaacgggcggtggccaccacattctgcggattgtaggtggtgtacatggacttcatttcctcacccttgaggaaataggaggtgcggcccgttagcaacgcagcgtaatctataaatagggatcaaatgaaaggtggagataatccaggtgttagataaatacaatagttctcttgttaattaaatgtacgagctggtgaatgggattacaatttcccgcaggatttggcggattctattgggatctgggtgggtgtccggtacttttgtacttacgtttcatgttgcgctcttcctcttcattgggcacgggcacatccaaggctacatccgtatctgaaagatggagggaatacaaatagagaataagatgatgctgggcgataaggtacgaccttaa

SEQ ID NO: 12727 - DNA, 1092 bp, Oryza sativa
ccatcagatagtgccgattggagttgtggtgcctgccgggagtgccgatgatgagcttcaaactttcattgcacttgttacctgagagctgcatagagcagctgtctaattacagtcgaaggtaagcacagcattttatctttgaatactacctgaatttttcagtttaacaagaatttggtttatggttctgagcataatttgtgtttaggtggatctgtagaagaaatctcatgaagcacaccaaggaggagcgagggaaaatttcccttctagctatttggcattgtcagtgccactgaccgtttgggagttgtggcgttgattactggacacaccttagcaatatggtttgacaaccaaggttttcggcgaactgtacatatattaatgaatggttgatcgaaaaagccgttttccattcatctaggcggttttctttttaaggggaggattataggattagattgctcttagttacgtgttatataggagctctggactttggaagccatgttcctgacaatgtgttgtcttggattcttttgcccctttttttccctcagaaaaagaatagaagtgcctctttctccgagtggatgcgatatccttgatatatatagcctcggctttttcctctgattaaagatgcttgttgctctgcctttttctggtgtggacgtgcggtggctgtacgagtacgactataggaaagatcatttttcacgtctttactctttacccttatatttttcataatgtcatggcttttatgtttctttctgcttttacttttgaatcgtacagtcaaaatgcttcaccgagccacacgagccacttcaatgcacaagaagattgtgatgccccattatattgtataagcaggaaactttgcatggattttgtgaaagaggcaagttcaattcctgctgctctttggtctctcatcactcaaaacatcatataggcctccagcgtagttgcatttctacatgggccgagcaggacgtcacatcatacaggcccagattgtagaaatgggcctagcaggacgacacacatgcagccccatatgcataaatgggccgagaa

SEQ ID NO: 12728 - DNA, 1887 bp, Oryza sativa
gtcataaagagtgcacattaaggtctgttggtacaaagaaggcaatgctgcttccagtttaacatgcaagttgtgcctcaagaagcgtagtcttatgcttacaaattacaatacaaacgcaagtttcatcctacctcaacagaagagtaatgtccatcacgcagtggcagctcccaaaataatctttaaggttggttcttcccattccgctgaaccagccacaaaggttgaagctccgccaatcgtgaaggtagaagcccagccagtggtcaagaaggaaacctgccagttgtgaagatggaaacccagccaactgcaaatgtagaagcacagccaactgcaaaagtggaagcctttccaatttcgaatttggcaactcagaataatgcaggggcgcaagtccagcctaagacaaaatctaaaaaacccaagccagaaaaaccgagaaaatccaagaagactgaagagatcaaatactttggtctcgtgtggaagaaaagcactaatgacaaaaataataatgaaaattctggagaagtgttcagggcgaatgatgttatcctaaaaggcaaggatggtgtaggttcatcaataaaacctacttgctgtctttgtaataagccttattgcccagatttcctgtatgtccgctgcgagaggtgcaaaagtaagcccgtctatcattattgtaggcttgtagcttcaagttatgtatatatatatatgtgtgtgttatctatcagattttaacttcttgatattcttctttgttcagagtggtttcatggcgatgccttgcaacttgaggaagaaaagatatttgaattggtttcataccgatgttgcagatgccgaaggcgagccataccaaaatgtcctcattcagatgattataagaagcctgaaccagaatacagtgagcaaacagtcgctacgtcatcacagtcaactatgctttctagtgaggagaattttgctgtagcagatcaagatccactgcttgcttcatatggcagagttgaaccgtttggagcacaaacaatggatgctgatttatcgatgaacatgatgagctttaacccaggaaatcagaaactatcagtaagaaggggacaaaacaaaaattgtgaatatgttgaccaatccagtatacatgtggatgactattatatccagaatcaacctcaagggaatgcaaacatcaatttcagtcactcgaatgaattctctttgtcagaggctgatggtgtggatgcttcagagctgttgggatgggatttttctcaaggaaataccagtgctgccccttctgatttcgcagctaattgcccgtggaatgacatcagctgtggcagcgttgctggtgatgaatatgaaccacagacttatttctcattcaccgaactacttgaagctgatgatacacagttcgataatacatttgggatgtctaatagtgtgcaagatgatggtgaccaacaaggaattggttttgatgaaatggctttcatgatggaagatggggcctcaaacatgcctttcccaactattgactccgcctctgacgaggtagcatgtgacaggtgcaagaatcctcagccgccacctgatctcaaatgcgcagtatgtggactgcagatgcaccgtcattgctcgccttgggaggatggtgaacagccatcagatagtgcctattggagttgtggtgcctgccttgagtggcgatgatgagcttcaaactttcattgcacttgttacctgagagctgcatacagcagctgtctaattacagtcgaaggtaagcacagcattttatctttgaatactacctgaatttttcagtttaacaagaatttggtttatggttctgagcataatctgtgttta

SEQ ID NO: 12729 - DNA, 2085 bp, Oryza sativa
  unsure (1)..(2085): unsure at all n locations
acatgccagtcaaatgtgttgtatcatgaattctttaaacttgaaacttgattgtatcccacagtagtagcagttaacatttataatcatacaactactgggatatgtatttccagtgttttattatgaattatttgaaccctaggtatgggctagtttcttgttaacttctttcaaacctgagcttatcttattttgcctggatgatgccatgactgatgggaaaataaaaggaaatattccctctgtcccaaattataagggattttgggtggatgggatatatactagtactatgaatctggtagcacatttttcagtcttgctatgcatcttgggctagatatatattttacatgtagggtttgccactcttcataagtgtaaagtgccatttgaggatcagccactctctttctcactgacatgaggcattcgagtgacaaattctcatccaccaatggtggagagtgacagaccccaaaatcaactcttggatgataaaatgaactcgatgctgaaattcttagtgggtagagcatggaattttgaaatacagtgtcatattttgcttaattatatcttgtgctaagtgcttctggagaatcaagttcgacatgcaataaataattgtaaaataaacttgaaatgttgtttcaacaagtgttggtgtaaaataaatacaaatgacaggttgagatcttattatctatttgttctttgcatcttttgtgcagttggaaagtaatattcgtggtgtagcattttctactagctggctgaagctaatagatgactggcctgtggaatctcctagtgcatctgctggtgcatcccgtcctgcagcataccaaaaacgtggaactggtggaaggcggggcagaaaacgttcaatggcatctgaatctgctcctgttactgatgatgacaacagctgaaagaagtgaattggtggagtggaggaaatgtttcaaagcgtatctgacagaggggggctctaccagttttgaccattataaaagctgctcgtcaaggtattgcacatgtctgtctgatatgataatccctttctctgtctcaaggtgagaacaagttaacatgatctgtcgctcactaggtggaaaaaaaaggatgttcagtgtgtcttatcatgaaggctccaattttccaaggcggactcggcaacttgcttgnagggcatgtgttggattaagccagagttcatctcaacttgctctccaggttagcaccttctatcatgatgttttgaagtatttagatcaagctatatgtattcctaatatacatatctatctcacaggttagatatcttgattcccacataagatggaaggagttcatccctccagatcaaattccttcagaagggaaaagtgtagattctgactattctgttctcagaaacgcagttgtttgtgataaaaaaatagttgacaataagataagatatgcacttaagtttcccaaccagaagcatcttcctgtccgtgtaacaaagaatattttggaagcagaagataatcaggatggggatgggaaattttggttttctgaaaaccatatcccactatacttgctacgagaatttgagcagaaagctggggttagctccttgcctactccaggaatgttagattctaactgttttgccaatttctaccaaaggcgagtaaaatcatcaattggagatgttttcttctatctgcttcacaagggtgatgtatatccttgcacctcatgcaagaaggatgtttccttcaggtttttgttctacaccttattgctttgttcattctgttattgttttctttataagatgctgctttatctttatttctcatatatctttgttgttaatcttatgtagggatatcataaaatgcagctcttgtcaaggtacgggtttctagcataccccctttttttttgctatttccttaaagtagagaataactgataaattactgacgtttttccaatatgaactcacaatagtaactaaaacaatgtttcaggtaattgtcataaagagtgcacattaaggtctgttggtagcaaaggggg

SEQ ID NO: 12730 - DNA, 1234 bp, Oryza sativa
ctatagggcgaattcgagctcggtacccaaataaaataatgcaggattggaacatcttcagatgtggagttttgtgcaagatattacaatcattgtgatgttgtcaaagtcgtccaaatacttgcctcttcagatgcatatacagatatatgtaggagaatgacagagtactggagtcatctacttgatatatttcagaatgagagatcaaaaataagtaaagaggttggtagaagccttatgtcacagtccaatattctatcgaccgctactccagtgaaagcaaataatggaagtgttcaggcaactttgaaagatggtcaggacagtaagatggcagtgctttcccagacaaatgcacatcaggttatggataatcaatttacgttgtgctcagctaacaataatgaagcttttaggcaaactccattagctaagacctatgtagataatgcatacagaaatggagcttttgggcccagtgggacatcctcaatttctcaccagagcatgtctatggtgacagttatgcctaacagaacacaagcacagccagcacatggattgattcgtccagacttgtcgtgtggttcagtaattggtaatggtatgtctagagaaaatatcaggagctctatttctgctagggcagacttgatcagcccaccttataaaagcaagccccctgttcagctaattactgaaaatatgagtggtggcaagccagctaaattctcatcttttagaccacaggcttacatgaatctatacaatcacgggaatgttgcagcatctgctgctgccaatctagctgttcttaaatctgatgaaggtaaggctccaacttcccatctgacaacaaaccaaaggaagaaactggctgctgactgtgctctacaagtgaaagcattttcctcagcagccttacaatttgtttggccaagtactgaaaagaaggttatggaagtcccaagagatagatgtggttggtgccttgcctgtcaaagttcagcaggtggaactaaaaaagcttgttttcttaacatggccactgcaaatgcttctaaaggatctgctcgaattcttagtggcatgcgtttaatcaagaattctgatagccatttccccagcattgttacttatttaagccacatggaggaaagtttgcgtggccttttagttggttcactacaagatgtgcagcggagacaacagtggtataatcaactaaaag

SEQ ID NO: 12731 - DNA, 724 bp, Oryza sativa
actatagggcgaatttttcttcggtacccttagcctgaatgattttgttgtgcagaaccaacaggctttgcagttccgccgcgggtttcaagaggcaagcaagtttcttcctgatgagagcaagcttgtgattgatgtggataagctctacagtggagatgaggggagtaggttccttggtgaggttagacaagagaagaagcttgtgaaggtgaagacagaaacctctgatgttgaatcagcaggtcaccgaggaaagaagcatttctatggtgatgacctggatgcggaggaagggaggtgcagcaagcattccgcgcaagggattgacactgaccaccttgtgagggatttgatggacaaggtcttgctatgcaatggtgagacatgctcaaaaggtgttaaggagttgcgtgaggctctgcagcatgatgtggcgaaacattcaggcggaggccatggcaaagggtccagccatggcaagggtcgtggaaagaaacaacccaagaaggaggtggttgacctggagacccttctcatccattgtgctcagtctgtggccactgatgacaggcgcagtgcaactgagctcctgaagcagatcaggcagcatgctcatgccaatggtgatggtgatcagcgtttggcacactgcttcgccaacggcctcgaggcgaggctggcaggtactggtagtcaaatttacaagaactacacgataact

SEQ ID NO: 12732 - DNA, 635 bp, Oryza sativa
tctactaacatttgggagtcctctcgttgttgcgcaggtcatgctcgacactgtcggcccggagttgcaggtggtgaacaagagtgaggctgcaatctcccttgaagcgaatggcactgttgttctcacccctgaccaggggcaggaggcctcctccgaattgctgcccatcaacttctccgggcttgctaaggtataccttcagtagttcagtgttatttatatgaaatattatgattgtttttacttttgttgcaatcagatcggtccttgactgtttcctagagaaattttgtatgttaccattacgtcaccgcaatttgtagcatctgctatgtgaaaaaaattgactctttttgtcctttgcaggctctgaaaccaggtgctacaatttttgtggggcaatacttgttcactggcagtgagactacttcagtttggttagaggtaaaaatcttcagcatgctaaaactggtgttctgtgtttgtgatgtgtaatgtgttacgtccttgttagtaggatgtgcttgctgtctacattttctgatacctaatctccattctgcttgatataggtttctgaagttaaaggagatgatgtggtttgtgtgataaaaaattccgctactctggct

SEQ ID NO: 12733 - DNA, 1323 bp, Oryza sativa
agcacaagatcacgtcataatcagtaagctaaaccaaccaaatcaccaagcactgtcaatgcaagtgtttgagcaacagcatgtaactgtcggttgcctcgagatgaagaactcacagaggccacaaggagagaagaggtggacttgtcgaagagcacaaaggcgtagctgccggtgagctgcgagagcatgaagctagcagggtaaggtgctctgtctctcagcgtcttgtacgcctcgataaccaggagcacctcattggcgcccttggacaggccatactgctggctcagcctgcccagattgtccaggactccctcaaacaggcagaaaatgtcatcttttgatgcaaaggatctgcacaaatgcagttgtatgttctcagtgagcagctgtaaaattatagatgctttccaaccctatgataaaaaaaaactggcatccacaacaaaatttaagaaaattagtatgtttggtgttatcagttcagccattcttgaatgcctgaaggacatggtacttcagtgcagaatgcaaaattaggtggaacatctatgacttaatgcaagatgcacctaacatcaagaattagatacctaaacttgctgaaaaggaagcatatattttgtactggtataatgaatggagtaaaggagtggaattccttggatgatacttcttcagtgaatctgcctagtagtactagataagatatgaaaaaagggtaatcaggccccacaaatcatagtgctgaattgacagcatggcccccttgttcagctttcctttctttcagatctgtgggtatcaaaaccggatagagtcttctggtaagcagtagccaccaagtgctaagtgtcctacactcctactatgaactaagccatgtgaatggcacaacaactaaaggaaaggcataaacaaagaggtttttaaaagcaacctagtagcttgccaaatactgtcatgtttatcctttttaagtttttataattaagaaataggcttgacaaaacaggtttgtccattttcttaaaactataattagtccaatcattagccgcctgatgaagaatatgaggcccgtttgttgtgaagtcaattgaaacctttgtatctgtggaaggtggcttgatgtggtaccatgcaaaataacaaaaggtgatgcggtggccttctttcatcgaaatatatgtggcaatgttcatgtaaacattgatttaactttctttcctgtcatgttctcctcttgtttttcctatggaagcaccaatcatttgaccgtaaagagatctaggggtaccgagctcgaattcgccctat

SEQ ID NO: 12734 - DNA, 9909 bp, Oryza sativa
tcctgcagcccatgtcactgccataaggtgtttgaggaagatcttgtttctggacttatcttgaggttagttaataatttactggaaatgatttaattgattatgacctagtttacatattaatctacatatgatgtaacctgaaatgtgatttgattatatatgatttgatggaacctgaaatgtgggcatgctcaagatgatatctcttcaagttgctgaaatgataatataggctataatgtcaatagcttgctgtatggagcagtgtttctttaagcttgctataggactgttattctattccctattatgtagaagtaatattgagtccatgtcttcaaaattattgcctaagtggacactttggcagacaacaaaaaaagctccaattctgactttaaaatcagaatccgaaatttatgagcagtgattcaatctgaaatttgtgattgttgggcatgtttatcttttgaatttgaatagtatatattgatatatgatctcactgaagctgaatctgaaaatttataattatgtatctgaatctatttttttagtatgtcaggtaataatatctagaagatctgttcaatgtgggtcacatctgtgcgattggaagaatgcaatgtgatcttctgctgctgcacatgtaaccggtcgatctcattgccaagcaaggataatttacttcctagttgtctgaacatgtaataattcactttgttgctacctgaacatgtcacctgggaccatgatattcattgccatgtgattttgatatcttttaccttgcctcgaataatgatacatgttcctattttaatataaatgatgattttgtttcctttgttgtgtgaacatgctatctgcacatctgtatacatgtggtttaaaattagaacgatagaaccagtgttgagtccaacaaacaagtccaatcttctacattgtcagaccatacgatgtctcccaataaaccacctagcagatgacgtcgaagacaatgttgatgtcgacattggcgactccaaccttggctctgacgtcaaccttgatgatgatgccgccgtcgacaccgacctcgcccttgaggatgatgctgttgtcgacctcgacctcaacgatgatgccgccgatgacgccgacctcgacctcgaggatgatgctgccgtcgatgtcgacctcgacgatgatgccgccgtcgacgccgacatcgacctcaacctcgatgatgatgccgccgtcgaccttgaccttgacgatgatgctgccatggaccttgacaactttcatcctatgaatatatacagcatggatgactttatagccgaagcaacctttttggatgaatatagtgaacagattattctcaggctgaaggagaacataacatctgagccacctcgtcgtctatgtcaaagtggtacaagacggtacgtaccaagaaaccgtgaagctggcaatgcggatcttgtggccaactacttctccaagtctccaatctacacagatgagatgttccgtaggaggtttcggatgaggaagcctctcttcctacgaattgtgagtgccctgagtgaatggtctccttattttactaatagattgaatgccactggtagagcaggacattcaccacttcaaaagtgtacggctgctatttatatgctagcatatggaactcctgcggatcaacttgatgaggaattaaagattggtcctagtacagctttggagtgtttgggaaaattcactgaaggagtcattgaaatatttcgcaaagagtacttgcgagctcctaggagtgatgaggttgaaagattgctacaggttgctgagtcatgtggttttcctggcatgtaaggaagcatagactgtatgcattgggcatggaaaaattgcccggtctcatggcgcggccaatttactcgtggtgacaagggagttcctaccatgattctcgaagcggtagcatcgaaagaccttcacatatggcatgctttttttggtactgcaggatccaataatgacatcaatgtgttaaacaagtcacccttattcattgaagcattgagaggggaagctcctcgtgtacagtttagtgtaaatgggaaccaatataacacagggtactatcctgccgatggaatttatccagagtgggcgacattcgtaaagacaatacagcttcctcagacagacgaacataaattatatgcaggtcggcaagaaggaacaaggaaggatgttgagcgagccttcggtgtgttgcagtctcgctccagctcggatgtggaggcagggcgacgttatcaacataatggaagcttgtgttattcttcacaatatgatagttgaagatgaacaggaaatggctgaaattcctttggatttaaatgagaacccaggagcatcgttcgttctgccacctgaagtgaggaactcctctgaccccaaccctttctttgctgcggtattacgaagaaattcatctattcgtgatcgtgcaaaacatatgcaactcaagaaagatttagttgcacatatatggcagcgttttgggaaaaagtagaactactttatgtaacgaaataatgtaatttagcttatcatttgcttaaataataatttcggatgtgtgtgctggtaggatgcacatcatcttcttttatatggttatgttaacacaatgtagcgttagttctatagggaagaaatacaaatatatgtatggctgaaatttacatttgattacatgcaatgaatttattagctatttattaccttgtattaatacagagttggttaaagagacagtactttgtaggtaggagttttttttgctgatgtggagtacagagagagcccacactgagctctacctttgaacatgccctaatatctattgcagatcatgcaccatgtcttgaatggtaagtaagaagaagggataagtccattttacacccctcaactcttgtcattgtgtaaaattcgcccccaaactctaaaaccgggtatccaacaccccctaactattaaaactgttcaatttatatcttttttatattttagacggttttggcccacgtgtaactgagatggcagtccaatcagcaaaaaagtatatataaaaaatgtggtaccatctgtcagtcaaccttcctcctttttttctttcttcctttctcgatatgtccaatctcggcgcatggagaaggtgatgttcctctctcgatctctactctcccctctctctcggtgcagggaggcgatggtgctcggcgtgtgcaggtggaggcggcgtactccggcggaggcggcgacctagaaagaagcggctcggagcggctacgacgagctctgtcagaggcgatgacgctcggggagacaacggggagccggagctcggtcttgttggcacacgaaggaggaggcactcgggaaggtgggggagctgaagctcgagctcgccagcgcatggaggggaagaggagctcaccggcgcatggatgaggaggcacttggggaggcggttgggagatggagtttgagctcactggcgcagatctcatgggctcgagctccccagctcccgcctccaggagctccatcttctccatggaattgagctcgccggtggagcttgcgctgcttggggatgcagagttcggcggaggtgacggggcttggggataaggaactcaagctcgacgaggcggcggcggatgcggagcttcagctcgacctcgtcctcgaccaaccggtgacggtgctccatagggatgactcctccccgcgcgtgtagctccggcgaggtccgcctctttcgcgcggggcaacaagctcgtgattcctgtgggaggcggcggcgacctcctcggcctctcgctgctccaggcgccacccccatcagatcccgtgccaccgttcaccgcataatctcccccacctcgtcatcgatgtcgatggaccacccggggaggggggctcgccgagggtggagggatgatgctaaggatggagctgacagagggagggagctcgccagtttcttttgcttaatcttatctaaaggggaaaaaaggtggatggagatggtctgaccggtgggacccatgctgacatggcgcccgaaactagtctaaaaccgctctaggggtaaaatgtctggtattaacaattggaggatgtattatacctggttttatagtttgggggtgtattttagacaaacataagagttcgagggtgtaaaatggacttttccctaagagggaaattgagggggtaaccgagtaaccattgattccctgaattcaagagttatcatttacacggcggaactagccactgataatttccgaccgtatttgtattgtgaagcggaagagaaagccctgaatacaatcatactcattttaacctttcgcctattataagcaacaaaaatataaaatgtaaactatttgactgttacacgttttttttctgaatgcggatgacttgtatacccctacaagcagcaaaataaatcagcacttttgccaatcactttaagtacatcccattagcaggttcaaacatgtaatgatgtcacataacatttcagtttgaaatagagaaacaaactggagccagacattccctatgaaactactaatttacattcagcatgcccccatcacataacccgtttagcacaaggtattgcgtgctgagatccaaggttgggcatgcatacgtaaaaaggcttacaatgtctgcacgatctaactcaatattcaaaattcaccatagaaaaaaaaacattttttcaccaggcataagcattaccagagaggaagagaggaaacagctcagctccgggatggtctccagttgtttatccattctgtcagtgtgcccacattcctactgatatcctccacattgtcacttcgcaagggcatcactatctcctctttgtagctctcccttgcctcctccaggagcatctggaaaatttcacattctatgttgtttgtgagcttggcacccatataacctctgtgaatagaactcttagtcagaaataagcatttcataatggctattccaacaggtgggtgattgtgcagttctgcatgaattacctgctagtcaagcgatcatgcagaattgagttatctgtttggagcacaactacaaggtcaaaccaacgttctggaaagaaatcacatccatggtaatctactagtataccaccttcttccatcacgtcctcaagctcatcgcaaacctgtcaaaaaaggaaccattcagtgcaattctaaccaacaaaagaaatgatatacagccaacttaagcaatttgcaaagttggaacaaccaatcatgtacttcctttacttcacagttcacatctgtgaggatagcaaaagtgcagaagggagcagaccaaactggtccagataggatgataaccaatcaccaaaaactaccctggacgtcagattttctcagttaacatcagtgggcatgtaattcattatgctaatgattttttttcgtatgttcattgtgagaatgcaatggcattttaattgtatacatctcagaaaaaagcaataataaaactctctcaggacatttacaagcatccatatgtacaactaggtgtaattagtccagaaaatcaggacatgaggttcagcgctgaattattttttggggggtatgcagcatattgtacggccaaaaattaatatttaatatataaatgagtatcaaaacaaaaaaaaacaaaattgcatgatgcagaacatccaaaatattgatatcttcatactagtttttgttcggaacaactttctgccggtgcagacataatcaattcataagacagattgagcagcctgaatcaattcctacatgctttcatataaataagaagggaaaatcattttattgataaagaaaaactgatggtcaatccatgaactagcaaaccagccaccagactgatttgattccctagtccaacattttgtactggcttcactaaagattaaaataaattgttcatattgcattgctaaagacaaatgatgcatatttcttttattgtacagcctccatatttttgttacatggagcacttaacatacataattttaattgtaaaacttagctttacactacatatatatgctatcttaggcctttcattttaagtattattctggagactaaattgaaaaaagtaacaatatgtgctagtactaatgtgtaatattgaagaacttcaaagactcttagtaaaaaaatggtgcagggttggtgggagtggcaaattcactgccatcaccaccattggctttttctaaaaggacatagatgcttagggaccacctatccgtgaaaaacatgagtagttatgcaaaaacatttgttatttattgttttaataaagtatgattaacttacataaacaactaaatcaataaatcatacacttatattaaaagaacaccctgatcaaacatagggacataaatagcccaaattagcaactttgtggatttataattattagcctttttgggcatcaatcaacgcaacaaattttaaagctgaaaagtagctctttatttagcatacctccatctagaaattcaacttcaaatctaatgtgttcagaaaaaaaaacaaaggtaaatcactgccaacataattttcgtttacaattacacttttataatgttataaatcataatttctacacaggactgacaacctagaaaacattgtttgaagagcagtagtaggaagcacctaaaatgcaaatgcgcatcataaaactacaaatacattagaaaactatcacaaaactacacatttcacataactatatttttggccacttataagtaggccccacagtctagattctgtcgcgtttaacatcagtggacaaatgtgtagtttgcaaagtttactccaataaaaatgcaaaaaatgcccataatcaggccatctaatatgtcgctaaccaaaagttcatggtaatacataatacaagaatgctaacactgagtatacacatcactacaattcaagatgcataaatcctaccctaacatatagagctagcgttcaaacaatattgcaaaataaaaattactgtccatcgattagaattgccagcagatggaatcatacaataaactccattattaggttatggttgttgtaaattcagggtgcaggtccaaactgacaccgctgtcaaggaggataggtcagtggaacatcacacacaatgagaatgagcaactttccatggcttgagccatggacactacatcaagctaaaggagaatggggacacttatatggaaagtgttctcccccagattatagtgttttcctactaagcaccagcattggtagagtcatagaaggaaatcctaggtctacaaccatcatgaaagacaagagaactttgctccaagtgctacaacttcttcagtttataacattatgataggcagataccaccataccagcctgtaatattgctagctttacagattacacgctgctacttctttatgctctacctatactcattcttcttgcatgtacatgttttcttctgtatactgtaatgcgctgattcttcagcatatttacatgcaagtatgtctgctgcatctcaagtaactactgcaagtgatgcttctttagtaaaataaaataggacaaaaaagcaggcatccctaagtccttagtttttatcaattaacagaatagacaactcaactaatggatttggacctcctgttccatcaaagttgcacaactaggcctttcactagaaatgcagtctatattaccttcattatgtttgagtgtaataccagaatggcatgatcactatttcaaaaagcacaagatagtgctcacttaatagaagtgtgagtgggaccatgtatacaaaacaagcacttcccgttttcgaattatatttaagtgtctgagaatattttcctgaggctctttaacccaaaaataaactcgaggaacaactctggattcacatttatgaaagaatgagaacgacttttatgcattcttgatcgagtaatgaacagttgatttgtaggatagtttcaggacaagaaaacacaggccctttctttttttggtacctgaggaactgtgcatactggattacttggttgtggtaatccaatgctttccttcatcactggcaaataaaattagtttgcttgcgctataattttcagccattataaagcaaacaaattcacagcttcatatccaaccctgcgtcacaacttcaatctactacaatccaaaatctaaggctaatgatgaatatagattgttcggaatgcagaatcgaacagagatttggattggattgggagagatgcgcggtagggcgggctaataccaggtcctcgttgatgatgtggcactcgagctcctcgtcccagccgtcatggaggctcttctcgcggacgaggtccccgatgttgatgtggcggaggtccaccgcgtcggcgaggagtgagcacgtcgtcgtcttccccgtgcccggcgtccccgtcaccagcacgttcggccgcgtgcgccgcgcgccgccgccccgcgacgccatcgctagaatcggcggctggttagggttttttcgtcctctttttcccggagagaatgggccggcgacgtcacactgctgccctcctggactcctggtggtaccgtgtaagtctagtggttgtcggctggttgggccgggccatggttgagtctgatggtttgggccgtcagccatgtgtccctggtatataggaataagtctattttacctctcttgtcttctctctggtcgaattacatccctcaaacataaaactgggtataacacctcccctaactttaaaaaccggtacaaattgacttctttagtggtttgggaagcggtttttttgctgacgtggcaggtcgacttggtacaagtgtgctgacgtggcagcccagacattgaaggaactaaaaatagaagtggctcccacatgtaagtaataaaggtaaaaataaaaaaaggtgaagcctatttgtcagcccacttctccatctcttcttcccctcttctatttctttctcgagtagctgctgctgctgctgcgttgtgcatacacggaggccgattcgaccacgtgcggcggctgggcggtggtctcaggttgcagcgatgaaatccacggcggcagtcgtctccaccatggcaccatgcggcaccactcgctcgcgaagatgtcgatgaaggcctcggctggggtgggcggcgccgtagtcgccgacgcaaaccttgttgaagacgaaagggaggccaccccatccgtcgaactactttgggcttcaggaacatgcgggttggtgaagaacgacgcgcacatctcagctacaacggtttactggcacaggtggtggtggggggtgggcactagaaaggcggtggcggtgaccccttatctctccctctccttccttctccaagtggtgcggcgacgaggtgcggtcgcggagcatgatttcggcggtagagacggtgatggtgcggtagagatccggtccacggctctgcagcatgcgtcatggcgctgatgacgatggtggccaccgtctgctccatcgccgctctttcgcctactgtcaccgctccagcccgccaccgaccactccctcgggctccgctgccattggtccagctcccggcccctgcaaaccgacgaaggagagagagactgaaagtgaaagtgaaagagaaagagaaacaggagtgagggaggagaaagaagggaaaggagaaatgatgccgatatgtcagtggacc

SEQ ID NO: 12735 - DNA, 4618 bp, Oryza sativa
taatgttttcttgcagatttgcactctcagagtatgtctgttaagtggaattttgttacttctttccatgctatatatattgttaataggatctgctacttcaccctttgttttcttgtaactggccttacaacgtaggaagtgaagttccccatatcctcgttgcattctccaccagtactttacttatgtagtactagtactgtatgttgcttgttatcactcttgtaaatggatagttttcacttgcatgtcccaacttatatttttatttttctaatggaaggactaaggatgtctttctgttcattgggtacatttattaacttcaaaattatgagcactttgctatgaccggttgccgataattttatgttagtttttgggagacattactagaaatagaagaagaaggtattaggcccttttagaatctggttttttttaatcagttccatgtgaactgaacgacttcgtataaatcacggggaaaattcttgcattctaaacagggccttattaggaggtccacaaaaccttgagactgacgttgaaagtgggctgctactaagtgaccgagttgtgagttctgacaagtgaataattggcttccacccctgctcattttgcaccaaaattgattgcacaccagtcatcatcctcggtataagaaattagaaccttaaaaaaaaatctatactcctttaaaatggagtagtggtggtagtgagtgatgattttttttttatatttttagagaaaggccaaaggcctggcttctattaaaagcccggggggggggggggggtctgggagatcccagataagcgtttgcagcacagagaggactttgcctcaacaaaagtaaaggaaggactgactggactactaaagcagaactcaacttgacagcttcaggtttagtatataaacagacactaacgagaaacagaagcagccacaaaacggagacatcagccaattccagttcttctattcccaaatcttgtgttcaccattcttagcttttctatcagcacctccagacttgctagctcatcagcgcgtcctaaagccttccactgcataagataagaaacaatttgaaaggagagatgcagaggtgagtaaacaatctttgacctgaaaatcatattattcctagtgttccaaagaacccagcaaatggaggcgagtagagccgtcataactctgagcctcacttttgaaacctggccaacaaacctaaaaaagtcatcaaaacctccaggacaagcatcccaacccagtgcgtccctctacagatgcaccaaacgaaagtggccatagggcagtcaaaaatgatatggtcagtcgtttccttgttgccacagagcaggcaattttcagacccaaccgaccctttaagtttcaattgctcacaagattggattttgtctctcagggctagccaaatgaaatgtttcaacttcatagggcaaggacaacgccagacaaactgtaatctctcatctaaagcacctctgaacaaaatagctctgtacaaggattttgtggtatacttcttattagaatttagacaccatctcaaggtatcaggggaagaggacaagaccaggttctcaatgatcagcttaatttgacgccattgttccaattctatgggacccatagatccaagtgtttcaggtctgcaatcaaaatctcttgttgattgcagatcataaatagctcagtaaaaatgatcttcagagggcagtcgccctgccaaatatccagccaaaagaagatgtgagtgccattccccacctgccattctgagcccaagttaaaccactttcttgtattgagaattcctgaccaaaattgagaaactctctttgaggagcactgaaagacaccaccaaagatcaagtattttctcctcagtaattccacacataaactctcatcagaggattcaatcttaaaaatccatttggctagtagagcagcattcaaagtcctagtctcagtaaggcccagacccccaaactctttaggaaaagcaaggtcagaccacttaaccatgtggtatttccttccttgcttattccctgcccaatagtatctgcctctaatggagtcaaagttctgatgtaaaccctcataaagttggtaaaagtccatcgcataggatgagtgatgaatttgccatcaccaactcccaaaattctgatatgtgaccatgtgggatcaccatctatccactttctggtacaacagtagaagtcacggactcacggttagaccttggagctctcaatcatgttcatccttgcacaccaataataactagatccttttttacgggagtgaacctccaattaattctaaaagtaagctccaaaaatcaaaatatatttccgctttgcaatgtgctgattcgattttttaattccataacaatgtgcaacattttggtagtatagtaaatatctagaaaccatttgtaagctctaaaaataaaatatatttcctctttgcaatgtgctgattcgattttttaattccatagcaatgtgcaacattttggtagtatagtaaatatctaggaaccatttttgttttgtcctaaattttcaaagttttggtagtataataatgttgcctttcattcagcacatcttggattagatgagcacactgtggattagatcattacattattaagtttttccaaacgagaattatttctagagcagaacttctaaccaccatttggcatttttgtaggtgtcactgaatggctagaacaatgggttcaacacctacctactgctcttaccaaacaaatggtgttggcgctttaaagcaatcacctcatatgcaattccaacaatcgtacaactatggagttaggttcctaaagagggataccctttctgtgcggattaacaaacatatggccaaaagaatagcaacaagcactggaatttgcactaagcctaggaggtctcacatgcctatagtatgctctgctggaatgacaataatttttattgcaactgaatgtcacccatggtgcaaaactggaggcctcggtgatgttctagggggactgccccctgctcttgctgtaaatattctttgtcacgtattgttaaatccaacagtcagatcaaacctcagtgtttctagcaaaaaaatatattcacaaacacaggggtttgatctgattctgcaaacaatttatgctcctgttcgattgcacattcttatgcaactaggtttcattgagataactggttgaagttgagttaacaagatacaagttttgtacatcatgctaatatttaatgcaggatttatcattcatatgttttttcctacattgcattgcacttgccctttatgtacagttcatcttgtgtgaagaaactcattttatcataggcaatgggacatcgtgtcatgacaatagttcctcgttatgatcaatacaaagatgcatgggatacaaatgtccttgtcgaggtaaagtttttaaccatgctgtacgtatttagctggatttaacttataccagttttctgatgttgtagatgctaatttttcctttttacttctgtaggtcaatattggtgacaggacagaaacagtgcgcttcttccactgctataaaaggggagttgaccgtgtttttgttgatcatcctatgtttcttgagaaggtctgataaaccattaattacctgcgttctaattgagtgatgcaaagttctaaaagttttggtatctcagtacaccctttgaatcataaaactttcaggtatggggcaagactggaccaaaattatacggtcctaccactggagatgactaccgggacaaccagttgcggttctgccttttatgcctcgtaagtaaatgcatagatgtgtcgcaacagcctcagccttgatgtacaaagccatgaagtggctacactaagtagttctacaaattgtattgttttgttctatacagagacattcattagttgagatatgtatttatacactaagagaacagaatctgtaaattccatctgataatgtcatataaacgtccccagtcaaaaaaaaaatgtcatataaacgtcaggtttcagtaatttgatacgagcttttaaagtggtccctttttctatctatttatcttttttttttaatttgcatgtgggctcagctaatcacagttgtaggtttgggcaaatctaccattgactgtcagaaattgcatggaattagttttttttcttctaatttgtattatttttgtgcaatttcttctaatctgattgtccttttaggctgctttggaggctccaagggttctcaatctcaacaattctgaatatttctcgggaccatatggttggtttctgtatagtataaactatcacagataattgtctttctccctcattctatctgactgacattcatatttgttaatcaggtgaaaatgttgtcttcgttgcaaatgactggcacactggagtcctgccatgctatctcaagagcatctatcaggcaaaaggaatgtatgtgaatgctaaggtacatcatttcgctatctcttgcaccttatgcact

SEQ ID NO: 12736 - DNA, 5954 bp, Oryza sativa
ggcgttgaggggagccagccaggcatcgagggtgaggagctggcgccacttgccaaggaaaacgtggccactccctgaaattctccatgacggtgcctagcttgctggcttgtttaggtgacaggcagcctgataggatcccatggacttctgagctcgccaccggcaaagccactatttgtatccctgcaggcttctgccatttctctcgtctacttcacgtgtaatataatcgcagatgttacttagagatgatgggccagatggcatgcatttgcctgtttctctctcgctccttctgcatgtgtaatagtatatttggctgtgaagttctggaccctgtcagtcgctgtcctcgtactgcatttcttgtaaggaactactccctccgtcccagaataaaccgtcccagaataaagtaacttagcatgggatgagatccatcatagaatataggatagtatatcttgacatagtatgtttttttttaatctatgccagctttgctggttttatattaagaaggggagaaactgtacaaaagcaccgagaaagcagcaggaagaagagaacaacattaggaaggctgcaggagaaaagaagggaatggaaaatgaaaacagagtacagggagcaggcagagaaggactatgggctgctcatggcgctattctcgctaggttttttttgccccacatgctatccatacattgatttcatcaagaattttggtcaactgtggaattgcaagctccttgttctgttcctctcacaccagattttccaactgagaagcatgtggatggagcgcattccttttgtcttgtccttgtcattttgctctgttcttctctcccaccagtcaagaagtgtttcatctgggttgtgttccatggagatgtgatcacagtccagccttgtggataccttatcccaaatgtcccatgtgacattgcaatccttgaaaagatgttgtgtcgtttctaagtttctgtagcacaattgacaaaagtaattgtttggccattgttggagctgtaggcagttggctgtccagattctattttgtagtagcaaccacgtgaagttcttgcatttggatggcgcccatgttttccaaatcaagcaggcagccctcaattcaattctaccgctgaattgcgccaaataagaagatttcgctgaatatttgccgctgctcgttcatctctaaataattgtcttcagtttcctttgatagaaccgttgcattttcccataacagacggaaaacaatgaggaagtcatgtagcagtgccatgctgaggtcatgtctgatgtcctgaatccattgctccccaagcagtgcatcatggactgatctgtacttccccttggagtgattgtagagtgctggtgtgaggtagttgagcggttgatgcccaatccaattagaatcccaaaagtctgctttctgaccatttcaattagaatcacatggcggtggagtcccaacccaaggttttgtttgggcattcccaccgaaaccagagccatcgaagcatcgaagccttagtgctcttgcaaatttgtcaaggtctagaatcccagaccagcaaatcaaacaagaccagcaggggcctgatccaaagggaatcaaacagtaggaaaccaccgtgttgctgctagtcatgtgatgttaagctgaaacaaagaagcaatgcattggcgttttgaggttcaagaataaagtattcatgattttgggttgcacattctgaaattgaattgattcgggagattggagcttgcctaggggttcatttcacccgattagcaccattctgaggactaatgtagcatcgctttcacaaatttgtggagtttgtgcggtggatgaacgagcgtacattggcgcattagaacactttcgcttttttatttaggcgcagggtatagcacagctccacaaaaattttattttatcaattgcttcctccgttcaaaaatatgagtatcagatttaattggaatctaaaccgagaccgatggagtagggttttcgcaagtctgccagtatctaattgtggccatgatgtggatttaactgaagtatgcacgaaataagtctattttgcctcccttagctggtactccggatttcctcaactgcaaaaccaactataacacctcccctaacttcgaaaaccggtataaattgactcttttggtggtttggaaaaaggtttatgctaatatgacaaaatgaccgtggttgactcattgaatcagcaggagagatccacatgtcaatgaaacatgtaatccttctcccctgtcctcccccctatcctcttttccctatttgacgactacaacaacagtcggcgggccgaggtttggtgaaagattcagggcctgatgctggtggcgaaggggagggctcgctaaccaaatgttatcctcacttgcgacttctcgcaaccatccgttaccacctcctctaatgctggcacgcccgcaggggcgcctgcgttgtccgcctgctccaagatgagcatcaagagccaactcccaccgtgtcatgcccagaaattcatgaaccaaaatttcaagcagaatatgcattaaaaccctgtccaggaccgaccagggtacacaaacgacaaagttgatatatagatctgcgtcttatagaacacaataaaaagtcttacaaatgcagcagaaaggtaaaaactagctaaacttgggacaactgatgctagtagcgcacaactccactccacagatggtagcgacgaaacttactcctccgagcagtagtccagctctgaggtggggaagatagagcaagactgagtactacccattaattgtactcaacaagtcataccaagaggatgtatgatgtaaggatttcgaaggaggctaggagttcttttgcataaagcagttgaaagcggtaaaaactattgtagtaaattaagcaatattaatcatcattgtccaatgctaaaccacgttgcgataggcccacacctaaactacaccagttccattaagttaaattattaatgatgagactaatcacggtgaagctagttgatcacccataaccgtaggcacgactattcaaatggttttaccatcactagaggtgtacaactatacccacaagacacaaccccatgacatgtttctgtgcgccgacatgccatcacgacataccataaagaaactgtgataggatccttgtcataactccccataactaagcgcaccacgctgaggattcaccttcaccttaaacaagggtgggcaggcccccgtgcatggcagtaaattcgacaactgattaacccttaagctgggtccaactgttgatatttcttacaacctgttgatgtaaaaacacgggaacctgggagatctgcttaactccagtgcaggtccaagactagtctcgagtgtatcaagggcgtgctagctgatttgatcctgcaatcagtaagaaagacaaaagcaaagttagtcaaccgatagccgattggccgatagcgtatcgttggtggtctcagccgatgtagttagacaagatcggctatggactggatagattagtggataatagatcctaaacatgcctcatcggctataatactgcctatcaagttcgataaagaagcttaagacaatattatgaaaatagccgatggaacaatatttagagcataataggataatgtaccacctaatgccctagtacggacttatataggcaaatcaatctatataaatatatcaaactatgatcggttagtagtttagataacctagccgataccgatttagcttgatatagctatatggagtgatctgtctatataagtggcaaatataaataaaacttagtaaagaaatatgtatattaggtaagatcggctgaaattccgatactatctttcattataattgtttccatgttagtttttagggttcaataaaagactagggatgatgcaccacaaagtagataaagaaacctagagtctaaacaatcaagtaaagaaccacttttcaggatggtagatgccttaactagtctaatctagtaggaagatttagccgataccggcaagaaccctaaagcgagaaccagctgataaaggtaaatctagatactaagtgtgggagttatcgtaccggggtagcccacaacggtactcggaggctagatcttttgcgagatacgggcctaggcccatgtaatctgttactataaatgatggggaataggagaatggaaacctatcccgccatattttgatggatggcaggtacccagattgtgagggataccacatctaccttgccgccgatcaccctgctgctatataaaggggatcggcagcaccctttggaggtgggacactctcttcactcaacacccaatacagagagaatccaccaaacaactggactagggtattacctcatcctgagcgcctgaaccagtataaatcgctaggtcaccatttctttcttgcatctagcgcaccctataaattttattgctgatttttgaaatcgacactaagagtagattagctaagacatatgatagcaaatgacaatgataaaaggactaaaacatctaaagcgacataatagccctgatagcacaagccaccgatacgtgttacctcttgcaaagcgaactcgtcgaaaagtaaaaatgaaaagggtggcgatgcgccgaagttgtatttgtctcccctattacaatgctaaggggttcatatttataccccgagtacaaacttggtccattatggacacgacttaaacctttctaaatataaaatacaaacaaaaccatataccacgttctcttaccaaaatctctaacaaaccgacataactaacctaattaatagatacaattgccttattttagctctatctctaattgtcaatgactgttatctcaatctagacccatgtcgagcccaaatcataccatatgggctggatcagccatcggcttcatcaactcatatcttatttccagccgatacgatgtccagccgatacgtagtccgactccaaattaaacttgatttcacaccaaacccgcttctatcttcttcttccttctccgaatctgatgcaaaattctgctgttaacacatgcccccctaattccgctgtattatataatgcagcagaatttgctctcggcaatcttgtgaaaatttagggtttctgctttgactgttaagcttttaagcaaaggctcactgcttccaaaatcctctttttccagccaagcccttcacaaatccccttgctataaaaaccccttcgtctctggtgatctctccggtgattcaatcttccgatggcgatctccccttgttctcaaccggttctgcttagatttgcggtgtacccagagcgatgccaaccacttccaatgttcacgaagtaagtctgtttttaccatcaattttcccttgtaaaaaccctttcccagttcttaaggtttcccgctttttttctgactttttcaacaccttaaaggccaagtcttgattctcgtccttcatgctaacacccaacattttcttggccccatgagcgatccggatcccacgatgttcattaatgctgagacgaataggatcccttttagagaatcaaaccagaactcagtcattggccaaatgtcttcagatcttggcccccaaaacttcatgagtggaaagattagtttaaaagggtattgactaccaagcaatcgtcatggaggaagacaaaaatagaacagtgccttcaactgtctttagccgatatgccaaagaacaaatctatgttatcggccgcaacatgtttctggtttaacaccattaatgccttcatctttggacatgggttgatgacaccaacccttttggacatcaagatgctca

SEQ ID NO: 12737 - DNA, 912 bp, Oryza sativa
tatatattacaaattgaacaaataacttaaaattatatattataaattgaacaaataacttaaaataagtgatctaacaaatgtagttgaagaaaattttatgagaaaacgtatttgtagaagcatgacgcagataattcgcagcaataatcaggtagaatgattgcgttcatcttaagcctaagcgagataaaattttgcagcatttggtgtactagtgtccagaagtgtaaaaacgtattgtcattaatattcttttaaaaaaaattactcaccttccaagataggtcttgagccatgcagttctgaaccatttcttggaatgccggtgtgttgtactgcttcagagcccgtttgacagttgaagcaaccgctgtgacgtccactggatcaacagtttcgcactacaggatgacatgacaaggctagcatgacgaactctttcctgatcttgagggcaatcaaaaagtggaaacacactgctccttacctcgacattgaacaaacccatgtggaatccggtcacgccctccttaaccgtgtcgacaagtcctccagtagatgagcagatgggaacctgtagtttgcaacattgtgaatttgattttctttttggtggtattacccacagtgtagttttactttgaacttttcaccacattatgatgaatacaaaaattcaattatgttgtattgctgtgattcataataacttcatagttcatactgcaagcaaggatataaaaattgactagtaatatagtatcaaggactgtctcattaacttcacaattgtgtaatcagacctaaagtgagaatacttaccactccatatctcatcccttgcaattggatgagaccacatggctcaaacctactaggaacaattataaaatcagccccagcaaacat

SEQ ID NO: 12738 - DNA, 1643 bp, Oryza sativa
taaggagaagaactcaacaatttaataccataagattcggtaaaactcttcacttccttagacataaaagaagcaccttggtccgtagttaatgtttgtggaataccgaatctatggataatatgcttcaaaataaaatcaattacctccgtatgagtcatattcttcaaaagcacggcttcggcccacttggtgaagtaatccgtagtaactagcacgaacctatgcccctttgatgacaaaggataaatttgaccaatgaaatccaaagcccatcctcggaatggccatggtttgattatggggttcaacacggcggcgggcgccaattgaacattgccgaaccgttgacaagcctcgcatcctctataatatttgaagcaatcatcaatcatcttcggccaatagaaccccgctctcctaagcaaccaatttatcttgtgggccgattgatgagttccacaaattccttcatgtacctctcccatagccactttagattgatcttcatctaagcaccatctatatttcggcggtataaatctccatcaagcaatgtgtatttgaacgcttgccgccgaattttccgatcaaccttaagtgtgggatccttcaaatattgaatcaaaggaattctccaatcctcttttgcatcctgggcacaaatgtccgaattcacaattaattcggcctccaaattgattgaaacatgccccccagcgctctgtccaaaccggtcagaccggccacacagagccggtcagaccgctcgggatcgccggtcagaccgacggcgtgcggccggtcagaccgcccctggtcaccggtcagaccgcccctggtcaccgatcagaccggccgtgcaatgccggtcagaccacccctggtctccagttttgctaatttcgcacaaagatttaaaatcaagcaccggctcttctaatattaaaaataatcccttcttcacattatagccagatgcttgttgtgccaagtcatttgctctagaattattatgcctagcaatatgtctaatagcaaaattatcaaaattggcaataatatctaaacatgaatcaaggtacctatttagtgatccgtccaagcatttgtagactccggcgacttgttgcaccaccaattccgaatcaccaaaagcctccacatgtttagctccaaccatctccataacttgtaagccgaacaataaagcattgtattcggcttgattatttgtacaataatattccaaacgaaccgatgcttcataacacatgccattaggtgaaaacaaaactacccctatgccttgaccttctttgcaagaagaaccatcaaaataaatcttccaaggtataacttcaactaagcaaacctctccctcatgagcaatatctatatgatggtctactataaaatcacatacaatttggcctttcatagatttcaatggttcataagccaaatcatattctatcaaagcatatgcccacttgccaattctcccacttagaattgacctttgcaacatgtgtttaataacatcggcttgacaagtaactatgcatatactagataacaaataatgcctcaatttggtacaagcatagtataagcatagacaaagtctctctataaaaaca

SEQ ID NO: 12739 - DNA, 696 bp, Oryza sativa
agactagttagtagatgctacagctggctgcgagttgatgggtttcttagatgcatactccggttatcattaagtttttatgatgaagatgaagagaaaacgtcgttcatcactccgtttggaatttactgttttattcgaatgccatttggtttaaagaatgctggagcaacttttgcaaggttaataggcaaagtattggcaaagcaattaggccgcaatgtagaagcttatgtggatgacattgtggtgaaaagcaaacaggcgttcactcatggcaaggatttgcaggaaacatttgagaatttaagaaaatattcagtcaagcttaacccgaaaaagtgtgttttcggggtaagagcaggaaagttgcttggtttcttagtatctaagagaggcatagaagcaaatcctgacaagatcgcagcgattcaccaaatggagccaccaaaaaacacaagggaaatgcaaaggctgacaggaagaatggcttctttgagcagattcctttctaaatctgaagagcagggtttgccatttttcaaaaccctaagaggagcaaacacatttgagtggacggccgagtaccagaaggcttttgatgatttgaagatgtagttacagaatatgccaactttagcaagtccacagaaaggtcaacctttactaacgtatgtagcaacgacaccagggaca

SEQ ID NO: 12740 - DNA, 859 bp, Oryza sativa
aagttgcttggtttcttagtatctaagagaggcatagaagcaaatcctgacaagatcgcagcgattcaccaaatggagccaccaaaaaacacaagggaaatgcaaaggctgacaggaagaatggcttctttgagcagattcctttctaaatctgaagagcagggtttgccatttttcaaaaccctaagaggagcaaacacatttgagtggacggccgagtaccagaaggcttttgatgatttgaagatgtagttacagaatatgccaactttagcaagtccacagaaaggtcaacctttactaacgtatgtagcagcgacaccagggacagtaagtgcagcattagtgcaagagaaagaaaacaagcaaatgctagtttacttcgtattagaagctttacaagggccaaagacaaggtacacagaagtggaaatgttgatttatgcaattgtgatggcctcaagaaagttgagacattatttaatatcagatgacataacgatactgtcagcatacccgataggagaggtattgacaaataaggaggtagcaagaaggattgcaaaatgggcaatggaacttctaccatttgatttgaagtatacctcgagaacagctataaagtctcaagttctggcagatttttttggcagaatggactcccaatgaggtggaggaaaaggaagaagatgaaaaactatggataatatactctgatggagcatgcaatgccactggcgtaggggcagcagtggttgtaaaaacgccgatgaagcaaacactaaaatattttgcaaagctagttttcccatcaacaaacaacacggcagaatatgaaggggttttattagccatgaga

SEQ ID NO: 12741 - DNA, 1431 bp, Oryza sativa
atggctcaaataatggagaaggaaaagggaaaagacaatgagaaaacactcgtggaggaagaaataactgggggcaatctggaagaggccgaggacaatggtggaattctggcagaggtagaggatgatggttgaataatgatagaagcggaggaaaagagtatcagcctaatcatagcaagttttgtcaagcacatggtctaggtggtcattctacggaagaatgctatagcaagttttgccaaatccatggtctaggaggccattccactgaagaatgtaggcacatggcttacttagtggaaaagcatgtcggtcgatatgagaacaagcattagggggcttgagatcagcgagggaaaaatgccatagaagcaccacaagtcatgaaaatagaagaaattgaagaagctccaaaaagagtgataaatgccataacaggaggctcttctttgggaattgagtcaaaaagacaaagaaaagcatatgtgagacaagtaaatcatgtagggacaagctatcagtcaaatccaccagttcattcgaagacagtaatttcctttgggcctgaagatgcggaaggaatacttttcccccaccaggaccctttggtgatctcagtggaaatagtacaatgcgaagttcaaagagtcttggttgatggaggaagctcagcggatgtgctattctacgatgctttcaaaaagatgcaaatacccgaagacagattgacaaatgcaggagtgcctctacaaggttttggcggacaacaagtacatgcaattgggaaaatacctttgcaagtggtttttggaaaaggcaacaatgcaagaaaagagaaaatagtgtttgatgtggtaggtacgccgtatcagtataatgcaatactcggaagatcagcaattaatatcttcgaggcaataatacatcacaattatatatgtatgaaacttcctggaccacgaggagtgataacagtccgaggtggccagttggcggcgagaaagtttgagcttcagggaacgccaaatgtcaaaggagtccatgccgttgatcaaaaacatggagaatactttaagttgcaggaaccagttcctgaagggaaaagtaggaaagtatagttagatgatgatgatcctagaaaatacattttgctaggagagaatctggaaaagcatgttgaggaggaaatcttgaaagtagtgaaaagcaatatggatgtctttgctggtcaccagaagaactagaagggggtagatagaagcctgatcgaacataacttggcaatcaagcaaggctgcaagccaaaaaagcaaaagttaagaagaatgtcaacagacaggcagcaagcagcaaaagtggagctcgagaagttgctcaaagcaaaagttataagagaggtgatgcatcgtgaatggttggctaatccag

SEQ ID NO: 12742 - DNA, 593 bp, Oryza sativa
aaaagggggacctgacctggtgcttttccttggggttgacgggggcgaggacgacggctctgtcgcggacggtgaggcagtagttctcgttggcgcggcagaagatcttgaagatctggttcgggtccgacggcgccgccggtgcctggttgtggtggtgcccgaacccaaacatcttcgacccttaattcgatcggtgcaactcgcgactcgcgagagaaatgtttttgtgctgcgactgcgagcgatgatgcgaggaggagcgagaggtgccacgttttatagaaggccaaggccggccactctcaccctcacccactgatcgatcggctcggctcgatgacgcgctctcctgtgccaactcccacgttcgctgacagctgggcccaccggtggtcctcgactggctcaaacgcgtgacatgcgtgcgtgtatgttttgcattctagccgtttgatttgaatatttgatatgatatgatatatctttggtgtttaatgtactctcagattcggttccatgaacttgacttggatgctagtaccagtaattcattgtgctgagatttgcattactaaatgtgcgagtaaatg

SEQ ID NO: 12743 - DNA, 7478 bp, Oryza sativa
tttttcttgatttactgagacttgaatgggcttaaacggagctcggatgaattaattatgaattttagaagattcactgtgtttattactataacaaaaatccttaaataatttattgcgcaatattttccagggctgacgtcagcacggagggggtgcggcgccggcaagcggggcccactggtcagcggctcaggggagagcggttcaccgtggaccgggaccacgcgggtggtccaccgccgttccacggaaccaacggcccagatcgccctcggggccgatcggacgggcggcgatagaggcggagatgtgggcgcggcggcggttgcgggcgcggtggcgcggcgggaggttggggaagggcccgacaggtgggccccacctgtcggtgaccccgggagaggagggcagcggggcggcctggctgggcctcggcctgcggccggcccagcagggaggagggggaggaaaggagagaatgggccggcggcccattcggaaaaggaagggaaaaagaaaaagaaaaaaggagaaaagaattttccctggaattaaaatattgcttgctcaattttaattggttaaaattatttttagggctctgaaaattccactaaaaatcctgttagtgaatttcgacctgtagaactcaagaaaaattccacatgccaattccgattattatttgcattgatttaaaaggggtttactcttgctttgcaccggtattttcttagggtcatttataaattaaatttaggcttgggaggagaacttcagggtgtgacaaacctaccccccttaaacggaatcttggccccgagattcggaggagctggcgaagaggtgcggatgggcggctttcaactcatcctccctttcccaggttgcttcctcttctgaatgatgactccactgaactcggcaaaacctggtgaccttgtttctggttcttctttcgctggtatcaagtatatgaaccggcttctccacgtatgttaggtcctcctggaaatcaatgtgttccgaatcagcctgttcttcaggtacccttaagcacttctttaattgggacacgtggaacacgtcatggatgccgatcatattggatggaagttctaactgataagcaacttccccccttcgttccaggattttgtatggtcccacgaagcgtggtaccaacttgcctttcgtctgaaagcggtgtactccccggagcggagtgacacgaagatacacgtaatcccctgcctcaaaagtgagctcccttcgacggttatccgcgtagctcttctgtcgagactgggcaatcctcaacctttccttgatgattctgactttctcttctgcttccgctaatacctctgtcccgaacagttgacgctcgcctgtctgatcccagaagaggggtgtgcggcacttccggccgtataaagcttcaaacggtgccatctgtagactggcctggtagctgttgttgtacgagaattccgcatatggcaagcttttgtcccaagctccaccaaaatcaagagcgcaagctctcaatatatcttccaagatttgattgactcgctcggtttgaccatcagtttgcgggtgataggccgtgctgaaatttaaacgggtccccaattcttcctgcagcttctgccagaattttgaggtgaactgactccctcggttagatacaatctttttgggtactctatgtagacacatgattctcgagaggtagagctccgccaaccttttgcccgtatacgtggtatgtactggtatgaagtgagcaaccttagtgagtcgatccatgactatccagattgaatcgtgacccgatgatgtccagggcagtcctattataaagtccattccaatctcctcccatttccattccgggatttgaagaggttggagtaaacctgctggtctttggtgctctgccttcactcgttggcaaacatcgcagagtgcgacgaattcagctatttctctcctcatgctgacccaccaaaacttttctttgaggtcttgatacattttggtgctgcctggatggatggagtactgggtctgatgagcctcggtgagtatcagatccttcagttccttgtcgtcaggtacacacaatctttctcccaaccagattgtgccatgctcatcttcgtggaaatcccgggcttttccgactctcatgttctttttcagctctgctatttcagaatcatttacttgagctactctgactttatccacgagcgtaggccgtgcctccagagcggctacgaacccgtattcaacaattcccatgttgagatgctcaaagtcctgccgcaattcctcacacatgccctcgatgcacagggcagtgcagtgacttttcctgcttaatgcgtctgccaccacattggctttacccgggtggtagtgaatgctcatgttataatctttgattagttccaaccatcttcgttgtcggagatttaggtccggttgggtgaagatgtatttcagattcttatggtccgtatatacttcgcagcggttgccaatcagatagtgcctccagatcttcaaagcatgaaccactgctgccaattccaggtcatgagttggataattcccttcgtgtggacgcaactgccgcgaggcatacgcaaccaccctgccctcttgcattaggacacatccaagtccgtggcgggatgcatcgcaatagacttggaagtctttcatctgatcgggcagaatcaaaactggtgcggatactaatttctttttgagctcctcaaaactcttatcgcactcagctgtccatttaaacttctcatctttcttaagcaactgagtcatgggtcgggcgatcctggagaagttttcgatgaatcggcggtaatatcccgcaagtccaagaaaactttgaatctgcgacacggtcttcggtggggtccatttggtaactgactccacgttcgatggatcaactgccacaccttgagctgtaatgacatggcccagaaatttgacttccgttaaccagaagtcacacttgctgaacttggcgtatagctagtgctccttcaacttctcgagtaccagacggagatgttgctcatgttcttcttcggactttgaatagataagtatgtcgtcgatgaataccacaacaagcttgtccagaaattccatgaacactttgttcatcagattcatgaagaatgcaggtgcgttagtaagtccgaaagacataaccgtgcactcatatagcccgtaccgagtggtgaaggccgtctttggaatatcctcttcccggattatcaactggtggtaggctgatcgcaggtctatcttagaaaacactttagctcctttcagttgatcaaacaaatcatcgattcgtggcaaaggatatttgttcttgattgtgacctcgttgagtgcgcgataatcaacgcacatcctcttcgtcttatcctttttctccacaaaaatgactggagcaccccaaggtgaagtacttggtcgaatgtaccctttctgcagctgctcatcaacctgcttcttgacctctgctagttcgttggccgccattctgtacggtctcttgtaaattggagcggttcccggtgccaagttaatccggaattcaatctctctcttgggtggcatggtagtgaggtcttcggggaacacttctggatactcgtagactatggggatatcttccaatttcctcaaattcttctccatggtgaccactgggatttccgcttcaatctgattcaaggagaccccttgctttggtgagtttggtgatttgtacactaccgtttctcccttctcgttggtcagggtgactgtgcgattcacacaatcgatgactcccttaaacttggtcagctaatccatcccaagaatgacatctaggtttttggattcgagaagaatgaggttggctagaaacggtgatctttgaatttctattgttatagaagggctgaattgaaccgaagtggagctattccctggggtatgaacccgcattggtgtgctaagttcctctcttattaacccatgcatcccgacaaacttctttgaaatgaacgaatgcgttgcaccagaatcaaaaagtactgttgtagggattgagttaacaggaaacgtacccagtacaacctctggtgctgcttgtgcctcctccgcagatgcgtggttgacacgagcctggataaaccttggcccggcacgcctaggcttcgggcatttgtcggcgaagtggccaagctcgccacagttgaagcaagaccctggttttgctccagtctccttcctggcttgcgcggacgggccggactgtgccggtgccattggtgggcgtggagctgcaccgcggttgggctgacctccatggtggttctgactgccactggcgccctggggaaagttgctagggtggaacgggcggtactggcgaacgatcatggtggtaggtccaccctgctgcccgggagcgaagcgcggcctctggtgacttccctgaggtgccctgaactgagcggccttcctcttcctgtccatcttgttgcgttgatcctcctgacggattgccttgtcaactagcctctcaaagtcggcgtagtccccagatatcagttggttggtcagctcatcatccagacctgccatgaacctttcctgcttctcggcgtcggtacggacatcctcgggtgcatatcgcgcgaggcgattgaactcatggagatactccgtcacagtcctgttgccttgatggagtgcccgaaattccctcttcttttgtgccacgaccccgtctggcacctgcgccttcctgaagctacggcagaactctgcccaagtgacttcagtacctggtgggcgggtggccatgtgattatcccaccaagctgacgcaggaccttgaagctggtgtgtggtgaaagcaaccttctcctgatcattgcactgcaggagattcagcttcttctctatggcatggagccagtcattcgcctccatagggttggtggtgctggagaaggtgggtggcctgacacgtagaaactctggcaacttggactgagggggagggggaccaaactgctggtgctgctgttcggcgtgctgcaacatcctctggtacatctgctggtgctgctgctgcatctgttgcatcatggctgccatcatctgagtctgatgtgccatcacttgggctagcgtcggattctcgggaagtggtggcggaacattgccggaattgctgttgggatgcacaccctcagtgcgctcttcgccgttgctgccctcgcctgttgcgcggctaccattcctggtgtagaccatctggaggaaaagcatacaggggaaaagaaggaaaacagatgctcaggaactaagctttattatataggaatttaaactgcaattgttctgatctgaattaaaacacttaaaaagcaagcaaaaaaaataccttattaagacagccatatcataggcacatgatatcgaccgtcgactgaccccaaacaagcaacctaaacacacaaactaacaagcagaagctagacagtcgataaactaatggaaaacgagcctaatgctccgaacggctcctgcggtcggtggagtcgaaggcgtcctcctgctcgtcaccaggtccctctgagcgactcccggagcctggccgataagtctcgccgctgcccgactctgagccactggagctactactgctgagatcgcggctgccactgggagtagcagacaaccaacctccgttgccactggctggacccctggcggctgatgctggagcgaaggagagagcggacgcgggagcggacatgtgaacgggagctggagctggtgctggagctgcaggaactgcgggcggaactggaggtgctgcgggagctgctggcggaggtgggttcctgggcgcaagttggatgcgcacgggtgcagtcgtcgacatgcggggtgtagtgcggatccggactccttctggcgcgggaagtccctttaactgagcaatcttcctcttcaggcgcgctattctagtgcttcagagcgacgatccttatgagcgggccatcattcaaggcctttgacgccttgtgcaggtccgagtgcatcctatccaatccccttatcacagtacacatgtgaccaaaggtagtgtagttctcgtcagctgtcggacggaaagtactgacatcatcaccgctggctcgacaagggtgaaatcggtacgccgtgtcgtggaagatgtagttgtggcgctcccgtagtctggccatcatcaggtatgctgcctcctgacaggcgtgatctactgtgcctccggatgcctcaaccaccatattagctaggcaggtacccacgtagccgtggacctccaggcgaacacggtgaggaagctcgccactgagcggtggaaccgtcgtgtactctggcgcgttggggtagcccaccaccagcgtcatacgtgccaactctgccacaaagtcgatcatgccttctcctcggtggttgggggggtggccggccatctagagaaggcaaaggactaggatcaatgcatgctcaaatccaaatttaaataaagcaataaaagactcaaataagagaatcgaataagagcgaaattttatgcatagatcattttgcatgagagcgaataaagaagacagacccacataacgataaaataatggggaaattagatacatactaataataacaataagagcataaataccttgcaacccatgttcctgagctaggacccaaatcccaaatgactaacgaataaatctcaacagttttactaaaaccctggactgacttgttttgacaaatctcacttaaacgagcgaccaagatttttcccttgaaccacaagacagatcccaatttttcccggaacaaatccaattgcaaagaacatatgcaatgaaagggattcagagagctcttaggtttttccatttggcttgtcctacggtcaaggttggctctaatactaacttgtcacgcccagaaattcccgagtagaattccaagcagaatgttcattaaaatccccgtccaggaccggccggggtacacaaacgacaatgttgacattcagatccacgtcttacaaacatcataaaagtcttacacaaatgcagcggaagaaaagaaagacaacaggagctaagccttgactagaactgcagcgggaacaccactccacaggcatcctcgacggcacggacgaagcctactcctcggagaaaccttcatctgacacatactcgagctctggggatgggaaaaaatagagcaagactgagtactacccactgtactcagcaagtcataccggaataggggtatgatgcagggaattatcaaagaagagctggagtggttcatttgcataaagcgagcatttataaaca

SEQ ID NO: 12744 - DNA, 948 bp, Oryza sativa
tcaagtgacaagcatgacttgccttgctctgctgctggaggaacctcggcgactatttcgaagtacaccggatcgtcttaggaaccggaatctagcgacatacaaggcaaacaatgcaaacaggctaaaagactactgaaacagggaacaaaaccatttttaatggattctacacatttttcttgatttactgagacttgaatgggcttaaacggagctcggatgaattagttatgaattttagaagattcactgtgtttattactataacaaaaatccttaaataatttattgcgcaatattttccagggctgacgtcagcacggagggggtgcggcgccggcaagcggggcccactggtcagcggctcaggggagagcggttcaacgtggaccgggaccacgcgggtggtccaccgccggtccacggaaccgacggcccagatcgccctcggggccgatcggacgggcggcgatagaggcggcccgcgggctcggctcggcatcaaagccgaccggccggccagggctagcggcggcggcacgcgcgcgtcgcgttgccggcgacggcattcggcggcggaggcgacggcgcaaaagcgacgcgaaagcggcggcagcggacggcggcaacgaccgaaggcgacggcgagcgcgatcggtggccacgcacggggaattagggaagaaaaggaaaggggagggagtcctcaccggaggggacggcggcgtccggcgacgaggagcgacggagggaggtcgacacgcggcggacggcgaccgggacgacctaaagaacgaaaagaaagaggttaaagaggaagagagggcccataggagacgggaatgccggcagaaagcggcggacatggcgaccctcaccgtcgcacgatgggaatggcgctccggcgacgaacctcgacgaaggaggggtggacggggtggatct

SEQ ID NO: 12745 - DNA, 14379 bp, Oryza sativa
acatgtttactttaactccatgtacaagcataaacctaacaacatgtatattagttagttgatgtaaattagcacatgtgttttcactctatggttcatattagttgacaaagattggtagtaacttgatcaattttcagcttcaccaactgcagtaaaccctgtctgtctccatcagaagtacatataaaataatctgtttcctgattctatgagatttgtcggagcgtccatggattagaacggatcacattcaacgaacagcctcttgttgataagaaactgacggttcttggcagggagtaactaattaattaaagaaaacaagaaattttcttcaaagttgcagcatggaaggaaactttatggagaggttggacaatctgatttctctcctgcaggaaattaaacagagcaataatttgtcggaaagtttcaaccaaaatgaggtcaatgatgtgtacattccataagaaaggtctttgccatgtcaacatcgatgacaaatgcatgaacaagtatatatcatgatcagtcccgtgaaggggagagcttcacttttctatctattgcagaaaagatgctgctcaatttgttaatccgtataaggcgataagagcttgacaattagatgggacatcatggtgtgctgatgagtcacagttaataatccaaaacatatctggaacaggatttgtcgccgttcgttcgacgaactgataaaattagttcagaaaattcaggttgctttcggaggaaggtttgaatgtctcgcatacaaacgaagaccatgtaataatcaactcatcagccaaccataatccctccttgtgacgcaagttgtttctgattaactcaataatcatatagtgtcagattggcatgttactcaggatgttaattttgtcttgaagattacagtttgactgcttccgaaacaacccccttaaggaaccacaaaaaataaatcagtagatgtgatactatttcagccccttggaatttcacataaaacaattcaatttccgcacgaattgtaaacttttttgttgtaatttggtaaattacaattctgctgtcatatcatttacatgcaattttgcaggctgcgaaagtagattagggctgtgtttagatctaaattttggatctaaacttccaacttcttccatcacatcaacctgtcatacacacacaatttttcagtcacatcgtatcaattttaaccaaacttacaactttgaaagaaactaaatacagcctagaagaagtgggtaggaaacaagaagagacagcaggtaagagcaagtacacaagaataatagcatagaacaagtaaggttttctatattacaaaataagttaaataaccatatctacaaaaacatgtttcctaatgcacaataaataaatagataagaacaccaacagcaatgagatgctggaaagtgcatagttaatggctcaatatctggacacgcatagaattctccaaaatctactccagctgcaagaacaatacttaagcatgattaggaattgaatacaacaccagctacaattattcggagtatccaaacacagcagctgaacccacataaatatatataatccaaagacagcatggacaacagtactcttttcatcagattatacaatcagccaaaaaacaaatctgaaaaacagagaagaaaaaagatatgtacccattctttgtgatcatttaaggaggaaccagcccaatgttctagaacaaaagcttttcgtcaaagcaaaatcaacattggcaacactcagaaaacattaaattattggagattatcatgctctagtatcttggttgcccttatgcccagactttggggcccaatttctgtgttttgtgccaaacccaccacaatgatgataattagttaatcacttggcttgctttaagatgcatggctccttcctttttgttataataataatgctaacactgatcacaattggtgcaccatgcctccatctccactaaactaacctgtgattgctctgcagtttatctcctatggcccaccaaccacttgagagaataatcaattgcaaatatgcaaatggtttataatccactctttagaaggaaaaaaaaataaagaaggcatcaagcaaaggaagatatgatatgctcatggaggaaccaaagaatatatactggtgaatatatctatccattgatgtactgctgataataagcatatgttcctgatgaacaacatgaatcttgcatggttaataacataagacagacagcacatggatcaaaatcttactgatgcccaaagatatatatgaatatatatcgagtaaaataaaaactcttgttggaattcttgtatacaactattttataaaacccaaagagaggggcaaaaattaatagagtaaatatcagctgttcttcatcaatctagagctccctttgggtatacatgcttctttgttgatgaacaatattatttgcgaacagcttaaatatgtactaaaaaaccatctcatttgaatcaaattaagcaaacgaaggggaaaaattaattgaaagaaagaacttctttttttttggttagctaggttgctatgagcctctgatgatcatgccaccatctgctcctgctccggccactgcgcgaatatgtcgccggcggcgtggccgtccttgacaagagagttcacccatgacacgtccggctccgccgccgcggcgtgcgtcgccaccggcatggcggattggccgcggaacgcgaacgacgccgacttgcggagcttgtgcagctcgtcgccctggacgccccagtccagcttgccgtccggcgagccccagtccgagagaatggacggcgcgccggtcgtcgccggcgacatgagcgaacgcgccgccggggcgcggcctccgcggtcgatgaagctctggctgcgcttggcgaacgccgaggcgcgggagctcatgatcgccttcgccatggagtggtccagcccgaacgcggtgttcgcgccgcccaccatcggcgaggtcggcatgtgcatctgcgtggtgtccgccatggagctgtacgcgggcatgtcgccggcctgcttgagggacagcgcgtggagctgggacagcatggccgggtcgacggagccgagcaggtcggtgtagtccggcacggccctcgccggcgacgcggtggcgaggccgttcgccgcggcgccccagctcgccctcggcgacggcgcgccggacaccttgtcgaacagcttctgctggtactggtccagcgcgagcatctcgaggtcgaagtcgagctcccgcgcgccgagcgccgtcttgaggcggctcgctggggacgacggccaggcggggctcatcatcgccgccgccgccgccgccatgtcgagcccgttgggcggcgaggagcgcggcgacgatacggtgggctgcatgccgacggacacggcggaggggttgacggcgcggagctcgtcgggcttgtgggcgaagaagcagatgcggcgcgcgcagccgacctcgtccttgcagaggcgcgtcctgtactgcgccgggtggagccagcactcgaacacgccatgggcgtactcgcacgcgtcgcccttgcggcacgagccgcccttgcggaactccgggcaaggcacgcagctgtaggagtagcggcgagggtcgcggcggcgcgcgttctcgccggggtggacgaaggggcactcggtccagtcatgggagtaggcgcgggagcacggcttcaccttgaagctgtacatgcggaactcgtcggtgctgaacagtccgctcttgaggtcgggcagcgtcaggtcaggcgggtactccttcttcgcctcctgcggcggcggcggcgacggcggcgaggccgacttcttcggcgacgacgacggcgacacggccggcgacttgagcagcagccggatggccttctccgccgcggtggcgcgcgggaggaggtcaccggcgcggagccccgaagccgagagcgcgtcgaccgacgcccccgcggcgagcaacaggcgcgtggccgcgaccgcgttcgccgcgccaccggcagccgccatgtgcagcggcgtggccccatccgtctccgacgcgcgcgcggcctccgccggcgctgccgccacgacatacccaagcacccccgtgctcccgtacagcgccgccaccatcgccgccgtcctccgctccatcccgagcctcgccacgccgctcgccgaaggcccataccacaacccagccacgccaagagacaccttctcctcctccacgaccctcctcaccgccgccacgtcgtccgctgccgccagctcaagaagcaaggacgccgccatcaccgtcgcctccttctgctgctgcggcagcggcggtgtggacggcttgcgcggcccagagcacatgacacacacaaacaaacacgcacgcagagtgttcgaccgagttcttgttagtcaaaacaaacacctagttcttgatttcttgttaaattcagagaggagaagaagaacaagaagagggagaagaggaattctcgatcgatggatggatttggagagtggtgtggttgaaaaaggcagggtagtagctgggtgcgtaacggtatatgtagataggtatagtaacggaggaatgggggttgatagagataagggaagttggagacgaagaagcagctggtctccttctccttcgcgcgttttttttttcccttctctttacacaaaaataaaataatcgttttattgttcgggttttttatttttttggctgctggatgtgtcgcgtggtcaaaaggaagggaagacgcgctgcacaaacgcaaacaaatcagagagcctctttcttcctctcttggtcgctgcatcctcctttcttttcctttccttttcgaccttcctttctacatcgtttttttgtttttcttgtaaaggaaaaaaaaaagatgagagagattttggtttgtgtttttttttggcggggggggggggggggggttggagcgggtaccatgaatgttgccacaggtgtaggcacacatgtgtttctccagtagaaaacatttcgcgagcgtgagggggaaaacttatgaggtatctacaacggtgtttattagcggactctctctgttatcatataagtaaatttggtgacgtggaagatagaggggaggaagagaaaacattgttgctacttatgatatcggcttagagccgactcttagtgtttattaaaagaaattcctctgctcgcagagggagaaaatgaaagaaagctaataaaaaactatttttgtgtattaatggttaagatgtcttttttgtcttgactatcgtaggagtctctgaataatgtgtatcaacaaagagctcatattagactttaccttaatacatgccccatgtaaagtgcatatatgagatttaacaacttgtttctatatactctctatgtcctatgatgatcaatttttggctgtaaatttttaggaattggttaagtttggaacggatggtgtaaagcgagtcaagaacccaccataatgaagctgaatcgagagtgtaaactttgctatgctcattatggaatataactttaatggataatggactataagtccactcaagctaagactaacattggactaaccctcagccacctttataagcattcaggtgataaggagtcgtggcgttgcaactcctaactcgttaatagataacgaaggttcaccatcacagtcctcggtctgtggtgttgaagcagggtagaaggttcaaacattattgcaattataccttttgtttctctagttaacttatgttgttatatataaagatgtacaacttgcatttaatcacacgataataactataatcccaatcacattgatctacaggaagaaaaatcagataaatgttacagtttatataaagagctagtgttgtagcggactaaaactctctaagaatataaagtttagaataaatagctagctttaaagtcattgcccctttataagaaaaaggtcatcacttacatggttggataagaaacaacattgttcaattcattgtacatcgaataaggggaccaaaaacatgttacccactagcatagtggaaagtctttggtatccatcatcataaggtgttagtgtaagctcttaagaactatccctatttcagtcctatgaaatgatcaacatttcaaaactaacacatggacattctttagcctacaaagctccaaatcctagagtaagggtggtgcgattcacacctcaagctcatatgtggtacaattctctgaaaaaattgtgagagtaaaaaaaacaatataatctttgtaaggtgatttaccctaatctatacaacatttaatccttgtaccatgtatcttttattctctaaactcgaataatttacttattagatagtataattagaaaccaatcgagaaagcaataatgcatggaaagactttggtatccataccataaagtgttaatctaagcgctatgaactatttatattttagccctatgacatgataaactttccaaaactaatacgcggacattcactagcctacaaactcttacccctagtgccaatggtggtgtgctttaaacttatacgtggtgcgattctctaaaaattttgagagagaaaaacaacatcatctttgtaaggtagtaattttctcaattctatacattatttaattgtagtacaccatatcgtgtttattcattgaaatcgaataatttacttactacataatacaatttcaaactaatcaagaaagtaatacggagctacttcgacataaaagtaccactctcactctcatcccttgagggttttgtctcctagtaggagtgagtaataaccaagtggtttcttgtgtgcacaagcgtgtgtgcccacaccacacggttgcatttgcatcccatccaaaccaaaaacgcgctgtgccgactggcagatatgccccacggcttgaccactgccaggtgggcccctacccggggtaacattattattctgccgggtggtgggccccactccgagccgaaaggcaaaacgagtttcacgcgtgcccgtgtggctgactccactcgactccgacgcgtgggtgacgccgttaacccgcgccgttaggcttggaccggttcgtcctcctcccaccatgggggccccacgtcggatgccgacgcggcaatcgcgtgcggacacgtcaccctaccccccatgccggcaaatatcggggacacgtggcgcgcgctcgcgtcgccccttgacttttcgcgcgccagggtggtaaatactcctaagtcaatgacatgtggggccagaatgatgtggggacaggatgtcagtgagaggggctcgggtgtgcggtggtagcggggggtttgtgcgtcggggggtgtgggtggtggggcccacgcggtgggtttccgagtcagtgttccactctggttgagttgacggcgtgagctgctttacggttagccgcacgggatttgccagcgagacgaccaggtccacgccttcaccttcacttcactgccagtttttttttaaaatttttttaaaatatttctctgactttccgctgctgctgctgttcatcttatctgaatctgaattttctgaagatttctgaagatgagggcagtgcagggcagcaaatctgaccggaattgctccatggtttcctcgacaccttaaacaactgcactgcactgcacacatatgcagacttgattattctgctcatatggatctgtaaaattattgacctcgtttgtgctctgacggctaccgcagctccagccagcacaaacgatcaaatccattgccttaggcctaatttagtttaaattattttaagaagtaaacttaacaaattatggtcttaacaatgcaacataagaaatcatttctttaagaaaacatattttttaaagggtaaagcagataatatgttttcaataattcagtgaataaactgaaaagaacatggtcttgagttaatcgttttattcttagaccatgttcttttctaattaagatataaattctatcttgatatctgttagcacattttcaaactattaaacggtatgttctgtataatacttagttgctctaaaatatcaaataatctattattcaattatgttatattaaaactcaattaatcatacgctaatgactttcttattttgcgtgcctttacttaaccctaatctttaagattcgaacggagccttaacctcctgtgtttctgtgagcgacaagaacaattttcagctagctgagtgacactctcaagctgccaaaagctctccatgtgttgtcaaatttccagcattatgctgcatgaaaaattaagcgccccaccacccacaaagacaaagcatgaaggaccgatggtaattagcaggtcggtcactcatatccttatctgcagatgcagctaagctgggcaccatgaggaattcagctgacctacaagatgatcggattattaagcatatgctaattatgcatgtgggggaatctaatcgatctgacgcctgcaatgggttagatagatcagatcatgcttgttattgttggtgtcgatctaaatcgcacgtgttccttaacttcgcacgggcagtttttcattataattaattaatcaattcaactttgcatcgatgttgtagataatggagcaagctaaggcatatgcagcatccatcagatcattcagacattcaggtagaatattatgttcggttagcactatagtggcatgacttttcttattcggattccttccctgaacaattatgtttattttcgaatagattattcagcggattgttattgtcgattatctactcaattatattatatggataaattagatactttaataaataaacataactaatactccctccgtactcgtaaaggaagtcgtttagaacaacgacgcggtctccaaaacacaaatttgacttcttgttacttatgtatacttttattaaagtatttttcaagacaaatctattcatataatttttatattttcaaactcaacaacttgagagttattcattatttatattcccaaggtttgacttaaacattgtcctaaacgacttactttacgagtacggaggaagtaactcataacaaatagtctaagtaatataagtaaagtattttttttagaaaatgtatttttttgaagtacagaaaaattaatctgaaaataactactgttgtacaataaagctaattactgctactaattaagctatacatgtatgagaaattgtgtgccctggattcaatgcagccatcagacccatggtcggatggagatggccttcaagcacacgcatataaatatgcgcatcacgcgtgcaagtagctatcagttgattaattaacggcagtttaaaaataagataattgatggcaattagaaggccaagtcagcatttcataaatggtctcgcagcaagactagaccagctcagctcagctgcctttctgcctcggctaagtgaaatctgactgcagctaatctggccctcaagattttcaacgaacaccggccttctcagctgtcatctgttaaccaccaactaaactccagtaatttacacatctactgtattatagaactaactgtccctttcataacggttgtgtgcaaattttggaaccgactgattgatagctagcttgctagctgtaattaactcgcagaaatggggacaggttaatttaattagttacagttgcaaacttgggagttgggatggattcatgcacaattggattgatatctgacagcttaatttgtaagattatagctgtaatttgaaacagtagctcactgaagctggctagctacctgcaggcagcttctgctttacaattctagtccaagttacacgtgcttgcatggtcaattggtcagcagctaagcctctacgttgactggttgaccagtcaacggacaagatgatatggcgccaagtgatgatgagtaaagtacactgttacgtgctacgtacctgagtgggccccacacgtgtacgtatatacggtacgtatacactgaactgaagagtagaaaagttcagagtagcagatgtaaattcagacacaacacaggtagtagtaccatgctccatcataatgaaaggtctggacaaacaaaaattgatgatagatgcaggttggcactcactgattagcttctctaatcaatctgtctgttttaattcatggtcggctcagggtttcagttctttaactattctgaactatgcacctcaattaacacaagcccttgatagatgcaacaatgataataatactattacaatttttcaggctcgagttgatgatgatggtgatgattggttgcatcaaaagcaaagcttttggtggccatatatgtagatatagagccagctagggcaaaaacaagccaagtgatacctaacccaactttggatttgggcaaaaaactgtcgtcaatgttttgctgtgtctccatgtttagccaaccccactactaacatgatgcatgtagtagtagtggactcagcaatcatggtggttcttggtcgtttcctctaattgttttggttgtggctctgcttaatttgtctgaatttgtcccaatgataggtatgcatacatatgaaaacatatgagaagtttcatgatattgcacttgcataactttgtctcaattatgcagaaaaaaaaaacgttattttttctttactggaaagaagtactagtgccagatatctggagaacgagtgtacatccattttctggatgccaataagccaaacaaatggtaataattaaaccagtatatatatattcactgaaaaatttcacatgccatggatgatgaactgttgattttttgtcacaatctctaccatagaaaaaaaaaagaacaggcaagaatatttcaggagcaaaacaacctctggtgaaaacacacatctcgtcatcgtctatcgatcgatcgattgaactcgctagctatcatatattcaggttgcaatttcccaaaggaaaaggaattaaagggaaggggagaaaaattttccatggccatgaaagagacctgcactgtccgtcccagcaagagcgtggtgacaaaccgaattgcaagcacgaactccaccggcatctagctagcgatggcgataatggtggagattatttgcggtgtggagaggaggcttgtcgccatcgccaacaccaccacctccatcatcacagtgaattctgaattgtcatctctctctcactgaaactttctctgaatcttttttggtttttgactcttcagagtagaggccggctggctttaccctggccttagttgtgtggatgattttctaccactcatcgccttgaatgatcttctttctagtggcatctgatgttctggactcctccttaaccacaaaaattaactgtcatcagaaattcagaaacaaaatcggcaggagtgaaagaaaaatgtttcttgcttttatctgtggctgtcaattgactgaatcctgctctctttttctttatcattttgttatgtttttctatcactgtactgtactagaggcagttgtttcgagaaattaatggagagttctggattctgaagcaagcaggaagattttgcagtacctatttctgatcgaaatgggaggagtgatgtgtgggtgtgggtttttttgttctgttgcttcaaagcaagaaatggaatatatctatctatcatccttcatcgatctctgcagcatactttacatatggtttcagttcagttcattgcaagtggttatgcctccatattttggtctcgtcagatattctataagggcatggtaccggacaaattgcgaaattctggaacaacagatttacactctggtggaatctgccatataaaaaaaaatacaaaacaaaagtggctcgccaagttgaatcataaggaattgcagaatatgatttgctcaattgagctattggataaatttctatatgaatttggagagagtattaaagaaagtttgaccttctgttagatttcctgtgtggctgcctattacatgtgaacacatggctatgcagaaaagttcattcttttgtttgagagagccacatggataaaattctccataagattcttagaattccataccctgaaaaaaaattcctcaaataatcctatgtcattcctaatttgttcctaaaaaggcgctaacgaacgattttcacgtattaaaaaatctctctgatccatgaagtgtttttggtgttgattgttgaattgaaccatgaaactgaaacctacacatgctttgcaagttgatgatcctgcctgcccttggtcccttcctacttttgagctgagcatgcctaagctttcccattgatgctgttgtgtgtgatggcaacaacaacaacaacaacaaccagttgatgagatgagaggattttgtggagttcagcccaccacactgataaccgactgatttgcccacttttgcctgctaccacaatacaagccccacctgtttgtaccaatgccctctccacctttcattcttctcccaaaactttattagctagtgctagctgttgttgatacttagtactggctagctaagcatagatgcaaatatgcaatggaataattatctttcaattgaatggctcacagattcagaacatgatgagtacatactatatgtaagccccccccttctgatggagaattaatcttctctttgattataattagcactttagtgtgatctttgactgatgatgctatctattatcatcatgaggggggcaataacatactagcatgcattatattgatgcatgtttgtgtgcactacaccttcatggcagccttcttgttcttctttgtcttcttcaccttgagtctgattttagcttcaggttggccgtcgccggcgaccgacatggttgctgccggtgaagaggcagcttcttctgattcttcagcctttttgggctcctgcaaatccttcatgattaactcaggcaccacccagttggacacgaagtagaagaacagcatcagagcactgcattttgcacacaggcgcaagaacatccatcaacaaaagttaaagaaaaaacagagaggcaaaaatcaatgagtcctgaattttgtggcatttgtcagatgtgaggttatgctgttaattagatgcgtattgatcgcatgtttttgcagctggtgtaaaatacagtaaccatctagactgtcatgttttgagtctgagctcactgaccatacagtgactatcaagtcctggtttttgtcaattgttggagataaaaaatgctaagcacaaaaataaaaaatcatgtgaaactaaggcacttccaacaatgacctggttagcccaagcccaacccaggttctacctagcccaagacacagcaaggcctagtttggcccagttaaagatgagaatttggatgtttcatagcccattggaacacaataaatttacacccactttcatataagatacaatcatacagttatattttgttcatacaaaacattgtctttcctgacattatcttgctgcttcttcgaaggccaaggaataatttgttattttcattggtaatatatatacatgtcttgtaatattatctgatgccatataagcttaaagttagttaacacaatgtattgattagctctgtaatcctaaaattagagtcttaacccttaagcataagttaatcacgtatttcatcctgtacttgcttgattttgctatcaagtattgcaggtaccagtatatactttacttagtactccctccgtttcatattataaatcgttcgaatttttattttatcaaacttttttaagtttgactaagtttagagaaaaatatagtaacattttcaatacaaaacaaacatattatcaaaatatattcaatgctaaatctaatgaaactaatttggtgttataaatgtttgctaattttttctgtaaatttgatcaaacctaaaaaaaattgataaaaaataatttaaacgatttataatatagaacggagcgagtaggataatgctggtgaagtacaatatgtatagagtactttgcctgattgggatgagggaggagacgtcgccggtgtcagccggcgagccggggaccagctgctcggggctgaggaactcgctcacctgcggaggtagcgcccgcagccgccgccccgaccacct

SEQ ID NO: 12746 - DNA, 1171 bp, Oryza sativa
  unsure (1)..(1171): unsure at all n locations
ctgatgcagatgctgctagctgcttattctgatgagacgcggaccagaatgctctgagctcctcagcaaatcccctctccctgccgaaaaccaccgtcttgtggtcgcaggcttccatgagtcggagctcggcgccgggaagcttggccttgaggtggcggccgcactccgccggaaccacctgatcgtcgccgccgtggatcacctgcaccgggacgccggccgcctcgacggcctccaggttcctgtcctgcagcatggccccaccgcagatgacgttgtgcatcgtgtgccacgccgagtggtgcgtgtgcttcgtcagatcacccagcagaaagtccacatccctgcagcatgcaacaacatttttttttgtttaaaatcaatcttagttaaaaggagctttgttttctgaactctgaattaatcctagtatgtgattacctctttcctgtgatgagcctgaagaggcgctcccagagcaggtgatttttgcagaccaagaagcagacagtcctnccaatgtgctcgtaccatgacatcactgcggatccgaactgcaatggcggccacagcttcttctccgccagtctcttcagtgccacttggctcgccttctcttcgcatgctccgaagtacggctacaaccaaagtcaacggatcgatatttccttaattaaattcagagctctcactgattcttcttcagatatatatgtactgtacttaccggtgcaatcagtgtgattgatctgactcgttctgggtgcttggcagccaatgcgagggcgatgatgcagcccatggagtggctgacaagatggaaggagctcaggttgagtggatcgatgaggctccgctcgatcatctcgacgtgatctttcagtctgtacatgcagtttgccggcttgggagacttgccgaagccgaggagatcgaccgccaacattctgcagttgttgaggatggatgattcgcggaacactgttgcccagaacgacgatgacgaggtgaagccgtggatgaagatggcgtcttcttctccactctgctgcgtcgttgtcactgctccatctgcaaaagctaagctcgcgaacgttaatgtcgccgacacggcaaagcgaaaggattgtaacagaaataacggaagcggttgagaccgtttggcggc

SEQ ID NO: 12747 - DNA, 568 bp, Oryza sativa
tgttaaagcctgcttgccatccattaacatttctttagttgaaatccggaatttctatctagcgctgtttttgaaattaatgtttctaaaaatagtgtgcgtagtccgatgacctgaaaaattcgtgcgcatatgcacagcatatatgcaagttgaatcaagccccaactgtatgtgtttatatatgtgtcgcccagcgagaggagctcttattgccaggtaattaattaacttgtacaagatacaagcacaccacacgataatcatacggtacggacgagcataagttactcttagctacgtatataggtgggtagctagcagagaataattattctgcaccagattcgttgatatcaacttgagccttgatagagagctggatcgatgtatcgatcagctcagtagtagggctggatcttccagcgctggttgtcgccctcgcaccacttccagagcacgatgttggtgccgtcgcggacgccgccgtggtacttgtcgccgtggaaggcgtcgaagttgaggtagatgttgttcaccatgcggatgcacctgaacccggtcccca

SEQ ID NO: 12748 - DNA, 1290 bp, Oryza sativa
cgaataatgctagacacctatagtttaaacatatttcaaaatgtacctgaagatgactcttaagatggtaaagggttaatcccagaatttcccatgagcctcatgattgttttcggcggcccctctgaagaagtttcaagtgtagccattgtaagatatgcaaattaccattcctctgctgcttcaaagcatgaatgattaattaagttttgaatactcactgtccggccctcccagctgatttactgcttccacaaaacgctcatgcaactctgatgtccattttaaccgaggtttagcgtcggtcgagaggacaagccctgatgatgaatctgctccgccttgcaggagaaattgcttctccggaggcaaacccggccttgaagacaggtgctggctatcactctgaacctgttgctgatgatacatcatctgccatcaaagatgtcatgttcctaatttgcagatatcatcttgtgtgagcataagcatatgatacgaaaggcctctcttccttgcatggttcaaagaaactaacacagtagtacatacagacctgttcagttccagtcatgcactgaaatgtctgtctgcttgtagtaggctgcacatttatcagtagtgataagatcctctgcagcctttttcagtgcctctatttgtagtaaccaaagacttgattggattatgtgtgtatggtcttctgggagtgagacaaccttggcttcttcagactatctgcctctccaatgactagctgctgctgcctctgctcatgtcaaggtctcaagcagagagtcttgagtctttataaggcagggaagagaatgtggaatcactgggacaacacacacactcaagcctgcctgacccaatctttgcagcaactgaaaagagatattatccttattctctcagggtgcccgtggaccctaacctctgccgatcttttccattgtaaattccaaaaacgctctcccattctgattatacacttgtaccaactttggttgaaattacatggcacatgagaagggcgaaaggcgaagaacaatcttttatttttcttccttttcttttcttttgagaaactagggggagggaggggcggggggagcaccttattctcatgacaactttggggctgtggtgctgcaaacctatggtgttagaacttgccggcctcttcggctggattcctgaatgatatccatagttgagaactaattctggtctccactgcatttctggaggcctataagtgttgaaatgaaagggcaacatctgtgg

SEQ ID NO: 12749 - DNA, 824 bp, Oryza sativa
ctaccccggccaagcgcttacagagctggagtgaacatcacattggcagtggtcgtctgcagcttcagatggcgaaggaacttgtcttccggcttgatgttgcgcaggaaagtcggtctctttcccccttggagacctggctgtggcgagatttaaagttgaagtgtcttggtcttgcctcgcttgagcgtactatcgcgcgtcaacgttcacgtttggtctggcttaaggagggtgacgccaataccaagttcttccacctgcacgccagagctcgtaggcggaagaacttcatcacgcgccttcgtgatggtgaccagcttgtcgtctcccatgatgcgctgcaagagcttgcctcctctcacttttgcgccatcttggggacgagcttcgagcgtgaactcgccctagacctccactctcttggcctccgccctgcgcagcttgaggggctggactgtcccttcacagaggatgaggtctgggcggtgatcaagtccttgccctctgataaggcgcccagtcctgacggttttacgggccgtttctacaagtcttgctggccggtgatcaaggtcgaaattctggcggcccttaactccttgttcctgaccaacggccaaggttttgcttccctcaacgacgccctaatctccctcttgccgaagaaggacgaggctgttgatgttaaggatttcaggccgattagcattattcacagctttgggaagctgttctccaagatcttggcctctcgtctctcccctcgcctggacgagcttgtggcgcctaaccagagcgctttcatcaagggccgctctctc

SEQ ID NO: 12750 - DNA, 706 bp, Oryza sativa
ggccaccggggaagccatcaagcactccctcggacagagccaccctgtatgtacatacatacatacatacatcttcttcattagataattaattcagtctgtttcatatatgtcaaaaaatcagtcaacgtagtggttggagcgtcgtagtagtagcaatcaacgcttacgatttctggaatggcgtcacatgatgtgaatttgtcgcaaaaccactactacactagtagttgatgatctgacacgttcgtctgcacgcaggttaggctggtgccatacaacccggagtacctggacgagtcggtgctgtggacggagagcaaggacgtcggccatggcttccgctgcgtccgcatggtgaacaacatctacctcaactttgacgccttccatggcgacaaggaccacggcggcgtccacgacggcaccaccgtcgtgctctgggagtggtgtaagggcgacaaccagcgctggaagatcctcccctggtgtaagtaattatcaccgatatatagcttaattagtcagaatctttcaactgacattgtttggttttgttccttctgacgcagaaatgaaaagccggtcaccaaaagcatggatggatcggtccctggggctggaattgggcatggttcgagtccgcccaggcaggcaggtggtgttactggtgcgtgtcctgtgtttatgtcactgcagaataaat

SEQ ID NO: 12751 - DNA, 1270 bp, Oryza sativa
agcagaacaccggccttgtgccataacatctcgactacgggcccgcaagcttggtgtatccttcatttgccctgaaaaaatgtcaatcgaccccggacttcatccatctccaatccgtgtacttttgtttatgactagactgagccacaaactaagccttacccactaaacatgtgaaagtacggtagtgctttgcaacagaggcctgaagaccggtctttatatggcagaggtgctactatcaaaaccatgcaccccgagcccagcctaaaaccacttttggggattttgaatagagggggcggtgtgaatccaattccacaatactccaacaattccacagtgtccaggtgatatgaatattcccaaggtctagagttgtaaacccacctaatgttacctaattaaatagcgaagcatctacctaaaatcatactagtggtaccatgagtagagtgtccactagttggggttttgttggttctagggtgaacaaggtaataatacaataccaataataaggtcgtaacaaaggtaaataggcatggctaaataaaacagtgataacgcgggaatttaaataaagcgataatgcaataagttaaatcaacataattttacaaactgggattcaatatgttcaaagatgatgtgacttgccttgctcgctttcccaaacaccggcttcaacttccacgaaaagcggatcttccgaagctgcagcgtctacacgaccaacgaaaaacaaaaggcttttcctctcctaaactccatataacaagcagaaccaaagcacaaaaatgggttcttgacttcataaggaaaaattagagacttgaacggtccaattccgagttcaaatggccaagttatgaccatttgaagtttatatgctctttaaatgaatatttgcgaatttcttcatttaaattttaatttaaaatcggatttattgcgtcagccgaggggaggggcgcgcggaccgggtccacgggagtggggcccacgcggcagcctcacggtccacggtggaccgggcgcacgcggcttgcgctggccggcgccgtgggtcccacgcgtcagccgcaccgagggcgctggcggctgacggccgggccccacctggcagccgcggggcgcgcccgaaggcggtctctccggtacggtcgacgggaggcggcgcgcccgcgcccctatggtcgccggcggcggccataagcaccgcggagcggcggcccaaagaggggagggaagggggaaacgaaatggc

SEQ ID NO: 12752 - DNA, 4983 bp, Oryza sativa
attttaaaagagaagtttctaccgtatattaaaaaagaaaaaatgcacgagaaaataaaaacggtttaaaaaaacgcgtgaggaaaaaatgtcaaaaaaaagcgcaaaagaaaatgcgctagaaaaaatttctgtaatccgtaaaaaaacacgtgagaaaaaatatttccatcgtatgtaaaaaaagcaaaaaaaaaataaaaagcatacgaggaaaaaactgttagaaaaaaacgctaaattgatggacacttggtcggataggatccagtgtttttttcatctcctacacgacttgtgtttcgtcaatctattctcctatattggagaccttgcacatctttgtaggcaattattagactatttttgtgaagtgtagctattattcttgataacatattatatggaaataatattagaaaataaacatattttaattgttatttaaagaagagtgtacaatgactctattttgtgtatacttgaccatacgaggcagcgtaggatttgattggttgcaagaatgagattaaaagaatattttagattatatgcatgttgtcatatgaataatccaattattttaggtaaagcaaacatcgtaagattgccatcatcgaggttgggccattacatttaagatgttccaattttctgattgtcatcgacatggttatgcatgaaaaacgtatattatcattatgtttttttttacccgttgcaacgcacgggcatgcttgctagttacttgaaaaatacaaggttttaatcgatcgatgcagtacatattattgggatccacttaatattattcggagttgcttttagcaagaggatagtcagaccttgattacatcgaatctgcttgtatttttggatctgatggccatcatcaaatgagattttctaaataccttaacatgatggaatttattcaattagcagcgagcaattaggatagttgagattgattttttttacttaaaaccgagtgttaaattatgttctatttctaaattaccctttaagagattcccaagcaccttaagaagtactccctccgtttcgaaatatttgacaccgttgactttttagcacatgtttaaccgtttgttttattcaaaaacttttgtgaaatatgtaaaattatatgtctacataaaaatatatttaacaatgaatcaaatgataggaaaagaattaataattacttaaattttttgaataagacgaacggttaaacatgtgctaaaaagtcaagggcctcaaacatttcgaaacggagggagtatctcgtataattcccaagcaccgtaagctgaaaaaacttatagttctttataacagtaaaaaaatattcctttcaaatttgtttgcccaaaagacaacttttttctcatgattatgttgagtcattgcatcggttcaataaaaaactttatagtcttcaatagaaagttttctggaaaaaaatttatgttcaactattttagtaccccaaaaggtttttctatcacaggttaaaatttcttttactctttatgtgaaaattaaaagttttgcaactcactgtatttcggtaaatactgccatccagggtacaacccttctttttctgaatcttaagcgtaaaaataagaggaaaactcctttgttctgtcagaaatgtatagccaaataaaagatcaaaacgtttcttgatacctcatcccattttcttggtatattaccaagaagccggcttgctgccaaccgttggcctcgtcagctgatgtcttctccatgcgtctctgacgttgtgttcgtccgtaatgctgcatacttccttcagataattaaattgctaagtttttccccttctatcaactactccttccgtccagaatataaggatttttggggttaaacataagtattaagaaaataggtagaattaaatgggagaaggttgtaattggttaagaagtggaggtatgtgagaaaatttagtgatggaggattgtgattaattgagaaggagaatgctggtgacggaattattatatttttgggacaaaccttgagaactatatgttattattatgtctacgagtatcatctagccgcatcatgcatcacctttggattcagacatccagtccatctataaacaaaccatttgatgtgtacaagatgacgtttgacacttttttttacatcaagcacaaactcgtagacatcttaacctaatcggcgtcacttgacattaacataaagaatcctcgagcatatggctcattagttaattcgtatatttctccatataggccaagagcccaagacacaattgtaaactatactagaatagccttggttaatttaatctcagcatttttaactcttcagaaacagtgacagatcgatgatgaaatgaacaataaaacattacattgatgttgcaaggagcctgtagggtcaactcttgttacgacagattgatgtgcagatgaattatatatatgcacatatagtagcatcttcctcctcttcttctaccctctgtccattgtatctgcaattctgcattaagcttgaaagacagtaggtacagagctgtctctgtagctactagatagtcatcctcttgttgaacttcagtactgaaaacaagatctgaatttgtatttgtttcccaggttagattcttctgtgtttctgaagctgttttgtttttgcatgtggcttcactttttcttgtgttgatgccagcaatgcctttctccattttgttttaggttccatctatcactttatgcagtgaaagtttgtaactacaggaaattaagggcgtggtttgtataaaatgggctgtgtatcatcaaagcagttcaaaagagctgcacaacatgaggatcctgctattctggccaaagagactacatgtaggatttgattcactggatacaccatggaaaaatatttacaggttctcttttggaaaaaccctgaataataataattgtaatttattgctattcttcttgcagtttcagtgagtgaagtggaggccctctttgagctgttcaagaagataagccattccatattcagagatggtctcattcacaaggtacttgcttaaaaaatctgctcaaacttgtgagattgaccatgtagctctgaaattctgatgaaaaatatgtcaattgcaaacggccctttccatgtacaggaggagttccagctagctctcttcaggaacagcaacaagaagaaccttttcgccaatcgggtcagtagcagtgatacccagtccatttcatcagtggattttatttcaacatatagaccatgatgtattggtgcaaaaaggcattatctgaagaagcacagttctacatatgtttggctgaattgtagaacctgttcttatgtgaaaatgctgacagtgtttcaccacaagtgcagatatttgatctctttgatctgaagcgcaacggtgttatcgatttcggggagttcgttcgatccctcagcatttttcacccggaaacgcctttgggagacaagattgcctgtaaggagttccagctctttctcattatatatggtcaatttaaccatcttgattttgttttctttaataactaccttctgtttatgccattttggtatttgacagtattcttttttgtagttgcatttaggttgtatgacctgagaggaactggatgcattgaacgtgaagaggtatgcattttagaaattagaattacttatcatctttttagttccataaatcaaacatgctacccatatactgtgtagaaatgattcaacatatagtaatttccatgcattaatagtctacagaactgatggtgacggtacacatctataccatcaaagaaacataaatggtgtgtttccaaatatttgttgaatccagttgatatttaatttaaataaatccttacatatccataagaagcctcaattcaaactggctgagtgtgaaaaactggaaatttgtatgtgtaccgttggaaaataatatgcataccgtcttaccgttttaactgacagtcctggagttactgaaactatttttctttcttatgaatcaagcagttgcacgaaatggtgcttgctcttctgaatgaatcagatctattcctatctgaagaagctgtagaacaaatcgtggatcaggttaagtgcattcagattaaatactaccttcagtttttctatttcccaggcattttttagcagatttcagttcatttctttcacaaagttgccactgctttcatgaataaatcatatcattaacctttatgctaacttgagcttttacagacgttcaagcaagcagacttaaacgatgacgggaagatcgaccccgatgaatggaaaacgtttgcgagtaaaaacccggctttgctgaagaacatgactcttccatacctaaagtaagtctgtctacaagtttcaggtttcactccaattacgttttactgttttacatcactttatcactaaatataggggctgttcagtttgttaccattttcaaccatatcaaatttagcattgtcaaattttggcaaggtagcagtctaagtacatcccaaatactccaccataccttaccatgccaaaattttggtgattttctagaaacctctcgacataacactatacaagaatatttagcatagtaacaaaccaaacaacacccacacacttttctaccctaccaaacttggccaaattttggtattgccaaaatttggaagggttaattttggcatcaaagtgaacaaacccataaaatttgtaattctgatgcctaaattgttcactttgtgttcagggacataaccatggtattccccagctttattctgaactctgaagtttgtgaggaagagttgtaacatccatggtaccctctgtgctccatttatattcctcacaaaggggcatgactacatgggg

SEQ ID NO: 12753 - DNA, 5085 bp, Oryza sativa
  unsure (1)..(5085): unsure at all n locations
atttgagccatagcactaatggcggcagttaactagaacaccctctaaagtttggttaaaagactaacttataaaacttgtagtctttataaacaccgccagcctcctgcaatagtttcggctgctgtgtgtctttggaaggtaaatatcccactgtttggactttggctatggattaagcttactttggttcaaccaaaaaacaatccctaccaagaggtagaaagaaatatttgaactataacacattgaatatattgttgacaaaaaaaatcaatatattgcttagttccaatgatagtcatgttgggttacatgctagttccaatgatagtcatgttgggttacatgccaagaataaagctaataaacttctagaaagtcaacatgaaacttttctttgcaacctgctcaacaagacttggtatgataacaaacaacacaatgcacacatattcctattaaaatgtgagtatcattaacagaactccaaagaagtaccttcccactttcgcttgcaccataggtcaactgggtagtttgcccatcagagaaccccactgtatgcaactcatcatcccgcacatacgcaatcatgctcccatctggagacagatgtgggtcaatgatgggggatgtggctgaactttgcagcttgagtacaggttcagcaccagacaaatcctggaagtaaacctatggaaatagaaaagatatatttccatgaaactcatgatatttagcatccttgaaaatttacaaaggttatctgaaacatcaaaaactaccagaaaaagaatatccatgatacgctgacaacacaaaactaaccatagatgacaataatcaacacaacagaggagttttatttctttgaatcagtagcgagatcactatttaggaacatgtcagctacctaatccaccaatacaagatgcagcactataccaagaatgcaggaagtgcgatctcaagcacagacctgcaggcactgataaactcaacttcatagccatcactaacgactacagagcaaatatggctcatcccgcgacatccaaaccagaaccataataatggtcacccaacactgccccacaaaaccaataccagccttccattaattcaacactcgaaacggaaattaatgagcctaagcctatccatgtgcagttgctgatagcaaaatcagaatgtcaacctcataccaaatccttaatccgagaaagtggtccaatacacaaggataaaagtataaaactaccgaatttgattagggcaatgcgtatcatctaatactaagttactaactcaactgaattggtaataatataaatcaaggaagaactaaatgggggaaagggtttgcggtttgagagatacgaaccccagaggggagcggcacgacaatgccggcgcgggaggcgggggtgccggggaggcgggcgcgccactcgtagcgcgtgacgccgaggccgcgctcccgtgcgcgctcgcggcggaggcgctcctcggcggagaggttcccctcctcgaggccgccgccgtcggggggcccgaagaggagctcctggcgccgctgcgcggggtcgaaggcgtacacattccggtgaagcgtgccgtcggggctgtacaggaaggccacccggcggtcgtcggggctgaagctaagcgccacgggcgccccgtagcccgggagcgggtgctgcacgatgtccaggagctcctcgttaggggaggnggagaaaccccccgcccccgccgccgcgccgtccccgtccccgctgctgccggcgccgacgaaggcgtcggcgagcggcatccgggcgagctcctcctcctcctcctcccccgcgtcgaaccgcggcttcttgcggctgttcccctgatccgacgacgacctcaccgcccccgccgcctcgcccgatcgcatcgaccgaccgccacaggcagccgccgctaccccgcaagatcgccgccccaagaaaacctcccccctccctccccaacccgcgatcctccacacccaacaacaaaggcggaggagaaggtatggtgccctttgaaggcagacgaggatctcaaatccgaggcggagatcggagtggaggaggagagagagagagagagagagagaggatcggaggagaggtggagggcgacttggagttggtcgttcgttccaagaaggggaggagagagagagagaggcggcgctaattgtaagtaagtttgttgagaggagggaggcctttgggatgtctcggtttttcgttggattggatcatggatggaagagggcggtgtgaggagggtggtgagtgagtgtggttgctttgcttgactgggtctggtctttcttgccctttgcctctctccaattctatcctaggcttccatcggttgccattttgcttaaaatggcttatttggtttattagaaaattaaagttaatttataagtaaaacttttgtagatttgttcgtagcgacttaaaagccaacattaacaaaaattacgttaaaagcatttcaaaatcaacttcaaaatcaagttcaaaaattcaaattttagcttattctttggctgtttaggccaaacgatggggctgctatactctcttttttttgttgttgttgttggataagaggaatttgtaatggttagttgtcttgaaattaactgttctgtagatataaaatatcatactttccaatgattggatctttcttgtctcgagatgaatttgaccaaattatcttccatgtgcttctttttcgtctttaacatcctaaatagtctacctgtcttgtgttaattttggtaccatccttattccaagcacagttatttgttatgtgttttttaataacgttgatataaaccttagcttgtgtccatagttctacatattgagttttttttaaaaaaaattggttaaaagttctctaaaaattaagttatatattattaattatggactaaaattctgcaaagacacttggcacgtgtatgccaccttagtaaacatggataaggaggaatgattgcacatgcaaggacatatgtatgagagatggaactaccggtgtgtagtaatgcactaatgcgccagtatcaatagaaattaaataattccggcaatcctagaataccaaggtctggctgatgattttctcgattgacttgagccaagagcatccagacttcttcacctggcatcgggagagccctggatgctactcgatgtgatctgcttacaatgcgatgttctttgagagtgtcaacttcccaacattcctaatttgggagagaaaagcccctagcgttgctagtactttgcatggttagttgctaactgacgatgttggatgaccgattggctgagtaagcgaggtttgcctcacccagccttaagtgtgctttatgatcaacaggaagaaacaattgatcacatcgaaacatgtatctcatcaattttggcagctgatcctgatcgccatcgggcatccatgcttctttgcaaaaaaaaaaactttcttcctctcatggtggtgtgagtgcaagaagaaagtaagcgggtagcttcaccgaggattcgacaccatcgtcactttagccacctggttgatttagaaggaaaggaacaatcgagtgtttaaccaatggcaacagacctagaccgaagtgacacgtgatgcggaaaaagatgtgctttggtgtgaagttgggctgctaaagtagcatcacaatatagtatcttggtcgcacaatggatgtcatgatagataatcttgtttacactttgtgtttatgtttgtttttctttttcacttgttggctgggttagcaagatgcacattaccctcttcttaatacaaaataaacacacatcttatgcatattctgcccccaaaaacaaataatttttgtctagaagcactgtagtttgttataaatttacaacaactttcaagcggactaatacttgtctcatgggcgggggtgctagcccttgctagatagatccggtagccttttcaaaattaaacctataaatgggagacctatcatgcacatgtgaggactaaaatagtaaagaaaaaaaaccctatgtcgattttgtttctaatttcgaataattctaatacgaatagtatacggaacgaaaatggtggtatgcacattgaggaaattcctatatttcttcctcacgcaacactccatcagcaacttaggtcttgtttgaggagcttctagtaacttctcttagaatctaaagttttccaaatactgcagattcttacctagcaatggtggattaggctcatcataaaagcccataaagcaattgaaccagcccaacaattgcatgttactgtgctacatgcacccagccatcccacacgtgcaatccccacctccgctccacccgagcctcgtattggtagttcagtggcattgtcttagcatctctcacccaagcgtgccgtgcgccaagccaaatctcgcctcccccctcctcctcctcgcccttgccctgttcgtcatcccactctccgctcccctctactgctgctccatggcccattcctcttcgcaaccattgtccctgtccccgtccacggtggtcgcacgcacgccactcgtcccggttctcttcgtgatcggcgactccacggctgatgtcggcaccaaaaactacctcggataactcacccgcgccgaccgcgagttgtacggccttgagttcgacactcgccacaacacggggcgcttctccaacagtcacatccccatcgactacatcggtatgtatctatgtatgtgtcgtccccttctcggcactatggctagctcgaggacatcctagctggtctaccgagcataaggcaaactggcgcgtgctaaccatgacagggtcccgatcatgaatttgttggcgacttcgatagggaatgatcactcttgcaatagctgaaaccccacttctccaacatgggctctcgcaccaatcttgatcaagacaacatcatgaccgcgatattatggagagttgttgaaaactgatcgccaggtgtttg

SEQ ID NO: 12754 - DNA, 3967 bp, Oryza sativa
attcgtctcgcagttttcaggcagaatctgtaatttattttattatttatctatatttaatattttaaatatatacccgtatactaataaaatttggcatacgaagtaaccactgccgagatctaggaacaaaggggaaatggacatccggccggagattacgtgtgtgcatgcgcatgcgtgtgctgtcagctgccaatctggagtactccagctacaaacatgacaagttcatcatccatgacttgacgtacaacatgcacgcgcatgcatgtcagtctgtcgccaccaaattaccaggagactattttagcgattgcagtaaaaataaaccttggtgtgtttaattcacgctaaaattaaaaatttatttgaaattgaaacgatgtgacagaaaagttgaaagtttatgtgtagaaaagttttgatgtgataaaaaagttagaagtttgaagaaaaaatttgaaactaaacaagggccttatctaattttagcgatttcaaaattttaatataaattaataatattatcaaattttaacgagatttatcaaagttcagtaaaaatactaaatatatgtatatctttaatagccttgcttaaaaaaagatatgatttaaaatggcatcaatcttaataaccttaataacctctaggagtacgatagatcaactgtttatacagaagtatcgccatcgccgttggaacacgcacacgggcggccatcgcatcgcaacgacggtatcgcagcatggcaggtaacggtgtactccctcatgtttttttcttaaaaagaaaaagtaaaagtaaaatcttagggacaaatctatacacacatagacacacgtgtatctaaaaattatctataggatttaagttattttttaaacagagggagtaagtggcaaactcacaaaatctatttatatagactaaaataaatcacgaacccactactttgatctataaataagtttacaagttaatcatttaggccatatttagattacaccctaaaattttacgccctgtcacatcgaacgtttgaacacctgcatgaagtattaaatataggataaaaacaactaattgcacagattacgactaatttgcgagacgaatcttttaagcttaatttctgcataatttgacaatgtggtactacagtaaatatttggtaataacggattaattaggtttaataaattcgtttcgcggtttacttgatgaattctgtaattagtttttttattagtgcccaaacaccccatacaacactctatataatacccgatatgacacgtcaaaattttacacccctgatctaaacaaccccttacacgtacagcaagacgcattaaccagtgcgagtaccgagtattacttctgtttaaaataaaaaaaaatctaacacataaacttaattttacaacgagaggagtacgtttgtaggacgtgtgtagtatacgtatgtgttcaatccaaatggacaacggacgtttgctgggcttgttttgtattgtggcttgcatagcacagcacacaacacagccgccaaatggaacgcgtaaacggaagccttcgcggcaaagcaagaactacgaagcctctagatcgccggatcgatcgatccatcgcagccgtcggatcggatcggacgtgtccccctcctccttggccttgctggttacgccgcgctgtcgtccgcgtgacgacaccctccacgcaaaacggcgttcgccccccacggccccacccaccccacccttccttggaccccaccaccgcatcccctatgaacccatcaactctgtggccatcttaggatgtgttcatcacttccctaccatttttaactatacatattttcttttgtatttttaaaatttagtaagctatcaatcccaaacatatcataaactctctacaatatcttgccataacaatatttggtgatccagtctgtgtatttgtctaattacataacttggatcctctttactatatttatgaatggcgatataatagacaatacatattatatttttaaaataaaaatattaatgtgcaccatcgctagtcacatgctttaaagtaacgcttaggatatcgatatacctttcgatgaatatatttaatcattactcgcatagcatagccacatatattaggcgtgttcggaaggccaggccacatttgtggcagcagcagccacatgttagtctgatgcttgcagcactgttgccgttggttacgctacaacgcagccacggttgccgaacatgcccattatcaaaaccatttttgatttaattattttgggtcaacttttattacccaaagttaatatcactttgtgttatgtttttttaatcttttgttgtacttttgactaacgcttttgttttgtatagccagatccaatctctccccggagaagatatgagctttgcctgtaaataggggtgatagttggcataattgtgtggtctttgtaaaattgataaaaaaaactagcccaaagtaaaaaaaattagataaaggatggtccaaaataaaacctaggtaagaaaaggtagaacaaaatggaaatcactcaaaccatatttttagaagcatttactaactaaaattctaatgtctaatgctagtatgtacttaaaagaaaatctttaataaacatttactaactaatatttcaaccgatagattttacggtcttatttaacatgactcaaaattgctaaatttaactttctagtagcatactctaaagtggagtgacttgaatcctgcttcatctctttaattaatcatcacccttttaggtgaggttgaaaccattttgttagccgttagctcttaaacagattaaccgtaaaagagatcctaagtagaaacagtaaaacaattagaaatagaaagggtttaccacatcactcactgtaaagatgtttgtaaacaagtttcttattacgtgtatcgaaatctacaaataaacaagtttgactattgtgttgtgtgcattccatctctagaggctagacgggcatgaggtcatacccagaatccaaggaccgtagtactagaccgcagaagatccagatctgggaagaaaagcagtgggaaagcaagccgtttccgcgttgaaacagatttcctcctctcctcttctctttcctctctctcctctccgcccaacccttgacttcccattctattccatctctctctctctctctctctctctctctctctcgatcgtcttctccacttcctcctcgcatttcccactagtgaggcggaggccatagccatggatcccttccaccacctcaactcctccttctccaacccctaccacccactcctcgcctccccgccccaccaattagcccccgacccactccccccacctcctcctccgccgccgccgccgctgctccccgccgacccgccgtcgctcgagcgggagcgcctcccgcagtggtcccacgccgagaccgccgccttcctcgccatccgcgccgacctcgaccactccttcctctccaccaagcgcaacaaggcgctctgggaggccgcctcggcgcgcctccacgccctcggcttcgccaggacccccgatcagtgcaagtccaagtggaagaatctcgtcacccggttcaagggcaccgagggcgccgccgccgtcgccgccgcggggacggatcagatgcagggggggcagggcggtggtgcggcggcgagggggtcgtcgtcgtcgttcccgttccatgatgagttgaggaggattttcgacgccagggttgagagggcgcgcgcattggagaggaagaaggttaaggggaaggatcctgatgatgaccacgacggtggtggtgatggggatgaggatgatgaggaggaggcggatcaccacgtcgacgaggaggacgacggggcgttcggggacacgacgagggc

SEQ ID NO: 12755 - DNA, 5820 bp, Oryza sativa
ccgccatggtcgcgctcggcgaggagcgcctcgcgctcgtccgacgctggcgcgagcgcgaggacgcgtggcgcgcgcgcgccgaggagcgcgaggagcgccgccaccagctcgtcgccgcactcctcgccaagctcggcgccggcgacgcgtccgcctgagatcgatcgatccctccccccattgttccatccgcaccgcaccgccgccggtacgaaccaaatcccctaccacctcctcctcatcaacagcatctgcatcatgtactgcaactgcttgatgatgatcttgttgtgttcttccaaatggagatcgaatcgatcataattcttggattattcttcattgctcaggacgatgcactgccgcgaagcgcgcgcgccacgcccggcccgatacatttgctatttatgttagatcagtcgtttcgtttctagtgatcgatcaatcagtccatggtctttctctcatctcatcttttgttagggtttcccttttctctgtagaagacaatgagaggttggtcaagaaattataagggttttgcaactgagatgcatcaaacatcttcctagtaattctttagtttctctactagctatctatccagcccatgccatctgcaagctctggtcttatcaagcttcaggaggaagctgaagctagctgctagcttttccaacgcatggatggagatgcatttatgcatgcctttgcatgatcaatcgatgtgctatctatctatctatctatctatctatctatctaactatctttctttcctctcttctcaccatgagtccaccatgaccaccactagctcttcttttgaagatgatcggtagaatctctgcagggaaaaaaatggtggtggtgtgtgtagtgtgtacgtgctccccttaattatgtctgcttttcagaggagatcgatatctctctctgtgcgcaggcagaggtgtagcttttgggcgacatggtctcgctagatctttcctgcttttcagttgcatggtaaagagatttgcgtctgaaaagtttctctcttggtgagagaagaaaaaagatgtgtggatggagctaagctagccataggatatatatatatatatatatatatatatatatatatatatatatatatatatatatatatatatgatatatatgtctagacatataatgcatatatgcatgcatgatgggggtgcagtgtgcagtctttggggttgggttgggttgggtttgctttgctttgcttatcatggaggaagggaattgatgccctgcatgaaaatatgcctatgtatgcaggacctccatgtgtgtggtgagaggagagatagattgaggtgtagaagccataattaacagccactagaacaacaatataatgctgagtaatgcgccatgcatatgttggtgacgctaattgcctgcctgattagtttaagacaggctcgctaatgatgtcaaatgcgcgtcatagtatgcatcatggtcatgcatggcatgcccctagtaaagggtgcgtcatgcatggtatgaaaccatggaccagctgctgcacagtgtgtacgggtagaaaagtagagtatgaatgcaagtttatacatgtacacattcattttttgtcaagaaattgcaagccaatattatttgtgcagtttagccgcttgattaagtagttttaagtttttttagtcagcatatatattagctaactatctgtttggatatatttgtaccgcttaatttgtagtgcttgcatgagattctgtaattatcatttatcaaaaattaatatatattcttgcctaaaaagtagtactatctaagatagagaaatcatatatacataaaaatacacagtagttaagctcatactgctactatatatgtatgtgaaatcttcaagtgaaagccacatcaattacgtgttagactgctctgccacccctagctgttaattactttagtgcatgtgatagtagcttccagcatactcaatcgtgcgtggtcagtaacgacaacattttgttgtgggaaggacggtcgttttgtgatcatgcatgcagggtctgtaactaacatttggtaagatatatatatatatatatatatatatatatagacaacaacaaataattagtatttattttaaaactaacatgcatgcttagtccatctgcacttgattccttgattgtgctcgagggtaaaaacttgctttctagtccctttaaactctatcttgtcatgcatgccatcatcaatttaattaattaagtactcaatcctatgaattttgctccgtcagcgtatcatcagtctagccattatatctaagatatgcacaaattgcctagttggtacgtttcagctttcttgacatgtcctgctcactgttcacttttggtgcgtgtgaccttgagtgttcacaatggcaacaagcaatcagactagtgagatgatgactagcaagatgttttcatggattccaaatgtttgtttggctctagcctcaataatatgtatggtcaataagtgatgattcgatatttggttttttattaatatatagttaataatttgaagctatttgatgtatatatagtcactaattactcagctactagaggcattatttcggtgcgtatatatatctctctctcccatgcatatgcactactatacgaatatatttcgtgtgaatgttgtcaaactttatgcaagctatttaagatttgaaattttgcgccatgctgctatagatgcatgaattttatgaaaattttgtgagattatcaaaattttatgaattttattattatctctacacaatatttgaaaatatcgtaccactcggtatatatgcacctattaatgtgggtagaaaaatattgaaatgttgaaataaacggtgcatgtattttcccacagttgccaccagtatatattacatatataaatactgaaataaacagcttagcatccaggcatctttcatctttggctctttggtgatagactactgcttcattattcaatttcatttcatataatatatagtacttgcatgttgattagaagatcttcttcttgttgcttctgttgtttcttgtaaatatgcatgacttctttttttgtttgttttcatacttgggcatcaattatttttctattattatagtgctcacagattatgacgatttcatcacgtcaatctgatatcattcggttctcactagatcttcccagctggaagtagaaaatgcacactttgttatcttttactaagaaattactggttggcaatacatgtcaaagatttatcttgaccttgctactagggtaattcaatttgcaataatccgtagaataatttaactccctaatatataggtttgcattggatgggaagaaaatgactgccgaatctatgatggagtaagcaaaaattaacaagaatttatatgatcgatacaaggacaatcgatctcggctggcccacaaatttcaggtgtgaagtcatcagtcgcatgtttagccaaaatctggagagaccacttgacacacgcaattaatatattccccagtacagtctaaagaaccaatatatattatttgatacatatgttaatatatatactgatgtgactgacaaatagacaaacgagattaaattgtgggttttacaatacctgaatcatccttaagaagcaaaggattatacagcagtgactgatggtgattgattcaacggtgacttttggcgatatgttctgattaaggtcgtccatgcatcaatatcgtatcctgacaagtacgtgtatcacataattcttcactagcttgatttttttatgttgttacttagtaatatactacatctttttctaatatataataccgtttaccttttagcgttcgtttgatcattcatctttcttatcatgaatattcacaaacataaaaaatataagtcatatttaaagaaaccttaattgtaaatcaaatcacaacaaaataaatattaattacatatttttttatataagtaaggttaaaaaatcgattgtatttttaaaagttaacaatatcatatattaaaaattatagtcggagtaatataagctagccccatatatatatatatatatatatatatatatatatatatatatatatatagagagagagagagagagagagagagagagagagagagagacgcatgccataagccaccatcagtaattcaatgtaaaagttaggccctgtttagttctattttacgctgtcatatcgaatatttggacacatatatggagtattaaatgtagaaaaaaaatcaattacacagattgcgtgttgcgagacgaattttttaagcctaattgtgtcaacaatatagtgctacactaaacatttgctaataatagattaattaggcttaataaatttgtctcgcagttttcggtggaatctgtaatttgtttttttattagactacatttaatacttcaaatgtgtgtccgtatatccaatgtgacaaccaaatctaaacaatattccttcgtttgtcaatgccatagctagctagtactagctttttcatgaatagttatatattgtcttgcgtgtgtccttcaagatcgcaacaagcgaacaattgtcgtgctgacacgttactgccaactaattttgtcgctgcatcgcatggcctttgctgccaagttggttgcattattttgaaatcgcgcgttttcatgatttggatccaagttgcagctggcaactcggttaaacaagcatgcatgcgtgacgctacaaacttaattcgatgggctatttggatgggcacagcaaaatatattttgataaagtatatcgtgtcgttattggtaataaagtgttgaccacaattctaacaggtagtgtgactgaaatatgtatatatgtggcaactatattggccagctacgttaattgctaatctccattaattccataggaaatcaaagttcccatgttacaaattttggaccttccgaccaactttgaaatttctataccatgacctcctttttcggcgagctcgttagtctccgggaacggtgggcggcgactttcggctaagtatcgggattgagagagtacagggagggataggaggggaggggtggctctggcggcttagagggatggcaatgggcaagtaaacagcgaagcggcgagacaagacagaggcgttataccaaaaatacggggttagctgccagtggtggcccgatgttagcgttaggggtgatggtggaatttctggtggcaagaaaccgtcaaagatgggtaatatatatggctgcgcaagggaacctctccaactcaccttggagaggaaaggtgggaaaggggaaggaggaggtccgatgggcctgctaccattgttgacgccttccggcatcgaccagacctggtggtgcgacggtggcaacaggggaatcggcgacgcacgagcagtggcggacgcaggattaaaataaagatggggtgaggatgctcgtctcaataagaacaactaaacggaaaaaataccatatttatgttgtaatcatataaacatatagtataatcaataaattaaggcaaacaaaaaacaaaaatgatattaaaataaagtaataattttgcaccatacataattcatcatacataaaaagatactagtaaacatatcaatttgcaaatatgagtcaattcataaaacatggttgatagatatcttttaaaaaataactatatgagaagatatcgcatacc

SEQ ID NO: 12756 - DNA, 4923 bp, Oryza sativa
  unsure (1)..(4923): unsure at all n locations
atcaattaatcaatcacgtacggagaaaagcccaatttcgaagtgaatcataagattcgtacaaaccacaaaagtatttttttaagaacaaaaccacaaattaaaagtatgatcaaaattgttggcttctacagccaaggtagctgacgtgtctgaccgtctgcccatggatctttttcgcactatgaattgatgtgtgttacaaaaagagggatcaaaggcaagacccaatgaaggcgactcagcttcatcatgatgtgctctatctggttctcacttaagccttcataaaatgacatgaaaaatgaattgaaggggatttgcatgcgagattcacgttggcgacaggtactcactaacctttctgatgggcataggattggcatatttgtatatgtacacaaactatatatatgtatggtcaggcgatctgctagcccctgtttgctaaatgtacacactgtgccatgaaaaaaattgaagtgccatttaattagtaaggtaactggcatctaccagaaaaatacacatgcatgacatattatccaatgtgccagaaaaatacacccgacaccttgagacaagttgcctgaaaaaaaacactcatctatatatcatatgcatacagatttttctgacttgttaattattagcggggtgcaaaactgtcctcatggacccacatatcaatacacatacagtgcgatacccaaatgtgtaaggctacatgggaaaagtaatatcatccctaaggagatatcctcttatatttttttgctatacaaataattataaaaaattgaaaaagttgataagataaatcaatatgtaataatatatcactctacaaatatacaagtttaaattcaacatatacaagttgtaataagaaaacaaatgtgcatataaatagtacacatattcaaaatcatatgccgaatttgaacttgcatgtttgtgaaatgttaaagtaatatatcacatatatattggtttatcttatcaaacgttttcatatatatgttttcataaatatttaaataacatgtaaaattgagggatatgcctagcttaaagggtgaaaatccatccccagcctacaagagacaaaccatgtgcatccagcagcgattgagataataggaggcatccgtgcatgcacagtgtggtgaccactgatgactgatcgaccagcaggttcattggcctcatctctaattaacattttccctgcctgctagcctgcaattccactagcaagtcagtcattggtgtcctcacaaagcacacaaaagtaactttcaaatagtcttgtgtgttagttggtcctgggttagaaaacacattgacacaacatgcatctatcaaagaattcaaggcatgcaaccactctacatgccctgtccccatccactgttcccttttctcaacgattttttagcattaacatgcctatatgtgaatgatccatattgcctttagccctttatattgcatatattggtcatgcacatttggcactgccacaccacttgggctaatgcagcggttgttttcttctacctcatcatcattcttatatatctaagttaccatgtcgatctgttccaaaatataagggattttgacgatatatctgatatataattaatagattctctcgctatgtgtatatatatagctaggtagctgagcaagcagctggtcatcacggatcaagaagaagattagcttagctagctaaaaagtaagtagccgtgcgaagtcgccggcggtgatcagccggcgatgacgacgtacagggtgtgctgcttcctgcggcggttcagggcggcgtcgaacgagccgtcggaggagctcggcgacgtgttccaggcgtacgccgacggcggcggcggcgtgatgggggaggaggcgctgaggcggttcctccgggaggtgcaaggggaggccgccggcggcggcgacaacaagctggaggcgacggcgagggaggtgatggccttcgcggcggagcagaggctgctcaagaagggcggcgccgcttccgccggcggcgggctcaccgtcgagggcttccaccgctggcttgtgcagcgacgccaacgctgcactggatcctcagaaacgggtacgtacttaatttacgtgattagttagctaattaaactcgtaattaacacctaattaatcatgattatgcatggattcgacgatctcttcctccatcaantagcttatcttagctactcttgtgttcaatagatactactattaacaaatgagtgtgaaatcaatctgtaataataataataataataataataataataataataataataataataataataataataataattgataataatgctcctcctatgcttttccttttttttttacggaagaatgtagagtaggctttaccttatagtcatttcattaatagaaatgaggtttacagattacatattaggtgtgggaatcatcagagagaaaaaaagaacaaaaagcagaacaaaccaaaacagaaaaagagataatttacagatatatgtacatgcctatgttcttctatagaaactatatcccagttacttattatgcgtatatatataaggaattaattcacattcaggagcaactaggcaaggccttcatcgtcagatactgtacatggataatcatacagaggctaaccatggccatgcaacctagggaccatggatgagctctcacaagcgcctccaaaacaaaagaagataaggtccctagtcatatgagaatggagaacaggtcgatgatattggaataagtgaattcccgtctttcattatcagtctaaattttttattcaaaccaattgacgcatgcaactcaatatagtatcagtcccaagtttaaaccctagttggcatataattaaataaaaaatacaacatatttctatctgaggtttgaggggacctcgtgtgaagggaagtgttgaaatataagtgaattgtccgtttttcttcatcagcttaaacttttgggttaaactgttcgggatgtattacacaatagtgaaaagaatctgtgtatacaactcaatggtgtgaaggagaaattggtcgagtctatagaggggtcggtgcgtacaactcaatcgtgggaagtgaagaggaggtcggtgtgtacaactcaacagtgggaagtgaagagggaggttggtgtgtacaactctatttttttagataaagacaactcaattaatagtgggaagtagggggggggggaaggagggggggatcggtgtgtacaattcaatagtgtagaaggggaaattcagatgagcatgttgctgcccatgcgcagagctacgagaagactgcttttgcggtttcgcctaggacacatgccatgtgaaaatatcaagtcctttcggtgagcgaaggaccgaagtcctacataactttttcccttgtttggtactcgataaaccaaaaccaaaccgtaaaaactgaatatatattcatgtaaaaaaataatcctcgctatacaaataagttgaaagatatagctacaaaataagcagatgtctctctatgttatgggtgcaggtatatcaagacatgggattgcctctgtcacactacttcatctacacggggcacaactcatacctgacggggaaccagctgagcagcgggtgcagcgaggtgcccatcgtgaaggccctccacgacggcgtccgtgtcatcgagctcgacctctggcccaacgctgccaaggacgccgtcgaggtcctccacggcaggtgatccgctcgatcaaccaccatcctaccttcctacaatctccattgcatccttaatttcaattcacgacagatttttgctatacgacactagtccctttgtccacagattttgagcaattttacccatcctatatttatacctcgaggtaccacattttgcacataaaattttaataccttggatatcaacttttacactataaagtacctcgaggtacccaaaaattggtaccaaatattggacgctaaaattactctaattttttgttttaattttccatttcaatcgtcctctcatgtaatttcatcatctactactcatcctaactaggcgatgaaaatcgtggtatgaattttatcttaattttattatattctaaaacattaaaatactcatattttttggatgaaagtagctgttaactatgttaatttgtgaaatttatgttcaatataacagtgcctatgattaaaagtgcattaaaattaaaaaaaaggtttagtggccatcctagccgttgtgtatttgctgatgggttgtcctaaattaattaattagaaaaccaaattaactactgcagattcaacgaattaaattaaattaatgaaatggaaacaagaccaaactatggacctatatgggccaaaataaatctaccggcccgtcattaggagatagagtaggcccatgggcaatgaggtggcccatgggccgcgtccatcaccggcctgcttcacgacgccgccgcgcgcgccgcgacccgtcggcttcagctcaccgttgccagccgtcgccggagaagaagctgacgacgatttcgctcccgcaggacgctgacatcgccagtgggtctgatgaaatgccttgaggccatcagggagtacgcgttcgtcgcctccccttaccccgtcatcctcaccctcgaagatcacctcactcccgacctccaatccaaagtcgccaaggtgaacacgcatttgccatctcgatcacctcaccttcttcttcctccatatactgacaatggcggcatcgatcgatggattttcactcgcgcagatgatcaaggagacgttcggtgacatgctctacgtctctgaaactgagaacatgg

SEQ ID NO: 12757 - DNA, 11799 bp, Oryza sativa
gaaattgctgaggatattccctcggtcgacgcgcattacgtttcgaattataatcctttgatgggttggaggtatggagttcagatggttgcagcaaacatgcaggtaactagtgcaatttatgttatttctgtcacactattaataatggtcttattctgcatgataagcacatgagtcatcatgtttactttttcagttcagcattgcaattgtgttacatatagtggagtggtattctatttaacaaatcacaacttagtttgaactagtgaactgggatatcctcttgcagagttgcagtataaaaggattgtagcaaggaaacattttttgtgtctttttctaaaatcaggtctagcacaaggaaagtactgaatagtttttaaaaaaaaggctttgtgaagatacataatagttcacccactttgatctgagctatctgctaccattcatgttcagggccatggaagaaagctgtggctgactcaggggatgttccgagcaaacggcggttgcggttacgtcaaaaagcctgatattctgatgaacaacgatccagataaactgtttgatcctacatccaaactaccagtaaagacaagactaaaggtaaactggacaaaagctaaatttccttttattaccggaagatcccaaatgtgctactactatttttcatatctgctacagtaactgaaagtctgtaaccattgtgtcaatgctacaaaatctgaaggtgacggtgtacatgggagacggatggcgattcgacttccgcaagacacatttcgacaaatgctcacccccagacttctatgcaagggttagcattctgatcaatctcatgtactacttccgttttttaatagatgatgtcattaacttttagacacatgcttaaccattcatcttattcaaaaagtttcgtaattatagtttattttgttgtgagttgtttttatcactagaactactttaaagcatgatttatatcttatgtatttgcaaaaaaaattaaataagacgaagatcaaacgtgagcccagaagttaacgacgtctcatcttttaaaaaacaaagagagtactacatatctaacaaattaatcgattacctaagatgtactgaaactctgaatgagctgtacacagagaagcaaactctgaatgttcagttcagacttcagacatggcaaatggctgacaagaaaagaaaaactgaaaactactgcaggtgggtatagccggagtagaagcagacacgaggatggagcagacgaaggtgaagatggacacgtggattccggcatgggatcacgagttcgagttcccgttgagcgtgccggagctggcgctgctccgggtggaggtgcacgagtccgacaaccaccagaaggacgacttcggcgggcagacctgcctgccggtgtgggagctccggcgaggcatccgctccgtcaggctctgcgaccaccgcggcgagcccctccgctccgtcaagctcctcatgcgcttcgacttcacctgactactccatcttcttcttcatcatcgtcatcgtcttagtagtagtagttccatgtatgatatcatgagggatgaagcattgatcgtactttctccgtcccgaaatatagcaatgtaggattagatggaaacatcttaatactacgaatctggatatgtcctatctggttctggtttgctatgttttaggacgaatatagtacataaaattttagaagttttgttttaaaaaagaataaattttgtgcgaaacggaaggtgtgattgtacattttgtacgtacattgtttgttgttgattaataaacgtgttaataaaagagggaaggattcttttaatttcaaggtgttgccattgattacatgttggtgttgagccacaaatcattgttaggaatcactcacaaaggccaactaggtaggtgtttaattattttcatgtttatgtacaagacctctagctttcaatatgctgtgcaattgtctttgatctacaagtagccaagtccaagataatttggaattcaattcaatgttgaagctacatccatgcctgggtaatggtttttttttctcccatgtagatgaggttgaccacgcgtcgataagactaagtccaagtttaatagtattaatcttgaggtttcaaaacgtaagtcaaagggaagatagttgctgcataaaatttatgaggacaggaaaagatgaatgtttttaaggcgattctagcgtgtggtaaaggtcatttaggacatggttttggattttttttaaacaaagcagaaatgtcaattgtaagttgtctaaattctggaattcagcagtaagcacatcgggctatctgagggaagctggattaattatctgacatgaatattgaggcctcaagatagctggtaaaaaatgatgtttctatgaagtgacagatcatttattaagagcagaggatgttgtgatgtactcctactcctattatctgaaacgaaaagttggtttaatttagagtagaagctgatctgatgaaaagtgacagatcatggaaaagaaagaactcatatttgcagttgcagtaccattcaattttacggtttcaatgtcaaatttcagccggctcttgactttctgcatgcattgagccggtcagacatggcatgctgaaactgaatagaagaagaagaagaagacaacattgccagccagagataatgctaatctgctactgctacttcatcttctcatgaaaagtggtattaatataaattcatcttctgcggagacttggaagatgtattaattgtcggtaccaaccgttctcaactctgaagttgatgtgttccgctgcatccccaccactaattcatatgaactccattttcatcggccaatcttgaatcttccatccatgttgaaactgtgcttcctgtgaggtaacacagcggattagtcatgcgagataagcagttcatcagaggattagtcatttcttcagtacagaaggtttttctgagtcaggtttctgaattttccagtgaagaagaggatgtccacccaatttctagaacctgaaaccatattctgacggctgtgtgcactctttgggtgcagaagccggaggtgctcccagaataattgtatcacttgatagaattttactgagattaataaagcttccattatctaaaaaaaaatattctgacggcaaagttccaacgatcctgacgcggctggcacaccaattaatggcccaaaatatcaagattcattcatagcctattagccttgagaaaaaggattccatttgccattgttaagatgacaagtagagacagcaagtggcactcataacgtgtagaaaggattcctgcctggatcatgagagattccaaccaagactggttgtagtgcctgtaattgcacgcaattcaggaccagtattactctgacctgctcttcattcttcagactccagaattctcatgcacgttaattcttgggttaatcctgctagctgcctagctttgtatagtactcatgtattaatatgctgtgctggggttcatcaatactacttagtattgagtgagatgcttggacaaaataatacttaaccaactactccataactaactgtcttgacataaatggaggatcattcagtgtgagtggtgagtgaggtgtgaacgaacagtgggaaacgatcagagaaacgaaagcaacatccaccatccataatctgaatctgtcaccattcatgtgtgaatcgaagagcaacaacaacaacccggaattgaaagacacccaaggagcagattagccatcctgcccccatcgatcgatcctgtatttatatacgcatatgtacagtacaacatgcaagatacctgcatatctgtattctactggacttctgaattctgatcaaatattcagaactaatcatatggtgacaactcataacgagtattccatatctcttttaagataaataaggttttatagatcttagacaattatatcgtaattactctaaaatcactttcagcctcagcataattaggatacacaccctatgattattgttttttaaaaaagaaagatgacatgacaacaaatgccatatcgtgtcatgacaaactacaaccataagtaatattcattctcaaactccaattaagtattctatgtctaatctttgaaattacattttaccatattagtattatcatgacgtggatatatatacatgtacaaaataagcatttttccagaaacatgctaatcctcgtagtactactaatctagtcctgacttggactctgaacgagctaaccttgttgcctttgactgctttgaccgttgacccagcttgggtcatgcatgactggagaacgtggcactccctgcaccgtcggatcatgaccgtacacaaaacaagctggagtagcgtgtgcccttgatttcttccatggctaaacaaaaagtccaaagcatggtaaagctagtctattactgtatcctcataaatcagcaactaatcaagcatgcaaaaggcatgtcagtaatattagctaatcaactgatcatgtggaagtcaatgctagttttgatggttcgtagtagcagccacagctgcaaaaaagtcaatcgatcaggtgaagaactggctcattaatcgcacatgcacgtgttaggagagaactaattactactagtataattaagttgccatatacaagaataaagtatgagaatagtgacctggtcaatgatctttcagaacgaaatcagcgatgacaaccgtcaagtttatacctgaccagacgatgtattgtaattaaatatactccactagatcagcattagaagtttagtattgtaatccacaaaggttacttattagattggtgagtagattatgaacccaattagggctcctttgaaatcgaaagattctttttgaaggaatgggtaagatatgaatctttgtatgatcttcctacatacttattaatacttctttagaacaaaggattttgaaattcctgtaaaatggacaaatatataattgtttggagtaggaattttagaggaaatctaccgtaaggtccaagcttatagaaaattttccaaacaacacaattcagcaatcctcccaaggactatactatcaccctaatttctatattttttctctgttactactcttttcaattcttacatttcaaaatgagcccttaggttgttcttcaggctgtttaaaaaaacaaaaaatggaaacagaagtggcggctgcattaggtgaaattcagagttggcacagtagcacagaagcagtacaacaactgcaggggatgcgaagctgccgacctgacggccagattcgggcaccagaatctgattctgaccgcgaaacgcacacggaagattaggctaatcctactggtaattttgcaacgcgatgatggtgattgcttctcgttcttgacaccggccagccattccaattttgctttgtgcaaatttatttctttttcccccactttcttttcctttttcttttcagtcagagcttgaaaggaaaagagcaatggtaggacacacaagctgctgcctgcagtagtatatggttctttaatttcttggcaataatgatctttatttaatttaggagaggtgatgcagggttaactatgaactatgctgcatttggagagaacaatgatagccttggctgcaattgtacacaattgatttcggtgctttgcccagggaacagtatatagttagtagaatagtagtatttattttagattgtcatagattacgtgtttcgaacatgcctttttgacgtttacctggagtttgtttacttgagaccatcataacatttgaaccatgaatagtagtagtccagtcaaaagccaaaactatggccatacaatacaacaccacagaagccccaactttagcaggtattactactttgcaaaaaataggtgttagataaagcccttttccttttaccactaattcaactgattaggtacaatagattcatattttaggataacttattatatattttttcgataacaagtttttttcgataacaaggaagaggcgaagagcacatatgagcacaccagtatctattgtcctacgcacactataatcaaacacttgcgaatgcgcctcataaaacatgctaagatgtaatgtaaatcaacggtagttccctaccacgaaaaaagtttctataaagaacatatccgtatctattatagctctggtttgcaaataaaaagaagagtaaattgcatttagggccaccttttatcaccaaagttccactttggactaccctttaaactattttttcactttggactagattagtttgcctctgtttcactttgaaccaccccaaaaacttttctcgagcacataaatgactttaaccacatcggcacccataaaccgataatctttccgacttatatagactattcttcgtaagattagagggtagatgtagttagaaaagtgacttggggtggtccaaactgcaacaaaggtaatcttacctagtctaaagtgaaaatattagctagagggtggtccaaagtgaaactttggtaataaaaggtggaccaaagtgcaattaactctaaaaataattgaggcttaagctagtagcctaacacagggcctgttcactttgatgccattttcaactttactaaattttggtaaaattgccaaaaaaatggctacatttagtttgctaccaaattttgataactatataagaaattctgccacaaaattttggcaactataccaaaatttagtaaggtttttttggcaacaaagtgaacaagcccacaatattttactatgtgtttcctccagctaaataacaatttctcatttatagtatgttctaactcaagcatgaaaaggctaaagcaaaaattcctttttattttctctagattaaaaataattatcgttttagataaagacattgccactttgagtactacagtatatgtacaactatcaataaatacataatttttattaaagtattttttaagattaatctatagaagttgtccatatgtatgagaaaacgagagagtacacgcagggaaagtatttggaagatcctaccagtagtagtacaaaatgacaaataaaatttgaccggagtgatagtggtgtggcgctacgactggactgacatactcctcggaaccggtggtgcctcgaaacgttcatcaaacgcaacgtgactccacactcttttgttcgttacccattccagcctggcacccgatccgacgcgtccgtccggcgacccggtttgacccaccccagtagcgtgtcgtgtcgtgtccgcgtggcggaccgcaataaaaccagtctcagccagcgtggctagaaaaaaaaccaaaccaaaccggggaagcgcgacgcggccacgacccgaccgacccaacgcggccacgcgtctcgtcgtgtttctccttttccacctccccttttttttccacgcactttaatttgagcaatttaatccgcgccttcctctcacaagtctcctcttcttctacgtactcctctccttcccccgcgcagccgtacacgactcccgatgagatgacggccaccgccgccgtcgtcgccgcccgcctcatccaatgaccccgctcctcctcctcctcctcctcccccttctcctcctcgccccggcctccgcctccaccgtcgccatcgccgccggccccaccgcctgcgccgtcgcggagggaaactccaccgtctactgcgcctccgccaccaactcgtcctcctccgccgccgtcgcgccgttcgtcagcttctcccaggtgtccggcggcgggggggcgttcgtctgcgggctgcaggtcggggggcgcgcgctcttctgctggcccgccgcggcgccgggtcagctcaggcgggtgtacaacggcccgggccagctgtcacagctcgccgtcgggggcggccatgtcgcggcgtacgacgccgcggcgcgggtgatacggtggtggcgtggcggggaccggttccctctctggttcggcggtgggttcgcctccctcgtctccggcgacgacttcacctgcgccgtggagacgagcacctccgccgtccggtgctggggcccgcgcggcggcgccgtggaggcgggttttctcaacgcctccgtctccgccctcgccgcgggaggttcccgcgcgtgcggggtgaggaggaacgacggcggcgtgctctgctccggcggtggcgtgctcgcgccgcgcgaggacctgtacgtggacggcctggccgtcggcgactcccacgcgtgcggcctcctccggccgaaccacaccgccgcgtgctggagcctcgggggcgccaccaccacgctctactacccggcggtcggcacggcgttcgagctcctcgtcgccggcggtaacctcacgtgcggcctcgtgtcggccaacttcagcctgctctgctggtcgagggatgggttggtggcggcggaagtgaacctgccgccgatcctccccggcgtctgcgtctccgacaacagctagggcaaatgcggcccgctcccggactccgggaggttcttgcaggtctccggcgacgtcatctgcagaaggttctgtgacacgttgccgccggcgccgccgccgtttccttgtacgccggtcgccgcggggaccccgagctcgagacgcggcgtgtccaaaggctggatcgcgttcgccgtcgtcggcgcggtgggctgcttcgcggggctctgctccatcgtctactgcctcctcttcggcttctgcagccacaagaaggtgcacaactctgtccagcccaacatcgccagcaacaacaacggcggcggcggcggcggcgccgccgcatctgtcggcagtggcgcgccgagcccgtacgggtcgccgaacgggtcgctcggccgcctgcggcggcagctgtcgcgcgtgatgacgcggcagcggagcgggccgtcgtcgttcaaggaccccgccgaggagttcaccttcgcgcagctcgcggcggcgaccaaggacttcgcggcggaggccaagatcggggaggggagcttcgggacggtgtaccgcggcaagctccccgacgggcgggaggtggccatcaagcgcggcgagtcggggccgcgcgcgcgcaagttccaggagaaggagacggcgttccggtcggagctggccttcctctcgcggctccaccacaagcacctcgtcggcttcgtcggctactgcgaggagagcgacgagcggctgctggtctacgagtacatgaagaacggcgcgctctacgaccacctccaccccaagcccaacggctcgtcctcgccgtccccgtcgccggtggccacgtcgtggaagctgcgcatcaagatcctgctcgacgcgtcgcgcggcatcgactacctccactcgtacgccgtgccgccgatcatccaccgcgacatcaagtcgtcgaacatcctgctcgacggcagctgggtggcgcgcgtgtcggacttcgggctgtcgctgatggggccggagacggaggaggtgaagcacctgtcgatgaaggccgccgggacggtggggtacatggacccggagtactacggcctccaccacctcaccgtcaagagcgacgtctacggcttcggcgtcgtcatgctcgaggcgctcaccgggaagcgcgccatcttcaaggaggccgagggcgggagccccgtcagcgtggtggactacgccgtccccagcatcgtcgccggcgagctcagcaaggtgctcgacgcccgcgcgccggagccgagcgcgcacgaggccgaggccgtcgagctggtcgcctacacggcggtgcactgcgtccggctggaggggaaggaccggccggcgatggcggacatcgtggccaacctcgagacggcggtggcgctctgcgaggacagcgccaccggcggcggcgccgccggccatggcaacagctcgtccagcgccagcctctccatcacgtccatggagttgagtaggatggattgattgagattagtagcttccctaattcaaatccagagtttcaaattgtgattagccccggaaggagattttaaaatttgttgcttcacttcattttttttagaggagaacatcatttgtgtgattctctcacacattttgttcatggtggctgtacatgattttgtattgaactgatttctcttttcatagatgagaaaatttctctctttttttttctactacaaacattcaacaagaaaccaaccacattgatttcattcaattctttcgataatggaagcataagtgcataactaattctttcgataatggaagcataacttcttgcctctgcaaattgcaattgaatggtccatgccatatcattttatcgtgtttgaattttcacaagtgaaatttcaacaaattgcgtgtgaattgaagagagcagttggttgtttggttggtctacatggttatacacaatgcaagcacaacaaaaggaggccgtttacttttctcccttctctctgcattcacatcggtttggtcgtggatcctgtactcttccatgatcaatatgtactcttcttccttgatccttatgcaacccacactaatcatgatgggaagaccataattcagcaagagagcaaatgccattaatcaattgtgagctgaatttgttaggacactctaactcaagaagatgctgtacatttagagtgacaaagctcctactaatcttcagagaatagttctattagggattacattagcgccattaggccctagtaaacagtagtgccgacaaatgctatctccacatttcatagagaggtagtagtatattatattagtacaaatgcatagggatttaattactgtgatctttgtccctgacatagtacattatggtcctactcctaccttacacaacattgcatttaaattgcattttgtccatacaggaacattagaggagaagaaaatggccgcatccatatggttggtgaaacaaatccttcgtcttgttgctttaaattgcatttcagcttcagttatactatctatctactctatctaatgtaggtatccccacatttcatgcccatcatgcttgaaaagaaaaggaaaaagaacatcttttgtttttcttaaagactcaatatatcttgaaatggatagtggagcaggtcaaagaagatgcacagtgttgaaattttcagaaagctaaagctggtagtatgtttgtcagtgaaatgtagtaaaggttagtatctaatgattgaggaagaacaatcattcgatttgagtacgcaaaagcttgtgccttaatagcactccctcctgtaatcctgttccacaaaaaagcagagatatactgcagaaaaacagtctcttcagattatggctcactgaacctgcaaaaatcacaaacaacaaaatgcttaatctctgatgaacggcatgaaccgcagctgataatatcactgtcaggacatatgatcaatcagcttggtctggagaaaaacagtctcatcagattatggatcactgaacctgcaaaacccacaaacaacaaaatgctaatctctgatgaatcactactgacaatatcactgtcaggacatatgatcaatcagcttggttttgccatcaccaaccatgtcactttccatttggcac

SEQ ID NO: 12758 - DNA, 8003 bp, Oryza sativa
ggccggagatgatgatgatgatgatattattgagtggtggtagtagaattaggtattgtggcggcggcggcggcgaggcgatcgacctgggacttgccgcgggggccgttgcggcggatgtagaggcggtagtcgtcgaaggtcatggggctgtacagcggcggccgctccggcgacacgagctccggcagcggcgccaccggcaggtcgctccgagggttgtagaaggtcgcgatcgacagccgctcctccgccgcgttcaccaccacccggtgctccacgctccggtacaatgcgttcgtcaccacctgtgtttaaatttaattaattaattcacaaatttcttctttattagataataatgcaccaactagctaaaggtatagtaaaatttatatgaccaccacacactagagtactagacctctttaattactttggaacgcataaattttacaagatgtttaaaaggacagtttattaatttcctttaaattttcataaaattcctctattccaaaaatgagttcttagtatttttcaagaacgggtgcaactctaggctagataaaactcatatgcacgataaatagccaaatcgaaaccttaattatttttccgagttaccgaaatagagttacttatttagaatttttgcactatcttgccgtcataaattaagcatctttggtgtgataaggtggcaacgaaaattacacacacaagtatatttttaataggattttgaaaaacaaataactattacctccgttttttaatagatgacgccgtagacaattttacatgtttgaccattcgtcttattcaaaaaatttacgtaattataatttattttgttatgacttgttttatcactcatagtactttaagtgtgatttatatcttatacatttgcataaaatttttgaataagacaaatggtcaaacatgtgagaaaaagtcaacggcgacatctattaaaaaacggaggtagtataagactaattgcttgttcccccaactctgcatctctacattcagatggcctcattcggtcttcccggccaaaaaaaaaaaaaaaaaaaactcctcatctcttgaggacgcattaaaccgatcgaggcatactcacgggtgtgtgagtgtgatgcaagtagatagtgatatgtctggtgtgcaaagaaagcatcctactacttcaaaggagcagtgcagtactggtcctatatactactccatgaaggaagagcagcaatcagagagatgtgtaggggaccttgcaaggttgggatgtgaaataaaggcattcctttgctctgaattgcatttgcatttgcatggccctgtggaaaacgtgctcacaggagctagcagcacaaatgcactacactaccaacagccttatgtctgcaactgctactactgctctacctatttaatttaccctgaactttattcgaccatgcaaatattacacatgcttcagttaagaaaaacaagacaaaatcacaaagttttttaaagaaggtacgattaaattataggctagttcacgtcaaaattaaaagtttggttgaaattggaacgatgtgatggaaaagttagaaatttatatgtgtaggaaagttttgatgtgatggaaaagttgaaagtttgaagaaatatttcagaactaaacacagcgatagttagagttgaaaaacagggataagaacataatcgcccccatatacaaatctgtccaactactacaaggttttggtagctagctagctaggcaactaagattatcagcaatatattcttctctctaaaatttggtagcaataggttagcatcaacaaaagggtatatatagtagcagaaaagggcattgtagcatactgttcctattttgcagacatattcagatgatgtggccactgaaaaccctgccagcatacttttttctttttatttttttgcagaatgaaacaagatggaaaaaaattgcaacacatgtctagagatcagggagtttgttggggagtgattttcctacctctgattcgtgtggttgggctaacaagtgacagacatgcattcatgattgcacattgttgtatgcccaatccggaatacagccacagaaaagatgatcaatggtttacggtagtgttaatcatcatcatgttatgtttaattatattttttaagatgagaaaattaaccttctcatactaaacaaacacaaattaagcacatgatcattgcttggtttagttgataggtgcagtacatatttatttatatagtgtttgcacaaacattcaagctagctgatgacgttggaagaaaggtcaaacttgtgtgtacacgtacgcatactgtacatacggagtacgtataaataccaccacgtcagcaactagctagcctaattgattaattggttgattagtaggcatgcattcacacacagatagctgctagcaaacggctccgattcttctcgcctggtgacggacgcatacaatacaaacgcacgagataatcagttttattttttatctatcgacttgcataaattaaatgcattataagtctctgactttggtcaaagttaaaacaacttataatttaaaaaaaacagaaggagtaagaaacataaattagtcatgttatttcatttagtccagtactatgtgataactcctaaatttgtcctctagttaatttagaatagtcgtcatagctaggaccacagaaaatgcatatatatacagaggactaaacgactcagccaatgatcgactagccataatatcaaatttcaacaaaaaaaaaactggtagtatgtcatgcgtgcatccataaaaaggaaaaaaacatgcgtcgaagatatttatttcatatgaactcatttcttataaccataaaacaatagcatctctacgtgaatctcgcgcagccacatagctctactcgaatgcgtgcacctaaggccatatttagtatagaaatgtttatattttggactgatgaactctaagattatgtatatttcttttttcttttatgtttatgtggttgttcagtggcggagttagcatcgtcgtcaagcccggacgattaatagcgtttcacgacgaccgatcaattatatatatattgattgcattcggtaataataacggtagtggcggagtccagacgatcacctgacataccagaagctgtttccgccactatggctgcccttacaaattattccatatattttaccatgaagacggttcattattttttcccacgtgcctattatttttaccaacatgcatatgcactagctagcctattatatatatagtactcgatccctttgtctcgtaatacatgacaattttgactttatacatagtttgtttcattagtttgaccactcatattttatagataaacttaattacaagtatcaaaagaacactaattactgaacatataaatccctttcatcacaatcaaactatttatatattagatactagtagcgatcaaatcaaactgaagcatgtgaccgtcaaaactgccgaattacgtgtgtcgccacgtgaaaaacaaccaaaaatatgctgggacaaaaacattttttatgtccacctcttctactaatcatgtaaaaaaatctggagctttgctataactatcttgcaagtagaagctaaggttggatatataccggccacgtaaacatcctacctttctaattgttttattttaccctcttcgatccacgtcaggtaacagtagtaggttggctgtactttactagtttatggattgtgttaatcccttcttgttgtcctaatatagcccactaattattaatatcgttatgtggatcgatcgatgagataataactaggttatattgatggatgtgatcgatagatatgtgtgtttgacaaaactaacacacacatgcatcaccatctttacatacttttggaagaggagtaaaaaaatcgagaaaattaactactagaaaggggaaaaaaaactagctagaacacggtgcacccgtgaggccgtgaagacgaccattttaaaccggagaaattgtgtatatttataagaaaaaaaggaggaaaatgcaggtgaaaattaaaataaaactatatatatggaggtagaaaaagaaatccagtgcatttttggagtggtagataacacacgtgtaatagttacttgttgaaatgtatgtaatgcaaatacctgaatttggtcgccgacgttgatgatgaaggcgtcaggcacggggtcaacggtgacccatgcaccggcgtggcgaacctggagtcccttgacacggtcgtcgacaaggaggaccgtcatcccgccggggtcggagtgcgaggacaaccctagtgttagatccggctgtgggcaccgcgggtagtagttcacccgcacgcacactccagcaccctctctaccaccaaacgcctcctgtagcctcccttcttctacccctagccccaccgccatcaccgccatcaacctctcgcataacctcctcacctcctcgctgtactctgtcgtcgtctccctatacatatatattagttagtatttttgcacatgtaattaggacatatccttttctcccttttaaacttgtattccctcgctcgtgcttttcgaattgctaaaggttgtgtttttggaagaaaaaaagttctatacttgagtttctttaaatagtcatatcgatatgtttcttaagttcttgtaagctaaaacttaattaatcacgcgctagtctattattctgttttgcatgttgagagggaaatgttctgaactcctcaaaagagcacggccttatactaacatttaagaaaaatgctaaaacaactacttcctccgtcccataatataagggattttggatggatgtgacacatcctagaacaacaaatttgaacataccgtatgtccagatttattatactaggactgtgtttagttcacacaaaaattggaagtttggttgaaattggaacgatgtgatggaaaagttggaagtttgtgtgtaggaaagttttgatgtaatggaaaagttggaagtttgaagaaaaactttggaactaaacacggtgtaggatgtgtcatattcatccgaaattcattatattatgggacagagggagtaaggaggaattttgtgttgaatagtaataattataggtggaaattagtggatgagtgatgtgtacctgaggtcaggggggaggtggggccacttgtgaggggagaggaggtggggtggtctgacgtggaggaagtagtagtcaccccagtcgaggatggcgcccttgtcgacgccgagccggctgccgtacccttcgtacgtcgccggcgagttgccgtaccgctgcttcacctccatcggctgctggaagaacccgcgccacacgccgcgggcacgccggagcagcgccgccggcaccccgtggttcaccgcctggaagaacccccactccctgcacgcctccgccaccgccgccgccgccgtccccggagacgacgacatgtccaccaccgggatgttgatgttggcgacggcgttcgcctccgacgacgacgacggccgctccgtctccggcctcacgtaccggtcggggatcgtcgccgccccgctctccgacagcgcctgcaccctcaccaccggctccggccaacccccatcacccgccgcctccgccatgatcgatcgatcactcagctagccactgctgatgctgctgtttcacttggaatttgtaggagatatctatgaatcgattaatcctagctaattaagcacgcagtgatgtgattagtggatcagctagcgctagctgaaactgaagctggaactgtgcagctggcaacgagataactaagctaggtagcacaagtgttgttctacacttgtacgactcactgcaagcctccagcttcagggtggtgtgtgtatatatactcattccatcctaaaatataaggctcaaccacttctaacatagagatcaaataaagaatataattatatccatacatgtaaacagtgtgattggaagacttaatggtacaggaaataaattaaactaaatttaaagaactaagaggtgataattaatatatacatgcacgcacgccttatatgtgagacataaaaaatacggttgtatcttatattttgagatgaagacgaaggaagtatatatttattgattgatttgggcggcagcactacaggaatcatgttaacattaaattgttgtgcttttcagtgtaattagtaattgattaatttctgtgcaggcagctagtacctccgtcttaaaatatactccctccgtttcacaatgtaagtcattctagtatttttcatatttatattgatgctaatgaatctagatctaaattcattagcatcaatatgaatgtagaaaatgctagaatgatttacattgtgaaacggagggagtaacagcctattatcgactgtgaagcatattttcaaacagaggaataccaaaataaatgtactggtactacgttatttagatttatagttctaaatatatcatcctaaatattatgttcgtttattttgggacgaagagagtagctaggtaggaagctggcaaaaggacgaaagctactaattgtaatagggaacgtgactgaaatagggaggatcaggttgtgcttggctctatggggtttatatgcgtgcgtgtctgattgctctgcggcgtggtgccactactaccactacagtgacccaaccccatatcaaaaagaaaaataaaaaaaaatcaccatcttatttgagagagatggagatggcccaccaccatctctgtcaataaatggagggtaaaatctggacattttaattgactgcttgtattgtatggtagctggaaaacaactatttactgacccaccatgttgctgtaaaatcttggcagatcattgtcactccgtacctttgaaaccgactcgatcgaatcatgattcatcattatcataagcagcacgcaaataaacaagtttgttttgttatttgttaattttataagatttgctagacttcaggcccctgaaaatttatagcagggaattaggaaagtgcgagtgatgaaaattagtgaagtaacttgcattgaattattgaatattgtacaaaatataattttactatgactcttagtttacattttagaatgtaattttacatttctccatatgggagcctttgttgttttattctaagattaaaaaaaagttagtgttgggtgaggctaacgattgagaaactattgatagctagaaacctagtcactaggtaccatgtaaaaggtaattttattatccttgagaaattaccatatttctagtataaattttggtacctacaggtattaattatctcaatataacaaagattttaatataaatttaggtagctcaaggtatttttttaagaattacaaaatttctccatgtaaaaagcttaattggcatgttgttgggaaattaagcttcaacttgtaacaaaggagccaaaagttcaattataatgtccatttatatacattgcatcttatcccttgattcctcttctttcttcattgtaaggctcgccgtctttcacgcacacgtcatcttctatcgatttatagatagcattgttactcgatttatcattaaaaaaagaaaaagactgacagataaattgtcacgtgcattggaaactatattgatgcgaggacggaggaccaagttcgaaaacagagatagtattgcactgttcagtatagtttgctagcaatgggggccagttcataattagttcctgtaaaatttaactatattgatgaaataattaatactcctgcacactgcagcattcaatggctgcatgcacaaataaggtactccctccgtcccacaatataagggatttt

SEQ ID NO: 12759 - DNA, 11653 bp, Oryza sativa
cgtttgattcagagatcggacggctgaggtgcctcgatggggtggagggcgcggatcttgatgtcgtagcgcggcggcggcggcgaggacgacggcggcgagcgggcggcgcggtcgtcgtaggcgaagccgacgtgggcgccgcacttgcggcagaggaggcgcgtccgccgcgtgaagaggcggcgcgcgcgcacgtccacgcaccggaactcgtccacgtgcccgaacctcgcgtcgtcgatggcgccgaacctcaccaccccccgccgcctccggtatcccccgccgccgccggcgacgaccatccccgccgtgtccctcgccgacgagctcagcttcaggtcgtacccgcacgccccgcagctgacaacacatacacatttcatccattcgtaagctactccttactaattaatcctacttaattaataccgtatattaattaatctgccaagctagcttggatcaagaaagaagatgatgatcgtaatcagagactgaccagtaggagacagtggagaggctactgggaagatcaagagctggctgatctggcttcttcatcgccattgacgagctgatcgagctcagctgctgcttcttcttcttcttcttcttcttcttcttcttcttccaagtcgtagttagcacactactccttaattaactaactagattctgctggatgggttggtagttgatgatgttgtgttcaccaatcgacgagctcatcgagaaatgggggagtttatatatggttcaatgcgtgtggaattcagaggaaagctggggcggctaatgattttgcgaggaaattgggcgggagaacgtgtgggtcaggaccgaccacggcaggtacgacgagccaagattgatactcctaccatatcatatgcactatgcagagctcctaactaattgtactgattagtgatattaatgcaggttagtacagtatgattcattgatgtggccggtgctcccagcgccacggcgtcgatcgatcgatcattccatcgcacgttccaaccaacccaatcaatcatcgaccctggaatctggataagcactaataatagtattatcatcgactcttttttttttcttatcttgatgatacaaaactgagagaatcacagtgcacatgtaggagtgctacaacttttaaagtaaacaacaatgatttaattaagtatttgttttgtgtactctagccaagagaaaagaaatagtaaaggaaaagggagaagtcaacgcctaaagaagtctccatttcagtaatatgatttcagtacagtactactgattactagtactgtacgtagttcattagttctgaccttccaaaatgggcgttgaactaaactgggctggaagcttgaaagcctaacagactaaatgaggcccaatttcaatttcaaagagactgatcgatctgggctaagaggccggtgaataagtttgtgtccggcctctctttgtatatcttgataatataggaataagttcacttcgtgaccctcaaagtgatcgagatctaacccgtgaccctaaaccacaaaaccggatatctcgacccccaactcttaaaaccagtgcaatttgactccctcggcggttttggagggcggtttcgctgacgtggcgcatacgtgacaatattgactcggtcttctgtccacgtggcgttgacgtggcacttacgtgtcattagaaataaaaaatatgggtgggacccatttgtcattcaccaaaagtacaggtgggacccactgacatgtggggcctacataaatcatatcctccccctctctttctcttcgtgagcgttggacgggagctagcggcggtggccggcgcctcctccaactccatccacagcctcctcctcccctttcccgcggcgtcgttgctggcggcggcggtgcatcagcccgcaagcggcggagacccgggagtggcactggagcggcgacagcgacgtgcgcgcgagggccatagcggcggcggcggcggagatcgaggccgccgtggaaggttggctgttggaaggaagaaaacgagccatgagaacggccgcgtcctcgccaccctcggccccgccaccgcactatccaccgctgcgctcgacgccctctctgccggccacgacgcacctgcctccgcagttctcccgccgtgcccacgaacacgtaagggccgcctgcgtctcgccaccgcgactcacgtcggcatcctctcgaagatggcggcattcggcggtggcttcttctgcacctgcggcggcagcgttgaaggtgggaggagcagcgcgggtgagggaggcggcggtaccaccgatggacgtggtcagcatgccgagccggccgacaacggcactgttggaaataaaccttacacgatgtatctagtagtagctagttttacgttcctttctgttcctgcatgcatgttagtttttctgttgttgcatgcgcgactggcctggacaacgggacgtgaacgcgtctctcggatcgcggggatggacgcgaaagaaccgggacgtgggatcgaatcctaagtctgttatttgcataataaaaggagaagaaaaaaaccgaaaaggtgcagcttcatcgcaccacaaaactcagcgtgtttcctcgtgttcgcgtgtgttttccacagcttgtttgtcgataacttagggaaacctgacaaaccttacacaatgtatctagtagtagctagttttacgttcctttctgttgctgcatgcatgttagtttttctgttgttgcatgcgcgactggcctggacaacgggacgtgaacgcgtctctcggatcgcggggatggacgcgaaagaaccgggacgtgggatcgaatcctaagtctgttatttgcataataaaaggagaagaaaaaaaccgaaaaggtgcagcttcatcgcaccacaaaactcagcgtgtttcctcgtgttcgcgtgtgttttccacagcttgtttgtcgatcacttagggaaacctgacaagtggtatcagagctcggttcagagcgtggacgcgagatcgcgctcttgagggtgtcttcatgcctcgaggacgcacgcactccccgcgccggcggtcggcgtcaccgtccgtgcatgtttcaggttccggcggccgcgcctcgggcagcggcgggagcgaccgcgggctggtgatccaccgcgtggtcaaggaagcaggaggtgcagcgaactacccgctgttgacaagaaccaactacaacgattggtctttgctgatgaagatcaaactgcaagcccggtgcctgtggggcgccatcgatccaggcggcgtcgagcttcatgaggataggatggcgcttgacgccatttgcagcgcggtgccccccgagatgatctcgaccttggccaccaaggcctcggccaaggaggcatgggattgcatcaggatcctgcgagtcggcgacgaccgaattcgcaaagcaagcgcacagaaggtgcgcatggagtacgagtcgctcgtccttcgcgacggtgagaccgtggaggacttcgccatgcgcctgacctccaccgtcaatcaactcgcgacgctcggcgatcccgagccggcagacaaggtcgtcgagaagtacctgcgcgtcgcccgtcccaggttcacccaactcgtcctttccattgaaactctccttgatatctctacactgtccctggaggaggtgaccggcagactcaaggcagctgaggacgccatgccattgccatcttcgtcctcagacaacgccggcaagctctacctcaccgaggaagaatggctagagcgccacaataaaaaggagcaggaggcaaagaagaactcaggcagcccaagcaaccgtggcaagcggcgaggcggcaaaggccgcaacggcggcggcgctggagtcggcggcgcgaagaatacgaactccggagcggcccgtcgtgaagacaaatgccgcaactgtggcaaatacggccactgggccaaggattgcaggagcaagcccaagcgggatgaacaggcccacgtggcacaagacgacgagcccaccttgcttctcctcacaggaggagtaatcacacatgcatgtgaacaggagcatgcaccagcgccgtctgcgccaactccgtcatccgatcccatctacctggaggaaaagaagctgttcgcggcgctcgacgacgccgcgaagcgtgatccgggccgctggattgtggactccggcgcctccaaccacatgaccggctgccggacggccttctccgacattgacacaggcatcaccggcaacgtccgactaggagacggctccgtcgtccgaatcgaagggcgaggcaccgtgctcttctcctgtaagaatggggagcatcgaaccctctccaacacctacctcattccacgcctcgctgctaacatcattagtgtcgggcagctagacgagaccggtttcaaggtggaggccgaggatggcgttatgcggatatgggatgagcagcggcgcctgcttgcccgtattcaccgcaatcctggacgtctctacgtcctcgacgtcgagctcgcgcgcccggtctgccttacggcacgcatcggcgacgaagcatggaagtggcatgcacggttcggccacattaacttcactgcgctgcggaaaatgggcagagagcagctagtgcgcggtcttccggctgtgtcgcaagttgaccagctttgcgaggcttgcctcgccggcaagcaccgtcggacgccgttcccacagcaggctcaacagcgctccctggagccgctccaactactccacggcgacctctgcggcccgatctcgccaccaactccgagcgacaaccggtactttctccttctcgtcgatgattacagctgtttcatgtggttgtcactgctcccctccaaggatggggcggcggcagccatcaagcgcatccaagccgcggctgaacgcaagagcggcaagaagctacgtgctcttcgcacggataggggggagagttcctggtccaccacttcgcggattactgcgccgagctgggagtccgacgcgagacgacggcgccctactcgccgcaacaaaacggcgtcgtggaacgtcgcaaccaatcggtggtcgggacggcgcggagcatgctcaaagccaaagggctgccaggtatgttttggggggaggcagtcaccacagctgtttatctcctgaacaggtcgtcatccaaaagtattggtgggaagacaccatacgagctgtggaacggatcgccgccggccgtccaccacctgcggacgttcgggtgtttggcacacgtcaagaccaccacgccgaatgtcaagaagctcgacgacaggagtaaacccatgatctttgtgggttatgagccggggtcgaaggcgtatcgctgctacgaccctgcctctcggcgcgtgcacatctcacgtgacgtcgcattcgacgaagaggcgcaatggaggtgggacggcgagacggcgagtgagctggacttcaccatcgagtacaccactgtgtaccacccagctgtggtgaacgcgccacgagctgactcggagcagccagagctgccgactccgtccgcgacatcgacaagtccatgcacacctgccgccacggcgggcacaactgcgacatcggcggaattcgcgactccaccaaccatcgccgcggacgacctcgacgccgatcatgatgatgctccgcttcggttccgccgcgtcgacgagatattaggaccggcgaccccgccgggactggctgtgcgcgagttcgatgacgaactcatgatggcaagtgctgaagagccagcgtctctcgccgaggcgcaacagcaagactgttggcgtcaagctatgctggatgagatgaaatcaattgaagaaaacggaacctggctgctcgtcgatcccccacctcgccagcggcccataggactcaagtgggtcttcaagacgaagaaagacgctgccggcaacatcaccaagcacaaagcgcggctcgtcgcaaaaggatacgtgcagcggcagggaatcgactacgacgaagtgtttgccccagttgcacggctcgagtcggttcgcttgctgctggcgtacgcggcgagcgaaggttgggccgtccatcatatggacgtgaaatcagcgttcctcaacggcgagctcaaggaggaagtctacgtcgcgcagccgcccggtttcgtcgtcgacggcaaggaacagaaggtgctgcgcctggtgaaggcgttgtatggacttcgtcaagccccgcgtgcatggtacaccaagctcgacgcgtcgctgctgtcacttgggttccatcgcagtgcctcagagcacgctgtgtacatgcgcggagctaacgcacgtcgactggtggtcggggtgtacgtcgacgaccttgtcatcaccggcggcaaccactccgagcttgatcaattcaagaaggagatgcgggagacgttccagatgagcgacctcgggctacttcggtactatcttggcctggaggtgagtcagaccgacgagggcatcaccctgagccagggtgcgtacgccaagaagatacttgaggcagcaggcatggttggatgcaacccgagccagactccaatggagccacgcctcaaactcagtaagttgagcacatctccttgcgtggatgcaactgattacaggaaaattgttgggtcgctgcgctatttggtgaactcgagaccggacttggcgttctcagtgggttatgtgagtagattcatggagaaacccactaccgagcatctggcagccgtgaaacgtgtgctgcgctatgtcgccggcaccatcaatcgcggctgtagctaccggaggaagaaaggagctgttcatctagttggattcagtgacagcgatctcgccggcgacgtcgacacgcggaaaagcaccaccggtgtcttcttcttcctcggtgacaacttgattacctggcaatctcagaagcagaaggttgttgccttatcatcctgtgaagcggagtacattgcggcgacaacagctgcttgccagggtgtgtggctggcgcgtcttcttgccgagctcaagggagaagaagccgacgccgtcacactcaatgtcgacaatcagtcggcaattcaactcagcaaaaaccctgttttccacgatcgcagcaagcatatagagaccagatatcactacatcagagaatgcattgaggaggacagggtgaagatcgagttcgtcagtacaaacgatcaactggcggacattctgacgaagtcacttgggcgtgatcggttcaatgaactgtgcacaaggattggcctcgtcgaagttaaagggacgtgcaaggtttagggggagatttgttggaaataaaccttacacgatgtatctagtagtagctagttttacgttcctttctgttgctgcatgcatgttagtttttctgttgttgcatgcgcgactggcctggacaacgggacgtgaacgcgtctctcggatcgcggggatggacgcgaaagaaccgggacgtgggatcgaatcctaagtctgttatttgcataataaaaggagaagaaaaaaaccgaaaaggtgcagcttcatcgcaccacaaaactcagcatgtttcctcgtgttcgcgtgtgttttccacagcttgtttgtcgatcacttagggaaacctgacaggcacgaccacataggagttgggaggcatctgcgtcgagcattctcctgctggttgccaaggcaatcggcaaggggcgacagatgagggctatggctagcaagcggtagcaacaggcagtgcatgtgtgtactaacatcaagcgacaagccaacaagcaaagggctgaccgaccgagcaaagttgttgcagataggcaagcagagcagcagattcgcatggacgatggcgcggccatggaggagggggacgcgaggggcgggagcctcgccgagcctccagcgctccccgctgccggccctcgagcgctccccgccgccggcgctccagctcccatccctgcagacatgcgaaggggagggaagagagagaagggagagaaagggaggaggatgaagaggagagaggataatatgtggaccccacatgtcagtgggtcccacccgtacttttggtgaatgacaaataggtcccacccatattttttatttctaatgacacgtaagtgccacgtcaacgctacctggacagaagaccgagtcaatactgccacgtaggcgccacgtcagcgaaactgctctccaaaaccgccgagggagtcaaattgcaccggttttaagagttggggggttgagatatccggttttgtggtttagggtcatggattagatttcgatcacttttgagggtcacgaaataaacttattctgataatatataacgcccaattcatatgctccgcttctcaattgtcgatccatatctattttgaattttaaagtttaatttttgaatatggtttgtccgtccactttcgaagacatttagtgaattttcctcaagtttcgtagaggaatcgatttgggttcaaaagagagggaaaaaaagacaacttcatcgcatagagaaaatccgtttttcgaaggcttacagtaagatgctaaggaggaccttagcatatactatgattgatagtgaataaaatggtgagaaacctgtgtcttaaggggatcaaacttagggatgtaagtggctaacccgcaaatctacttataggtcacaataagcgggttcgcgaattatttggacctataagtaaggtttacaggttagacacttagagcgagtataatagcaggctccaaatcagttataaacatatatggatggaataagagaagagagagaagaaaaacgagctacagatttgtagctagctgctgcacggactctaaaatattatgtgtatatgagaggttggaccatgtattgatagtgtagtatatatttataggtaactattatatgaatgagctattaaattagctatagatgatttggagctagtagttgactatactatttttttagataatagttgattgtactattaaacttgcttttacacccttaggttgtgttcggaagtatatgttcccaacacgcacagcgcgcacggaaaacagaacgatccattagcgcgtgattaattaagtattagctattttttttcaaaaatagatcaatatgattttttaagcaactttcgtatagaaattttttttaaaaaaatacacaccgtttcgtaatttaaaaagcgtgcacgcggtatacgatggagaggggttgggaatccagggatccgaacacagccttaattaaaacctaccctgacaactctccacaatgcaccaactagatgagctacatttcgttctcaaaagcattacaaactcctccaaaactcccaattggattaatatctcgatctgttcttgatcgtgcccggatttgtgcgtcccaccaccaataatttataattccatcccagtggcccagaaagagaaacgtgtgtctgccattggtatccatccaatggaacgaacaaaggctagctaacacatgaatcaaatatgcaaatcacaacaggataaataaacatataataataacgcagtcagtgtctggttaacagtaatcacgcatgttcgcctgttgagaagaaacatcacacggatcgacctttagggatagatgctgatatttaaacaaccaggcataatggttcacttcgatggcagtggtttaacagtcaatgtaggatgtggcaatagctacatgcctctctctttcaacttggattagttttcataagagacatgattaatttctttgagacttaattaacaaaacatgtacatcaagctagtgcgctactatatctttttgcacgagatagctcttggcaggattggagctatctaaaaggtactaaaccaattaatatatttatactagtcatcacatatttttaccactttaattataatataattttaataattgggtttaataaacaagctgaaaagatagctaaaccctaattgttctaggcttggctccatctatatcggttggggtaatgtgcttcaatccgcaatggctatcaaacgtataattaatcttgcgaactttaagcctgttgtctgatggtccacacatgagtggtggaaagcgctagtcatatgtcttttcacgaacgcgtaaacaaatatcacattattaatatattagaaaaaatcagagttttagttaaatcagaaagccattgtccgaggacaaggaaaaataaaaagaaaggaaaaaactgctaagcctacgaaagagaaaagctagccacctctgtcaaggcttacccaaatagagatgtgttgctcatcttcttgccatcatgggagatttgggggaagagaaatcagagagtctttaatcacaaagaatgccagtgacagtcttggtggggaaaatcaaacaagaggccatcccttaaaatccatatgcatatgttttttgagtttttatatttagttttactttatccaataaaattttcaccgacttatgtcggtttgtagaaaaaacatagtattaattaaaagggaattaattcccatccacaaaaacaacctagctatcaattgtaacccacggtagcaattaatcaggtatgaacaaaatttaatctgacaagatttgtggtcgtctcccggacacaaacatcataatcatccatgatatccgcaaaacaagatgttacaccaataatcttatgatttgcgctaccaactagcatatgcatggcccgatttcattgggtgcaaatataacaatagcagcaccaaatcatttgtaaaaaaaaatgtcatccatgtaaccttagctagcaaaatcgaatcattcaggtatagctcattataaactttgaccaacttaacgatggaactgccaacacttggacacggctttaacatggcgcttgaataattttatccccgattacctagctccgattaatttacaatgttatctgctatcactcgacagggaactaaccatatttcctggcaagattcgataaatactcctacttgtgtaattaaattatccctagtaactagtttatgctgaatgattggaaaattaatcgccaaagcaacaaactaaagtaagcgactgttgttaattaatatgatctgcgaaaagcagaggtttcgatgcctggacacgtacaaccgacagtcaggactcaacaatatttttttttcgcaaacgtataaaaatattgcacgtctgtatattagaacaaaagaaagttttaattgcacaacacaacaggccagaagacctattgccggagggaaaaagggaaataaaggaagcaaaagaaatgagagaaaaatgatgtatatatttaaacaggagacaatacatatgtatatggccagctgctcgtacatgcccatttatttttattctcttcattttcgatgacgctagaatatatacatttgattttttttctcaaaatgaatggtgatatattatcgtgtttgtgttccaaaaatcaattggtacaatattatgaaagtgacgacaca

SEQ ID NO: 12760 - DNA, 10237 bp, Oryza sativa
tttttccagctcaaaagtgtttgttttattaatctttttctttcttaccgaatattgtttctagctgcaatttttctcttaatcatatgttttttcatcatacttatacttatacatgatgttcctgcagactttaaaaaattgtcttgaaaggatcttgcaaattttatagcatatatataatataatatagagtaatagattaagcgttaatttctaagtgggtttcttatggccttatgggccatgatttttggactgggctgatgatgttcaaggcctacagatgactgtgcccagtgggccatttgggtccatgttgtatagggcctgttcactttgatgccaaaaaaaccataccaaattttagcattgccgaaattttggtaactgtgtcaaaattttggcaggcaggatttcttatatagttaccaaaatttggcagcaaactaaatgtagccactttttttggcaactttaccaaaatttggtaaggttgaaaatgacatcaaagtgaacaggcccatatagatagttcctttttttttttgagatgtgttgtatagatagttcaattgcctatctctctgttccacttcctcaaatttgacttgagagtccatggcaaataataaagagcactcctatttgggttcttttgatcaaatttggtttcgttcaggttcaaacagaaatagtgaaacaagtgaagttgtttgacattgcttccaagactgaagaaaaaggatggtagaaaataaagactaagtaaattatgatgaatgctttttgttggttccaagtcaatggtccacaattgcggttagagaagagaaacaaatcaagtggtgataaaatgattcttttttttttctgaaataatccacagacaactctttacattgtttgataagagcaatttttttaagaacagataatttattttgttatttcctaatattttaaaattctaagcagatattatcatataaatatagacatttaatatgtactaatccatcattgtaacctacttcctccattaaagaaaccaaatcctagctatgtgtctggacatacactatatatatagttaggatttttttttcatagcaagagtatactacaacttttgtcctaaaataaagttattttcaacacaacactcggtcccaaaatgagatgtttttcatcaaaatgaatcccaaacattctttatttaatttattcacccactttatttttatcaacaaatcacaactttcattagattattttcacctagtttcttaatattctgtccataccaaaatacttatatttaagaagggagataattataggggtggcgtgtgcacttataggatgagtttgtaatgcgtttcttttatgttaaaaaaagagagatggaggcagtagttttgtatacagcttacaaagtcgtaacaaacttctaccatcgatgatgtcccgttacattatcttcattaattaatttatataaatacctacgttaatggctaaaaacggtggagtatcaaatcaaaacagactactacaaatttatcttttctcgaacgaaaaaaaaaagcgataaaaaccatctcatcgaggaagaaagcaacccacgataaccctcttcttcttctacccatctcgccgtcgccgccgccgccgccgccgccgccgtcgaatcgatcgaagcccagcagcgagcgatggggctggactactacaaggtgctcggcgtgggccgcggcgccaccgacgaggagctcaagagatcctaccgccgcctcgccatgaagcaccaccccgacaagaaccgctcgccgacgccgacgactccctcttcaagcaagtctccgaggcctacgacgtccgtacacctcccctttctccatcgccggcgccgccgcactccaccttttttactcacccacctcctcctcctccggcggcgtgcaggtgctcagcgacccgcagaagcgcgccatctacgaccagttcggcgaggaaggcctcaaggccggcgcggcgccgccgccgaccacctcctcctcctcctcccacggcggcggaggaggcttccgcttcagcccgaggagcgccgaggagatcttctcggagatgttcgggggcgcattcggcggcgcggggccacgcgcccccggcgccgggttcccggggttcggtgggtccccccgggcaggggagacgtcggcgacgaaagctccggcgatcgagcggcagctggcttgcagccttgaggacctctacaggggcgccaccaagaagatgaagatctctagggatgtcctcgacgccactgggtgagacagatttttctcccttttttttctattcaaatcgattcaaatcaaacagattattgcttagagttccttgtaaaaattggcattgctgttaatttgttgtgtatttgtgatcttggtgagcgagtctgcgaggttaggcagtagcagtagcacccttggtaaccagctcttcttgcctcatagcatgcacctactagttctagactgccattgtagataatctaattttagcctgccattgattcttagataatcatgttgctctagattccagcctgacattgtacataatctaattttagcctgccattgtagataatcctgtcgctctagattttattctgtcatgctccagacgagtaacctcatagcgacctttatgttctagacgttattctgtcatgcagtgaaccagcggcctcattgcaattgctgattagttaatgtatagcacaatgtaatggtagggaagacggagtaaaggggaggaaggttgagaggagaggaagattgagggtagtacacgagaggagacatgagagaaggtgaggacattgcaatagttgcttagcttgcctgatgtcctcatgggttatgccacttcacattttcctgtatgtttgctccattgagatggcataaaaatgtgcaagcattagtgtgcttcaatccatacttcattacttctgttgagtatagcctcttggtgcttaatctaattttgaacgataactgatatgactgaaccctagctctttggtgtggctccatgtagcctgatgtaaacttcgtatttagcgttaaccttgagctccatgcatcatttatgtgtagttggaaatagattatttcagtaacggaggaatgcttttatggtctgtatttattgtaaactgcataaactgttccacgtgttgagaaatccgatctacatccagctcagcatgctgctagtgtcctcttgtgttatggtttgtttgagataataataaattctacctttacaacctttccagcttcataaagaatccttctcaataaacactttctgacattgcagctacggagctactactgtataatgtataaacattaaaataaagtagcattttaatatttttgtgcaccctgtttgccttttctggtactgtttgtaaccaatatgtcaatattcgtcagctaatgtacttgctgacaaaaaaaagtattatttccactttgtcatctaatgatagctggtgtgacagttgacaattgccttctcgcagatgctgttatgtgatggaaaattattactacgttcatagcttatattttgctgcaattaggggtcctattcaaaacggatcttggagggtttaacttctagaatgttgggttcctgagcataattagcttgtgtactaagtccacagattacaaataggatggatatcagagtgctcagaggcatgcatagattttggtgattgggctttattgttgtgggatgatttaatgtccaccatcagagatagacaattgtcattaatttcagcattcagaatagatgtattgtggtgctgtgtttacttgtttacttacagtggttggggcccttagttcttaggtattttttgtatagcctgtagtaaagtcaggcatacttatgactatgagagcacctgaacaaaatgtattactccttttaaattaaagcttactgcacttagttgacataaaaatttcatcttcaagaacacttagggcattgtctgtcctctaagtatgcaaagatggcccattggaacctgtaatggtatgagatgacttacctaatatgaaagaacctactccgtatttatttaattgagtttggagcagcactacaggatatttactatttgttatgtcagttttatgtcaatttttgttattgtcattcgacacgtagcaatcatttttaatcaagtccattgtcttctgaaaaaagtagcataaaaaataatggcagaaataatggtgctttggaaaactaaagcttagacaaatgattcatacagtttgtttgtttgtttggtgatttgtaaataaagataataatataacctcatatatcgggcatcttgatgattattagtgtttgggctatagtgatgtcatggataaatatgcgtaattgtttatatgaaagttattatggtttactgtatgctgcatggataaggcttcataattgattatgccaaggtgttacgtatgacattcaatgattttctgaaacttcaaattcttctttgccgtaaaaggagctttgacttttcggggaaaaggtaggcctattatttccgtgccctttttacaaaatgtttctatgtttttgtgcaggaaaccgacaaatctggaggagatcctgacaatcgatatcaagcctggatggaagaagggtacaaaggtaacctttcccaagaaaggcaatgagaagcctaacatcataccatcagacctagtgtttataatagaagagcggtcgcacgctagattcaagcgagacaaggatgatcttatttacacgcataggatctcgctcgtggaggctttgaccggttgcacagtccaactgacaactctggatgggcggaatttaaccgttccagtgaagtccgtcatcaatcctacttctgaagaggttgtgaagggcgaagggatgccaatcacaaaggaaccgtctaagaaaggggatctgaagatcaggtttcagatcaagttccccaccaatctaacgtctgaccaaaagtcagggatccagcaacttttgcctaagccttaactggtagtacaatattgtgaacctgtatttagtcgtttgtttagcagttgggaatacattgagagggtttgatcacagttgctgaatgtacaatcactgcttcggtgcaagtattgaagaacatgtttgcattggtatttccaacattactccaattgattgccaactgctaacagagtagcagcagttcattctgtcaatgtgttcagcttcattgtggaaaagcagattttccttccttgagatatatcctaaaacgttcctttgtttctttctcctagcttaacacttgtaaatatgttccaggtgcatacttgcaactggacactagtaatccttggaccatatctcaattcccaggtgcatatactccctccgtccaaaaaaaaaaaagacaaaccctggtttccgtgtccaacgtttgaccgtccgtcttatttgaaaaaatatgaaaaaaaataaaaagacaagtcacatataaaatattaatcatgttttatcatctaacaacaatgaaaatacgaattataaaaaaaatttatataagacggacggtcaaagttagacacggaaatcaagggtttgcctttttttggggacggagggagtgcttgttactggacacaagtaatccttgggtcatatctcaacttttcttggctatttcctgaaaactactcctgccattttgtcattttgcagtgtttctagccaggtctgatccacagatacattcagtcaggcctcatccacagaaacagtaaaagcaatgaaaactctgctcaatcaacagtgaaaactatgcacagatggggaatgctttgctgatatatgacataaatttgcacatggtgatgataagatccagtgggttccgtaagtgttttccttgctatagttgctacctgagattgacctcatctgctgcttcaaatggtgaagacgacgacatggtgataagattccagaaagttcctgtccgtcgatcgatgattgttgtcagtgaagactgcaagcgttaaaagcaggatggtgatcttcttggacgaggtatgtccgagtgcccctcatgaggctgacggcacgttttggaatcccctagatttccaattccaaatcctactgagaccttaattcgcttaacccaactctaaaagaagtttatataacatctatgaaagtgtgaaattaattttccttaattctcttcaatcctttcctcacgagtattaaccccttatgaagttgacggcacgttttgaaatcccctggaattccaattccaaaacctcccgaggcattgtctggacgttcggttaatcctaagaaagggttcagcagctaggtctcatcatcatcatcttctcctggccggaatatcgccattgccgtcttccagtgagacggctggctggccttttcggccggtgtcgctggccggagtcgctgtcggagagggagaccggaggttgaggagatgatgatgatctgccgtgtccgtaggtgctccactgctcagcaacagtgcaaaaacagtgtagcaacagtgcatatttgcctttttagttgtagaaatactatagttctagtgtggacttttggggattggaaaaatttatcggatcacaaaccaatggttgaggtgacttgaggttgatcctgggggaattcagaaaggcttcatttgatatggagttatcatataataatagaagcacaaaagtgtcatggattgctgaacaagaggctcgcgatgtgtcggcaagtaacaaccgaaaatcagcatcgaaactattggtatgtttggttatctaccctatattttagtaatggtaaattcttggtatattctagcgagaaccgataaggggcaagggaaagaatatacaattagcatgttttggtttggggacaaggtgggactcatttttttttaggatgagatgatcccatctatctgttggcattagggatgtgatgatcatacttttaaagtaatagcccatatatcgaccagagaaaaagttggttggattagtccgccaatttttaaaggatcatgccaaactggatcttagggaaatattctctatcaaggatcatcttatcccacatgtccctaaccaaacacattgaaaaataggttcaacctaacccgattcatctcaaccctttaaccaaacgtatgcttaatgttgctgttgtattcttatgatatactatgatgttttttctttaaagaatggtcaagggagggggggagtttttccacctgaattttttcatataacagttcgaaaagagggattacacagttttggctcagattacagggtatctcaaagaggaggaaagggtttcctttcacgaggaaacaaccactctatcattaacgttaagacattcctcccagaggatggcgtcctctaagcatttcatcactaatctcctcatcaaagattgcatcccgtggaacacaacatcatgacggtgaatatgatgttttcatttctccaagaggttcactttgtcaatgtttatgtaatgacaagcagatgacattacgaataatgcaaattaatggccagctataatgcccctttaagatggttgctgtcaagagtggtccatcaagatcttaggaaaaaggggcgaaatagccatcagaaaatatttgcctagctagggagtatatcttgcttttccattgtggttgtcagacaacgctatgccttttcctttttattggttgctacctttataatcagataacgatcgattttgcaggtgcggcagtatgtaccgacaactgatcaagtcctcccatgttcaaaaaaacacattatttgttattagaaaaaacatattaaaaaacacattattttgggtgtcgccaagagctccaagcaaaactcttggtagctattttattttctaccaaggcattttatagaacctgctaaaattatgatattatgaaaccaattttttgtgtaaatccacgtgtacagattcgatacatccaattctatacctggggtgtaaaagactgaagattttaaaatatcatgaccacaattcatcccataggagttgagaaaaaatccctatgttccaaacaacgcgtcacagggtacatccaacttgtcatgactatcttgccttaaaaaagaacttttcatgactatcttatagaggaatcctttattaatctaaaaaatgtaaaatcctaagggaaatcactggatgtgtagtattaaaggcgtgtgtgcatggttccaccctaccaggaattcaaaaatcaattataggagcaggtgagcactttcaataaaaatttagtgagactaatgatttgtctttaacaatatagcccagtcccgcgcggtcacgcaggcctgccctgcggcatcgacccgtgtgtgtgcatacatgcgtatatgcatgcatgtgcagcgggctgatcggtcacgcgtggccggcctgagtaaccgcgcagtgccgtgctgctggtccgcgagaccgacgcggtggttgcgtccccccgtgtgccaccacgataccgctctcccgggttgcgggagcgaggcggtcccgcatggctgggctatgggatcgccggtcccgtggaatggtaatgcgggaccgtctcggtcccgcgtaaccatactgcgggagaggtatatttgtgtaaattttcggcacatagatatataaacgcaagataatgaaaaaagagatatatttttaaatttaattcgctgtttgagccggtgttaattaagagagcacactcagtgagttgagtgtgcatgtttagtgtacatgcgtagtggtgtgtatatattctctccgttctaaaatgtttgacgttgttgattttttcataacatttgattattttcagtgttgattttttcgcactgtttagtgttagccgttaaaaaaatatttatcttatttaaaagtttcatataaatatgtaaaagtataacataatattatagtttcttacatgataaaacaaatcacaacaaataaataatatttatttttaaataagaagaatggtcaaatgctatcagacaagttaacaacgccatatattttgactcagagaagaaaaaaaattaggaaaaacctcactcgctcattgatcgacacgttagtgacctgcgtgcacaagtccccccttatctttcttgacacccgttatttcgaattaacacacaaatgggaaaaaaaacatgtaatataagctagtctgcacacacatgtcgctgacaaagacgagaaatcgttttcgttcacgtgccaggtgaagggaataatatattttgggataccatttggttgtggatgcatttgagcaaattagtccatatatgctttccaatgtcattttcaagcaacaataatggagtttcgatttctttttttaacccttttttcttttgtcttcacctttgccttccattgtggctatggttaaggtgatgatcatgaccaggagtttccttggtagatagcaagtaatgtcattatcttagtatcttcctcgagctaactagccagttattaattaattagataattaattattccaaagagatcatatcgatccatatatgtttattcatactttcctgatctccaaataaacaaaccgagatacgttctggtattacgaatttgtacatactgatcagtctctagtattagatttatttattttgagatgaagagagtttaggatataactaaccatgtgatgatcaattagtgacgtgggaggatgtgcgtatatgctagtagctaatcatgctattagctatagctagttaataattatagctagctaggagggataacctcttgttaaatcacatggattagttaatcaaatcagatagaacaacaagagaatactagtatataaactgatcattaatttgatcgagaaccgacgatgacaagacaatcaattgcagatcgcaacaaactttaaataattccgtttcatcacatgaatcgacaaaaagctagtagctagctagcatgtccatattaattaatttattactaatca

SEQ ID NO: 12761 - DNA, 6495 bp, Oryza sativa
caggaaaaagaaaaacgatgatgacgtcatgatgacctcatcaatggccggaccaagatggcgacctcgccggagattggatggtcggctgcgactttggaggacatgaacacgtagaggacgacgagacgaacccaacggtactcaccctcgtgccaaacgacgaccgacgacggccggcgacgaggaggcgacggcggcggctcgggttgcacggggcggcggagctccgatgaccggcgacggaaaaggaagggtggccgagcttcccctcaccacggcgcacccaacggtggtgacggagaccggcgacgacgatggagacggcggcgcggcggcaccggagatggccggcggcggcggtttgcttggcggcggtggcgacggagctacggagcacggaagaggacgggagagggggcaaacgaaagaggaggactagggggtcctatttatagccttggattgaagagatcggactcctcccgtaagaaatcgatccgggaaatcaaaaactcggttttggagataaactcaaaaacgagtttgattcggataaaatactcaacggtttgctccgattcttgggggtaaagatagaggaggataagaggaatatttcccctcaactaaattggaaaaaggagcaacggggaggcgagatttggaaggaggaggcggcggctgcacagggcacagcacgggcggctcgggctctgcctgagctggaagatgaacagtagcgcagggagggaaaatagacttttccggctaggctgagaggagaggaggcggctcaggttgggccggcagaagagagaggaaggaaaggaaggaatgggctgaaaatggcccaagctgaggaggaggattttattactttcccaattaaaataatcacttaaatgatctttgaattattaaaaatacttccaatgctcaaataatttcaagaaaaatcctgaaaatatttggacactcaaagtacttaaaaaaattacaattagaccatttaatgattaatttaatatgtgggtaattactgaaatgctctttgtataattaaaaattaggaattgagctccgaaaaatctgagaaaattccagagagtataattaaccatgaagaatttaataaaaattaaatccatccatgctttatatttaggaaattttatttcccacatttaacttcacttgtaaattaatgaacatttaatataaattctaataatagtttattaaataatttataaatcctgaaacaaaaatcagggtgtgacacgcttacagtacgaggcctatgccgaggacctggcgaagagggttaaggacgcccgcggtgtcctcgatgcggctgccgcccaagagcggcgggtatcggaagccaacacctcgctgcaggctcggacggtggcgttcgagtctgagcgcaaggccttagataagcgtgcccgctccgcgcaggagtttgaggccacgattcgtcggcgaatcgaggtcctcgatcggaaccagcgcgagcaggacgcgcgcagccaggagcaagcgcagcgagcccaggagctggagtggcgggctcaggcgttgaaggagcgagcgcgcctgctagaccagcgggagttcaccttggccggccgcgtggaggagctacggctccgggaagcggcatgccgggaacgggacgccgcactcgccaagcgcgaagccgaggtgaaccgccgtgtggtggcctcgcgccggctgggcgagcagctcgcgaaacgtgaggaggccgtcgctgggcgcgaggcttggcatctggagagtgctcgcgccgagcgtgcggtgatggcggcgagggcttctgagctggaggcccgggagaaggacctggcggcgggcgggcagcccggcggcgcggagttggtgagccagcttaccacggctcagagcactcttgccgacctagagcgcttggtgcaagaccaggctggggagatcgcggccctccgccttaccaatgagatcggacccgggcagctctccgatgccgtcgatcggctggagcgcgcggggcgcccagtcggcatctccgtgcgccgggatagtaagctcccgcccacacaaccggcggatctggagaggctggaggaggaggtcggcgagaccgtaaaatcgtcatcggcttccttggcgcgagccgcggtggaactggtccttgcgagccaccaagcccgcgaccccgacttcgtcccatggcgcgcactcgaggatttccccccggggaccgaggcaaaggctcgggagcaagtccgggaggcggccgacgcgatcgtctctaacttcgaagggtcggcccctcggttcacctttgggattgcctcggacgaggagagcgggagcggggacgacggtgacgacgtcggcggcaaggactgggacgacgtcgttagcggcgccggcctcgggggcccgggcactccgtgattatccccacttttaatttctttttgttgggtgcctgcagcggacacttcttgtctttaggccatcgtgccgtcttgtctgtaaataaagcttccccttcgcactttctacccctttgctttctcctttgaacgcctgcggcacggaaagaagaaagaacaagagcaaaagtatataattaacctccctgtgatcgaaatgccatttttaccccatccccccctcgggctcattcttgcgaaaaggtaaatccgcgctcagtccgtggtacctaagtggtgaggagcaagaccgtcgatccgagggagccgcccagcgggactggccagactgaggctacgacgaccgagggtcggggatggccgtgtgtaggcccttccgagcccccggggttcggcgcaacccggggcgcggcccgcgtttaggctccctttcggcggtttttaggtcgcccaacgccacttagggttcggagtgtgaattgtcctttgaaccaggacaagccagaggaaagagtgagaaaaagggggcgtaacggcctccactttattgcttggaaagggaaaaagatacaaagcaattcacagtagtagcccccggccaagcccgcacaagccgaggggttgtgcgggggttggcccgagctcctagaaagcaaaatatcgcgacgctatggatagaagcgacggagatgttcgatattccaggggttaggcaactccgtgccgtcctccgtggttagtcaaacagagccttgccggggaacaccgatcactttgtatggcccttcctacattggcgagagcttgcttagccccagacgcgactacacgtggtgtaggatgaggtcgccaacttgcagtgaccgggcccggacgtggcgctgatggtagcgccgcaggctttgttggtagcgcgccgcacgtagggccgcgcgccttctccgctcttcaagatagtcgaggtcgtcgcggcgaagatcatcctggttggcctcatcgtacagcgcaacgcgaggtgatcccagggaaagctccgaaggcaggaccgcctcggcgccatacactaggaaaaagggcgtttcccccgtggcgcgacttggagtggtccgatttgcccacaacacggcgggcaactcctcgagccacgaatccccgtgtttcttcaggacgttgtacgtcttagtcttgaggcctttgaggatttcggcgttggctcgcttgacttggccgttgctcttggggtgggcgggcgaggcaaagcacaatttgatgcccatgttgtcgcaatagtcgccgaacagctcactagtgaactgggtgccgttatctgtaatgatacggttgggcactctgaatcgagacgtgatgcccctgatgaacttgagggcggaatgcttgtcgatcttgacgaccgggtaagcttcgggccacttggtgaacttgtcgatggcaacgtacaggtgctgatacccgcctcgagccgctttgaatggtccaaggatgtctagcccccagaccgcgaaaggccaagagagtgggatgacctgcaaggcttgggctggctggtgggcttgcttggcgtggaactggcacgccttgcaccgccggacccattcttgggcatcttgcaacgcagtcggccagtaaaaaccttgtcggaaggctttaccgaccaaagtgcgtgaggccgaatgggccccatactcaccctgatgggtgtcggctatgagcttgatgccttgctcccgagaaacacacttcaagagtatcccgttggcggcacaccggtagagggtcccttctacgagcacgtaccgcttggagatgcgcgcgagcttctcagcttctgcgcgatcctcaggaagagtatttttgtcgagatacgcccggatgtcagtcatccaaacgacctgacgaggggggtcggggccgaccctctcgggccccgaggcccgcaggtcgccaagggtcggggtggagggcgtggtgtcggggtccctcggggggttcggtcgcgccgacggctgcgcgagtttttcctcgaaggtccccagggggagtggggcttgtgccgacacgacacgcgacaactcatcagcgactgtgttgtcgcgtcggggcacgtgacggagcttgagtccgtcaaagtggcgttctatgcgccgcacttcgcggacatatgcgtccatttgtgggtcggtgcactggtactctttggatacttgattcacgaccagctgggagtcgcctaggaccaggagacggcggatgcccattccggccgccgccctcaaccccgcgaggagtccttcgtattccgccatgttgttcgtggcttggaagtcgagccgaatgacgtatttgaggacgtcccctcttgacgaagtcagcgtgactccggcacctgcaccttgaaggttgagggagccgtcgaaatgcataacctagtgcccaccacgaatgtcggcgttcgggtcctctccatctccggggagggagggaacgttggacggaacagggtcgtccactagggtccactccacgatgaagtcagccagaacctggcttttgatcgcgtgccgtggttcgaagtgcaggtcgaactcagcaagctcgagggcccactttacgacccgaccggtgccctctcggttgtgcaagatttggccgagagggtaggatgtcactacggaaacccgatgcgcttggaagtagtggcggaattttcttgaggccattaagattgcataaagcatcttttgggcctgtgggtatcgggtcttcgcgtctcggagtgcctcgctgacaaagtagacgggtcgctgcaccttttggtggggccggtccgtgctgtcaggggcagatgatctggggcgcccttgcccgagggcccttggggggtctcgagtcatgtcaggaccataggccttgggattactcgccaaagcctcccctcctcccacggggtcctcgggggtcctcccgggggttgggggcttcgggcaccaggccttcaggggacgaagggccatcgcgagtcaagggggcctccggtccgctctcttcgcgcttgactactagggcggcactcatcgcatggggggtcgcggccaagtagagcagcaacggttcctctggccccagggctaccaagatggggggaggtgaggtaagcttttagctgattgagagcttgctcagcttccttcgtccacataaatggtctggagtgcttgaggagcttgaatagggacagcaccctctctcccagcctcgatataaatcgacttagggcggccatacatccagtgacgtactgcacatccctaagcttgctgggggggcacatcctctctattgcacgtattttctcgggattagcttctatgcctcgggaggagactagaaaaccgaggagtttgcccgccggcacaccaaacacacacttgtcggggttcagtttcacgcgtgtggacctaagactgtcgaaagctcggccaaatcctgcaacaacgtgtcctggtggcgcgtctttaccaccaggtcatcgacatactcctctatattgcgccttatctgattactcaaagtaatacgagtcatacgctgaaaagtagggcctgcattctttaacccaaaaggcatagttgtataacaaaagctgcccacgggagtaatgacggcagttttttcctcatcttccctagccaggcggatctggtgatacccagatgtcacgaccggaaataacccaacgggcattccttacgtgcgtgcattaatccttgtcccaggaggcaaggtacaccaaaagttgatacaattcagagtttaacaagcggaagcgtaattagataacttattacatgggcagcgaaagcccagcacacacaaagacaaacgagaaacagcggaagactagggcgacgaccacaggcacttgacggcaggcacgagctagacaccgaagccttcatcctcctggaactcctcttctggggttgggaaaaattgagcaagactg

SEQ ID NO: 12762 - DNA, 1541 bp, Oryza sativa
aaataattctgattctccacgattcccctccgaatatttttgggtggaaaagcaaacaagacagcacaaaagttcaatggcataattaatttaatcaattatcgaacatactaattcattgcacatggtcgcacgccatacgcctgtttgcagctgcatggttgcaattatttggcctctagctgtttgcatctttcctcccagatcaagcagtgattattgttgtgtaaattacacaacaagctcaaaccaaagcctaatcatcagtccatcacaaatcatcagttaaatatcgaacaagcatagccattcaatcatagtaaacaagagttgacaatccttgtcctagttaaaggcttgaggcactctcccacacacgagcaggattccagcaggaaagtaacaaataatacatgaggatggcgatagcaatataagtaaacaaagggtaagcaaagacccgacgaaaggacacaagaaaatggtccttgtacaagcatcataactacccccagcggttaagagacagacgactgtcactaggatctttagctagtgctcatcctcaggcttggttgcatccctcatttcatcacctccatcgtcctgtacatatagaacagttagcaccagtggcaatagtatggcaagtgttgtgttcataagttttttgcattttcgactagcatatacaccgatctacctgcatatcagaagtccacaaagtgagattgtcgcgaagaagctgcatgatcagggtgctgtccttgtaggattcttccccaagggtatccagttccgaaatagcttcatcgaaggcctacataaaccagaaagtatgatcacatagtgaatgagtgaaatacaacatgagctgcctattatcagtaatttagtttttctgttgtacccaaaaaagtttcacagaaatgtatgaccttggacaactagacttctgaaggcaggaattcaaagcaataataccactagaagatacaatgttgtacatcaatacatgcatatcatcaacagcatgggactatgtcccttatagaattgactccaaaagaacacttgaggagcataagctcattgcaacaaacatatacagctacataattattggcattcatgagcaaacaagtttgtcaggccagacagatgagcggtatggtacacttcttttgttaactaagcaacccatgccatgacttaagcctgcacatagcaagcaggcatatgggccaccactctgcaagataacagcggtcacatcttggatgcatgcggcaatttgagccggcatggatcacagattctcacagctaatacaggatgccaacttgccaagcaaccatgaccagatatccaaagcagctaaagcactacggaatgcaactgtaactgaagaatttcacactctctgaacactgtaggctcagtgaggcatgaatcatacggaagcaagcattacaagtctacaagatctaccttggcatgaaaaaaactctaaatattggaggaccaattggacaaagaaa

SEQ ID NO: 12763 - DNA, 755 bp, Oryza sativa
ccaccactctgcaagataacagcggtcacatcttggatgcatgcggcaatttgagccggcatggatcacagattctcacagctaatacaggatgccaacttgccaagcaaccatgaccagatatccaaagcagctaaagcactacggaatgcaactgtaactgaagaatttcacactctctgaacactgtaggctcagtgaggcatgaatcatacggaagcaagcattacaagtctacaagatctaccttggcatgaaaaaaactctaaatattggaggaccaattggacaaagaaactaataaatcagctggaaccttaccattggcaagcaacaaattgtagatctacacactgttctttgaactgactaactcggaaggtaagcaaatcacctgcttggcgagcgtgcacgcgcggtcgggcgagttgaggatctcgtagtagaacacggagaagttgagcgcaaggcccagtctgatggggtgcgtcggcgacagctccttcatggctatgtcctagagaaaggaaaatccccaagatccaaaattatttttagtcaaattggtcggataggtcagcaagaaaagatgggagatgttcgtggaggaagagtaggggtacctgcgcggcctggtaggcggcgagggtggcgtcggcggcgtccttgcgctcggctccggtcttgaactcggcgaggtagcggtggtagtcgcccttcatcttgaggtagaagaccttggcgtcgacggcggc

SEQ ID NO: 12764 - DNA, 3154 bp, Oryza sativa
ccgccgtcaccaccttctccatgaactccaccatctcctcgtacctctccgcctgctccgccagcttcgccatgtacaccatctcctccctcgtccctcctcccgccgccgccgccatcgtctctctctctctctcttgcggattcgggtggagttgagttgagcctgtgagtgggtgggggcgaccagaagaggggaggaaccgaggaaggagaagaagtggggaggagcggctgcggttttaaaacgaggtgtggtgtctgtggtcacttttgcctttcttttttattatcgctttctctctttctttcttttttgtccctttattagtttttttttccttctgttctgcgccgtagtagtagaggtgttggagataagaacgagaacgagggaggggtgcgagatttgtttcagttaaaaaaaatgatatccatgtgttagcttctgaatagctggattttttttcctccctttgggaggggggcgagattggacggatctttgtatatgtagcactgtagaataagtttatctcttgtcccttaacttgtcaacgaatcttatcttcgtccttcaatcgaaaaaccagagataataggtctctcaactatcaaaactggtacatatgatgtccctcggcagtttagatggtggttttggctgacgtagtggctacgtgactgatttgactcggttttcatctggtgtggtattgacgtggcgcttatatgtcaatttgatccggaaaaataataaaacctgtgggacccacatgccagtttcgtagacaaaataattaaaaaatggtgagacccatgtgagccccacatgtcattctcacacagtatcacttttccttgccaagttatagagaaagattttaagtatgtctccttgaactgctacatcatttgttccgtgtccgccttctgctcatatgacagatcttcagccttgacaaggacgatgttatctttgtcaatttctgaagttgacatggtgaatgaatgttttcatcccactggacgtgccaaaagcttgttactgggaaaacacgacgacatgggagatctgcttagctccagtgcaagtcaatggcctgcctagtgcgcttgtagggcgtgccagttagtttgatcctgcaactagcaagaaacatagaaacatagttagggtgtatttggttgtgctgtggcttttggaaaaactgatgtgggctgtggaaaagcagttgtggaaaaagcagaaggccgtttggttagagcagttgtgaaactgtaggttgtagaagaaatacctgttgtcggtgatataggtccggggtaaaaaacttaaagggaagaagccccccccccaactttcacgtggcgctccccccaccccccgagggggtcggtcccatggatgggtggcagtcgccccttccgagcctgaggggtcgggctaccggcggtcaccatgtggccaccgagcgtatgaggttaggtggacgctccccggcgtctacctaatcgcatttagtgcaagcggagcgagcgcaccacgctgcattaaatgtggcgtgctgcgtgcctgactagcatgcgaccggtatgtgaccggtcgaataacagatgggacggcggcaagccacacgcgttctacccgagtgtcaggcggcgtgcggcaggtatgccccgtcccatcatgatgatgagaggttatgggcctctcaactgatctggaatcggcttgaccgctctggacatgcccgagattgtgttcctggtgcacgcgtgtccccaaatccttctccattaaatgcgtgtgggcctacgtcacccgtgtcagccggcatgatttgatgggccccacacagcagctgacgtgcaaatagcttccgggttaaggcacgagacacacatttaatgtagagaatatttttccctcttcactaattgtcactcacagcgcgtgtgggaaccccttggagtataaaaggaggtccatgtcacggtcccccactcaaggagttcatcctccgacacctgtaatgcccctaaaggcctgtgggactatttatatgcaaattactcgtgaaaacctattccgtttaatattgcatatttaaatagctaatttggaaagagaaaatatatgtttccatgcatcaaagtaatatggccaacatgaatagaacaaaacataaatggtttatacaatgatgccatatctcaaaataactattctcctcttgcactaaccaaccaaagcatcagctatcctagtacaaatagtgttcacggtatcagcattctcaacatcttcactctcattgtatgccatgtcacttgtatcttgtactccctccatcccaaaatataagggagtttggagggatgtgacacatcttagtactacgaatcggaacaggttatttgttcagattcgtaatactagaaaatatcacatccctccaaaatcccttatattatgggacggagggagtagtaagtagtccttgtcagcatcacatctctcaaactccttatcacgtaaattgctatcacggatgaagttatgcaaagcaagacaagccatgatgatatgattctgggtagtaggtgagaaacttgggatgcccttcaaaatatgccacttttacttaaagactccaaaagacctttcaataacattttaagggaggaatgtaagaaattgaacacctcgtactttccttgaggaggtcccgaacgatgccgaaattccggtatatggtatgtggttcttttgtaaggtgcaagataccctattcaatttggataacccgagtcgactagataatattttcatataaaacgaagttagtaatgcaaataataatactagggtacaaatatcaaaattaatgaaggaaccatttatacctgcaggaggcacgggaaatgaaggaaaatttgccaatgcacgagtgaagatgcgcgagccgggccccgacgagcggggtgtcggcgaccggtcgaagggagatggggaatggtgtcgagggccgcagtcataagtgattttgaaagtcaaaagtcaaccacagaatccaaaagccataagtgattttgctttaaagctgcttttttttcgcctggacggtgcgctcctcttcacggatgcgcga

SEQ ID NO: 12765 - DNA, 1226 bp, Oryza sativa
ctcctctgtgtttttaagcaaggcctttgagttctccatttcagttcttgcattagtcaactcagattgcgctaatgaaagtttcgcttttgcatctctggcatcagttgtctgttccttcaaagctattgccaaatcatccatggccttcttgcacttctcctcagcttcgacagccaacttgagttcacgctgtaatgaccacgtctctacctcaccaggatcagcaaaggagaaagacattattccccttctcctgagattcctagccggttggctaggattagaagacagtgcactgaaggcttccgagctctttttattatctttgagggaagcaatctcaagcttggcctcctccagagataccttggtttgttcaagctgcttcgtttgggcccccaatgacactagcagtttcttctctgaatcccttgctgcctcctgttcaccttctaactgctctaatctgtgcacaaggtccaacttatcatcacctccattgcttgtcaccttattctcattctttttcttcttgagccctgctatctcatccagagcacgcgccttctcctttttctcattcttcagctcttcctgcagcttgttcaatttctcctgcatctctgatgcctcggtgattgaattggaggctttgtcaccattggaagttgatctgacgctgtcaacaaaaacattgttcatgttgattcatggattggtggaaatcatcaaaacagtaaatctaaaaacaaggaattaaacagaaattccactcaatgaaaaccgagatgtcaaaaactcacaaaatgattccagaacttgaaaaagaaaagttgggaatagacaattactctacctggacctgaaggagaacatcttgtccattcaagaaccctgcagccagcccagaattagccgaccatgccacctgcgttcctccaaagtcgtatactatgaaacccaaaattctatcagtaagatagagaaacagagaatacggtgttactctgaaatggtggtgtccgcataccggaggctacggttgctcctgggtatagaagtagagatcataccgcgtctttcgcgttgccagaggaaggagaagatgaaaaggcttattgaagaaggcaaggaattgaaaccgtccaaacctcgagagccgccttgaagggtaagcagaaaagcacagaagcggtccaagtttgttttcttcagaattttag

SEQ ID NO: 12766 - DNA, 772 bp, Oryza sativa
gagcctcttcctctgccaagacgcagcaaacaaacagcacatcggaagccaagccccaggaaagaggaacgcacgagcagcatatgtcacagagggccagcgtcccacactcctcctccatagccttcgccctccattcccatctactcgtctccagtgagatgtgccccagctcctattggcagcaataggaatagaaaagattgctcctttcttttgagctttcttgcaattttggtcttctttccttttgatttggtttctttccgtccgatttgtgaagaggaggagcaatggggttcaagggatttgtggagggtggcatcgcgtccatcgtcgctgggtgctcgacgcacccgctcgatttgattaaggtgaggatgcagctgcagggggaggcgtcggcggcggcggcggcggtcgcgccggcgcaggcggcgctgcggccggcgctggcgttccacgcggggcaggccgtggcgatcccgcatgacgtgattgcgccgccgaggaagcccgggccgatagccgtcggcgcgcagatcctgcgggcggagggcgcggcggggctcttctccggcgtgtcggccaccatgctgcgccagacgctctactccaccacccggatggggctctacgacatactgaagaagaagtggacccaggagaacggcggcgtgctgccgctccaccgcaagatcgccgctgggctcatcgccggcggggtcggcgccgccgtggggaacccggccgacgtcgccatggtgcggat

SEQ ID NO: 12767 - DNA, 623 bp, Oryza sativa
cccatcacaatttcggaaatctatcatttctcaagtgcaagcacattaaatcacctggttcaaccttcacttcttacctatctttacaaccagcaattctatactttttagtcatcttttcaacatagtacttagttgtctcatgtattttcaaaataatttcagcacgtgccttagcatcattatgaaccctctcactagtaggtaaagacaaaatatcaataggagcacgagggttgaaaccatacactacctgaaatggacttatgttggtagtataatgtgttgcccgattgtatgcaaactccacataaggcaaacattcttcccacatcttcaattttttcttcaaaatagccctcaacatggtacccaaagtacggttgactacctccgtttgtccatctatttgtgggtgacatgttgtagaaaacaatagttttgtacccaacttgttccatagtgtgcgccaaaaatttcttaagaattttgcatcgcgatctgaaacaatagtagagggcataccatgcaagcaaacaatctcatggaaaaacagatcagcaatatgaacagcatcatcacttttatgatatggtatgaaatgtgtcatcttaaaaaaaaga

SEQ ID NO: 12768 - DNA, 2127 bp, Oryza sativa
ggaccacggccaacaatgcattggtgacgggctcctgatacctcgcaagtatcacctaatacgtggtaagaatcgcttgatacttgacaggtataacctgatactttgcaagtatcacctgatacgtggtaggaatcgcctgataccttctaggtatcacatgatatctcgcaaatatcgcctgatactggttaggtatcaggacatgatacctcagaggtatcaggacctgataactaattggtatcattctgtcctaacgggattccgttgaatagcagccccgtttttaagaaatcatgaatcctacaaacttagcgaatataaacatgatataatctatgatatgtaagtggaaaagaacgaagaaatttgaataattttttttctcataaaagaatgaatttgaatagggttgacatcatgtcatcactcttaatgtctttttcccctatgatgcaagtttcacctattcgtgaattatcaagacataacaatgcgatatactaatcttcaggtcatgataatatattatttgactcacgaatggtgccaactccatggacggcataatgtatgaactagccagctaggtatatttagtttggcacacagtttcaaacccagccgcaacaaattctttcgttatcttctccatgcaacaaagaacaaaacagaaggaatcagctaacttaaaatacaatcaagcatggaggagaaaacgtgtgtcgccatcatctgacggtcgcaggttagcgatggaaatatggaattatctgaaaccttttcttcctgagccagaattctgtacgcaagtaataaaaaacttcaggcgattagcccccaaccaatgctctctcgcacttagctgatggaccacataagcattagcatatcaaagaaaagtgtttatctgtcccagaatggcaagagaacaaaaaaactgaaggaacttggcaacaaaaaggggcaaaatgcatccggtgagctttacagaactttatgcactgtaggttatagtctgatagagactttggtttaatctgtagagataacgtgctgcaaatacaagttaaaatactcttatacgaaaaatacaagctaaaatacagtctttctaaaagttctagcagaaattggtaagaaatagtcatgacttgttaagacaataataataaaatagttgaagaaattagataagagatagttgtaattagctgagatgaataaaataagtagaggaatggttatactgcggtacaaattttcaatctaaaaacagtttggagaaatgcttatattgcaaaggctgcaattatcgaaacgaggaggttgcttctgcaaacgtaacctgaaaaaaaaaatctcatattctcatttgttacgcacctaatcccgccaaataagtttgatgagaagattcagctcggtgaaatttcgctaattgcggaaacaaatcgccctgctggtcgttgcatctaatcgactgaccacaaccgtggaaagcaaccggattagttgcgaaatcaatgaatggtttgattcgtcaggcttttggactcccactgaggaaaaaaaaaggtcagtgcatgtactagaaaacaacgcatgcttttgctgcagtattcttcagcacatgtacatgttgaattcgttggaagctaaaccaccccacaagctattggttttcgggaggaaatttcttcagggtacgagcttgattagcagagctgaatcgtatacaccacgtcttggcatgctcttggacttccatgttaacataattcaatgttgccatgttggcataatttcaattaccacttttacctgaataatctcgtctgttactaggctagcagattcctgagcagagtattagctggtgtgttgttcgttaattgggtggtatgaaaatttttaattgtttcgacgtcgcatcatgctgatagacagttgttatacaaacagcgatactacggcttggttcagttcccaacttttttttaaacttttaatttttaatcacataaaaacttttctaacacaaactttcaacttttttgtacattattttaattttagcgaacgaaacacacccctacagctcgtggaacaaatcgggtgatc

SEQ ID NO: 12769 - DNA, 602 bp, Oryza sativa
tacggtcctacctcacaaaccagagcctggccaacaccagcgatcagaacaatattctttcatcagctctttcagagtttcagttcgttatattattatatagcgaacgctggtcaattgacaatttgttgtttagccacacattggctccttgctgttgctgttctcggacggacctgcattctcttttactttcaaccacaacagagtactctgcctacgaactcatgaacattctacagatcagcctgtactgttacgactgtacacaggacttccgcctgccgccattgatagcggtaacaccgtatcaatgcaagtagttaatggagagaatatcagcccatgttaaccactagtaagtatatattccagggtaaaacaggtaaaacctgtgatacaaagcagtcacataactgaaaaagcgcacgatagtttgtgctactacaacagtaaaccaggacagaacacatccaacacgatgacgacgaggtcatgggggtttcgacgatagcaatactggcagtacgaattcgaggtgccgcacaacggcgcaccacattcacttcagcagggttttaacgatggatttgacattgagc

SEQ ID NO: 12770 - DNA, 3188 bp, Oryza sativa
  unsure (1)..(3188): unsure at all n locations
ttcctcgccaccaaagaagctgaatatttcccggccgatgacgaggggaaaacaccggggtgggccgggataaaatctcgcctcggcttaaccgaacgcctatacttgcgtgggccggtatcctttccacgccgggattttccatggggattgggccccgatcccagccaggaatggcccaaccgaacaagccctaatggagttcctgagaatcggtacttaattgtcatgggtacaaatctgctgtttttgcataattctgttcgtgaggaggatggttgcctgagccggcattagctctggcctcgcggcaaccgtacagccgcctccttcttcttctcttccttgcggctgctttctgaagaaagattggttcttgatttgctgtcttgtggccattcttgcctttggttttgtagcagtaatggactaattttcttgaaattttgcaccattttttgttcttaagccacgtagacgggtgctagagagaacaattcaaacaataatatctttttgaaggtagttttgttagatttctgtgcgcggcgtggcgccgcgcaaccacttctagtagagataaattacacagccatacgagagcaaactgcttcgtttaggtggaaactagaatgcctaaaaaggtagaaaaccagaaaggcatcccaagtttcccaacaactaataatacaataaagttggggaaaaaagatcaaatcagttctttattaaattaaatgtgattttacacaaaatacactgaacaagtcattgtcactactgctttaaagtccacgcctattcagaagtgataatcctgataccatagtagacggtcaatgagtttcttgtagactttactagtcatttctgactagttaggaattggccatttagtcaatttaatataaaaaggagcatatatggtcacatctaaaagccaaaccaaataacttaggcttaaaaagacaaatcatttagagtactacacagcggcgctgttccgtaatatcaacaggcaatccttttgcagtgaatctaggtgcttgctaattactagtatataagcatagcatgtagaacggccaaaagacgttgcttaaattcaacaaatttaactggttatctttttatggaggcagcaaaacaatctatgggaaacccaccaacttgtccatcgtgcaagaattctaacattagacccaactaaacgttatgctttgcatatcaattgatgtacaatttttcatcagcaaaggtctttgactgaaaattgcaattaaccatgaattgacaccaaaccttagtattgtaagcaactacgcacctccagcaattagaaggaaacatctttcactcagagaaaggtagaatttacctcattcatccggtggtgttcgcacaacagatgagtagtaatgtgcctccaactctttgaggcttcctgctgcttcctgcccaatcctctccagcattctctctgttccttcaacttgttgactaaagatttcaatccgcctatccacattttcagttaaagaagcaagcccagaaaagatagctgttctcttaagctctgacactagtttcaacagagaatcagctgaatgtacctgaaaagcatgatagcatatcgcatctgaaattacacattcaatgggtttgccaaatgatactgattactagaactagcctccaattatattacaaaagcatactttgtacaatggatgattgcaatatgttaatataaaggtagatcggaaaatacataggcaacaaaatgtgattcaaactcattattcattaccatcaccatactgtctatgataaccaaagtaaggccattgcgtgtctgaggtaggttcttctcaatccactattatatactgttggttattcatgatcttgtatgtaatattcctanacaggtaggcgtaattgaaaaaaaacatgtataaaacaagagnacacgctgggctgggagatatgctccagaaacagaatggaagangctctttcttctttctgttgtaatccctaatcaaccttgcttgaatgctattaatttttacatagtataagagcgatccaaagatcaaagagcagccacaatcaggaatctgtcctaatctattcttggtgtgtttgtgtgggctggaggagcagctgggaccatcggatgtgtgatctactgtggcttgttttgttggtgttggatgcattattctgttgcatatctatcttgagttttgatttctgaaggtctatgttgttattacaatagtatatttgctcctcttctgaagttagtccagtgccattgtagtgcacaaaaggtgtttgtttaaatgcctgtaaggatacccgtgtgatcgctggctcatagaatctagtctgcttgtttggttcaagcacctcgttgcttgtctgcatgtccctccaagtggttccagcatgtcttatgtctttgactgcttgcatccatgacactgggcttcattgcttgccatcaagggatagccggattggctctccatggtgggcaaggatttgttcatcaagggatagccggattggctctccatggtgggcaaggatttgttgacggttattggctactttgcttagcaaagcaagattaatttgcctctaccaaacagctgaggtttcactcttgcctaggattgccttctagttataagttccaactggatcagggtgcacctgaaatcaagaaatcaatactataactcctaaatcctaacaaacagctatcaaggatatggcaccaaggattcactgccatggcttaatttgactcctaatacaatggtaataccaaattgagcaagtaattactcagttttcttcttacacaccaattgtctccactactgaggtaggaggaacatctccagttctccatccagccggcacagcaaatgtgatatcaacgcttaaaattaggagtatcgtagctctaagtttgctcatttagacaaatgctatagggcaagatttaaacaccgccgcgaagaaacaaatcatggagcaagtgtgtaccatgcgggagccgcgcatgtccatctggaaggcctcctgcgtgttgcgcaccggcgggtcgttgacctgagacgagcggagcaggaggaggaggagttagggtttggtagtacgacaccaag

SEQ ID NO: 12771 - DNA, 1473 bp, Oryza sativa
cccattagggcttgttcggttgggccattcctggctgggatcggggcccaatccccatggaaaatcccggcgtggaaaggataccggcccacgcaagtataggcgttcggttaagccgaggcgagattttatcccggcccaccccggtgttttcccctcgtcatcggccgggaaatattcagcttctttggtggcgaggaaaaaatcctcttgacgcggcgacacaccgagagggggcgctgcggcggggacggctgcacggcgcggtgcgactccgacgcgacggcgacggcacgctctctcctccggcagttgactcctccggtggccaccttcttcccggtgagttccttcccttcccattagcctcctcttccagtgttagggtttcttgcgctcgtggcctcgtgctactgcggcggtgcacgacggtggcaggcatggcgggggacgccgcagcatcacaccccctcaccatggcgccgttgaagctctaagcgctacagtaaggagaagcaggaggacatggatctgttctttgttcctcacaaggtttcttgatttattcttctttctcccttgatttgttctgagtaatattcctaacttagtctgaagctctgatcatgtccttcctggatctgatcctctgtttgtagtgccgtagtgagaatatgttgattctcctggtagttgagtagttgaaagaccacgttttctgattctcaatgtgagttgttttaaatttgtacataaaggttatgaaaatggtttattcttaaaattagttggcaggtaatagtaatgccacaaaaacatgcagtgcgtaataatattgaggcatcagaagtgaatgctgttcatttttcagaaatagtactagacaaatgttgttcatcagaagtgattccaacaagttgtctgcccataatacaagtagatcaacgagccattccacatgccatattttctgaacaaagtacaaagttcaaattgaagtagtaagaaaaatgagtcatgtgcagctttagttcaggcctgtaaaaagctcttggcagtcggcagaatacaacttacttaaatctgaactattttggtacatggttcaaatggtctaaaaataatttcctaggttggtccatttttagtagatcttttgtagaaccatctaatgaagaaattctggatgtaaatcatgatttttgcagctattgcttgcttaatctgcagactactgatttttgcttctactatagctactattgaattcagttttttgcttgctcaatcttatgtgtcctaatttcattttgatatctgaagcactgctagtattagtctcatatgcatgtccatgtttctagcactgctagctattaggcaaagcacacaatacagcttacaaacaatcacttgtcaaactgaaaacttggtaaaaatgttgccaaggatcaatagttggctggttccagg

SEQ ID NO: 12772 - DNA, 1401 bp, Oryza sativa
aaggtcataacaaaggtggataggcatggctagataaaacagtgataacgcgggaatttaaataaagcgataatgcaataatttaaagcaacataattttataaactgggattcaatatgttcaaggatgatgtgacttgccttgctcgctttcccaaacgtcggcttcaacttccacgaagagcggatcttccgaagctgcagcgtctacacgaccaacggaaaagaaacggcttttactctaataaactccctataacaagcagaaacaaagcacaaaaatgggttcttgacttcttaaggaaaaattagagacttgaacggtccaattccgagttcaaatggccaagatatggccatttgaagtttatatgctctttaaatggatatttgcgaatttcttcatttaaattttaatttaaaaatcggatttattgcgtcagccgaggggaggggcgcgcggaccgggtccacgggagtggggcccacgcggcagcctcacggtccacggtggaccgggtgcacgcagcttgcgccggccggcgccgtgggtcccacgcgtcagccgcacccgagggcgcgggcggctgacggccgggccccacatggcagccgcggggcgcgcccgaaggcggcctcgccggcacagccgacgaaaggcgacgcgcccgcgccccgatggtcgccggcggcgacctccggcgcgacggagcggcgcccgagagaggggagggaagggggaagcgaaatggcggtcctcggctcaccccgggtcgacggcgacgacggaaacggcgaccgaagtggagagaggcggcggcgcggctcgggtcgacgaggacggcggcattccggcggtcggcgggcgaaacgaaggggtggacgaggtcggcgaggacgcggcgaagccgaaggaggcgatgccgaagcgggaggaggtccggggcgacggcggcggcggaccgaagctcggcggcgacggcggagagagaggacgacggcgcgagctcgattccgacggggagagagagcggcgagcggcggaaacggaggagggaggcacggggagcgtttatatagtgttgggagtgagagagggcggccggaggggaaggaaaccggcgcggctatctcggctccatcaatgacgccggcgaagtttgcgggaggatttccaaacgaatccgagagagagagagagagggaaaagtggggggggaaagagggagggaatcacggggagtgatttccccctctttattgcgcgcgggggcggcgggatgcggcggaatccgcggcggcggcggcgctagggcacgggcgaggcggcgggagcggcgggaggacagggatgacaggtgggccccacccgtcagcgaggtggcgggcgggcccgcccgt

SEQ ID NO: 12773 - DNA, 6280 bp, Oryza sativa
gcggccggtctggcgacggtttttttttttggcgatttggtgaagagaaggattgagaagcgctaatcgcagtgttaatcccaccaaacaactcgtgccttttatattagtctagatatacaccattttaagtgtttaagaattattcttttttgggaaaaaaaacaaggagttcaagtttaaatatgagtactgtctggtgccatttataattgaatagagggaatatttttctgtgatggcaaagtccaagcaaaccctaaaaatgaaagaagtaagagaaaacatcattgcaatgtctgttgcttgcacttttttgcaagttgtgggtgtgtctgtttctgtcaaaatgtagcctggtaccatgatgaaaattaggatatatacatgtgtgcaagtgtgtttgtggtacaggtggacttgattaatcaaaagcattcaggtctgcttaattccaggtgatcacaaaacttggtgtgcgaaactggaaccatggtagtttggttgataactttcattaattttgacaatttgaccctttacaaaaactaattttacaaatgaaccgccgccaaacttatttcaaaagtgaccctttttctcagcgccaagtcgtgtagtgctgaacttagacacctcagcgccacatcacctggcgctgaataccgtgccaccatggaaggctgagtcagtgtgccaacgcacactcagcaccgagctatttggcgctgaggtgtctaaattcagcgtcacaggatttggcgctgaacaaaaaggttatttttgaaataagttttgatgatggttcatttgtaaaattagtttttgcaaagggtcaaattgtcaaaattaatggataactttgtatgcctactattgtcgccctagaggcctagaagattgacagacaggtactccttgatttcgtgttgcagcagtcttgagccaagtctagttcatcccggcagtgaattccccgttgccatctataatccttctacgacacgaaaacaaggggaaaatataatataaataaatcaaagacttggcatacgaatatatcatgtctatataatagattgtttggttagctcaatagaaaagagcagaacctgaatcaagatgtacatggaaatcagcaagttattacagatggatcggcagtctttattatacaaatgctgtgtttagttcacgctaaaattggaagtttggttgaaattggaacgatgtgacggaaaagttggaagtttatgtgtgtaggaaagttttgatgtgatggaaaagttggaagtttgaagaaatattttggaactaaacacagcgaaaagtaacaataataaagaaggaaaataataaatcacaaactaccttgtagtgtgtccaactgtcatctcatcacctgtagtcctccatatctaattgcaaagaatgtgacgtgatgttaggatacacatgtatgtatttaagctagattaaaggtcaatgacatgtcaagcaggaaggatttgcacagcgaaggcacatttcaataccatatcacgctctgcctaacatctagcccaacaaaggtaggagtatgaaacactatgtatgactttactgcagagtaatattatagcatctatatgtgaatcaaaactagtagcatatattcattggcagcatttctgaacagtgaggagtccgtttccaaatataagcatttctagattgtttagcaggaataaaggtttgagaaatgcttatattgcatacaaaatatgaattctagaatgcttatatttgggaatgtaacgattagctagtaggaatctaggcagggatcggaattttagatgaaaataaaatgagaactgagcaggaaagtgtatatgccttgtttcctggtagaccatgctacatgatttcttagtttcgtttaactttttgtatgtcttttttttctctagaatttggatgtttccttagcatgaaaataagaagttcattgacaaagcaattagattgaccaaaacctgccagtatttagaatggtgtctccaggttctctggagcaaggaagagaatggagctaatatgcatcaataccagagtaagtttactaaccatttttactggctcttgaatgatgtcgtagtaacaatggctatagtatcttgtctccatccaaaactgacaaaatgaacgaacatgaataaaacataaataaatataatagaaccaataggcaaattgtgagaagtgcgcatttcaataccagatcacgatcttccatccatctacagaatgctccatcaacaacctgaaacaaaccaataaatgacaatataaggacttgtttcacaaggaaaatctactagttcaaggagatgacttatcctaccacagagaaagcatcatcccaagtgctatccttcatatttaacatttcccgataatcctgatatttaacacattgaatcaggtttcactattttagttaacagacaaacgatggtgaggcatgagaaaagatcagaccataattccacgaataacataatattttggaaggtgaatcccagcaaagacatgctcattgaattcgtccacaagttctgaaaagtgttcgttttcctataaatgcaagcacacaaaaaataaaacatagaattaggtaaagcatttattgattttgcatgcactataaagcaaaagtaaaacactatttagtgccataagtacccattcaatagaatcatcatccacactgaagaaaccttctgcctcaagctcacatatcaaactttcaagtctatctctatgctgaaaatttatacaatcacaattagctagtaatgagaccatatccaagcttatatatttgccacttcagatagggtgctatagcatgttaaatacatatagtgatacaaattaccttcactccgtgattaagtaacatcaagaatgtagtaatttgagggaaaaaaaacttgagataattttagtgaacattaaggacaagcaagacagaacagatagatcacatacctgtaaatttatgacagcacttttcatgtgtttgcaatataagcataattgatcttgcttactgagaagtttagctcgtcgctgtaagagggcactaacatgtaagggacagttctcatgaaaatacttttgaaataatttgtgaaaaatgaaaatacgtcaagaaaatagtacctcatatgacaatttcaggagatcgtaatccagatctgtaaactgactacgcaaaatatcatcatcaagaataatcttaatgaaatcatcctgaaaatcattggtacaacaaataacaaacagttgagcagaatgtgtagtcctgtttttgcacgtacagtaagtttatgatatttccctacctttgaagaactagtccgacggacaaaatcatctaatgcaccagaagccaaatgtatatcaaatgcttcatgcaacctagtttgttcttttaccctgtcatactggtggagaaacaacactttcaggacaagaacggtggccaaactgaaacatcaagagcaagactaaactagtggctcattatttcaactttacatactatattttaataaagtatgttcttacaaaaccatggtcataccaaaagtaaattgaagaatcaatccaatggtttcggctaaaaaactaacatgtttgaatactgaaacatgtttgggtcttatataactgaagagggtatgttgtttgtaaaatggtaacaagggcatgcaaccaccaaattttgaaaaatttcaatgctttgaagtggggagttaacaagaatatacagtgaggagtcaaaccacttgcaaatgccttaatgctaacaaagaatatcaaatatgttcagatatctgccatgtaaagtgaggagttaacctagcgtctggttcaaattccatttgaaccattgtgtttcatacaagtttaacaaaacaagtcgtgaatgttttagagacatgataaagttctgtttattagctagcaaccacaaagatcagtatgcagctattaccaaattaggtaaaggcaacaatatcttacttgctagcagctccatttttttttagcaattgtacatatgactcagctacaaagtacaaaccttatgttgtgcattgctatctaacaaatccatacatgatttgctacttgctaagtaaacaagaactgaacatgctacttgaccatatggtgatttatggtgattttaaattatttgctacaaactatttcatagcaaataacatcgaagctactgctatgatcgtcttaatgcttctagagaagccagcaacaacaacaataaaatgcctagcagctaggagctagtagcataacaatatatgcaagggagtgaatagcatctaggcagaattgttaattttgcgatgaaaagcacaaatatgcttgacattagtattaataggattgtatagcataccccagaccttgcgttcttgacctcaatgtaattctgtgcataaggttgtagatgcagcaaaaagtcgcttgagacaggctggaaggactgcagagaagaacactagtttcaatgagtactcaagaacatgataactcaaaggtgaagcatagctgcacgaaatgaatatattcctgagaagatgaaaactgtaaagtatacctgaacatgatgaatatcttcccgagaagttaataggcaagctatttcacgtagcatttccttgtcatcctgcataatgagctcacatttaatttattaatttaaggaatatagaaaaaaacatgtaattttttgtaagttacctgacgtatcagaggatggaactgaggctcccaggaatctaatattctacagaagagctgaaagaggagtaatttggccaatattcaaaagagtgcatttaagcattagcatacatgttaaaatcctacctcaagtgtctcctgcctacaaaatccaggaagtgcagaccaaacctctgaatcgtcctccacaagttcttgcacgctctcatcataaccagaacactgcacaacatccaaatacatacacatcatggtgtttctgctaggtgtagtaccatcttaacttgctaagggtacaggacaatacacgtaccttaatatagggtttaaatgtgataagtttacaaaaaaacttgtatttttgttcagtctctctcttgcaatacactgaagttactttacgcttcagaaagagccaaaataaataatcagaatgtgcacgcatatactcacacacccacccacagatatacttgcaagcacatcaatatacttactgacagcatagttgacatggcccatgcatgagaaattgcacaacaatcagtatcatgcttggacacaaatttaataggagaactaagataacaatcctgcaaacaggtaaaaagattattaaattaaaaaaaggtaaacaaactatcatattgtacttcaatactctctttgtcagtaacacatacagagcaagtactaaacatatctcacaaaaataaaaatgtatatatatttacttcagacatatgcaactttcagattttacataataaatttctaatgcggaagtgaactatgattagtttattttcagacagagaaaacatgtgcataaattaaatttctaatgcggaagtgaactatgattagtttattttcagacatagagaaaacatgtgcataaattaaatttctaatgcgcaagtgaactatgattagtttattttcaaaattagtgcaatgcagtggcttttgtgcaacacagtggtttgaacattaagaaaatgaataattcaaaccattggagtatcttattttctgatgctagcatcttttatcacagtacgcagtgccgtatattgacaggtgcaacctgtgcatatgttcaggccccccaaaaaaaataggacccccaaatccacaattagtattatttatctatgcctaattagcaacaaattacagggaaacagataaaaaaataagccccaaaagaatacaaggcctaatcccatccctaatgcttatactatttgatactttgttttgttatcagctacaactttgccaactcctctttttttcctaataacaattactgatttctaaagtgtgaagttcgtccactctccgttgttcgcagaagcaacatggcagcaacactataatcaatcagcaatttcatatagtagcaatttcgtaataaaagagttataaaatctcgcagcaagcgtgcaag

SEQ ID NO: 12774 - DNA, 1097 bp, Oryza sativa
tgccccagccgcgccgcctcgtggccgtccgatcggctttgggccgatccgggccgtcggttcccgtggaccggcggtggaccgcctcggtggtcccggtccacggtggaccggcgcccttgtgccgctgaccggtggggcccgcttgccggcgccgcccctcccccttgatgacgtcagcgaggtccattttctttgtaaaaataaataataattgcgcaataattcgataataattatagaaatccattaaaatggctcaaaacttctaaaattcatatctaattcattcgaactccgaattgagccattcaacttgcaaaattcatctaaaattgagctctacatgtttgtttagtttttatgtactgtttccttggtttttattagagtttttcctcgttttgcgtgccagcgtgtagtttccgtcgtttcggaagtccgcggtcgcgaggaaaagagttcggaagatcaaagtgaagaagcaaggcaagtcgcacatttccccttgagcatgttgatcctaatttataaatgttttaccgtttgcaaataaatatgcatgttttgctaattacatgggatcagggtttacctatctgctcgcttgtgccatgtttacttgatatctgtcctttgtcaaccttgggtgataaatcgactagcttgtgttacttatgtgacctagctagaactttatgcttagccatgcttaattaccactagctcagtcgatgggataattgcagtattagacattctagtatcttgttgagctgcgtgctcgagacatctggccatgttacatggtcataattatccaactaaaatgcgactgaatggtgggctgtgggtgcatggttttgcgagtcgcacccatggcaattaaggaccggttcacgggaaaccctggaagacttacagtgcttaccacaagcgggaatgggtaactgcttgatctgaagtatagctcgaccctttcctaggcaccggtggcgagggtgggcgtgatggagttgggtcggccggggtgtccggttgtccagctgccggattcaccgcggcgcaagaggggaccgcccactgccttttgaggg

SEQ ID NO: 12775 - DNA, 2741 bp, Oryza sativa
  unsure (1)..(2741): unsure at all n locations
ctgtgtttagtttcacgctaaaattggaagtttaagaaattgaaacaatgtgacggaaaagttgaaagtttgaagaaaaaaattggaatctaaacagggcccatgtctcttaaatattctatccaacctcaaaactccaatctttagctattcaagagaattcgctgtcattgtttcagtcttacaagcttcaagtgcagacccaacatttttcaacagcaagtgaaaatccaatggtaaaataccacagggtctctctcagttcattggatttcccatctgtaatgtgccacaaactgcaccctattcgatgattatatatatagatgaaatcaccgatggacttatcatcacgaagcaattgaatcagaatatcagatacttctttaatgactccatctgatattctgatcaaagaaaaaaaattcagagcattgtaggtcaggccgagtttagatacaaagtttttcttcaaactttcaacttttcaatcacatcattccaatttcaaccaaacctccaattttagcgtgaactaaacacaccctcagcatggagctatggcagtctggcctttcatctaataggtcatgacaggcctactgtaataagctaagcacatatacagagatatctttaaataccgatacactggagtcacaatgtagtatagcagaaatgttgagccatcggttaatcactacttagaaaaaggcttttcccagatggccaaatcatattttcgcaggcggacaagccatccgcctgcacctcaacgtctgcgaaaatagttgattttcacaggcgggcaacagatccacctgcgaaaatatcttccagcactaaaaaaaagacagccaccgccatttccggcggtagcttcccgttcccaatccattccccatccaatccccatctaatccattcaattcatctagttcatccaaaaatcaccaaatcaattcatccggatcatccaaaatcaccgaatcaattctagcaaagaaagcaaataaaaacattcaaaaaatcacggccgccgcctagccgtcgtccgccgtcgcacagccgtcgctcatcgccgctatggcacgtccgcgccacgccgtcgtccgcggcccgccgtcgtccgcgccgccgctgcacggacgcggcccacccccctccggccagatctgagagggaggggcgggcaggagccgccgccgccgcctcaacaccccacgccgccttgaccctcctcgccgccactgcccaccgccgtgctccccccgccccctccggccagatctaggagggaggggccaggagccgccgaccaccgctctccccccgcccctgccggccagatctgggagggaggggccaggagccacgtcgcctggaccctcctcgccgctgccgccctcctccgccgccgggagcacacgccgccaccgccccgcgcccgatgccgcgcccggccgccggtccgcgcttcaccaccggccgctggcctcccctgtaacgccccgattttcgttcgggtttaaaaatcattaataatacattttctagaaattaaataaaagttaaatcaatttaatcaagtgaaataatgggagaattaaaattttcccttaaaaatcattggccgggaatattttgtaatattctttgtgccctaatgtactctccggaattttccgtgaattttcggagctcgagaaatagttttaaagtcacaaagttcattttatcaattaaaataaaaagaaaagcaataaaatttcctcctctttgtttttaggccgcccggcccaatccccctcctcctctccttggcccgctcgcccctctctccttccccccctctctcgggccggctcccctctcacttggcccgctcgcaaaagtctgttttgcatccctccttctctcccttcgccgacaggtgggaccggcggtcccacccgtcagctcctcctcctacctctcgccggccaaccccaaccgccattgccgtccacgtcgccgcaaaatacggcgccctcccgcacccgggctcgcatccaacgacgtgggcacgatcccctccacgtcctccaccatctcccccactttcccccaaaaaaacggcgccggtttgacctccccacgagctccacgtcgcctcccacttcgacgccggttgccgcccatcccggcctgagccactccctcccgagcctataaaaatactcccccggccatcctctcccttttccccaactttcccgcactccccgcgctctctcccgctctcccctcgttgctcccgtgctctgccgctttccggcgagctccggctgcacgccgccgtcgctgtagccgccgccgcgccgcaccgtttgcaccgtcggctccgccgctctttgccgcacaccggccaccgctccggtttcacaaaactccgcgcaaacaccacattcaccgtgcacccgagccacagctgcctctcgtcacctccagtcgcgcgccaccaccgntcccgtcgctgccgcgctgcgctaccaccgncatcggcatcgncgttccttcgncgcacccccggcccctactccgtttcccctccctgcccctggaacgccgccgccgcgttcaccatctctctccgccggccaccgccgagtctagccgtgtcgctccgcctctccggtcgacgccgacttgtgccgccacctcctccggcttagtcatctagagggccccgccggccctcg

SEQ ID NO: 12776 - DNA, 1608 bp, Oryza sativa
ccagcccgcaagccatccagaaggctcgaaacggccaaggcccacctcagcgccaggtggactggcgctgagtgtcccacggtcagcgccattatggctggcgctgaggtcccagcccgcaagccatccagcaggcttgctggtctgggccttgggggttgcggccaagtcccacctcagcgccaggtgggctggcgctgagtgtcccacggtccgcgccattatggctagcgctgaggtccaagcccgcaagccatccagaaggcttgctggtttgggccttgggggttgcggccaagtcccacctcagcgccagtccggttggcgctgaggtagctgccacgtcaactggggatcggcctggccgccacggtggcacaatgtcagcgccagtcccgttggcgctgacacggccaacatcagcgccaatgtgtttggcgctgaggcgacgacctatttttggttgaagtttttggcaggggttagtttcgaaataagttttccaaaagggtcaatttgtcaaaaaaagggtaaaaatgctgaacatattagtaccgtctggagagaccaaccgatatatgtattgatctttagcactaattggtgacaccaactggtactaaagataatatttgcctttttatgccttctttcttctctagcccgagccattggtaccaagctagagaaggaagctaagagatgtgctgccaaaatttttgatgaaagtattttggtaatattacacaaatcaaaggaatctaaaaggctataaacttcatcctctattgatgtatggttaacttattgcatttctagccatgtttctatcgtcattctctctcaaaaatatatggaaaaagatgagagataataagcatacttcgtaattttggagacattggatacgaatgtaaaagaagaggcaacaaaggaaaattatattaaatgaaggaaaaaggaatagaaaaatagggaaaatagtagaaaataatagaaaatgaaggagatataatggaaaacatgaaggaaaaacaaatagatagtagaaaagttagtgtggcattgtatggaaaataggaaaaaaactatggcaatagtaaaaaaataaatgaaatctaactgtggttagcaatactcttcatccactcaacttttgagtttatgatattgtaacgtcctgccttccccaggccgggcccgcttacatctgatagctttcataggtcatagactgccctcacagactaacacatgtcttttctgcacactttgtcctcactcgtgtgcacccgggaagaattcccccaggccgggcccgcttacatctgatagctttcataggtcatagactgctctcacagactaacacatgtcttttctgcacactttgtcctcactcgtgtgcacccgggaaatgtcttttctgcacactttgtcctcactcgtgtgcacccgggaagaattcccggtcggtcacccatcccaaattgctccaggccaagcacgcttaaccctggagttctttggagattggctgccggaaaagaagttgcaacttgttgatatgaatattctattaatcctattaagccctacgccggaatg

SEQ ID NO: 12777 - DNA, 1188 bp, Oryza sativa
tcaagaacccatttttgtgctttgtttctgcttgttatagggagtttattagagtaaaagccgtttcttttccgttggtcgtgtagacgctgcagcttcggaagatccgctcttcgtggaagttgaagccgacgtttgggaaagcgagcaaggcaagtcacatcatccttgaacatattgaatcccagtttataaaattatgttgctttaaattattgcattatcgctttatttaaattcccgcgttatcactgttttatctagccatgcctatccacctttgttatgaccttattattattgttattgttattattaccttgttcaccctagattaaacaaaaccccaactagtggacactctactcatagtaccactagtataattttaggtagatgcttcgctgattaattaggtaacattaggcggttttacaactctagactttgggatattcatatcacctggacactttggaattgttggtttattgtggaattggacacacacctccccctctattcaaaacccccaaaatggttttaggctgggctcgaggtgcgtggttgggttttgctagtcgtacctcgggtactataaggattaagctcgggcctctgttgcaaagcactaccgtacttccacatgtctagtgggtaaggcttagtttgtggctcagtctggttataaacaaaagtacacggatggagatggacgaagtcggggtcgatggacatctctaggacaaatgaaggctacacgagctgcggcccggtagtcgagatgtcatggcacagggctggtgtcctgctgctaggggctcaatcctgcctacctgtcccggaggttccggccgtaggtggggttgggtcggtactcttgtttatggctaggatgggttgggaactatgtcacgtcttccgtccgtataccgtggtggtatgtggcacgtggttacacgtgaggaagatgtgtcttgtgggtaaagatgtacacctctgatcagagtataatctattcgaatagccgcgccctcggttatgggcaagccgagcaatgtacccaagttagtgttttaattcttaaaatttgctcaacaactaaaatgtggaatggttggcctgggttggcttgggacgagctgggacccagggtcgggttgccagttcggtctgaatcatcgtagg

SEQ ID NO: 12778 - DNA, 2024 bp, Oryza sativa
tgactttcccttctgcctcatttaaaacttctgtaccaaacaattggcgttcccctgtctgatcccagaagagcggagtacgacaccttcgtccatacagtgcttcaaacggtgccatctgcagactagcttggtaactgttgttgtaagagaactcagcatacggcaagcttttgtcccatgctccaccaaagtcaagcgcacaggctctcaacatatcctctagtatttgattgactcgctcggtctggccatttgtttgtggatggtaagcagtgctgaaattcaaccgggttcccaattcttcttgtaatttctgctagaactttgaagtgaattggcttcctcgatcagacacgatcttcttaggtacaccatgtaaacacataattcttgccagatagagttctgctaatttcttccctgagtaggtagtgtgcaccggaatgaagtgagccactttggtgagtcggccaacgactacccaaatagaatcatgccccgatgatgtcctgggcaaaccggtgatgaaatccattccgatttcttcccacttctattctggaatctaaagtggctgtagcaaacctgctggcctttggtgttctgcctttactcgttgacagacgtcacatagtgctacgaattcagctatttcccttctcatgctgacccaccagaaattttctttgaggtcttggtacatcttggtactgccgagatgaatggaatattgagtttgatgagcctcggttagtatcaggtcttttaattccttgttttcgggtatacacaatctttctcccatccagattgttccttgttcgtcctcaacaaaacctcgggcttttccaaccctcatgttctttttgagctccgctatttcaggatcacttgcttgagctatgcgaacctgctccaccagtgtgggctgtgcctctaggacagccacgaatccgtgctcaactataccaaggttcaaatgttcaaaatcacgttgaacctcacagcatagttcctctacccatgcgacgttgcagtgactcttcctgctcaaggcgtctgcaaccacattagccttgccgggatgatagtgtattcccatatcataatctttgattagctccaaccatcttcgttgtcggagattcagatcaggttgggtgaagatgtactttagacttttgtgatctgtatatacctcacaacggttaccgatgagatagtgccgccaaatctttaaagcatgaacgactgcggccaattccagatcgtgcgtcgggtagttgccttcatgaggacgcaactgccgtgaagcataagaaaccactttgccatcctgcatcaacacacatcctagcccctggcgagatgcatcacaatagacctagaaatctttcgtctgatcaggcaggattaagactggtgcagacaccaaccgtcgtttgagttcttcaaaactcctattgcattcagcagaccagataaacttttcttccttcttcaatagctgtgtcattggcttagcaattttagagaagttctcaatgaaccggcggtaataacccgcaagtcctaagaaactccgaacctgagtgactgtccttggtggggtccatttggtaactgactccacatttgctggatccacagctactccttgagcattcacgatgtgaccgagaaactgaacttccttaagccagaagtcgcacttgctgaacttggcatatagctggtgctcttttaacttttcaagtaccagccgaagatgctgctcatgttcttcctcggacttggagtagataagtatgtcatcgatgaaaaccacgacaaacttgtctagaaattccataaacaccttggtcatcaaattcatgaagaaggcaggtgcattagtgagtccgaaagacataactgtgcattcgaacaacccgtaccgagtgatgaatgctgtctttggaatatcctcttcgcggatcctcaactggtgatagcctgatcgcaggtctatcttagagaac

SEQ ID NO: 12779 - DNA, 868 bp, Oryza sativa
ttccactaaaaatcctgttaatatattgtgacatgtggaacccaagaaaaaatcccacaaatgcaatttccaattattaattgcatttattaattatggaattagctctaggttaattaagataatttcttcggacaatttatttagccaatttttaaagctaggagagggggaaacttcaaggcgtgacaaacctaccccccttaaacggaatctcgaccccgagattcggaagagctggcgaagaggtgcgggtgggtggccttcaactcatcttctctttcccaagtggcctcttcctctgagtggtggctccactgaactttgcagaatcttattactttgtttctggtccttctctcgctggtttcgtggatacgagtcggcttctccacatacgtcagatcttcctgaatttcgatgtgatccggacttgcctgttccttaggaactctcaaacatttcttcaactgagagacgtggaacacgttgtggatgccaagcatgttggagggaagctcgagctggtaagcaacttcacctctacgttccaagatcctgtatggtcccacaaagcgtggtgccaactttcctttggtttggaagcggtgtactcccctgagcggagtgacacggagatacacataatcccctacttcgaaagcgagctcccttcggtggttgtctgcatagcttttctgccgagattgcgcaattctcaatctttccctgacagctctgactttcccttctgcctcatttaaaacttctgtaccaaacaattggcgttcccctgtctgatcccagaagagcggagtacgacaccttcgtccatacagtgcttcaaacggtgccatctgcagactag

SEQ ID NO: 12780 - DNA, 1801 bp, Oryza sativa
aaagaggtacccctgtgggcgcagtattgccactaggggcacgctactgtggctaaggtgccggacggttcatctgaggacgaggggcgtagcctggctgccggttagcttgagtgaccgactggtggtattgcatgggttgaccgtagcgagggcgaggtgcgcctcgggaagaatttccctgatggttagacttgcgtttcttgtattcttcggtagcctcttttctggcatcctcaagtagaagtgccttgttgatcatatgttgaaaagtggggaagtcatgagcaagcaactggagtctcattccaactgcgattcctttcaagaatttcctgatcttcttcttgtctgtgtccacttcctcaggggcgtaccgagccaacttattgaacatacttaggtactcattgacactgctgttgccttgcttaagtctgttgaattcttctttcttcatgtcaatagtgctttcaggcacatgagctgcacggaaagccgtagcaaactcatcccaagcaatgttagtgggttcagggtgtgcattgcagtaattctcccaccaatctgctgcaggtcctcttagctggtgagaggcgtagagcgtcttctcaaccggagtacactgcactaagttgagttttctatcaacatctttcagccaatcgtcagcctcgacgggctcgacggtctgagagaattctggcggacgagacctcagaaaatctgtcagcttggacctattgttgctcctgtgagggtggccatttccatgcgcattatgctgaaaaccggctacggctgcggctaatccttgcaagatttgtgtctgaactgccattaagtgttgcatgttgttttccacatgaggtggggaagggagtcgttcttctccagaattgtgactggcagtgcggagagagcggtgagactgttccatccctgcatcacgggaagctgtgcgatgcgagcggttgctgcggcggggttgctcaacttctgcgttgcgggaagcagtacggtgcgaacggttgctgtggtgagactgctcattagctgactcatgattcgcttctggctcggctctaccatcttcaaaaccaaagcgggctggtgcacgagctgcacggcgggggtggctagccatctaaactcccagaagagggcggggtaagagtcagataagcacttaggagggcgaggagcaaagtaaatagcaactcagatagcacatactaggcataaattggatttttcaaatcataaaaacacctgatacaacgggtgtggacaagtcacagagctacgccgagcttgactgtgcgcacaccacctaggagaaccacactaccaaacaacacccacaacaaacacacgcacgcactacctcgccacgactccaaaagagttggcggcggaacaaaaggacctaacacacggacggctgctgaagactgcctcctctactcctcgtcggcctggctgcctcctgtagtcggctcctcagtcgaagaaacgtcgatcggctgacgcgaaggcaccggcggaatctgtcgagggccggcagcagcacgggccgctggcggtgggggagtctgtagcgcccgttccgtcgtggcgcctagcgggaaaattatctctaaaaccctaattgcgaaatttgtttcttcccttgttgtctagggtccgtgccatctcaagatctcaatccccgatctatcgtcaagttcaattcccaatccaaatccttccaaatcaaatcccttcgcaaaagtctattttgcctccccccggggtcgat

SEQ ID NO: 12781 - DNA, 841 bp, Oryza sativa
gttctatggtgaactcaatctctcggtctggtggcatactcgttaattcttctgggaatacgtcgggatattcacagactatgggcaccgactccaaggaggtgacttgtaaacaggttaggatagaccgacttgcggtaggggtgttaggggtaaagcggacttgctttcctccaggtccttgcaaggtgatggacttttcggcacaatttatctgtcctttgtgcttagccaaccaatccatccctaggatgatgtccaagctttgcgagtctaggactatcggtttggctaggaagtcaacttcctcaattctaaggttaacttccgggcatatttgagttgcccttatattcctcccaggggaatgtactatcattggtacacgtaaattttgggttttccaaccatttcttttcacaaaagcttgtgatatgaaagaatgggaagctcctgaatcaaacagaactatcgcgggttcggagttgacagagaacatacccatcacaacgtctggagcatcctgagcggtttcagcttgaatgtgattcacccggcctcgaccaaagttgttggaagcacgtgaaccttgtccacttgcctgagagctaggacgagacggagctgccgctggagtaggagttctggcagtgctgccattagcatgccctaagttggtgttggtaggattctgagggcactgtctggcatagtgacccatctggttgcaccggaaacactgaactgctgacggtccctatggtgacttgaaagaggtaacactgttgggcgcagtattgccactaggggcacgctgctgtggctgaggtgccggacggtt

SEQ ID NO: 12782 - DNA, 1183 bp, Oryza sativa
atgaatgctgtctttggaatatcctcttcgcggatcctcaactggtgatagcctgatcgcaggtctatcttagagaacacaatagctcctttcaactgatcaaacaggtcatcaatccttggcaaaggatacttgttcttgatggtgacctcattgagtgcgcggtagtcaacgcacatcctcttggttttgtctttcttctccacaaagataaccagagcaccccaaggtgacgtgctcgggcggatgtatcccaaggtaactgttcatcgacttgtttcttgacttccgccaactcgttggctcccattctgtaaggcctcttgtggatcggtgcagttccaggtaccaagtcaatccggaactcgatatccctttttggtggcattgttgtcagatcgtccggaaaaacctctcgatactctctgactatgggaatatcctccagcttcttagtggttttctccactgctacctcttgttcttcaccagcagcctggtttaaactaatccctggcttccgcggtactggagactggaaagttaccacctctccttttgcattggtcaacttgatggtgcggctggcgcaatcaatcactcctctgtgccttgtcaaccaatccattccaagtatgacatctaggtccttggattcgagaagaatgaggttggctggaaaaatcgacccttgaatttcaactgtcacagatgggcagtagtgagttgtggtcatgccacctccaggagtatgcactcgcattggtatcttaagcttcactaaagataacccatgtgcaccagcaaaacgcttggaaatgaaggaatgggttgcaccagaatcaaacaatattactgccggtgtcgagttgacggggaatgtgcccaatataacttctggtgctgactgcgcctcctctgcagatgcatgattaacacgggcctgaacgaacttgggtccagcacgtcttggcttcgggcactttccaaccgtgtgtccgggtttgttacaattgaagcagagttcgggtttttctcccaacctcttgggctgttctggcagagctggttgaactgattgagctggaatctttagtgaactcggagtagggttgagactgtgctgctcactgttgttgtgactgccactatggtggttctttgtgaagctacccgggtggta

SEQ ID NO: 12783 - DNA, 853 bp, Oryza sativa
ccccggggtagatgggccgagagggattcggcccatcgaccccgggggaggcaaaatagacttttgcggagggatttgatttggaaggatttggattcggaattgaactcgacgatatatcggggattgagatcttgagatggcacggacactagacgacaagcgaagaaacaaatttcgcaattagggtttttagagataattttcctgctaggcgccacgacggaacgggcgctacagacggttgcgcggttgagagctgcacgcactagccaccacaccatctcgttgcttctttaagttggtcgaacaaatcgtcaatccgtggcagcgggtacttgttctttatagttacttcattcagggctctatagtcgattaccattctctcagagccatcctttttcttaaccagaagcactagggctccccaaggggatgagctaggtcgcacataacccttactctccaattcttcgatttgtcttttaacttctgctaactcattagctgccattcggtagggtctttttgccattggtgcagtgcctggcgccagttctatggtgaactcaatctctcggtctggtggcatactcgttaattcttctgggaatacgtcgggatattcacagactatgggcaccgactccaaggaggtgacttgtaaacaggttaggatagaccgacttgcggtaggggtgttaggggtaaagcggacttgctttcctccaggtccttgcaaggtgatggacttttcggcacaatttatctgtcctttgtgcttagccaaccaatccatccctaggatgatgtccaagctttgcgagtctaggactatcggtttggctag

SEQ ID NO: 12784 - DNA, 6343 bp, Oryza sativa
agaagtctccttgcacgacgacgacgccggcggccgcggggaggcgggcggcgaaaaaccggccgtcgaggaggccgaggcgccccgtgcggcgcgggcggtgcagcgctaggtcgagggcgcgcgacgcccgcggcgccgcggaggaggcgaagatgccgccgtcgaaatggcgggggaggggcattctccggcggggtggctccgttgcggcggcgacgctaggtcacgaggcggaggcggaggtggaggcgcaaggcgggagccccgggagacgaagggggtggaaatttcgggcgggtcgcgagtcgcaacaaggtgccgtgctgcagggtcggtcggtcgcacggcacgagccggctcacgttccgggtgcgacctgaatgagcgaacccagccagatcggtcggtcacacgacacgagtcggctcacgttccggggtgcgacctgaatgagcgaacccagccagatggtggtgcggttcgtttcgaacgcgatccatatgtactaggtatatttttcgtgaaaggtaaatccccaaatatcatatggttgatccacgtaagcaaaagaaatataaatatgatagagaaatattgggcttgtttgggaagctttagattcggagaagtagctgtttggtagccagcttctaacaatctagaaaagctctgaaacccagcttctccagtttttagcttcttagtttatttttcagaatctgtaactatatattctcagaagctgtggattgtttggaacagcttctagcaaaagcagctttttaaaaaagatgtccaaacagaacctgtacaagataaaaataacattggacctacatgtcatattctaccttttcctcctactcgccctaaccttcactccatgcgacggagccagtccacgtggtggctggcacgggtacgggcaagggcaacgctgcatgacaggattagacggagaccatggccgcacgggcagaggccggtgtgggggcaccatgcgacaggccaggccgcgtggtggatatttcggacctctcacgttatttctctctcttattcaacaaaaaataaatattctaatgattatggtgttcaacaactaatatccatctttcgagaatatctatttttaaagattgactttcgccgtgtcctgaagataaaaccgcagtcgtagtgtcaatttgtcaattataaaactctgttttacatatgaatttaaagtttgcagtcggtagataatttattgtcataataatattgtttattacatatcaaaacaaatgtgcttgctaactagactttatgataatttcattccctaatacattaatttatataagctaaacaatgctaatatgttcccaacatttgtgagttacgtcaatttcatgtccaccatttacacaaatgatcactatgattgggggcctaaccttattcacctacatatcatgttcaaacccctctatttattatattataaacgggccctcaacctatttaataaaaattggtcaagttataaatgcaccttaatcctctatctagacatggattatttgaaaaacatttacaaataaacccttatcttatatttataaacctcaatagactaaaaataatttattcaaataacatgtaaagacatccaatacagagccagattaaagttgcacgaatgtgcgactatttgcactagtaaaagggtgaaagcaaaatcgtttttaactcaaaagcaacacaaacaaataaaataaaaggtcatcataattgtgataattacaaaatatggtatatcattccagtgcaagatttcctctcccatctatggcatgctacttcaacgacctgactcatttccaacaaaggaaatactgtaaaatagtacattttcataggagaaattataagcgatctaggcacaatttcactatataaacccctctttgaatttgaataaagaatgtcattgtttagcaaaaagaaggcatctaagtgatgtttccactgctacgacgacataccgctttttatcagctttgaagatttttctaccgcttctagctcaataatcagccaaaaataagactatctttcagctggaatttgtttcatatattcaaatataaaggagtcgattcaagtaattcatgtggggcgcgtggtaaaaaccattgctttcggacttccattacatatgtcaaactgcaagttagacgtgtgtggatgcaaattgtgcaccagatatccaaaatatgttattaacatgtgtccaataagaaaatactactgtacttacctaaatctatcatgatgtagatgccaaaaaggggaaacacttttttcacattccaattttgcctttgtatatgttaatcctcatctaagcaggtgaaatgaatgttatacaccacatagcagtaaattacaggctacaacagtgcataaagtataaatgattccattagtttttgccacaagaagttcccctgccatttagtgcaactttccagaccatgttaaaaacgaaatgtcatttgtaccaaagtttccttcatcagcacttttcctaagagcagctgcaagaatggagatcaaattttgttaaacgggagtaaaaaggaaaggaaatggacttttttttaggacatgctaaaaaatcatcttggttaccagtgtatcagaagcaattgtacgcatagtgatcattttgcagcttttggtggataaaactctctcatgtactgattatcctctgcatgcaagaatataatacaagtactgggagggaaaaggtaacactgtcaaaaatattttcagattacttactccgcaaaaatggtgattccttaatccagcctaaatgacgtatttctgcaatgagtttcaccatatatgtagggcactctttcatcagcagcctcacaacggctttcctgtcctccactgtttcctgtatgaaacagtacatgggaagattaagaaaaatctaaactactttaaaataagcaagtggtgggggtgagtgaccaatctaccggactaccaccaaccacatcaccaactcactacttttttgtgaaggtaaaaaaggagtgtggagccaaagagcccacccgtcagctaaaatgtatacggagaaattaacaaaatgagaaatgtagaaagcgatgacgaaacaggtcgatctgaatgtaatataaattctttgcagtaaagggtgccaaacaacatgtccacatataagtattctaagtttacatagaaacaattttaagtccttcatgcataaattcataccgatccaaattaattgaaaaaaattaacaaaattgcaaaaacagctaacgcacctttgctccactgtatcctttgattaaatcgtctcggtgtgcaaccatgtaaactctgaggaagaataaggagttatacaagcttttgtcattgatttctttgtttggctctcttgatttgttcacctccaacttgtcaatgcagcttttgagaccaagagatgctctaagcttaagctgggatatttttgcctcatcgttgttatagtgccaatatatctccctgataaattgcactttgctgttatgttcccataatccagcttcccacaccagatcttcatacctgtacaccattattttgtatcaacttgggtgcaatgctaaaagaatacctaaaattatttttgtaaggaagtgttacttactttactgtttttttcccaagaagttcagcaaaatggtttagttctgcgtgaagtccaaggtttttatggagcttttgaagaagctgccccaaaccattccaatttgcaacctttagctcatcaacagttggtactgctaagaaaagagagattactcacaagttaggtgacttaagtatattgacaaaactactatgttatacaaattctctcctcaataagagacataaatttcatgaaacaccatgttttctgacatttctaatgtaaaaccccatttctataacttgtataaaggatccctggatttgagaccaaaatatttcagaatttctttttgataaacagaagcaaagctgattcatttcattgattaaaaagagtacaaacatcaaaaccaaacaaaaggggaaacaattaacaaaatattttagattaatcctgattcgcatgtgttcaacatgtctgtggatatacctgtgctagaagctttacccttgcctttccggttatttctcgcattaccggttggtgaaatctccaacttgaagtcagttaacaggacacggtagtcccgctgagcgttcaactggtaaaatattttactttcatcaaaattcaatgccttcaaaggtatttgttcatcatcatataggtcattgacatatttgacggccataaacatttctctgcgaaaaaggtaaaagtatcatctaatgctataaaataaaggcaataacccaaatattaattctgcatctgtgtaacacatacatgcttacaagcttaacccatgcatctgcactgtctcgacatgtttgttattattttgatctatataaattaatctacttttgtcgaatgggcaacaagaaaattcgaaaagtaacatgcttgcatgtatcaggatagtcctgtatggttaaaactatagatcaagctaattaaatcaaacatgaatgcattttcctgctatgcaaagactactttttgcctaaatccatttgtgtttctacagaatcccaaccataattagacatatcttcattatgtgaacagttgagatgtttttttcctctctattaattccagaacttttagttattttcaatcaatacagtaatttctagtctatgaacttgttgatctcaagcctctaagaagaatgtaacatttaaactgacacttacacaaaaattttgcatccttggtcagtgaagccaaatgtataagatttgtcattcgtggcatcctccacatcaaatatttcttctgttggaattaaactcagtggtccatcaaagcatggaaaaacaatatatgccagcttcgtccccttttcttcccaaattccaataggttcaatgatgttgctgtgggagcaacttgcaaggatgtcaaaaagtgcatgagcatgttccaatcttctacacactgctacacatttctcttgttgaccttccggatatgacaacatagcattatatgccacactatcaacaactttgctggcataaactgtcaagtttctgcttcggttttgaatttcaatctgcacaaattaaaaccgtaataggataaggtatttcctatttgtcttattgttttatttgcatcaaataatataaaagttgaaattcaccttagagtctccagggattttaattggcattctgaaaaacaaaacatttcttttgtaagataattttcatagcatgaacttaagtaagaaagaactagtaaagggtgagaaagaactaacgatggatcaggaataggtagattagccacaattgactcattcactttcctttttggagccatcagtaactctgcattgaattgattaaaaccaagagttaggtttcatagcaattgtgtttacccaactttttctaaaggagtggacccttggaacataaagccttaaaagctggcccaaacctatctgagcactccatgtaagactaatccgaccacacaaaatgtttatactatgtgggcccaaaccagcatacaaatgtgaaccaaacagaacacaagtgacaacacatatatcagtaggaaagaaaattaattatggagagcacatagcataaatcgaatccatctgctgtttcaagttgcacaacaagaatacaacaaagagagcataaaaatgttttatcacaacaatattattataccacaagcttatcaggttttatagcacaacaatattattattaataggtttatagcataaaaaggcttattgaaacataaagtcatataagcttaggtagctaagttgggagtgggtatttcagcaatgcccaccccattaatcaaaagcaatgagaaactaacacacaaaaatagtgcacaattagtgaattgttatggtgttagtgaccaaaagttagcgagatgcatactggttgtaaatgatggagtatgcattatagtgcaattaactaatagagccaatgagacccaacatctaacaattcgtctgaatcaaaacacttgaaacatgaggcaaatctaacagcttgcccacatttacaattggtacaaattaatgtcctgaaaggaatctgaaatgagtaggtggttagtttgttggataag

SEQ ID NO: 12785 - DNA, 594 bp, Oryza sativa
ctccggctttgtcatctcgagggccccgccggccctgggccgcgtctccgtcatggtcgggtgtcgccggaactgccgttcccgccgcctctcgtgccagtcgccgacatcctttccgccgccagccgactccctgtggtcgtatcgccgtcgccgtcctcggtgagaatccccaccgtcccttccccttttttccctcctccgccgctccccgtgcccgttgccgcgacgcgccgctgtcgccggcggtcgtctggccgcacgccgccgcgcgctatcgctttaccaggccggctgtgccgtgcccgtgccccagccgcgccgcctcgtggcggtccgatcggctttgggccgatccgggccgtcggttcccgtggaccggcggtggaccgcctcggtggtcccggtccacggtggaccggcgcccttgtgccgctgaccggtggggcccgcttgccggcgccgcccctcccccttgatgacgtcagcgaggtccattttctttgtaaaaataaataataattgcgcaataattcgataataattatagaaatccattaaaatggctcaaaacttctaaaattcatatctaat

SEQ ID NO: 12786 - DNA, 8491 bp, Oryza sativa
catgctggtcttcagtccttctctcagattcttttcaaaattatcataaagttcacgtaccaggtacagttgaacatatgtattgtagcttcagaagtactaacagtacagtacagtggacttgacattatcaacggtaatattgtgattgtctttaaacctaataagaacaccaatcaattctttggtttatcaaaaatgatggtgttgtagcatgggataaacaccgtccccccatgctcggccgaaaacatatgctaaggaggagaatgagttcgagtcaaattatttgctcaaatgaagtttccatgcaaagtgattttcagtccagaaattcgtgctcaccaaaaaaggcctgttccaaagggaaatgtatttgagtgagattgcttgctcgaactaacatcactaatgaagttgtgttttgagcaggtcaaagagacaaggagccagaaaggtgggaaaatgtgttcgagtcctaacatggatgttgtcttgagcatgtgaagttgaggaaaagtaccatcgaggatcgagcaaagggtatattttgggaaaatatcaaggggaccacctcaactcctctcaccaactagcaccagatgtcacctagggaccactaaaatgtaccgatatgcccctataggtcatgaactttataggggtaatataataacttcgtgtaaacctgtaatagccaacttgtaaatcttggatatacggttgagcactatttaagctaaccaagaccctatagcatggggcgagatcaatagggaaaaggcatatttattcactttggcatttgtcttttgagctcactctcaggatagacgggtgtcggtgaaatgggcccgagggtacgcacagtagagggaagccgccttcccgtatgggcacgtggctaagcggcctggatttcccccgcccccttcggggaggcggtcaggtagcgctgacgcggccaagggcctcgaggtgccacatcacgaccctcgggccctcagcgtgcgccaccccgaggccctcgcccggccaccatgtggcggggagagcgggaggtgcagggtgccccaatcgtcccacgccgcatttaatgcggtgtgggtgggcgtgtggcgccgctcgattgacccctgtcaatcgagcacgaccggcctgtgatcggtccttggcgactggacgagcgacagtgcccccacgtcccgccctgtgtcaggcggagtgggggcaggtatgccccgtcccgtcagcacactgccgagtacgccgcctacgcatggtgagtccaccgtcttcacgcatttatgaggaaatgacagggatgtcccccgtgtcaggcggagggcggcgcaaggccccgcctgaagccaggcaaccatgttgcttccggttgaagcaaaggatagcggtatgattagggccatatggcccccctcccttagaggggtaggtgcaaacgatgcatgtggtatccccttgaactataaaaggaggacttcgcccgccgagaaaaaggacgactctcagataacttgagctcgggaggaagaacagttaggtttccctccggagctcaaaacctcttataagaattcaccataatcccatacataggagtagggtattacgcccgatagcggtccaaacctgcataatccttgatctctcacacagccacgagggcgatctagcggttagacgacaagcggaagcaactccttgatcatcgcgccatttcccccaaccgaactcacaaagggggatctcacgatcacccgctagagaggatcacttctcgacagtgggaatttacttttttctcgtctatcccccaactttgtccgtgccctaaggtcacgacagtggcgccgtctatggggacgtaaagtctcccagaggcgagcttgaaaaggtaaatgcaacgtccacaacgagcgaagacagtaccagcaagatatacagatacattctcaagcgcggtaggtagcataaatgaatagtacataagcagatcccgatactggaagaactgaaaggagagaaactcaagttgaaacaatcattgaggaagtcaagaaacggcaagaacatcagctccgacgaaagtagaactagcaaaaaatggtgcaagcacaaggggttgtaacggtgaacagagaacaatatgaagggttacaaagggagttgcagcgattgcaggctttgcattatcaagcaatgagggcaaacagatcccagaggcaagaagggaaaacacaacgggctgacggaatccaatcaagccgtgcagtggagaatactcaagaggagaatgcacatgaagaaaacttgcaaagaagaattgctcgaatggaaaacactcaaccaatagaaccacgcaaggaattcctcaaatccaaaattttcaaaaccaaattccccaaacctagaatcttcaagcccgaattcctgaaacccaaattcccaaacaaagaatcctcaaacccaaattccccaaatccaaaatcttcaaacctaaatccctcaaatccaaaatctccaagctttagatccctcaaacaaaagtgcttcaaaaccaaaatcctcaagacaaaacttcaattcattccctcaagtcatttcccaataccaagtattttgcactcaacccaatcaaacaatccaagaacaccaaaaccaaacattctaacaataccaatttcaacagcaaatgccctaccaaaatacttcacaatattttggccaattccaaaatcagataagcaattttccatcaacccaacacctccaattccatccaactcgtgctacagataccaaaaaccctctaagccaaagtttacaaatggcaccatggccagcaaatttcaagttatccaacatcagcaaatacaaaggcgacgctgatccaaacgattatttgagggtgtatgaaacagcagttgtaagccaatacctcctgaaatataaatatcacattagttgcctatattttttgaaatctctcataaactattacatttcttacatctcaaaagacaagagataggcaaacaattcacgctcataaatgtaatgattttatgttttactgtttcatagcaacatgccatttagattaaaaaccaacaatgttagctctgtacatcaacatgtcacgactaaatatatattaaaaaacctgaactacaaacaatgaaacatacatgcacattactacgaataaactaactacaaacaaagaaacatacatacacattactacaaataaactgaaaaaggataatactccctccattccaaatttatctacatatttcataggtacatcaagaccacgaaaagctaataactctctcatattatatttactctagcaacaaactcgatgcatgcaccatccccactattttctagccaatagcaaatcaagatattgcatgtgtggttataaatacttatgtgcatagatgcatgcatcaatgtccatttactccaatgcacaaataatgaataggctcaatgaatgaacacaaatatatagatcatttaggaataatctcaaaaaacactatatgtagatcaatttggaatggagggagtacaaaacaaacctttgattcttatatcttcctctctttctctttcttcaactctactagtttgttaaattccaattcggatgtctgatcggaagcccataactgaatcataagaaactctaatgcccaagatttgcgaatataatgctcaagatcagactttgtcttacccaactcgatttctttatggccaagtttcgctattacctacagtgtaacaagattgttatttaaattataattgcaacaaaaatttaaaatattaagcgtaatacataaaaaaataaatacataagtttaggaaattacatctgatggaatatattcaacttcatgttcgataatgtctctaagttcatccaatagatttcttaatgttttcggtgcagattttattcttttgttgccaatccataaaggccttgtagattcaatactgtttgcatctagaaactctgtcaatgtgtatgctgactttgattcatcaagtggatgtatttgttttggtttgcaatgaatactgacatgagtccaaagaaacagaactttctcaaatttttcgcgcacagacaagaaagcactctgctgaagaatatctaaactgcaacaattaaaaaaaatagagtgttagaagtatggatatgtcaattaaagataagagtcaaatacaaattatagagataagatataatcctagagataaaatagagtactagagatggaatcctagagataaatataatcttgcttgtattgtattcctatatataccccatgagagggtcgatgtaaaccaacagaatacaattagatttttcacatggtatcagagccttagagatcaacgtcgttcgattctcgcgtcgccctagggagatgagatcaatcctataatctccatggggcgccgcatctattagctaccaaattaccgatatattagaatctttcccaatatcagcattagttaaatcctattagccaccacgttcggcaaccagttagtattagattagcttttcaagttttagaaaattgcatggcaatctcttcgtgcaggagttgaagcgcagcggcatgaatgtcgtgttaccacaccattcgcaccgacaccctcccgctcttctatgtcaggacagcagcgacggcagcaccaggacgcccaggaaggaaccatctactactgcatccatctactcaattgagaggagaagcacatggtgcacaggagaataagatcctcacgcccggtgctacaagcatcaaatcaagcgtcaagccaccaagccatctgcgtcgatcatcttcgccaagttcctacgaccggcagcgacgtaagccgcggctgctacctcctctacaccagccatacatttgtcttcgccgacactacattaccggtggtcttcattaacacgtcgtcgccgcatcgtccacaagtatggacacatgcgcgtcctctaacagatacatttgcagtatgcttcatcagtgacatcgaccgtgtcctctacgacggcaacgaccgcatcaccgatgacggcatcgatcacgtcatctacgatgacaacgactgcatcaactcggcatcactattgtgatgaccgctacacggtgcagaaggaccaaccaaagtggtggcctcatcgccaatgacgtcctctgacattcgtaagacgtcttcaacggcatcctctgacatctacaaggtgcaagatgctaacaattgcagtgccatcttaacaccatgtcgtaaatattttttttccgcctttggctattcgcggctatatcaactactatgatcaccacgaccacgactactacatgattggctacatcgatgaacgtctacaacaacaatcatctacgaaaactccagctaaagtgtttgtgtcatcactatcatccataacactcccgctatggctgcgggaggaaatagaggagagaagggacgacacagaaggggacgcaagcaccaggtgtagagtgagtcaaagaagatgaagaaatagatttcaaatccggtcgcaatcgatcgcttcactcccgttacgactaaggggaatgttaggaatatatatatgttagttagagataagagtcaaatacaaattatacagataagatataatcctaaaaacagaatcctagagataaaatagaatcttagagatagaatcttaaagataaatatactcttgcttatattgtactccaactctctatctcctatgtactcttatatatacccgatgagagggttgatgtaatacaacagaatacagcaaataaatttttcacagagacatcactaaaatctaaataattaattagtataaaacatttcattgagattaaaaaacaataaatgattatttcaacttaccctcttatctgaccttttgaaatctggtagcatacatagtgtatctctagcgaatcactagaattagcgaaatttctctcagctactacgcgaagcatatctcccaatcttttccaatccatatttttcttgacatcttagtttaagaagagacaaataatacagacaaatggcaattacaaagttagagaacagaaaattataatgttatcaatatcagcaatttcaattatttgaattttacctgaagtacaaacagtaaaattccagatttttgcatctatggagttattgttcatcttaattgctatgtctgcccctttcaaatttggacagaagaaaccattatcgtgaagtgcttgcaaacctttgacaatttgactgaaagaaaagtaacagaaaacattagcacgcctgaagggagatggaattcagtcaaaaaaaatatcaatgtttttgtgcagctcatccatatcatcaaaatttagtgacacggtgtattttttagtttttgctacaatatgaagtttgtttgattagagttgtcatataaacctactgtttgccattgttctagtgcttgtgtgcaaaagaacctttagctggtcttggtgcacacaactggctagatggatgcactgatctataggcagtagtgtagccgggatttagacttgaggggggccaactgaagctatgtactgagcgacaatgaacgggaaaaaaatatccatcagaattcatgctcatttcgagcacttgatatagatgatacttcaaatcaacatatatttatatgttttgagcataaaaaatgttttagtgtctattacttacatacaatagttgcatatgaggaatcaccagaaaactgcagctattggaacagcctagcagtccaatcgttgttaccgttccttcattagcctgttgcagaattactactatacgtgctagcatgcaaagacaggatgaaataatcatcataagcctgtttgggcctgaacctagctagtagtggaggcctgaatagagccagtacaccaaaatgcttagcctagtgtcctaattaaatgattaattattggcagttcctagggaaaacacattaaatggcaggctacctgtgcatctgcgctaacatcaatttattaaatttggtgagaactgaacaataggttgcaagatgacacaaataacagtaggtggtgcagcgtaatatactcatcaaaacattgaaagtgcagttataccttactgcttcagtaaaaacttccgtgaatcttcccatttcaacagctctgctacccttggcaattaaatcactgaaggttaaatggaacatcggaaaggccacaaacccatactttgagtgatgacggctgccccaagaacaccccaaagatttcattacagagggatgatcaaatgatgaccatttcttgtgcattgcaggcatctcatcagcatcacattgaaaagcaaagatagtggcttttattggttgagagtccgttgagcccaacttgatagtaccatcataacatatgatataagttccccccctaccaatattcttgtgtttcatgtctgtaattatcatctctgatacgccttcaaccttcaataaaagagagataaccagcagtatttcccaatcagtattactagctataaatcatgaatataatagcattttgtattaatatgcaggttcaagaaaagcactccattccaaatgtccaatattagcatgcgttgttatgttttactccctccgttccattttgatcatcgtattgcaaaaaaataataattccattttgatcgtcgcattacggtggggaggagatgaaaatcccgggaaggatgttaatgacacttcctaacgaacactgcatgcatctgattggtcaggctatgcggcatgcaaaactgattaggagccgctgcatgcatcgatttaatacgctcacaactgattggccagccatacagcatgcaaaattgatggcgttacattcacggatacgaaacgctgttttcgatgctgattaagtgctccacatgattgtcttggtattgatgcacaaagcatatatgaagatcaattaggaatggagggagtatttctatatcagagcagtagcaatgatactcaaatcaataaagaagaaaacatgtgtttgtcacatgccggttacaagcaaacaaggaagcaatgttattcatttttctagagaggaacacgcactcattatgttaacattcggctttgttatccattaccgaaaaactttatcacgcagtgagatcgatataaccgcaagtatcaagtcccaggcatcaaaatcggttaattctgaagggcatgttcctaaaccgaaactacacagtggcaagtctgtcaagagacaagtttatgatggcatgtaattaattgggtcttactgattgagattatggacctcaatgcatacctcgctcttgacag

SEQ ID NO: 12787 - DNA, 1177 bp, Oryza sativa
taatgatttacctggctctgcatacaatggtatgcatcttcacaaagaagataaagagcattgttatctgacttcggctcgagggttaagcattgtacaatctttggaagtatatcatcttgaacaaaatatagaagttcatcattgtgcgtagcaatagcaagttggatcaaactatgacaaaatggtgcagctataatccttgcttcaccatccttccaatagccaaagatataattgattaaccttagtattgaagatctaatgttatcatggcataaaagatacctacatgtgaaataattcaagtgttatttatattctaaaatacaataaaataactgcacaaaatctcaaaatatactattgtcgttgtaagctgcagttgatccatcttacccaacaagcgagcttgaagtagattccaaatctgctgtgctgacaatagatccattttgttctggcagtgccattgcagcaagcaaatatgatgcttcacgagtcaactcagaaagaagtccctttcccgctttctcaaccatttcttttgagaaagattcacagaatttatcaggaaccgacactatatccttatacagaagactgcaccatgaactgtatagtgtctcttcacagtagtgaaacactggtggtagaagcatatctatccactccacccaaagatcaggaggacaactttttaccaatggaacaattgtatatttaatcagcatggtcaaatgacgaaagtccattgattctacatcttttagtaaggtgccacaaacagaaaagctatccaaaagtttacaaaatgctccctcaagactcgcacacatacctataacattgtacctacaaagtaaaataaacatttatgtgaacacaaaattacaaaaaaaacataacgtagacaatcaaagtatttctttactttgaactttcaaagttttcctcgaaccaacattataacacaatgttcaaatgaagctataacttacaaaatgcattggaaagggatattacgccttaccaccacatcttgatatccttaaattattgtgtgttagaatatgagatgaagcttcacattatatttcgtgaatacattgctaaggtactatggatcggactagagttttaagtggaggaatggtgctaactaaagcaggaaggg

SEQ ID NO: 12788 - DNA, 11508 bp, Oryza sativa
ccatttctgggataagttttttcagggctctatttgcgaaataagtttttcaaaaggaccaaaatgtgaaaaatccaggttataagactttctagtatagtccacgttaatatagatgttaataaatctaaacacatatataaatatctagatttattaacttctatataaatgtggactatgctagaaagtcttgtaacctgaaacggaggaagtataagttaatttattggtttatatgcttaaacttaagtataatggtggagtcgtactttcactcacatcaacgttctctaatgtataagtcaatttgttgatttatatgcttacttaagtttaatggtggagtcgtactttcacttcatcacttcacaacaacgttctttaacaattcatgaccccgaacactgacaaaatcgtggtgttcctacccttcttctagttcagcctcgccttgcccaccgacgatttcctccaatatctgcttcacttctatgatatcaacatccatcatctcaaccccaactctatcctccaaattgctatcttcattcatctatgtgaggcgtactgcggcatacccccacactttgcgttcttccattatctctaccaactcaagccgcagcaggagaagaagaatcccatggtggtttgatgcagggagtagcatccagatccggtccgaccagaagccggagttctttgatctcccactcagatccaacaacaagggctagcgctccaagtagttttattgctccaacctgctgcccggtctgcccccttacatcggtcatgaaaccgagtagcttactcgacggtacgccgaaggtacacttgtcggggttgagtttcgtcttgaaggcgcaaaagctgttgaaggtttcttccaagtcggtgatgaggtcttctttcattcgggtcttgatgacggcgtcgtctacataggcctccacgttgcgtgagttggttgtgtaggcacctctgcattgttcgttggtattatgactctgacgttcttgagcccgaagggcatggtgatgtagctgtaggcgccgaattgagtgatgaatgaggtcttgaggcagttgtcttctttaagggcaatttgatgacagcccgagtagacgtcgaggaaggagaggagcttgcagccagctgtggagtcgactacctagtcgatgcggggtagacaatattcctgatattagaaatcatctctctgctagatctagtgagccccataaacaatattgccgatattagaaatcgacaattggcgcatcaggtaggggccgctcgatcatttttctttaggaggagatggcaacccgtggagtcacctgcgcgacaaccgccacattttttgccaccaccctcattgcgctaggttccttcatgttgtcaccaacgacgtcggcaaactggtccagatgacccccggtgtgatcggatgcacccaagcactccgctttcctgcaggtgcggcatttcgcttcgactcctcaagcccgcatcatcatgcgtcctgccgtagatcacgccacctcagctaccctttggcatcagcaacttcatcaccatcattgccaaaaccgtcgccgccaagatccccgttaaggacagcagggaaggcgcaccacttccacatctacctcgtgaactcaagtcccgctaggttgggttcctcgacgaattcgtgcgcctcttcacgagaactcttcatgagttcgggccccgctaggttgggttcctcgacgagttccgggagcatcccgacgtcacaccgcccttcacaagacatcttcgttgtgatcctcctggaaacgaaggccgagaagcaggagcgtgaagaggaggaacgccgcatcaagtaacaacaggaagatcttagctggcacatagaagaactgcgccagcgcggccgtttccaaaaaccgtttccaaaaccatttagggagtcaatttgcattggttttaaagttaggggagatgttatatccggttttgttgtttatagggatgtgattcaacaaggcacatgaggtatgcaaatagactaaggctgtgtttgctggccatggtggggaaccttaccctcccacacggaaaacggaatgatccgttagcgcatgattaattaagtattagctattttttttaaaaatggattaatttgatttttttaagcaattttcgtatagaaattttttttacaaaaaaacatactatttagcagtttcaaaagcgtacatgcggaaaaggagaggggttgggaaaaggggcatccgatcacaccctaattcctttctcgtgttcgttcgcttgccgttatgccacgcgtacgagtcccgtgacgtgctggcccgctacatgccggccatggtgcggctgggctgggccttggacagtaaggtggccttgcgtgaaaagatgtggcccccataatggcccaattaccttctccccaccgcggagggattcacgtcatcgtcttcgagacttcgactctcgactctcccggcgacggcgacggcgccgccgccgccgccgccgcgtacgagtcccgtgacgtgctgagcccccccctccggctcgatcggctctcttccccgacccgatccacagggggagtccggcgtgagagagggggaaacccggacgcgacccggcctcgccgccaatcgtggccaggaattagggttgggtccgtgtcgggctcgggactcctgccgtgccgctgtctgacaagtgacaaccccaacaccgtcccggctgcggtctcctatcctcccctctccctctaaaacatgcctcgcaagaagccaacttcgctttcgccgggaacatcccggtttcctccaagccctggaatctacaagtttcgaccggctatcctttgggactccgcgaggcacaacagattcagcgcacgcaacagattcagcgtactagaagccatcagcgacgaggacgacgattcgttgacggagcgagactccaccacttcagacagctgtggcgaggacaattcgcggaaagacccaccgctggtttgccattacttcttctctgcatcaacttatttatctaggatttacaaattgtttgtggatgtggccttattgtgtgattttagtgaatgaattgctagcttgtgataatagtaatgttcttttttttttccttttccttatgccagaattctctacttcttttggtggcatatcatcaattttaatataatgaataataaataatatggatgttttcaattgtcacagatggaggatggagagattgtgaatcccttggtgaggacattgctcgagctgttcagcgaggaacaaatttctgaaatcccactcatggaaacatatattcgcagatgtgtaagtaacaagttttatgctagattgtgatgggtaatggaatcttctaaatcttgttccacaaccgtgatggaaacatatattcaatcttcaaaacctgtgatgttgtttaattatttttttagtttttaagctggtagatatatttaaacttgcacattgacatgttatatccatgtatggatttcatctttaatgtattatgtttgttatgttatccatgtatgactttcatctctaatgtatgtaatgtattatgtttgttctccagggtatcagtgaaggaatgggatctcatcttattgaagagaataactttctctttggagctttcacttctatagtggcttgtccatggtacttgacaatgacatcatttttttctttcataacatggttttaagtttgctaaatattatattttgtcacaggattaaaaaagatacaatactgctttccagcatacttctccgtttatcagaaatatggaaccaatcagaatgggtgacaaatctattggacttttttgaagatgctcagttcaggacatctgtgtacaatgttgttgcatttttcgaggatcagctcacaatgtccacgacagaaaattctaatggaatcgaccataaggagaaattaagctattcaactttgtttgcccttcttccactgttacttcccttactcttaaaggttaaaaaaactaaataccatacttttctaaaattgagattatagcataccggaagaatttagttatttgtagtaatttcatatttattacaactgttcttttttttttgcagcttcttcagtatgtgcattcactttggacggatgaagttgcttctaacgtatcagaaaaacttgaaggagctaaatttattatacaagctgagaagccatttggtattattgaagaaactactgaaatgctagatatgaatgaggaagagttgctggaaaatgagataaggaagtggctaaaaaagatccgccaaactgggtatgttttttgctagcaatattcactgtttatagcattcttaatgagtaggttcaataaatatcatgctgggctatttaatgttaccactttaaaactctagtctgaatgcatattacttggcaatagatccacaaaatctaaagtgaagcttcacttttgattctaatatataataatagtttaaggttacattaagatgtgatgggaagaagtaatatccctttccaatatattttggaagttatagcttcatttgaacattgtgctataatatcggttcagcgaaaacttctatgatttttaaagtaaagagatgttttgcttgtctatgttatgtttattttttttaatttttttgtgtttacataaatattaattttattatattctgtaggtataatgtcataggtatgtgtgtgtgtcttgagggagcattttataaacttttggacaacatttctgtttgtggtgccttactgaaggacctagaagtaatggagttccgtcatttgactatgcttattaaacatacaattgttccgttggtgaaaaattgtcctgctgaactttggccgaagtggatagatatgattttacagccagtgtttcactactgtgatgatacattagatggttcatggtgcagttttttgtacaaggaaacaatgctcgttcctgataaattctgtcatatttctttcacggaagaaaagattgaggaattaggaaaggatcatctttttgaggtgactcgtgaaatatcatatatgcttgctgtaatggcactgcctgaattaaatggtggaatagcaaatgagcatcaatctattgtcagcatagtagaaacatctgcagatttggaatctacttgttcaagctcccttgttgggtaagatggtttaacagtagcttataattatatattttgagatgttatgtagttattctgttgtattttggaagttaaaagacaatgaaattgtttattttgcaggtatctcttataccatgatgatcttagaccttcaatactaaggctaatcaataatattattggctattggaaagatagtgaagcaaggattaaagttgtgtcattttgtcatatgctgatccaacttgctatttctacgcacaatgataaacttatatcttttgttcaagataatttaattccaatggttgtccgatgcttaatatttgagccaatatcaaacaataatgatcttcttcttctttgtgaagatgcataccgctgcatacaaagagaggtaattcattagcttcttgtagtccctccattttggcaggtgccattattcgttatcttggttgatacatgagaattctgtgcttattttatgagcaatgctatataaatataattattattagtattgtgcaatattttgactgctccgattggcacaatggtttttcccttttcttttttggacaaaaatgaacccttttattggactcaagtatttgtttatttcaggaatcagtaagtgaaggtcaacatgatggaaatagtgcagaaatatttgaaaactggttgtcaaagcaaatgatagtggctcattatgaacactcacctcctgatgaactcgaagactttgtgtgcatctgggaggtattttgcctcttttttttttttttttttggggggggggggtctatgttaatccttgtgattttaattttgtatgaaatgttttccttacttgaacaatatttttccccctcaaatcagattgaagaagaatttactgcttatcttcacacctatactgaaatgttgcataaagtggatggaatcggtgatacaatagaggtaaattatttatttatccactcccccataaaaaaaaaattctttcaagtgaagaaatgaaaaagtgagttgcatttataatgttggtgcagtggcagatgtggaatttcagttgggaaattaacagttgttgctacgcaatgctttaaatcacttccagcctattttcttttcttaatatttaagcgactgtttcccacaaaatttgaaaataaactaatgatatccgcgttataaatttatgtacatgtttctttggcacacgagaaatcttaaacttgcgtatgtctgatgtaactatatatttcttatttttgggagggagaattgaagtctgtttacctgtttgcaggatgtttatcttaggtgtcctatcccatttgtgtccaagcatgacaataattgttgtccaatttctaattcatgggccatgtcatctatgctgtcagtaagtatattgatgtacttgcaagtatatctgtgggctgcatactgattatttattttggctctttctgaagcgtaaaataacttcaatgtattgcaagagagagactgaacaaaaattcaagtttctttgtaaacttatcacatttaaaccctacattaaggtatgtgtattatccattatccttagcaaattaagatggtactacacctagcagaaacaccataatgtatacgtatttggacattttacagtgttctggttatgatgagagtgtgcaagagcttgtggatgacgattcagaggtttggtctgcacttcctggatgttgtaggcaggagacacttgaggtaggcattttgtcatgtatgtgctaatgcttaaatgcactctgttgaatattggccaaattactctccgctttcagctcttttgtagaatattagatccctgggagcctcaattccatcctctgatacgtgaggtaatgatgaaaatttacatgttctctttctatttattcttgagtttatcaaattaaatgtgtcttcattgtgtaggatgacaaggaaatgctacgtgaaatagcttacctattaacttcccgggaagatattcattgtgtgcaggtatctttacctttgagtttttacgttctcaggaacatattcattttgtgcaggtatgctttacctttgagttctcatgctcttgagtacttaatgaaactagtgttcttctctgcagtccttccagcctgtctccagcgactttttgctgcatttacaaccttatgcccagaattatattgaggtcaagaacgcaagttctggggtatgctatacaatcatactaatactaatgtcaagcatatttgtgcttttcatcagaaaataaacaattctgcttagatgctattcactgtatatgttgttatcctactagcttgtagctcatgggtatattttttttttgttgttgccggcttctctagaagcattaagatgatcatagcagtggtagcttcaatgttatttgctggcagatagtttgtagttaataattaaaaatcaccatatatgaccatctgctcaagtaccatgttcggttattggttactcccccagtatgacagggtaaaagaacaaataaggttgcatgaagcatttgatacacatttggcctctggtgcattggatgatcatgttcgtcagattagttcttcaaaggtaggaaatatattatgaacttattgtgcgtacaaaaacagggctaccacattttgctcaactgcttattaattgttgtacctatggttctcaggataatttcgtgaagattatgcttgatgatgatactttgcatagtcagtttatagatctggattatgatctcctgaaattgtcacatgaggtgctattttcctgacatattttccttattcacaaattatttcctaagtattttcatgataactttgtgcccttttacagcgacgagctaaacttcttagtaaacaagatcaattatgcttatattacaaacacatgaaatgtgctgtcgtaaatttgcaggtatgtgatctatatgtcctgcttgtccttaatgttcactaaagttacctcaaagttttttttcccctcaaattactagcattcttgttgttacttaatcacggagtgaagttaatttgttaatttgtatcgctctatgtatttaacatgctatagcatcctatctatatgtttcattctcattttttttacttgatactgcaatatcacatgactatgtcgaaagctaaaagctgttccaaatgagttaccagctatatcatttgccaagtaggctatgcatttcacttttgctaacaaaagagtcaatgtaaaatttgtggttgccattttccatatagtttttgaaccaagattcaaggatctagtggatagtttggcatatttttgtttatttttttatttgtacgatgttttctatttttttaattattttggtgtaataacgaaacaaattgtctgttgatgcccattgcttccaggtttaacacttgaaaaacgtgttgaagccaacatgcattaatttatgaagtgacaactatatgagcttggatatggtttcttagctaattgtgattgtataaattttcagcatagagatagacttgaaagtttgatatgtgagctcgagtcagaaggtttcttccgtgtggatgatgattctattgaatgggtacttatggcactaatagtgttttacttttgctttatagtgcatgcaaaatcaataagcgctttatctaattctatgttttattttttatatgcttgcatttgtaggaaaaggaacacttttcagaacttgtggacgaattcaatgagcatatttttgctgggattcaccttccaaaatattatgttattcgtggagttatggtctgatcttttctcatgcctcaccatcgtttgtctgttaactaaaatagtgaaacctgattcaatgtgttaaatatcaggattatcgggaaatgttacatatgaaggatagcacttgggatgatgctttcacagtggtaggatatgccatctctttgaattggtggattttccttgtgaaacaagtccatattatcatttattggtccatattatcatttattggtttgtttcaggttgttggtggagcattctgtagatggatggaagatcgtgatctggtattgaaatatgctcacaatttgcctattggttctattgtatttctttatattttattcatgttcgttcattttgttagttttggatggagacaagatactataggcatcgttactatgacatcattcaagagccagtaaaaatggtattgacccatattacctccatcttctttcttgctccagagaacctggagacaccattctaaatactggcaggttttggtcaatataattgctttgtcaatgaacttattttcatgctaaggaaacatccaaattctagaaaaaatgaaaacattcaaaaagttaaacgaaactaagaaatcatgcagcatggtctaccaggaaacaaggcacatatagtttcctagtcagttctcatattttattttaattcatctaaaatttttatccttgctcagattcctactagctactccctacattcccaaatataaagcatttctagattcaaaatttgtatgtaatataagcatttcccacacttcaattcctgctaaacaatctagaaatgcttatatttgggaacggactcctcactgttcagaaatgctgccaatgaaaatgtcctactagtttctattcacatatagatgctataatattactctgcagcaagtcatacatagtgtttcatacctttgttgggctagatgttaggcagagagtgatctggtattgaaatgtgcctttgctgtgcaaatccttcctgcttgactacttgttgacctttaatttagaggcaatctagcttaaatacgtactactacatgtgtatcctaagttcctaacatcacgtcacattgttttctattagatatggaggactacaggtgatgagaatgagatgacagttggacacactacaaggtagtttgtgttttattactttccttctttattattgttactattgtataataataaagactaccgatccatctgtaagaagttgccaatttccatgtacatcttgattcaggttctgcccttttctattgatctaaccaaacaatctactatatagacatgacatatttgtatgcaaagtcttcaatttatttatattataatttcccgtcgtttgttttcgtgtcgtagcaggattatagatggcaacggagaattcaccgccggaatgaactagacttggctcaagactgctgcaacacgaaatcaaggagtacctgtctgtcaatcttctaggactctagggcgacaatagtaggcatacaaagttatcaaccaaacctccatggttccagtctcgcacaccaagttttgtgatcacctggaattaagcagagctggatgcttttgattaatcaagtccacctgtaccacaaacacacttgcacatgtgtatatatcctaattttcatcatgttaccaggctacattttgacatatacagacacacccacaacgtgcaaaaaagttcaagcaacagacattgccatgatgttttctcttacttctttcgtttttagggtttgcttggactttgccatcacagaaaaatactcactctattcatttataaatggcaccagacactactcatatttaaatttgaactccttgtttttttccaaaaaaataaatcataaacgctaaaaataatgctatattattgaaatgtgttacatcctaaatataagcattaagcttttgcttatcttacgataactatttaaaaactatttctggtctaagtttaaaaagtgttggtcaattgtgccatctataaatggatggagtatttaatattttttagacaaatggtccaacagcctggcttttgtactacatttttacagcggttgtttgatagggtgctaaacttcatattttgggtgactgagactatattttttgcaattttctattaaaaaggtattatttctaaataaatcctcaaagttaaccgacagttctaaatatcctatttcgatccaactgcaatgaatatgcagggtgaggtcttaccagctctacaggtcacaggccatgaatattactggaattataattcatcccagctattccttcatgtcagtagat

SEQ ID NO: 12789 - DNA, 1869 bp, Oryza sativa
ccaaactttaggggctaaatgcaattttttgcagacggcgccgtcgagccgccgtctgctacgtcagcttgccgccctccattaggacggcagggtctatttttgtaattttttgcgccaatagattatttctgtaaatattaaaagaaaaaaaattaaaaatgaaaaaaattctatcttcgtgagactcggccctctacctgcgttcagcttcgtcggcccaaattccaggcccattagcccagttgcatactccatgttgcaagttgcaacagttgtgtggggcacgagtcctcgtcacgtaacgttgttcctatcttatttccgcccgcaccccgccccacgcgagacgcgacggacaaaccgcttccccgccgcgatgtgccgatgatgcagcagacgagactagacgagacgaggcgggccaccactgagccgggacgcacccggtatctgggaaaaccaacgcgcgcggccacctgattcagcccgcaccacctgatgaccccctccccctcccttcaagtataaatcccacctccactccccaccagattctcatcaaacatagcaccaatcaccaatcacctatcagtagtacttcactgctcgctactagtcccctgaattcagcgatcagtataacagcgggaagctcaagaagagatcgtcgatcgatggcgggtgcagcgaaggcgtcgtggatggtggcgatgagcgtgggcgcggtggaggcgctcaaggaccaggcggggctctgccgctggaactacgcgctgcggtccatccaccgcgccgccaaggccaacgcgcgcgccggcgtctcgcggggcaagaagctgcctgcctccgcggcggcggtggcggagaggaggagagcggagaaggccgaggaagggttgaggacggtcatgtacatcagctgctggagtaccaattagtatagctgtgccttctactcttctactactagctttgctataggagtcaggttggaacttggaagtggcaaccatggctgagacttgccggttgcttgttaatttcctccgggttgtatataccacgatgatgatgatgaaaacttctgttacttgagtatacttgatgtctcgatgtctcatgggttatcaatgcttttgccttgagagattttgacaggcatttttcatggttgtacatgatttggattttgacggggaagaaccactagtatttatcttgacaaaaatgatacgacagtatgaaccctgcactttgattacaacaataaacatccacgttgaaagttgaattgctgatgagatcatgatcagagatcagtcatcaggttgtcaatacattaccacgcacgaaaatcaggcagtggcgccatcaatttatccagtcctatgaatactcctatctgaataattccttcttgtttccttcgttataccactcaaccaatcctaatttctgccattcttttttttaccaaattaaactgatgtagcaaaatcacaatacagtttctttcccagtttgtgctaaacgatattgagtcggaggaattggatcagagtcatcagactggtgcggaaaagcacaggtgtcttctgtctattgcatacccagaatgcaatgcatcaataaattaagctggaacgagaagtattatgcaattattaagcccctgacatcttggaaaaccatgtgctccagcctctggtttcccctgtccagcagcctcccacaactccgctctcaccatcacccgaagaaaacgtcgtcgggcgatgcgagttggtgcgtgaaaagaaatgctcacttgtttactcgctcaccaaagaatgcaagtacaggatccagaatcatattatactccct

SEQ ID NO: 12790 - DNA, 3863 bp, Oryza sativa
ttgcatgcctgcagtcgactctaagatccccttattaatacacaaaaggtacggaactacaaattgaggaaatgatcatactggaaattcaacaacttcgtttgcttcattagtctcattttcctattgagaaaatgccctttcctactggcgatagcatcacttgacctgcaaaatattggatggtaaaattagcattggagcatctactgcagagttaaaaccagggcacacgatttcaaacacctttaacactcaaaatgcaaattagactgtaccatggctattccattttggcataggttgcacagttatggtataaatgcaaggtagcaattaatttaataaccttgattggctgaaattcagagtggtctgcttcattgaggccgtccctcttcccctgccccttctggaagttccagttttggcaacatcggtagcatctttagagggtcttgtaaatccagatgctttccttccagcattagttgttcttgcaccgagaagcatctccctggtgtcttcatcatcactgaaagagttcaggttactttgagctgtaacagatctacctccagtatcctggtcaagtatcataagagcaacaaacaatcagcaacaatgaaaaaatggcatacaacattaagggcataaggacattgaaaccaccaagttttgagagcttgacgtgaaccgtgaatcttccttggagcggagggacctttccttcacacgttcctaagtagttaaaaatattaaccttttaatcaccccacaacctcataggaacaatagtagattgctccaaatacctgcatgcactcgccaactttgactattatatcttcttcctctattttaaatttatctgcctctgaattcaatttagtctgcaggtttcaacaaaggatttcaattttagatgcatgcaattttatcaggcagcaagcaatcaaataagaactaaaaaaggctacctctgtattctagtctcatttctattaatggaaatggagagctacggccctttgataaaaaaaaagaactaaaaccaacaatagaaaatgtagcaaagcatactctggtttcttcaagattccgctgcaaacaggcataaaacgccatcttgtcatccttgctcacaaaatcatgcaatgcaatgtccaagtcatcaactggaagaatctccattttctggaaacaagatttgtgtcatgaagcttatattgttactctaatatttttttttaaaaaaaagaaggatgtaagaagctatccaaagaatctatagaacaaaatcaggaattccagacccacaaacccaactaagacaattaaatagtccttgtttcacagtaccactgttagtctcaggctattattgtaaaaagctcatatggtgaagtgtaatgggaccagatagagatgtcgctcattaaattattggctgttattcaatagctaccataatgggcctcctagccagaagtacctttcttgccattatatttctgaaaatttaattatatttcagcctaatactgtaggagtcaagaataaacacattaccatccatttagtgcataaggcagtataggaaaaaggcaagatctttgttttacatttatgatcatcatatatacaactaaatggaatcccatcaagaaaaacagatagcagcaattatttctcctaggagaagagcaaaactgcaaaataatacagaatatgtagtttcaagaagtaccaagttattttcggcaaccaaagcttcaatagtttgttggtttagttcctcgggacgaagtttctcagagtcatcaatattgcctactgtatatatacatagacatagtcagttaaacaaaaaagtcagaataacatggcatctgttgctcctcatagcttgatgcattctgccactatgtaaataacttgtgcactgtctttcttaaacataaaggaatacctccagtagtctgacgcttttttgctgattttgagaagataagaatatcctgggggtttgcaaccttacaacaagaagctatcaaataagctcattcaggtaagaattctgagtaagaacctaattagggactcagataccttcccgacatacttctgaccaaatcgttgtggattaattgttgaaaacccagagtaatctacctacagaacaatatgagcactttcattgttcctgtcttgattaatttgtgcggagtacatctcttctgttttttttaccttgattctaattagtggaagtttggtctctggtctactggctgttggctgactactcttcttaataagatttcttacctgaaacaattgagtattatgagattgagggttaacgacttcattcaacaaagaaaactagactgacaacaaacgggcaaataagccaatgttgaaccaattccacaccagcatgccaccatgcttctcaataaaatggaaaagattataacaaatcatggaaaactgaaaactcacaattttatccaaatgttcaagaacagaggcctgatcattgggatcaacatccacttcatcttttaacacaacctatatattaggacagtgagacccaagcactgaaataagcatgaaatgaggggtatcatacctcagcatagtgaaagggcctaacggatctcaaaggtattttggttggcctatactggtttccctgtttaagaataaaaatggaatgagaaaacaccaaactgaagttttgttcaacatgaagaggagagctttcaataggaccttgatttctaacaagagaacatgctttggttttgcttcaccatcaatcagggaggttgcaactgatgagcctggttgagtgatgtgaaaacccatcccaggtacctcctataaacaattgatcatatgacaagtgcatattcacgttattttttaaaaaagaaatcaaataaaatccaagtcattacctggggatcaataaggcattcatgctcatggccccatactataaagtccagaaaacgtggtaagaaatgctcattgattgcgcttttagggtttgtttttatcctgtatgatttcaggtttcaattttcttttcagtaagcggcatgaagattataaaaaaatgaacaagaatattgaaccagtcagatactgacattccactacagtttgtcaccattcattcaccgcccatacctattctgatgaagaacaagaatattgaaccagtcagatactgacattccatcttgagtttcaggtcgcatccattgtacagcatgaggtgtctgaataattgatataaaaatatgatatcaatgttcaaatgatcaagaaagtttcttgctctagtgctgccaagttgcgaattaacttcaaattcttagaaaagtcaatggaaatgcacctgaaacatcctgtttaatcgttcatctctaatgtttccaaggccatagagcgcaacaaaagttgtaccctgaaataacaggaaaaacagaggattaacatgtgagagttcatggtttgcctgcagctgaagtagcgcaccttttttacgagtacaggatagactgctatttcaccaacaccagagccaccaaggtccatcttcccaaaataatttacaagattgcaggctgagagaatatcaattgcagagagattatcctacagagaggggcaagaatgcatgagaaaagctggcacccatcataagcataataaccataataacagaatgtcagaacgagattctcataccacaccagctggatcatcatggtttccatggatagtgaacacaggcaatccaacattgaagtttggatcttcataatttacttggccgaatc

SEQ ID NO: 12791 - DNA, 4083 bp, Oryza sativa
aactagcctctgtttgtttcagcttaaaattattgtaatatatattattaagccagattactgtaagctgaattataataagccgacatagaataagctttgagttgtttgtttctctggattataagctatttgttagctggtagccacccaataatctaaaataagcatctttaaagtggattactagattatagagtggattatcgaaagaaaaagcaatcacaccacatatttccagaagtctaatgaacgaggctccagaagtctaatgagattaaggaggatttgaaagagattaatctcacacctattatggtgtgaaattaaacgaacaaggccgaaatgtgtactaggccggcctaattcagatccccaatagcccataaggcccgcaccatacaagagcccagccctatatctaaagccttctccttccctttgccaccatccgtaccgaccgaaccgaccacgacgagctcgaaccatcgaagccgaagcgcgcacgaagcgaccccccccccccctcctctctctctctctctctttctctctctcgcctcgcgaaacccagcgagccctagccgatggcctcgccggagcgggaggaggaggaggccgcgcgatcgcctccgccgaagcgcccccgccgcgacggtgacgccccgccggaaccccagcctgcccgcgtgggcctcaacccggcggactgcgacctcggtacgcacggttcttcctttgcaggttgcaatcgatcacgcgctctgctcaccactccctcttccgttgctgtgtggcggccagatttcgacgtcggcggcggcgggctccggggggaggcgctgcatgatggcgggttcgcctactgctggtcgggcgcgcgcgccacggtgggcgtgaggggtggcgggaagtactgcttcgggtgcaaggtcgtcgccgagcaggccgtggagatggaggacacggccgcggaccagcagcacctctgccgcgtcggggtctcgaggggcggcgaccccgtgggggccctcggggagaccggccacagcttcgggtttgggggcacggggaaattctcccaccagggcaagtttgtggagtatggcgtcaagtttggggttggggatacggttgtctgcgccgtggaccttgattccaagccgttggcgtcgatcgggttctccaggaatggggagtggcttggcattgccaagcacttcgatgcaagtgacaaagggctgggtttggttgaatctcctgtgagctcaatgcaatgggagtcggcaatctttccacatgtgttgctgaagaatgttgttgtcgagatgcaattcagcaaggaggatggattgcagcttgttgatggttatgagctctggccctcagcttgtgtcgatgggaatgcggtatctggccctgtgtttgcagaacaaaaagagtgtgaaatcatgatgatggttggtctcccagcttcagggaagtcaacatgggcagagaagtgtatcaaggagcacaaggagaagcgctttatccttctcgggactaatcttgcattggtgcaaatgaaggttcctatgcttgtttcacaacttgcatgctctatgatttccactattttcagtttatgactttccttttgcaggtgccaggattgctgcgtaagaataactacggtgaacgctttgaacgtttgatggatcgtgccacaatgattttcaacacattgctgaccagggctgcgaagatccctcgcaactacatcatcgatcagactaatgtttacaaaaatgcccgtagtcgcaaactaaggccatttgcaaactaccgtaaggtaagctgcgaaaggataacagtttcacagtttgccgtgttgttgctgaattaataaatgtcaatgttggatgcgtttgtggggtgtttaatttcatatacttgttgtgcaacagactgctgtggttgtgttcccatcgccaagtgaactcaaggtccgggcagcaaagcgtttcaaggaaatggggaaggggatgtgccagctgatgcagtaaatgagatgacaggtatccagccaaatccatcactgctatctcgaaatgttcattgtctatgttctatgcatcaattacttactatattgccataaacacctattttcagctaatttcgtcttaccactgtccaaggacatgcctgattctaaagagccctttgacgaggttgcttggcattgctgtactccatcttttggttactatcaagtttttccttaggtcattacacttttcaacatgtgcaggtaatctttgtagagctttccagggatgaagcccagagaaacctggatgagatgaaacgtttgctgccaaaagcctcaactcccagctatgccaatttcagtaaccaaaatgtatgttaccattattgctgcttatggatttggtcctatgttttgtcatcatgggttagcttgatcttttgattcatgtacaagtcctaacgtagatgcttacaggtgagctcaacatatagtgggactattgctgggacaatgccatctctgtcaccaggttatcaccgacaaatggacagtccatatggaagtggtgtgcagacaccaagggccttgacacaccaacaggcagcatggggtgttcagggtttccagagtccagcagggattaaccaccatcaagtccacttaagcagctacccaaataccccataccaacatcaacaaatccaatcaaaccatccaagcaccccataccaacatcaagcccaatcgacaagctacccaagtaccccttatcaagatcaaattcactcgagctacccaagtaacccaacccaacatcaaattcatctgaactaccccagtaccccaaaccaataccaaagccattcaacatatccaaataccccatttcccggtcatggaaatagcgtatatgattccaatggtggcccaggtccatacaatcctaatccttacagcatgaacaccgatatgcaacaaagaattcaagctcccattggtgacaggaaccagtcctatgcagttgtgtcaaatgaagcctatgggagatctggctatgaagcggcaaattctgttggaaggcctatcaatacacatcctgccgtgtacaattctggcagtggcaattacatgccctatatgcagcattctcacggtaagtggctagctcaggctctttcttttcagttcattttgttacaagctaattcaacttggtggattacagattcactatacaaactcttaaaattacgaagtgagaaaaataagctctgtaactagaaacttttatagcacatttgagtacattagcactcatcatcatagggttctttgacctattaattggctacttggaattagagattatgttgctacccgtgaagtaaaactacagatctttctttgactgacagtgtgctaacattgaagtaaaactaacacatctttctttgactgacaacagatgtgcacaactctggatcacagtactcagctccagtccccaggcctccttacggagctcctccaccaaactatatgaatccacagacgagcatttggcatatctagcaaggcagctaatttgtggcgataagcgaacactggacatggtaccaagaaaagtagtttaagtagatatgcgcgagtgcgtgacctataggttccagggaacctttggcagttcggctcgcagatttttgtatagttatatgcacgcataaaccattctccgtatgtatccagtttacgacttttgcatgatcaattagtattggtttggccaacgcagagtgttatgtcgtgaacaactttcggacgctcggtcaggtacgcctgaatcatgaaaacgtatattctagtctctgaagaacacctactattgatgatgagaatcccttgtgcccgcatgaatgtcatgttgccaatgtacaaactgacatccagcatttagcagctacaagcacgtaaatccatgaggctaaggaatgtacaaatcacgcgagttggcgttccagtagttcattggaaacttaatttgccag

SEQ ID NO: 12792 - DNA, 2010 bp, Oryza sativa
aaggaaaaagaggaccaatgctccttctaccaatgttgatggagaagtcaccaaagtaaggtagccacagcaaaaccaaaaagatacttggatttggaaaatgactgcaatgcaatgatgaatcataaaaggtatagataggaaaactgcaaaaacaattcaaaagagatgacccagatagctgccatatgctaaatagccctgaagagaaggaaagaaaataatagctaagcagctgcagttaccagtttgtagccgatggcagcacaaataatatttctgttctgaatattacactttgttttgtgtaaacactttcttgcacgacaattcatcaaaagttctgtaagcactaaatttctctctgaggttaaacatgataatccttatgattactacgacatcatgtcataaagtcacatttcctggatgagctaactttgtttatactttatactaacattgcatggcctcataaagggcatgcaaagtgcaaaacaacatttagaaaatatatacgataattatgctttgtgagacatttaaacaataagctttactctgaacatccaataaatatatatatctcaaaacttgctgtgacaccacaagaattttaaatcaaatctacaattatgccctcaattttctcacccaaaaaatcaaaattgaaaaaattacattggtggttgcgagttatgaatgtatataatggacgctgctcaaataacagcctaatccatggcaatcttggctctttctgatgtttacctgtgccagtcacatctgtggttgctgtacttcatcaactacaggtagtataaacggccgcccatgtctaatctgaggatgtaatttcaggacaaagttaatcagttctgttactgtgttcacgtgtggctgttgagtaaggcattgaagcatttccactaggaagttcacaaaaaattctaatgttgatacacattcattagtgcgtgaagcaccgctgaagcagagggtgtgaatagtctacatagttatcccagaagcccttgtacttctccatcccaatttttagccatggcttcatatttccattgtaatgcaacactgcaccttctttgatagtagcgggatccactgttgtgtagcccagtcccaagacatgccatttggggtccaatggctcaaccaagccatagaaagcaagaagaccaggtggtaaagatccaagcttccatagggtatgatcagcattgcgctcttgccagtaatgatatatacctgtcacattcttattcctccacatcacaagatcaagaacattcataccaaatgcccagccacaggcatcaggatcaaaatgagcacggattagaggatgggaatggttaagatacttatggaacctgtgaaatgtctccatgcaagtctctacagctcccataacatttccattgaggttgatggtaaacaattccgacaagtccttttggacaacaatgtcatcatcaagaaatacgaccttacgcaattctggatagatttctgggatatagaacctcaggtggttaagcattgataagtacttagggttcctgaatttgactggtgttccacgattaccactgccagagaagtagtagttctgggtggcagcatcctggagctgtttaagaacaggaacatacgatgaattgagccaagtgaaatcctctaccttttgaatctccacagtggctcctctgtaatcattcagggcgaaccacgccctcatgggagcataattcacctcgtcagtcaccaagtgaaaaacaatcttttcagggcgcattgaatttagagttgtagaattgacgacaacagaaacagcaaggatgttgtccgagaaaacacagtaatggtaaaggctgttatcccttaggttgctctgtactgctgggctcctctcagtaaacttcctctggagctcagttgtcttgaaccattccatggttaaccggactccaaggcagtaaagcccctttg

SEQ ID NO: 12793 - DNA, 1404 bp, Oryza sativa
taatatattgacgcgcaatccttttgcgcgttcgtgaaaaactgagcttcttgtactagtgatgagctctttgttaatcggttccagttcttctccgggacgcacgccattgcctgtgctctgtttgctcttctgaggcctggacacgaggtaagagattagagaacacctggatgaactgagttttcgcattgcttctgctagcttagaaactgggagctgatgaaaatttagaaaatgtgtagctcctggctgtcgctggtcctccctatgacaccttggaggaggtgattgggatcagggggtcggccaatgtgggatcgctcaaggattttggagtggcataccgagaagttccggtttgttgatttcttcaccttacaaacaccaggaatgctttacattgtgctatttgtgagttactgatgtggcttcagttgtagcttgcagcagatggtggccttgattgggatgctcttgcaaatgctgtcagacctgagaccggatgcgccttcatacaaagatcttgtggttattcgtggcgcaagagcctaagcatatcggatatccagcgagctatagatttgataaaggcaagatgatatgttgtgaattcatggaccagcatgttctgtatgtgcattaactaatgcatatggtgatatttgctcatggagtcatgttttggaactcattgcagatgcaaaatccaaactgcatggttatggttgacaattgctatggtgaatttgttgagacgtcagagcctccaatggtggtatgttcatgcttgtagccaccttaagcattagattttagttacctgattgggtactttcatggcagggagcagatttgattgcgggtagtttgataaagaatccaggtgggacaattgcaccttgtggtggctatgtcgcagggaagaaagatttggttgcggcagcagcagctcgcctgtctgcacctggacttggggtagagtttgggtctacacctggacatgtgatgcgggcactgtttcaaggcttgtttcttgctccgcaaatggttggagaagctgtcaaggtaagttatttataaatttccacatctttaaccaataaaatgaaaaaataaaacagcatgcaagatatcaagtgacagtcttataccatccacagggaggcatgcttattgcagaagtcatgtcaaccaagggctatagagttcagccacttccaagggttcctcgccatgatattgtgcaggttggatctacatgtttaaacatcacttcaccagcacaaaaatattcatacagccatgatagtgcggcatatatggctgaaggaaccatccaattagaagtttgattttgagtactgacagaaggccaaccaagccttaaaagagtttagaaca

SEQ ID NO: 12794 - DNA, 2479 bp, Oryza sativa
aagcgtctcaaacatgaacaaggagatgattggggatagatacgataggggataggacgagcgacaggtgaagaagtaccaggaattaggatcttgaaattggaagcagtcggcaggtttcgatccgagaaccttcgtaatcgccatcgccaaatccgatctcaaaccctcaacgatcgattaatagggattagatagactgaagaacacaatcaattccgccccagaacgacgcagcaactgcacaatttcgcattgatctcccaaatggacctgatcgtggatgatgaggaggcgaagaagaagaagaagaaggtggtttggcaatggcggcgagcttgttcgttcgtcagtgaagaactgggcagaggattaaatcatcaaacagaaatggaaggtggcgagacgaacaccgtggaatccagcagttcgcttcgctaaaaaactacgttagatttgcgtcaaaaaaaaaaaaactacgttagattagcacctagctgctgcgtgcgtggtgtggggcctctaaaaccgcgccgtgattagtgaaacaaactccccgttttggtcagtgtcgaactactatctcgatagggaacagtcagatttatgcgctggaaaacgcgtgtgttgcatgcacatgtcttctgtttaattattcatctgatgatgatcatggatagtcatttcactagagataacaaaaaatcctggccaaaattatggtgtcaagactcaagagcatttcgggcttatttatattgttcctttacaaaaacaacaaaattcagtaaaattagaaataaagaatgtctaaatttgtcatgactgcgttaaaaaaattgcaacgtacctctatcattattatttccaaaagaatctgtaacgcgagtaatttggcccatgcatgcagcccatgggataattcaccatcgcggcatcaagcagaaaatcacgataaagagagaatatcggccagaactctgtggcaaatgaaatctgcaaagccactcacgtttgtagcaaaactgagtatgcaacccaactttggggcatactagcaatttttttttaaaaaaaattctagtaggctataaagcagaaacagcttggtgcaatgagagtagtatagtcattgaatcttgtctagatacaattaatcatacatgtggatgtacatctctttatgatcagaaaagaatggaattggtttgctatgtcctgttgatttcaagcgttgcttacttgtattactatgtggttaattaatcagcattgttggcatcaactattcatcgtaaaaatagagtcacgtatcacgtaaaaataaaatgaaatggatgcggccgttagattacacgtgtggttaacttctgaattttctgagggattctgaagagtcaccagctatcagttcaggctggtgatgcgacgtcacggttgtgctccccgaagagccgattcaagaacatggccagcctaactcccccctgcgcgattcgtcgtgtcacgatcgggagccgtgagccgaagtagtcatctggaaataacaaattgacaatcccatgacatcagctaggttcagacttcagagatgtgtgcttgttctagcaaaggcagcattacctgacagagtttcgccttcacggacatcgttgtacgcccatttgcaagccaaatttatgctctctgtagcgtacctgttgtatgatagaaaaatatgattcgaatgcaaaaaaccaaggcgattctttctttgttaaacaatacagaattgtggtttcagaattttggattgtactgacttggttgagcaagacaggagatcctcgcagtctccccaagaggatacgtcatcagaccacgttccctggagatgaaaaattgcagaaattcgttcgttcaaaataattttgcaggaatttttctcatgtttctttgcttggaagagttgttttcaggcagttctcttaccgtggtgaagttgtgcacaaggtccttttgaaacgcatccatgtccttgccgtagaattcagcaatagctgtgagtatcatctccctatcccacacctgaaaaaacaccagacagacttgaaaagtaagtaaattgagcttaacggcaggtttttcacatggaaggaattatgtgcaaggatcaaggaagttgattacatgatggagattggatttgtgcctgaaccagcgtagattaatcgtattgcccccttggtcgctcgtgaacccaacatgcattggctggatggacagataaaatagttagtatgttgatgtgtatgaactgttgcagggagtgcatgagagtagactaattggtaaggttacctgatgaacatctcccatgaagtgtgacaagaatagcagtgcttcagtcatgttatctgcgttacaagcagttacaacaatatgaaagaaaatgaacagtcagacaagagatacatgacaactaaactatattggttga

SEQ ID NO: 12795 - DNA, 2024 bp, Oryza sativa
atccaatggcgggtgcagcgaaggcgtcgtggatggtggcgatgagcgtgggcgcagtggaggcgctcaaggaccagggcggactctgccgctggaactacgcgctgcggtccatccacaaggcggccaaggccaacgccgccggcgtctcgcagggcaagaagctgcctgcctccgcggcggcggtagcggagaggaggagagcggagaaggccgaggaggggttgaggacggtcatgtacatcagctgctggagcaccaattagtgtataaactcgagatactagtacgtagctagagctgaagtagcaaaccatggcttgagatttggccggttgcttccttgatgtgtatatatatcaagatgatgatgaaaatttcttgttactaaattgccccgtggtttttttgccatgtgaattgcgatcacgttggctcgtggatttgttgcccctgaatttcagtctctctagctagtggctaaggccatctcttatttggttcagatgacagtaattcatccaggtctccaagttctaggattttcagaactgcaacttattttatcaaggaatctttaaacatacgaacagatcacttaaagttcttctgaagcaacttaaagttatcaggcatgcatggatcttggaggaatcagatgtgcagtcagggaccatagcacaagacaggcgtcttctactggtgctaccagcaaatgctggaagccgggaacactgggtacgttggaaaccacgtgatgtgaagaagtaagataaactgtaggagaaaagcatttcgtagtgggccatgaagcctttcaggacatgtattgcagtatgggccggcccattacgcaattggacgacaacaaagactagtattagtaccacctcggctatccacatagatcaaagctgatttaaaagagttgtgcagatgatccgtggcacgaccttacttgaacgggatctgttctataggctcgtaccgttgcatccttgactaataaggaggcaagcacttaagcttggttgatgacgcatgacctgtgggccagagcgtgattaacggccggatcactggctgatttgatcccacggctgtagaggatcgtttcttgccgggcctcgcctggccaggatggctctcaggttctctgacaggctcccattttttttttcgttttgcattgagttttctccgtcgcatgtttgcagttttattttccgttttgcattgaaatttctccgtctcatgtttgcagcgtgttcaaaaagtacgcagctgtatttcacttatttacggcgccacattttcatgccgtttgtgccaactatcccgagctagtgaatacagcttggcttcacacaacactggtgacccgctgacctgctcgtacctcgtaccgtcgtacggcacagcatttggaattaaagggtgtgatcgatactgcttgctgctgcagcaactgtggctgcaagagctaaaaatggctgcagcggcagcagctgaaaaacagccacagccatagcggcagcagcagatagcagttccgatcaggccctaaatccaagtcctacctaaacaggatgctccattgaacagccaaaccggcctcacatggtctatccaaggactctaccacatcagctgtctttgcatccccatgttcccaacccatcttcctcattttccgcgcgcacgttttttaaactactaaacgatgcgttttttttaaaaagttttctatacgaaagttgcttaaaaatcaaattaattcatttttttttaaaaaaattagctaatacttaattaatcacgcgctaaaggaccgcttcgttttccgtacgggagggattggcttccatcactggactccgaacacagccatgtcctccagctaacggttttccctaccagctcccataactccgctctagctcaccgtcacccaaagacacaaacattaatttttttaaaaaaaaaatgacttcgacttatatatatagaatcaataacgatca

SEQ ID NO: 12796 - DNA, 681 bp, Oryza sativa
ataataacagaatgtcagaacgagattctcataccacaccagctggatcatcatggtttccatggatagtgaacacaggcaatccaacattgaagtttggatcttcataatttacttggccaatctgtgattgtaccaagaaaattcatgtaagaaaattaaggggaaaatgcatatctgcatacacgtatgatatatcaaacctaaatttcagcaaaagtgacacttttatgaaagattacattgagggatcaccaaatttagagtacactcaagaaaaaaatggcatgatagagtgatataactcatcgtcaaaacctgtttggaaagttgattgtctgatcactgacaacctggaacttcactggctggtcattcaagcagtaacgccgtagaatctcaatggtcttaactaaggttgaacgtgaaggtttgttctcatggaaaaggtcaccaccaagtagcacaaaatcaacctgcaattcagtatgatttccatcatattataattcataattcataaatagaaggttatcccccaacagaatgagcaggccaataaattttgcaacacaagcagaaaagaatggaaaaatgtgcagctcctacaaaccttattctgctctgctaatgagcatatctcttcaaacgcctcaaatgaatcaaacctacgaatctcgt

SEQ ID NO: 12797 - DNA, 2789 bp, Oryza sativa
taaggactaaataatcaaattttgaagagcatgtgcctcaccttgaagtaagtgaagcatagcagtatacgctagctaacagcctgcacctcccagtgccatgtttctccatcactaagcaagttacttttctttccagaatccaagcaaccaaaaagacaagttcagtttcttcatattgctgccatagtagtagcctcattctgcagtaaacagcacaagatactggaagggtgtcaataagagggggcatggattcaagcaagtacagatcaagaggctacacgatggcaagcagcaacaacaagaggccacctccttacctcctcctgctgctgctggcactcggcgctgcggcgctgagcgtgggcatcctgcacaagatgagggagcgccgcgtcttctccatcctcctccaggaacgcgatcagcagcttatctcccttcaagccctcctgcaggtatggatatatttctggaatatcatgcatcgaattcttatacattggccatccaggaagttgtagccaaaaaatagtctagcattatatattttttaatcaacacatcatgttcacataatacaagtactgaaataaattcaagctcccctaagaggctagaagctgtactcccggagaatgtgaatgtgtactcggtatccctgtgcatattaatattccctccgtattttaatgtatgacgccgttgacttttcgaccaacgtttgaccattcgttttattcaaaatttttgtgcaaatatgaaaatatttatgtcatgcttaagaacatttgatgacaaatcaagtcataataaaataaatgataattacataaattttttgaataagacgaatggtcaaacgttggacaaaaaatcaacgacgtcatacattaaaatatggaggtagtagatgaagtatacacctcaccctgcactactgcactcacaaaagttatgtaaagcccaagctgtgtaatctggaactaaaattcaaacttgccaaagacttccatactgacagcgttccagagaaacttcgagctagatacatcatatcagaaatccggagtattactttcaaatagacagagatatatactcaactgaacatcctcttagttcaatctataatcattccgaaaggtaaacactgcaataccagtagcattctagatttttttttagataatagatacaagcactctagatatgtaaaacttaagaatgtatgcctttcagttactgggttctataatcattttttgggtcagttcagatacctgatctttgaattccataatatatcgttaatcacatagtaatgttttattttgccagaaagaacaagaaatcagtaaagagatgaggagaaagatggatgaattagaagccaaaacatctgtcctaagcattgagaggacagaactgaaaaacaagctcatggattctgaaaccaccacgacatatctcacaaatacccagaaagagctggaagcggctctagtggaaaaagagggtcatatcaaccaaatgaaagagaatgcggctgcttcaggccctgaacaaatggcagctataaaggaacttctgcagcaaaaagaagctgagcttgaagagatcaagaccaagttgcacgactacaagaaatcagatacaaatatcagcgagagcattttggttggcacaaacaatgagaatacaacttctgacacagcggtacctgagaattctgcaaaccctggtgactctgctccagcagaagaacatcattcttacgacaatagtgcgtcagagagtaaccaagatgagagcactggagcaagcacaaacaacgaaaatgcaactgttgatactgtggtggtcgataagtatgcaaactcagtgagtatgcaactagtgattccacacctgctactacagaagaaccgcatccctacaacaccactgcatcagagagcaaccctcaagaaaatagttccccagaacaacactttataaagcttagaactaacagggaagatgatgaaccacaagacaaaacaacaggtgatgccaatgataattcaaatgatgctctagagggaagccacttggggaaatctgaacttcctcagtggagccccaaattggcagatagtcaagataatagcacagaagaactagatagcactagacagttggagaactcacaaggtgaggccaactatgaaagcagaggcagtaatctgctggagaaagaggtggaagccagcaacgaagttgaaccaatgaaggaaaccagtcctgagactgagctggagacttcgaaggatagcttgagtgaagccaaccaaaacagtacacaggctgttgaacctgtggctgatcctgcagatgtgaagccccgtatgcccatatataatgatgaaacaaaagagacaagcaagagacgtaggcggagaaagtttagatccagaaggaaaaagaggaccaatgctccttctaccaatgttgatggagaagtcaccaaagtaaggtagccacagcaaaaccaaaaagatacttggatttggaaaatgactgcaatgcaatgatgaatcataaaaggtatagataggaaaactgcaaaacaattcaaaagagatgacccagatagctgccatatgctaaatagccctgaagagaaggaaaagaaaataatagctaagcagctgcagttaccagatcgtagcctatggcagcacaaataatatttctgttctgaatatcacactttgtttcgtgtaaacactttcaagcacgac

SEQ ID NO: 12798 - DNA, 3141 bp, Oryza sativa
gaacttcctctgtattttttaaaaaacattgccaacgttaaatatttagtgaaactaccgaaagaaaacaacgattttaaactagatttttctattatacttcctctggattttttttattttctttatgatgatcaacgtcaaatatttaatgaaggtggtagcataagaaaaatatattacttcataaaacatacacaccccaaaatagatctataatataatataaaatatcaaataaacatatcatttcacaccacaattgttgagtatagatagattttatttgcatcagtgggtctacattgatagttcaagatgaaacaatgagtaattaaaatattacttgggacatattgtcagaaactcaaataaaaaatgtattgtttaaaaatatgttgcattttttctcgcaaaacatagttagccgttaatgactcaattaatatacgcttttgatttgtacatatttagtaataaatttaaggttgagttctaaagtgtttatcagattggctctccctcatttatcttgagcatgttcttcgaactattaaactgtgtgtgtgttttgcaaatattttctataatttttttaaaactatctattttaatgtttgtaatatttaatacttaattaatattgcgttgatgacctacattgttttccgtgcccggcataagctcaaccaatgagatagaatgtagtttaagtaggagataaattagattatttactatataatttaaaattaaataatcaagttaactacattattaaaaaatttcattactttggatcatatatatttaagaaaaaagcaaataagttttgttgtctccttgctatttcttagctattaactaaaataaaaacaatagacaatgttggatttttttttgaaacaccgcccgcgcacaccctacccttttgagtacctccaaaagactaagccagcacattttgagactgacgatgtcaccacgggcgtctcgctgtcgacgggtatgtcacctaccactgaaagaataattagtcgtaactgcgaacacccatgtcaagtctaggacttgaacatgggcatgtttcaccaaaagaaacctaaccaattaattgagccacgctcacttcgcaataacgttggatattaaaataaccataatttttcagctacattactggaatacttatatgccttttagaccggtgaactattagttataaccgttagatctatcttatataaaagttaagcatgtatccatggtacatgatatttccaaaatattattgtgcaattatatttcgttattatcgtatccatattaggttgcatggagcctctcacccaccctacttgaaatgttcatagatggatcacctctcaaattacatcaatcgtattagcttatataaacccatacatttaatggagcttcatgtcccacccaattcatctcttaatgaactattataatagatatccatttactttcgctgacatgtattctaaaaaaaagtctactttatttttaaatgataaagaagattataaataattgcttatagatattatttaaatatgatattactaataggttagaaacttattaagcaattaatactgatgaaaacaatttaatatctcacggcagatgttctccgtttaatatttcgctcttatatttatctcaaacatagcgtacgatgcatgcccgcgcaaatgcgcgggctaccttcctagttattctaatatattgatgtgcaatcttcattcgcgaaaaaagaaggaaacaagaaagaattatccacataggattgaaattaaattgatggcaccactgccaagttgatcatgatcccatcggcaattcaaacgtactagaagaaattgtagctatccagtagaagtagaagtatgagtactacgccatgtccaggagtactagtgctttgtagcactatgccatgtccaattatgtttatttgttataatcaaggggcagggttcgtacggtcgtctcgtttttgtcatgataagtagttcttccccttcaaaaaccaaatcacgtactgcatgctacaggaaatgcttgccaagatctcaaaagcattttgaacccatgaggcatcgagacaccagtatactcaagtaacagaagttttcatcatcatcatcttcgtggtatatacaatcaggaggaattcaacaagcaaccggcaagtctcagccatgcttgccccttccaaacccgactctatcctactactattagctagctatagtagacagagctatactaattggtgctccagcagctgatgtacatgaccgtcctcaacccctcttcggccttttccgctctcctcctctccgctaccgccgccgcggaggcaggcagcttcttgccctgcgagacgccggcggcgttggccttgcccgccttgtggatggaccgcagcgcgtagttccagcggcagagtccgccctggtccttgagcgcctccactgcgcccacgctcatcgccaccatccaagacgcattcgctgcacccgccattggatcgatctcttctttcttgctgagaattggaccggattgtttgtgatttcttcttttggtttgcagtgaactattgtatgctgtgttgaggatgaggaggaaggagaggggcgggttatatagaggaggagggcaggaggctgtggagaggagaaggacggggttggggcgaaacaggaggcgccgcgcgttggtttcccagtataccgggtgctctgctctgcttgattaggccggaattcgcattcgtccaggttcggtggcccgagttgtctctgttcgcggtatgggagatggttgtccgttgcgaggagcccacatgggcaggagtaaccgataaggacgcgtgtcgctgcagatgccacgcagggccagtacctgtatgggcctgaattttggggtttatgaaagcttagcacgatcagactgtgagctatttttcctctctcagcaacaggtaaaacttcttcagagtaaggaagcaaagcaattctttctgtactgtactcctacctatctcgctctcaaagtttcagcaaaatctgccaaatctactactccctccgtttcgaaatg

SEQ ID NO: 12799 - DNA, 1723 bp, Oryza sativa
catcggccagccgaagagggtcgggtctgcgcaggccttgctcgccagcgcgtcgatgcagcgcggcacgacgaggagctcctcggcgagcgggaggagcgcgccgtcgcacgaccgcagcgcgcgcaaggcgtcgtcccagctgccgagcacgtcgcggaggaacgcctccgcctgctcgacgaggttgccctcgccgccgtggtcctcggtcatgccgaggtgctccgccgcgcaccgcagcgcgaccacgttcccggcgtcgagctccgccctgacgtcgtagcagaacctggccgccagctcgaacgccgcggcgccgccggggacgtcgtggagcttgacgctgcacggctcgccgtcgtcggcgccggcggctgcttcgcttatcagcttttgcagcgtgccacttcggctcatcaatgggaactggaaatggaagagcaatttgacacacgtcagtagagaaaaatcttaaaatgttcagattatgcagaatttaaggcttctgtccctgttcttgaacatttctttttaatctttgtagtagttaattcattcatttaaaccctcaaatagctgtcacaaaaatcagataatccatcaatatatcgatttcagctacctcaaacaggacatggaacaagaaaacaggatgacagatgatatcttttcatcaagaaaccaaattgttgacgcatgtgtaatgagttcaatttaggatcccctttgtacttcaagactcaatagtgaatttgcactagaaaaagataggagattgaaagagagatcagtgtagcagatgtaccttgtggagatggaaggagaaatctccaacctcaacgaccacatcgcttacaagctcagtcatgcaagtcctgcaagattgagaaattttgattttgtcaaaaaaaaaaccaggataacatgcaattccactagcagagtgcaggaaagagacccaaaagattctgcactgttcatctcaaatatgctcatctattctgttaatgtgtcaaagtttacatctcagtttattttctctgttatgtgctacattcggtcaaaactgaaagttaagttcatcttacaggtgtattatgatcgagttactgtcatcttaacctgatcaaagatagcgatattttttttggaaaaaaaaaacctgaaatgaagaattttcatggaagaaaatccatgcagtctgtgcgctacagggacacaatcaacaagtcatatgttaggatcacattgaaccctaacgaaggcaaatatatatatacatatatatagaagttaacgaatcgtttaggagatgaacacacgcaaagcgtctcaaacatgaacaaggagatgattggggatagatacgataggggataggacgagcgacaggtgaagaagtaccaggaattaggatcttgaaattggaagcagtcggcaggtttcgatccgagaaccttcgtaatcgccatcgccaaatccgatctcaaaccctcaacgatcgattaatagggattagatagactgaagaacacaatcaattccgccccagaacgacgcagcaactgcacaatttcgcattgatctcccaaatggacctgatcgtggatgatgaggaggcgaagaagaaaaagaagaaggtggtttggcaatggcggcgagcttgttcgttcgtcagtgaagaactgggcagaggattaatcatcaaacagaaatggag

SEQ ID NO: 12800 - DNA, 1625 bp, Oryza sativa
agtatcatctccctatcccacacctgaaaaaacaccagacagacttgaaaagtaagtaaattgagcttaacggcaggtttttcacatggaaggaattatgtgcaaggatcaaggaagttgattacatgatggagattggatttgtgcctgaaccagcgtagattaatcgtattgcccccttggtcgctcgtgaacccaacatgcattggctggatggacagataaaatagttagtatgttgatgtgtatgaactgttgcagggagtgcatgagagtagactaattggtaaggttacctgatgaacatctcccatgaagtgtgacaagaatagcagtgcttcagtcatgttatctgcgttacaagcagttacaacaatatgaaagaaaatgaacagtcagacaagagatacatgacaactaaactatattggttgatatgatatactacaactgcgtagttctcacatttgcgatcggcgctgccgtgattatagtgcataagctgagaggtgaagttcgcgatcgcgccagcgacgcacatatcctccgcaccatccgcgccatggcaatcccctgaaaacccaaacgcgacagacagatcaacatatacaccattatcacagcagattcagagtatagcataattcagaaactgatggaggagaagagttgcctaagcgtacttgagtagacgaagctgcaggctttgtcaggggtgtcgatgaagtggagagggctcgtccacctgtacttgtaccagtgcctgacctgatccggccacacgcacagcgccgacaggtcgccgtccgcctcctccgtcagcaggttcctcaccgcgtgcgccgcggcttggctccagcagatcctgcatccaacacggcatcataatcatcagtcattcagcctaaatgttcaggaatggttcgattgatagtgatcattcacctgcgcgattcggcatgtgagcatgtgaccctccttgctccacgaatgagccaccggcgccgacgcgaggacgagcactgcagccgctgccgctgctagtagaaacgatgagcacttgtctgatgccattgatcaacgagacgagcttgatcctgatgagagaaaacaccgggacacagcaagtgatatagagcagcatgcagcaagcggagcagtgggaggcaatgatttaagcttagcttagctagccttcgttgagtgcaagcattgtgtggcgtgttaccccgcatgctttgcttcgcaccatcaaccaatcgccgttgggggtggtttcgcctttttgaaagagctactaggttgctgggcctgggccgaagcagattctctcgtaatgggcctcatcagacggccacggcccatttctcgcttcacatggccgcattaggctgggcttaagggaggcgaaacatttcgcggggacgaggataacgtctgcccaagcggagcgaaagggatgacgggcgccgccgccgccgtctccccgctcgtcgcgtggccccgctccgcgcccgcctcgcggggcggcaggcgtgcggcgcgcgcgtctgcgttccacccggacgtgtcccgcgcggtggagtcgctgcaagcggagttccgggaggtggaccgcgcgctcg

SEQ ID NO: 12801 - DNA, 1350 bp, Oryza sativa
cttcaaggtgaggcacatgctcttcaaaatttgattatttagtccttatagagattaggagcataaagtttggcacttgacttttgttagtgtctcgtaagacgctggcaatagctaggatgcctgcacttgtatctgatcccagagtaggatgtcttggatcacaaatttattccttggacaaacccacaactttgcatacagtccattgaactcttctttctataggaaagtggtccgtatctttgggatttctaccaaataagcaaataagcaattcatgacaataattttgacaaacgaactgtttacaaaaatggcttcatgagaagaattgttacaaacgaactcaggaagccataatcctcagcaaaaaatatttcgtagagaaacgtggaaaagcatactctaaaatttgatctcaatcgcaaacgagtcctggcaggctggcactctaagcaatatgaattcattatacacaaatatcctccagaatgatgcactgtgagagccatcttggccctatctcttctgaagctacaagctcgtagaactagtgcatcgcttccaagtaagaagtttctaactagtaaaccatacaactcagttctagcccaaatgaactggcaagtcaatggctgaagctagctgtccttgtgaattgtgatgctttggctatctgtccttgggattctttagttcgaagttactctaatcaatgcagcctgctgacctcttcacaactgtgaatatctcgatttctttaaaattttaatactattcatcagttcaaccaaagacgtgcgccatgtttgtttcctgcattaagtcagtaatcccaattatgagttgacaactttcagaactgacaacatcaataccaagcagaattatgaacttcacctgacaattttcatttcaatcaatatcatatacctagcaatcaattataccaaaaaaaaggcaacccattccagaagatgaaagtattatgcacttttggcaacagacagctatataatcttcagaacgtcgctgaggacaagagcccattgtgtccaatgtgttcctccctgcaccgttacatttccagaggaaaggaaccatcagcactagggatggatgatagtagggtgaaagattggtacatgtaactagtctgaagcatgacttcaactaacctgacagaatacagcgtatggatctcttaagggcccatcacatgatagctcacttgtgcttccatctatgaatgtcccatcagcaaaaatgacctgattcaatttgattaaccattcttgtatcatagcacactaatgaaaggtctttttagaacataaaagaaaagaa

SEQ ID NO: 12802 - DNA, 2494 bp, Oryza sativa
cttgtatggtgcgggccttatgggctattgggaatctgaattaggccggcctagtacacatttcggccttgttcgtttaatttcacaccataataggtgtgagattaatctctttcaaatcctccttaatctcattagacttctggagcctcgttcattagacttctggaaatatgtggtgtgattgctttttctttcgataatccactctataatctagtaatccactttaaagatgcttattttagattattgggtggctaccagctaacaaatagcttataatccagagaaacaaacaactcaaagcttattctatgtcggcttattataattcagcttacagtaatctggcttaataatatatattacaataattttaagctgaaacaaacagaggcttagtttatttattgagagaatacggtagtgcagaaggtggagaacggctccgcttttacactagtagacacaaggaagacatacgtgttaccgtttgcgcataataccatatatttcaacagctgaaacacacttgtgtttacgtaaatgcagtggcggagctagaaacaataaattttatctgccatgaaggtgactatcagtaaattatttgaattttgcttaaattcaaattaatctaatttttttttgtcaaatggagggaggttatggtggttattcttctttatgtactccagtaggaaataaaacaataaatgcatgactaagattgaacaataatgaatctgttggatcagttggcaagtgtaaatgattgtactaaccgggaaattggtattagctattaatttatgaagttatgtatttatttttcttcatgcagacatgtgctcctacgtatcaaaaccatgtttcattttttacttcccccagccacagatccttgttggtatcctttccaaaacagttaaaaccagcttatcatactagtaaaaatattattattgtcacaaccatctatcaacttcctaattaatggctacctgtagtaaacaaatcaaaatgggtaaaccaaaccataactaattaaaaaacaatttacacttgtctgcatatttttttaaaaaatattcgataatattgagtttgttatagtttatcactatacttttatatactccatccatcccataaagatttcattttttttctttttccaacacttgactacccatcttacttaaattttttatggattttttatatagtcgcatataaagtgctatttatattttatcatctaataaaaatagaaatactgatgatagaaaaattttaaataagatgaaaagttaaatgttatataaagactgaaaaatagagtttttatgggagagagggagtaatacggagtaataatacacaagtttatcaattcttttacgacgtgctattgggatggtatagaatggacttccttttcttttcctacctcacctaacatttgatgaagagaacggtgaaccgggaaaagccctgtgaattttcaaacttacccagtcagtggatgggatgctatgcgatcatgtgagcgacaagttacaagatccaaaccagtcgtggagcagtcaagccgcgcacgcagagagaggcaggcaaggcaacgcaacgaaggcgaagctgcctgcctctgccgcgccgcgccgcgcgagatctgggcggaagggaaggcgcggcgcgacgcgacgcacgagagaaacaaaaggaaaagggaggggcgggggggacaaaaaccttcgccgcacaaagcggttaccgcgtccccccagatctcgtcgccgtgccgtgccgtgccctgcccttgccccgctggataccggcggcgcaccggcgcggccgcgcgatccgatgaggcggcggccgttcctcgaccagcggcggccgtcgtcgttcaagcgccggtggcagcagcgcccgtggtggttccgcctcgcggtcaccctcctcctcgccctcgcctgcctcttcctcctgctcgcgctccggggctcgcccgaccccgacccggtggtgctcccctccaccgactcgtccagatccgcggccaccacctcccctctcctccatcaggtgagcgaatcgcgtctcatatctactttgcttcacatttcgttagctcatttgcatttggcttttgagttgatccggttttaattagttcatgatcatgagtagcgtttgaaattcgtggctcctgtaatgtgcagagatcttacctcgatggcgttacggatgcgttcaacatgaccgacgaaatgctgagtgctcactcgttttcaaggcagcttatggaccagatttcccttgcaaaaacctacctcgtcgttgcgaaggaagccaataacctgcagtttgcagcagagcttagctcgcagatacggcgggcgcagagcatccttgcgcatgctgcagcccatggtggcacggtgacggagcaggatgcggagaaggcaattagggacatgtcggt

SEQ ID NO: 12803 - DNA, 5009 bp, Oryza sativa
tggagacatgatccaaaatctgccttgtaatcttaactacatcaaatttatcagatacatacacccatatcttaacattaaactgacttttaattaccagatctttgcagaccagttgcgccaaagtggtttttcctatccctccattgcctacaattggcaggacggttatgccattagatctattgctcatgatcagctgtttgatggtttccatctctgcagccctcccatacactatgggctccggaagataagacgatgttgttgcatttgtggccggtggtgtaccctgtcgactctggtttgaacttgaggatcgacatagcctcataacctcatttacagcctcttctaactgatgagtcatgcattggatcctgttggaaagttcagccttgttccaagggtgcgtgctaactgcctcgtggtgtgttgaagtcccatccattctcatcctttttctgccaactgaattaccagttgcatttgatgcaccctcaccggcactggaagagcatgtgatcgtggttaggcgattagaaaggtcagcaatataacgcaatcttaagtagatgaagagcgaatcatttcacttatacttatgattatccttacgatttattaacaatttaaaaaataacttatgggtaaaatttttatatacgcattcttaactattcaaaatcaaatgttgtaaaataaaataggatgaaaagaaaaccacaaaatcaactccaaaattaagttttaaatttaaatttataaacataagtataaacgaaacaatgagctattttattggagactacaaagcgtttttatatttgacttatattaattggttgctttctgtaaaaaaaaaaaggcagcagattttgtcactcaattttgcatagtagatttttgaaagaattggatttgatacactactcatgttttagatataattatatttgatatatacaattgttcacttttgtttccttgcatctaattacatttggtgcaccatcaccggtactatatattaggaaaaaaaatgaccatgagttggctattagaagattagagacagaatgagatcttaagcagatgtaacgggccaaatttacacttcaacggatttacactaaattcagaactccattagcattaccttgatggatttaccggttggtcagtacttgttacacgtttcctcttgcaaacattgagatggttgcgcaaagctgatgtcccgttcttagatgtgcaacataggtccttgtggcagtacttgcaccgtgctttagaatccttcccgtcagcagtgaactctacggtagtaaagtgttcccatgccttggaccgtttcttgctgctgcctgccgccactgcctccggtacatcagtattgtccatcggaatatcgtcctcgtcctctgctccatctccgaccgtctcttcagcctcaaaccgtgtagtaactgtagcacaagcatggattggaaactgacgccaatacgccattgttgcaggcaacgcagcttgcaaacttaattaaaaggcacggatatatgcaaagacagtacctcctccctcgacctgctgctggagcctgaagtagtcgagctcgtcgaccgcatcgtcggcgtcgtacagcaaccccctgagacggccgagcgatcgggccagcgacctgttcccgatcgccctccccttcacggcagccaccaccccatccaccttctcgatctcagcccgtagcttctcggtgtcagcggcgagcctaatctggcgaatccattcatccagcttgtcggcgtccaggttatccaggatggtctccgccagccacctgatcccgccctccagccaaccggcttccacctcctccatcggaacaggagcagtccttggactgtggccaatggcgtgtgcaagagggctgcaacaagcgaggatgggaaggcagagtagtagctaggagaggagactgcagagtgaaaactaggtggaaaggagaagattcaccagtgcgtgtgggcgtgtggctcggggcagcgctcctggtcgtcgtggattaatcgtctgatgatgatcgattgcttcgcgcgacccgcgttttctcggattactactgccgcgttgacggtggactcgtcggcttccacttcgatgggctgtgggctagttggttatttggcccattagcacttcagcatccgaagagaagcctaagttgagcattccaaacttttggaagtttatgggaataagttcacttgccatccctcagctctgcgtcgagtcatgtatgacatccctaatccccactacgaaaaatgttgaccgacggttgttttatctgacgtggcatccgagtaaaaaaaaaatatggaaccaacatgtaagtgtccacgcacaccttcctctatcccttctcctatccgcgttggtggtggatgaataggaggggggaggggaggtgtgacgctgcgaattggagtgggcgaatcgagccctccctgccaaatcgtcatcgcctcggcagtgggggagctcctcagctcatcgatgctagaagcggctcggggacaggggacctcgatgaggccgcggcgtgagcttgcgaggctgctacggagcaggaggacaagggtgtcgtggcggcgtgagcatggcgagaggatgttgcaacagacggagctatgaggttcaccgtcccagctgtctcctcgccatcgccgcagcatggacgatgttgaggtggtggccgagctcgtcatcgcgaacaggccgaaaggactggacgtggcgatggttcaggtagtgggccctgatatatgccacatcaatggaaaccaggggaaatatggtctataccctcgaggaactactttgcatggttttgaagacttgaggggtcgacatctggtattgggaattagggccatcatacacactccatgtaaagttgagggaaggcaagtggacttattccagtttatgtcgatgttggcccaggcccatctctggcttaaaagtttgagttatgcttcgacgggccgctacacagtacgaaatgcggtccattaattacggttttttttgggtataaatgcataagtgtttcttttgttctactagtaatatgcccgtgctaacgctacggtgtcattatatttttctaatattccaagaaacctttatacataatattttcggtaaggtctatctctttcctagtttggtagtttggcaaaaatccctgttactgtttgccttacatactccttgacaaagcatagtaaagttgtccatgcgaggaatatatatattctcatttgaaaccatgaacatcatcactctatgttagcttacctgacaacgccgatgtaatatgtttcctaaaaacaacagtaattatctttcataaacatcctgaatgcctttggaattaagaaatatgtattcagtcccgtcttcctgaaataaatattatgtatacattaaggttcacaaataaggtacagaattacatcacttcctctgttcccattatgtcattttctcaataccttacttgcaaaggactaagatacaaatcatacaatcgattgttgttctggttgtccaacgaaatgggaaacaatctaccaaatagtgaacggagccaataataatatttgctgcacatagaacagctaaaagggaatcattatcttattatattattcaaagcactaagggttgcatctgtgaaacagttgcaagattgcacagtaatgtcacttgtaatgaatcaggaaaaaaaaaggggcatgggtttccagagtggaaagagaaaaaaaattacctccactgctatgatttcttatgccaagtgaacatcgttatatcaacaaattatttgcatggtttaaaaaaaataatagtcaataatatgacaaaattggagcaagattcagaaaaagaaaagttgttggataaatgaacaaagctcatttaatttgtcaacagaaagctctaatggtccattgaaccagttacaaacagaagattgatgtaatgtattagtagtaaattcatttagcatatcaaattgcataagtatgtaaatgtccaccaaaacactggtaacctgaatttttttgacaaactttccctcagaagtttcccacgctttgattgaagaatcttcagaactctacagtgcaacatattagtcatagaatattccatagcattgttttaagaactgtacagcagacacacattagttttagaatcttgatatttcaggttcccaattgtgaaaagtagaaacaatatgcattgttgtacatatacttatgtattcaggttcccaattgtgaaaagtagaaacaatatgcattgttgtacatatacttatgttgagaaagtgattacctaggcagtgtgttagcatttgaataattttctgaacaaatcaattatatttcctatattttcacgcttttactgttctacaaaattgagtgtgaactgaaaggtgtacatttgagtcccagtaatacctatacaaagaatttgcagtttttgaaatttaatggatgacacagcaagaggaaagtgcacccaacaactgctaggaaactcagcagatttcttgtttatagatcatagtaccactgcagtttcagtcattaaacttctagttttttcctttttagataaatagccattaaactgctataagtggtgtttacttgtgatcaatggtgattagttgcaaaactaatcaaatcatcaaactaaggaacttaatatctgacaacaattcaaaaatttccaagatcctagtcaatatatactcaatatacagaattagatgcagatgatatactcttgacaatggcaagatggaattaaggtgctcgccacaaatgaaatggtgaggctgcattagacaaagcaagtaatctggttaatccttacttaattatatgaaggctgtatatagatgcaaaaacgggggatcc

SEQ ID NO: 12804 - DNA, 1779 bp, Oryza sativa
tcctgcagccctgtgcacacaggaaagaggacaattatagatggtaagcttgctaagatggggcaaccatgacgacgtccgctcgatttcaaatttctggcaaatctcaaacaagggaaataccttcagtacagggcaattcttaattttcagaacctttaaactggagttcaagttcctgatggaagtgcaggagcatgtgttcaagcttggcaatgcaattaacacaagctcctccagtgaagggattgagagttctgttgcattcctcattttgatcaacacgagctttacaagtaaccctagcctttctaaaggaagtatttgccattttccacatttttctagatgaagtgtttgcagacaggtaagtgaagaaggaagccaagttggggaggtagatccattatacccagatatccgtagatacttgaggccgtgatgtggttcaagaccttcgagcacctcacttgaagcaagttcagagcttatattactgtgatgttgtaagctttgggcaccattggcatcaccaactgacagttcctccccttctgtttctatattcatatcactgccgtattcatcttcatagctttcgtcactgtcatatccattccatgcatccttccaggacaaatgtagcttttctaagtgttgtttgtctttcagttttgccccacatgcctcctcctgagttctaacattttcaagttgagacacactaagttgtacaagcttgttcatggatttcaattgtgtcacctcaaaaccacttaaattattctgaacaataaaattgcctagttcctgaagtgaggtcattttaccaatgttagcaatggaagaacacacttcatcatatgcaacaagatgccgcaggctgagaagattatttatatcattagatatacggggaattccaaatctatagccaatatctagtacttgaagatggtaatacttccttagagatcggggcaaagttctgccggattcttcagtcacaattttcagataccggagatgtgtagaatttaccaaactggagagaaatgaatcagaatcagcataagttgcagtgatctgcagcagtcgcagatgttgtgcttccttgaaagcatctttgaaatatttaaaaaaatgagaatcatattgcccaattaataccagtgacctcaacttactccttgacttaactttcatcaaccttttctcaaacacctcattacgagatatgtttctatatttctccttgcggtatgcagaatcagttactattgacaaatggcgtatacttggggctaactctgtgcactctgagccatctatagttgcatattctgtttgtgaaaccttttgcgctaaatcatgcataagatcgtgcacaacaaaatattctgatgaaaaccgtgtgctttcaacttgctgaaggaaacccgaatttaccaactcagctagatatttccatcctttctgctccaacttctcactggattcttccacaaatccttgagcaatccatatttgtattagttgtgctttgctgaaagaataacccttggggaaaagagaacaataagagacgcattgctgtaaggggttggatagatgatcatagcacaacttcagcgcttgcatgatgccataagcttgttgcagggatttccattcttcactctttataatgctatcccaatgatcgatggtaagattcgttcctaatagtgaacccacagtttttgctgccagtgggttgccttttaactcgctagcaat

SEQ ID NO: 12805 - DNA, 554 bp, Oryza sativa
cgagccgccgccggcgtgccggcgtggactcggatcgacggctagggtttgctcccttgctctgataccatgtcacttttggagagaagatagaaattggggatttcaactattgcaattgacttagctcaaagagcatataaatatgtacgagagaagtagaaatgtctataataccctcaatactcttaacacacacgtgctcctgcacttccatgggggacttgaattccagtttaagggtcctgaagattgaacagtgccctgttctgaaggtctttccactgtttcagaactcccagcaatttaaaatcgagcgaatgtcatggttgtctagtcttaccaagcttaccatcaatgattgtcctcatttgcatgtgcacaatcctcttccgccttcaactattgtttcggaattatttatcgctggagtttcaacacttccaagggtggaggggtcatcccacggaacattaagaattggacgtcatcctaatgatattttcagttttgattccgatgatattttagagctaatgatattggatgataaa

SEQ ID NO: 12806 - DNA, 1064 bp, Oryza sativa
gaagggcgctgtgattttctcctgacatatattcaccggtaagctctgatggaacatttgaagggagaagttttgggcagtcgtatatttttaaagtcttcaaacatctgagttgcctcaaaccatggaatgaaatagacgtcggattttggaaaccatatatttccaatccagttaggaaactcaggttatggaacgacataatgttatcatccaacgttatcagcttatcaggaacatcatcatcattgggaagccaaattgttaatgttccattggatgaccccttcaacgttggaagtgttgaaactttggcgatggataattccaaaacaatagtagaaggtggaagaggattgtgcacatgcaaatgaggacaatcatggatagtaagcttgctaaggtgggacaaccatgatttccgctcaatttcaaatttttggcagtcctcgaacaatggaaagaccttcagcacagggcactttttaaccttcagaacccttaaactgcagtttaagtccctcatggaagtgcaggagcatctctccaaatttggcatgtcaattaacatcagctcctccagcgaaggaactgtcatttctattattttctgcatactctccaacttcatctttttaagaaagggaagacgttccagtgatggaatcattttccattgtccacaacactctagacggagagtctgtaaagaggtaagtgaagtggcaagccatgttggaggggtagcaccattgtacgaatatatctctaggtgcttaagatttgtatgtggttcaagaccctcaagcactgctcttgcattttcacgttcatcccatggcacgttagtccccaaatgacccaatttatgtaaattagtccacgaaaggcgcagcttttctaagttctgtttgtctcttagttttgcaccacaagcctcagctctagttgtgacattttcaagttgagacacaccgagctgtacaagctggttcatggactggagttgtgctatctcccagccgctagaattttgaacaccaaagttatgtagttcctgaaga

SEQ ID NO: 12807 - DNA, 10869 bp, Oryza sativa
cccccccccccctctctcaaggcatactactacctttaacaacaacatcgcgtgttcatcattttgtaatcgctccactttgctgcgatctcggcgaacgattgatctggctggcttggtacttcagtccggttcaagtgaggttcgccttcaacagagagaaagtcgagccggttacaaaccgacattatactgttgtagggcaaaaaccctaagaaagaaatataaaaagacaagaacctaggataagcctactccctcccttaaaaaaacaaaccctggatatgaatttggacgtacaactggacatgatgcatgtacaaatttatgctcagggtttgtcttctttttttgagacggagggagtactctatttgcttgaacactcctgcctccctccaagatcaaaacttcgggtgtgtttggttgtcggccacattttgccacaactaacgttaggcaagttgtggcagccacaaaagtgtggtggataaattgctagccacaaagtgtggcaaagtgtggtggataaggtgccgtcaccacgcgcggtgtttcgtgttcgtgggcgtggcaacgacagacaaatcaatagcctggagatcaacggcaaatcatcaaacctataggaataggattagtccaagcacagcttcatgctccgggccacttacgtgttctgagtcacgattgataaaggctcaaaactctgctcttaaactcaaagtcacgatatgtcaacaaaccgatctgttccggtcggattcggttttcggttccacggaactagccgtgctgccgtggtgacggaatatgcgtcgcgcgagttttaatcatttcttgctgttccacttgtgtccaataatccgtttgacccagcttctgctcttgcctctttgcgagcactgcaaatgtttcggtttcttttgcggtttcgggtaattcgtatcgcgtcgcggccgtgggctgcaggtcgttgtcgatgcttctaaatacttgactttgacaatcacctcctccttcagtccttctcatggcagcagcaacagtgcaagagcgggttcggtttgccactgttcgattcggttcggtttgcggttttttttgagaattaatattatttttatggaaaatcgcaaaagtagtggccaaccggggaaaatcgcgaaagtaggtccctgtcgaacgggtgcaattcgatagggcacctatcgaacgacgggcagtcgacaaacccctgtcgaacggctggcgttcgacacgctcacctgtcgaacggagggagttcgacagggcccaccacccggcgccgcgaggcctgtcgaaccgggggcgttcgacagggccctccaccgaccctgtcgaacaatgggcgttcgacaggccggtttaaagccccgtcccccaggccgcgagttcgatttgttttgaggaccacatcgccagccgccgccgagagtcaccacatcgtcgccgtgagcgccggagggagcgaggggaggggatagcaggccggagaggaggccgaggaggcgccggccgggaggaaagggttggcgacgccctccagcagtgaagttaaggtatacattagtaatccctaagtacaatgcatatgaaagtttaataaaaaattggtttaagagttgttaattgtttcgcattgttcgatgttagtatgtatggttagcacatatttgttattgctaaatgttggtagagttatttaagtaattgtacggttaaattagttcttagttagtacatattattgatatgttgtgtgttaaaataggtagaaaggtgttatattttatttggattattaaactagttgtttgttactaatagttgtaaattagtacacggcaatatagtataagttgtaatagggtaattatcgaatgattaaatgattaaacgtgagactatttgtcatgttttatcaggatgtcaggtgatatgcccattcgtctgtattatggcgatgctcctatataaatatgtgatagcggggtggatttgactgtatatgccttccatgatactagtctgaatgcaccggagcatatgggtttgaacgacgtgttagggtggttgtataatatgtttggggtagatccaatgcacgataaatttgtcataaatgccgtgtggccagtgaggggtcaacatggatggcagtggagagtagtggaggttgcgtcaactgggagttggaggaagtttgttagtaaagtaagggagaaaggctatagcctggcaatagtggtgcagaagacaacatgtgttgatcgatcgggggagtcaagtcatgccgtggtggaagaaactccgttggaaggtggacaagctgaaaatgtttggcggactgagcaaggtcgagggaaagaagtagtagagggtaatacacaaggagaggtcattgttcgtggtactaatcgtgaggccaatgactcggacgatgaagaaccggattcgcctatgcgtgttgatgcagcggaggagaatgaggcggtagtggatcagatggaagtggaaaacgaggaataccttgcacttgtagtggaaggagaagatacaacactgtgggacaacgaaactaacatacccgatgattggacgaccatatcaatgagtcgtatgaaggtaaacgatggtttagatgcccactggtgttatgatagtaagcaggtgaaagttggacagatgtttcatgacaaaggtcacttacaagatgcggtgaagaggtgggcatttgtccagaagcgtgagttcagggtgaaggtttcaaataggacgacgtatgacgtgaagtgcatacagggtggatgtccttagagagtgcatggttacaagccacaacatgacactttatgggtagcttcgagggttgagcaacatacgtgtttgttggagaatacccgtctggtgcacagaaacctgacagcggcatttgtgacacaaatggtatattcaaaggtggttagaaaaacatctttgtcccctttcaccataatgcatgacgttgagaaagagtacagatatgagatatcgtacgacaaggcttggagggcaaaacagaaagcattggagatgaggtttggaacttatgaggattcttatcacaatcttcccccactattggaggtgatgcaggcaagaaacccgggcacacacatggctattctcgatgaggtgaatgaatatggggagaatgtttttcgtcgggctttctggtcatttgggtgcatgatagaggcctttagaaattgcattcctttgctctgtgttgatggcactttcatgacaggcaagtacagaggaacaattctaaccgcgatcggagtcaacgcggatagccatgtcgttcctgttgcttttgcatttgttgaaagcgagaacacatcaagctggctatggtttttgcggcacattaaaatgtgtgttgttgaaaacagaccaaatgtgtgtgttctgcatgaccgacacgccggtttgctatcagcgatatagaagcttcaagaagatgtcacacagttcgtgccatggccagatttacatagcagatggtgcatgcgacattttggggctaatttttatagacaatttaggagtaagagattgatggacctgttcaagaagttatgcaagcagaattaacaaagaaagtttgatgccatatgggatcaactggatcgtttgaccactacacacatggaagaggttaggaaaaaacctatagttgccagacaggaggagccggagggacttgaacccattcctaatgaagcaccaagtattactcggcgcaggaagcgtggaagggccacgaagtgcttcacggagtgggtagaatttgagccaagggagaaatggtcgttgttgtacgatacagacggattgaggtatggtgtgatgacaacaaatcttgctgaagtggaaaactgggttaataagaaaacccgaccttttaccatttgtggttatcttgaagggcatcccaaggggtacacagaagtatctctgtaaaaggtattccatggctagtctgaacctcagcaaacctaggttaagtatagccccgctattacacagtacatgggatgagaaaagtaagaagggaggaatccacagagtgtggcctgctgggaatagagagttgttatttgagatacgacttcgtgacaagagtggtgtcggcattgggactactgacatcacattggaatgcacgttgtggccagagtatcacgcttgcaaatgcaattgcaacaagccttacctgttacatcggccatgttcccatgttcttgctgcttccgcaaaagggggtgttgatggaaacatttttgtttctccctactttagaaaggaatcgtgggaggcaacttggcgtggtgaattgcgtggttggcgtgccgtgtgcgatttcactcgtcctcctccagggcaagctaattaggttcctgactcaaatttattagttgatactaagggtcgtcgccagtcgcgcaggatcaagaaccttatggatgaagctgaagtgaaagatcgttctcgtcgtaagaaagcttgcattctttgcggggagaaccattcccgtaaagattgcagcatgtacaatgtagggcaagatgccacaggcgctgatgttcgtcgcgttccaaaggggaagtcgaagaagaaaaataattcttagttcgctattatccttggtggactccctactttgaagatcgttatcgttcaatttatgtttagtgcgtctgtaattttaatttgaactttcttgcacttttattacccgaatctatttgtaatggccttgtaattttcattttgaactgcactgcacttttaatatcgtcatgtatttgtattggaattgtaatttaaatttcgaactgcactgcacttgtaatatcataatatatgtgtcctgggcttgtaattttaaattgaaatgtactgaactgttcttatctgtatctatgtgtgctggtactgtaattttaaattgaaatggcatgcaaatttgttacttgaattatgttgcatacatttactgtactgttaccatacgtgcattgtactaatgtggttttcgatctgcaggtatggctgatcaatatgatgggcagctgatagacaaggagattgataggaaccatcgatcgcgacgtcttagtacaggaactttctgcaatgtgctaaagatgcgaggaccggatcaatattggcgtattgatcctctttgggttccaaggtgtgtgaaaatatattgtttttactaatacaaggtgtttatattttcatgtattaataacttgcgctctgtcatgttgtaggctgagagcagctgggttgttgacgtttgcacggttggtcgagccttcacgtgcaaggtccgaacgaatccacattgacgcggcgcttctgagtgctcttgtggatagatggaggcctgagacccacactttccacctcacagttggagagatggtgcccactctgcaggatgtgtcttatttgttggggctgccgatagctgggccagcagttggcccaacaatggtgaatgctggatgggcggatgaccttctggccagttttggtggtgtgctgcctgttgcactggaggatctcacagatgggcacgggcctacgaaaagttggttaaatcagtttcgacaggatgtcttccctgatgaccaggaggagtggatcgtgcagcggcacttagtcgcttacctgttgtggttgtttggatgggtgatgttcacgggaactcacgctgactccgtggacaagtacttcatccactttgcggagcagattgcagagttacctatcgcggagattccacagtacagttgggggtcggcggtacttgcggcgacatatgccggactgtgtgatgcttgcgtgaggaacagcaagcaaagttcactccctggatgcccgttgctacttatgttgtgggcgcacgagcgcttcgacattgggaggcctcagcttgactcgtacgcaaactacggtttgcgagagatgtacaggtctggtgttgatgacatcgacgatcgtcccactatgggatccttgtggacacaccgtgaggtattttttgttaaattcgtttatgttatcattatgaatactagttcacaaactttccttatatgactaatgaaaactactacttgttacagccgcagtgggttagcgggatgacacgtcgtgtctacactcagtttgtagctgactttgatcagcttacgcctgaccgtgttcggtggactccctacactcagcacgatgtcaatgatcgtgcaccgcacggtctcgcggatctttgcacgcgagatatgcaactctggatgacaacttgtcacctcgtggtggacgtgcacgtcgagccacacaatgtccacagggttctcaaacagttgggcatgtatcaggacttccctccgagagatggtcgtcctttggctgatagtcttcataggttagttcacatcacagttgtttaatcctacattttttaaaataaatcactacacaatattttttctgatgtgtgaatttgttgttgtgcaggtactccagaaaggggctcgggctttcctacgagctagttgttgtgaccacggttcagccgacggtacaagagtgggagcacgcagctgataacttggcacttcagacacctccagacgatgggagttattatggagcttaccttcgttggtatcgcagtgttacatgatggaggtgttttcctccacaaggagatagcaccgtcccccaccaggcagcgattactgacacgtttgcccctcagcctagatcagcttacaactcaatggtacgtgtttatttgtggaatttgagcaactagttcaatatttttaaaaagttagcaagtagttcagtatgtctaataaatgtgcaattggttcaactagttccttttcttacataaatgtggaactagttcagtatttataaatgatgtgcaactggttcattatttctaacaaatgtgcatcttgttaaatactcttaataaatgtgcaactggttaaataattttaattgccttgattatttgtggaacaggcggaatttgttgagcacgttcacgtggagtccgacaccatgctgcaaagactagaggcgagacctccagtcgtcaggcctgacgacgtggcgagcatccttcgcaacttccgtgcacgtgctgccgcactactacgtcgtgtctcctgtcggagcgcggcagatgtggtgcagacgtcgggccgacggccatcaccaccactaccccgacgttccagcgtggatcggagtggtccatcctcttcacgtcgcgggtacgaagcggcccacacatctcacggtcgtccttacctttcagcacaccccagcaccggagtacaccagggggtcagccggatcaggggtacccacgtcgagcacggcaccaccacgtccgcaggtattccaaactccgccttatgttcacccctcgcagggagcatctgggtcggcacacttcccttacatgccaacgggggacaacgtgttgaacacaccagcatggggacttcatatcactccgcgtgcgccagagcagggccacacacagcacacatgtaagtcattttaaacaataacacgctttagtttctaattatatgtatcgttactaactacgccatattttttggtttctccctcttgtgcaaacagacgatgagtacggttcggcgtcgacgcatcacggaatgcctgcttactcccctcgcacagcatttattgaggacttcttgtcacaccccaatccggcaccgccacacaacggcacctgataggagcgtgtcgtaggaaaaacggcgcgaatcgcttcctacgaaaccgcgatctcggtaccagtcccaggacatagtgctggtacccacggtgacaaatatgagtcattgcaaatccttaaaatagatagaggacttatttaccttaacttaggttgcagctcagaacaacccgagaatgcaaccgacgacacggacgaggaaacaccaacaacagcagcagcagcggaaccaacgaactaacacccaacaccacaggcgacggctgggaaccaggacgaaaccctaatcttcacttcactttatcttctcttcagggcggaggaactatatatatatttatatagagcaagggtgagtactttcgtactcagcaagtcacgggaacttaggtgtttaatgcaagcttggaagagaggcaaggttgttttgcaaatcttttatttgaagacattttgaaatcactaagtgatttatttctttctaagtttgggccgaaaagagacttgcgtctcgattcgactttaagaggtgcttttcaacagctcatttagtaatgtaccgaccccccgggtcagatcattacttctcggctcccagagccattccacttgattaatcggcaaccagagcctttttcattttctcggactcccagagtccagctgcccagcagcacaacagtccgcttccactcgggaagcctagtctatgatgcccgcagacatcccaaatcacacagattcgtttctgaccactcaggtcgtccatctgccacataggctgattctggttacgattcccacaccacaacaacttttcacaaagcacaggcaaacaaatctacgcaacgggaaccacctcacatccgcccatgaccgtgggcacggctgttcgaacagttagttaacctctgtagaggggtacactttacccacaagatacgaacttattccgaacacccgtcggtatcggaggttcgcaacaaagcctttcccaagccaacccagggttacctcatgccacatagaaggatcaaatcctcacataaacataggccattttaggcgttcacaaatcaaactccaaccaccttgatcggtaagtgagcaagcttctcgtccttgccttaccaggaacccggtttgtccgaccccgccccgacgttcccaactattggcatgcgaggtttccctgaaccgactagttacttagccagggtgtcccattccaccttgtggttgcactttgattatgttcgatgagtttcccacaggaatcggtccttatatgcgaatacgggacagtgccacataggcacaacccccgcatcgcgagttttcacaattcattttattttcaaacacaccgacaccacatgtcgggtttttgaaggcttcacaaacccatttcccaagttttcgacaaacaacggtgtatgtgggatatttggtatacgcgctcagagagcacgaataccgaggtaccacaagggtggagcgacaaggaatcagggtagtaagacctacggaaattagtgcgactactgggtaggtccgtcggtttggcacgcaaaccgaggccaagcaagttaagtgtgtgattctaataatgcaagttgtaaacaaaataataatgacttttcaattataggggcaattgatcaaagggtgacttgccttgctcaagatcttcacaaagcttcacgaatcttcgaggaaacccgcgatcgacgaaaatccgataaccgcaactatacgcaaacaatcgaaaacctaaacaaaggaccaaaagaaagatcctatttagactaattagtagtgccattaaatagatctcaatttacggaattattggaagtggaacggagtcaatcggagttgcgaattgggtgatatgaattttgaaagtttaattggagtttctggaataggagagatgatttatggaatttatagaaataatattctcaagaatattattgacagtcattgaatccgggaccaaggaaaatgattcatggaattttggaataaggaattgatttatggaacaagggtggaaaaaggaaatcaaggagggatgtatactagacttgtttcggtggtattggtgcgacccaaaagctaacgcgactcggccgaaccaaatgggccggcgcgggcgcgaggaggcggcccatgagggcgcgcggggagagagggaggcccgtcggggtgggcgcggtccaccgcgcgggacccacatggcggtggttgggttcacggtggggagggtgcacgcggaggcgggcgctagggtttcggatgcacgcggttcgggcgcggcgcgccgggtggatggatggcggcgggcccacgtgcagccgcacggcttgccgtggaccgcacgcacgggagggaagacggagggaggaggctgactgggcgcgacttgacccagtcaagcgggcccgggactgaggtggcgtccacgtggaagccgcgtcggatggggaggcagaggaggccgggcaggctgatccgacggctcacggtgtgcggcgggatccggcgaacggcggcgagccggaaggggcggctagcactggcggcaggaggaggagaaggggaactcattccacggctcggatcatgaagaggacgcgcgacgacggccggcggcggcggccaatctcgccggcatgccgacgtggccgcgcgcgaggagagcgaagggtgcgcgggctcgggcttagccgaaccggtatggtgttgcgacgcgcacgcggtgacgcgggacccgatggtcaccggcggcgcacgcacggcggcgttaggcggcggcggaagcggcgacacggcgcggagacaaaggagaaggccgacggccttggggcagccagggggaggtcaaggggatccccgggagcgtggcggcgagaggaatcgacgcgagaggagccgacgacggtggattgcggcggcggcaatcaccggagatcaaaagggga

SEQ ID NO: 12808 - DNA, 9524 bp, Oryza sativa
ctcttcaaatgtcccatcggagcttaccagtgaagacacgacaggtgcaaatcgcaacgccctcccttctctcgaatgtcttgatattgcttcttgtggaattaatgggaagtggctatctctgatgctgcaacatgcggaggtcctacagaaattgagtataacctcgtgttggcagataagagggctatcaataggagaggaagaaaatggtcatccaaatcttatgtcagctacagaggcttcgtcgtcaggatatccaagtcgagacgaacttttgcaccttccattaaatctcatcccatctctgaagaaggtaactattagattctgcagtttaagattttatggaaacaaggaaggtttcgctagatttaccttccttgagggcatagcaatttcgcgatgccctgagctgatctcgtccttggtgcataacaacagaaaggatgagcaggtgaacggaagatggctcctcccgccatcaattgtagaacttgagattcaagatgataattatctacaaatgttgcagccctgctttccagggagcctcacccacctgaaaagactacaagtacagggaaacccaaatttaacatctctgcagctgcattcctgcacagagctccaagagttgataattcaaagctgtaggtcacttaattctctacaaggcttgcaatcactctgcaacctcaggttgctgcgggcatacagatgcctcggcgatcttggaggagatgaaaggtgtctccttccgcaatcaattgaggaacttgatatcgacgagtattttcaagaaactctgcagccattctttccaaggaatctcacctgcctaaaaaaattacgagtatcaggcactacaagttttaaatctctagaactgatgtcatgcactgcactcgaacatttgaagattgaaggttgtgcatcgcttgctacattagtgggcttgcaatccctccacagcctcaggcatttggaagtatttagatgccctagcttgcctctatgtttggagagtttgtcagggcagggctatgagctatgccctcgattggaaaggctccagatcgatgacctctctatccttactacgtcgctctgccagcacctcatctcagtccaattcctagagctttacggagatccatacctttacattcgtggagtcgaagtggcaagactaacggatgagcaagagagagcgcttcagctcctcacgtccttgcaagagctccaattcaagtctcatgacagtcttgtagatcttcctacagggctgcataaccttccttccctcaagaggttgaagatcgataattgcaagagcatcatgaggctgccagagaagggtctcccaccttcgttggaagaattgcatatcagcaattgcagcaaagagctagctgaccattgcagaatgctagaaagcaagctgatggtatcaactgattgatgatgaatatgtggattaattattgggtggcttgataagcacacctttttccaccagcccaaatgataccggcagttcggcacacacctttctaagctatacatttaggagtaagtattttctgttaagacgttcaagctgctatacatatcaccgccgcagtgacctgttcaggaccatttcaaggggaaaatatgtaaggcaaattatatatgtagtgaaaacgtgaaaactaccgttggatccataaatggatgtttgatatttgtccatgtcactaaaagtaaaaaaaaaaaaactcccagattcaactatgagtaaaaattttattgggagtaaaatttgtactattgatgatatggacaaatattagatgttcatttttaaatccaacaatagtttttaggtttcctctgtatacgtggttggcactgtatattttcctccatttcaagtgccatataactacatgttgtttctctggatcaactttttttaaggaaaaatattgtaggagagtatcctacagcgtgtgtgtccatatagtaaatttgtttggtgctccatggtgcctgggcaccatgattgaaattgagtatatacccaattcaaatgagtatgaaatttttttaaatgtttaggtattaacattaactactttactaactagttcaaaacaagtttgaactgaatttaaacatgtttttgttagattttgaatctaggtatatagcatccaaacataaaattagttaggtatgtaagatcattaaaattgtatcttccatatcacatccttctatattttaataatatcttccaactaactttacatttgtatttgaagggatatattttgaatgacttaatttaacggtgttatttatcacgataatatttagaaatgagtaaattttaacggatatatttaaaatgagtataaaagcaatgcaagtaacatctactactatatttattctctactagtactactgctgaactattccttctctcttctactagtactactactctacatcgagggagcggtggcgaggggcgggtcgggcgggagagggacggcgacggcagggccaggcgggtgaggggcggtgatggtcgggcgggcgaggggcggcagcggagcggacaaccggagagggcgtgggagaagctacgagcggcaacgatgcctgggacggcgggggcaaagctgcgggcggcggcgatggctgggacggccgagcggcgggggcgacggcgggcgcgggcctctccgccaaatccgctgcctttccacctacaccagcgatctccaccgcgagttccggtacacacctcctttcttccgtcacttccagtagtcttgatggtggcataagttggattggaacatgggtagttggaggatgacgtgaggagagagaaccgccatatttggcttgtgaaggtctccgtttggaggacctccaaatatggcgtgtgtgatggagcctctgctggcccctttttccccttctatacgccaaaaatgggatggaggacgggatagcgctactgctggggatgctctaagagacttgctccggcccggtaccaaatcgtttccaaacgttggatctaactgggcaggatagatatttttagatccaacgattggaaacgatttggtatcatgaggtactgatacttcaaggtactttttgatggaccggagcaaatctcaacaatacaactgcattgagaagaatagacagccacttcttcagatcagaaagcctggtgaactaccagtcagtaaatggctaccgtaatctccacttttcacttatatgtacaaaggacacctgcactatcagaacacccacaaagccagttcactcactacaaactatcttgactaaatccaagcagataccgactcctcttaggccttgtttagatttcaacttttttcttcaaactttcaactttttcgtcacatcgaacttttctacacacgtaaacttccaacttttccgtcatatcgttccaatttcttcaaacttccaattttggcgtggaaaaacacacccttaatcaacttacaaaacaccaacactttggtgtatccacagcaccaatcacacaaggaaatttaccatccacctactcgtatcctactgttagattggccaccttacaccagagaaagggcattgccaaattctgagacgctgtcctttgagctccccgaatctgaacaaataacataaatcagatagaacacaacacaaaaatttccattcatcaagaagttggttgttctaattataaagtggcagtgatgaggacccaccgctcgcgacctcagtatccttctcaatctccactgattggtaagttgctgttggcatttttttcgccgggccggcgaataaccggccgatgtatattaagagaaagagttgctgttggcatttcatccccgatatctacatactcatccaactgctcggcctgtgtagtgatcttgtcaggatccttgctctcctgtaaacaacaaaacacattaaccattataagagctcatttcacacataagctaatagcaaccaagaacaaagcatgctgcttactattgccattgccacgtcaccgttgtccaccatcgtagcggtactgccattcaccagcacataactatcattagccacggaagcatcaatgacatcggcattttcaccattaacaatggcagcccgtcgactcttgttgagcgccttcttgaagttgttgacgaatcgatcaagctcccactgtgtctcgacatccatctcatcaatatccagctcgatctcacccccaaccagctcaggattgccgttcctcttccgcacaatctgcagcacattatgcatcttcttctctggcaagctctccaacccaaccctcagcaagttcttctcctccagggtaatctcccacttgatgacggtgtggtagtcgtggagcccgaggcggtcgacctccacgggggcgttgaaccagatgctccgcttgtccttcccgcagcgtcgccaggatctggtcgcaccgcttccgcatcgccggaaaaggatgtttatctgcgaaaaaaggatggttttgtattctaccgaaaacaaatcaaccatcataagaggcgacgaactgtattttacctcccaacccagcggcgaggttcggcttccccgtggcgagatccgccgttgaaccagatgccccgcccacttgccgttccgcagcttcggcgggatcccggccgctccgcttccgcctcgccggcttgagttccggcggcggcgggggaggtgaggcgacccatgggtagcgcttcggcttgaccctgctgctgcgacactgacgaggcgatgtgtcatgtgcgcggacaaggccgaggcccaactcgcctgcgacgtactctgcgaggcccataagtgttcgtttggactggcagtccattacggacaagaaggccgacggcgcgcgcgatacacctctttgtcttccccgccttagaataagtccacctgaactcccttaaacatacataacaaatctaatccagattccttaatcgcaatactacatatcttaaaccctcgactgtttaagccgatgcaaaatgactctcttcggtggttttgagaatggctcttgctgacgtggctcgttgtgagtctgcacgtgggggctcacgttatcctcttattcccttcttcctctttcctcaaacaacccctccccggttttgcacgagatggttttgctatctcgcgcgcacggcctctccacgcgcatgcatgaatgtgtatgctctttttctttttttctccatcttaattaattttgggatatattaaaagtatcaaaatttctattaaaacttaatttaaaacttttactccaaaattttaaattttgagaattttaaacttttaactcaaaatttaaaattttgaactttaaaattcaaaattttcaattccaaacttttaaactttgaactatttttttaaaaaaaataatgctaattacgataattaatactccctccatctatttttgatagtcatatttccaaatctgaaaaatttatttttgataggcatatttcaatccaacaacttatcatcttaataactttcttagatttaatgcatgactcttcattcttccatacatgattggctacatggacattgagaaatgtaagtattaatgaatcgcttatttacgaggaatgactagtagcatgtttaaatggatgataagtagaattatttatccttggtctatgtgtcaagatgaaatatgactattaaaagtagatggagggagtaataattaccgtaagtagcagcgcaggggcgttttgcacgatgagtgtgggggaggggggtgcgcccactgtgcaagttaaacagttggctcacacgcgcccattagagcaagtctaatcttaggctataaactaattataagcttatatagaagagagagaataaaaaataaaaagggttggctctcatgcataagctagctattcaagaaaaatacattaaatgcgcaggtgatagataaagagaggagaaaaaaataaagataacattatagctcatttatatacatgttaacttaaatataagttataatcttataattggatctagtattaaacttgacccaccaactcctcctcagcagcccatgtctggccggttcagcgtgctcgggtatactcaacatgggtgaggcacgacgacgggttcagcaatgcactcgagcagtcggagctgacacttttaggtcctggttggcacagctccaagcactagctctatctctcctggagctggagctcagccaaacagtttcagctccatctaaaattagagcggagctaggtggactctctcacaaaataaactagtaagttggagctgggtttagactgctccacaactccactacagaccgactccttaagctaaaattagcagttgtagctctattaaaaatgcgaatattaaggaatgatctaatatcaaataattagaaggggtgaggtttcgaacccagatcatctagcccaccatcttatagagctagttggaagacccctgaatgtgtttctgttgtagctctattaaacaagcccttagcagcatcttgtgattcatccgtgtgtttctccggcgcgtcgctttctgtttagagaaaaccgaatagctcgggttcggattcggttcgaggcgagggaaggcttaaaatcatttcatgcacacacagctgcccccttggcatttgcgtgcactgacacgatgccgtctgtcctacacgggttggtagtatgacgaaaggctgcggaaaccgatccagaaaattaaaccgtttggatcattggtttttttgactagtagccatgaaagtgaaattgtccgaaaaggataaaagagttaacgacgtcggtcgagctcaaagctctgcgctcaagaatccgagcacttcgggtccgggttcggttgttcagagtaacttcatgcccattgcccaatacgttgtcctccaccagagtgcatgtgagcagtgatgagcgtcattggagaatttggccattcgtacttcgtaggttgctggcgtcggcgagcgcggcgaaacccgaagcgctggttcggtttcggttaatccgtttcgcggtcgcacgcggacacggccatggtgccaggtcggtgtctcccctcgctgctgcgacgcttgacttgcttattactactattcatcttgtcgttgcagcagaacagcaacgtgcattcggttcggttttgggatctttttttcctgccccttcgctataaatacacggcatgaacactgaagagctcacccatttctcgacgctcacaccagctagagccaccatttctctcaacgcgagacagcaattcgcatacgctaggagatggaggtcatggcatccctcgtcaacatcttggcgctgatctccgaggcatgccgcagcgcggagaagctgccggcggcgctgatcactggcggcgtcgtggaggccgcggcggcgatcttcgtcggtgtgttcaaggcgcccggaggcatatttcaacaccacggcaaggcgccattctacctctattacggcatcacaggaggcgtggccatcttcggcttcgcggaggcgtgggccgggttctgggtctccggcgacctcaacggccggcgcgccgtcggaaagacgatactgtgggtgtcgattttgcctctcgtcttggtggctgcgctcggagggttcgtcttcatgacatagttgcaaacctctgtttcctctgtttgtacgagtgtgtgtaatctcctgtacctctgtgtgtatgcactactactagtttgtacctttgcgtgtaatccataatgcttttagtgtacttatgatattttcagttattatgtgatgtagcagtgtgattgttaacttttatgaggttttatgtatcatacatgaggttgtttatgttcttttatccatgttcctaactccctccctcacgttcttacatgtatgtttcccaaactattaaatggcgtattttgtctaaatttttttatagaaaattactttaaaaaacatgctaattcatttttaagtttttctactctctctgtcccaaaaatataacaatgtttaggtgtattcatagtattaggatatgttacgtccacccagaagttgttatatttaaaaccggagggagtaccatgtaattaattatgtgctaattcatcccatcgttttgtgtgctggctcccaatttgcatgtttttcttgcatttttctagttatgaatgttgtgcaggtctaccttttttacgaggatttcctccaacttttgtttgtctttctcgaaatcatagcagcaatcaaccaatcataatctaaaaaaaattcatggtagaaccagagcaaccaactactagtacgcatttgaaagaacaagcgtttgcatggtgtaggctgcggtgtttcaagcatattgaagaaatcaaacttgtcaggtctttgatggctcgcaactagtagttctcccaaaagagagagaagaagaagacatggacatgcggattaacagaatgcattagcatctcgaaaaaaaagacagaatgcattaaaataaagctgttcggttccgggttcggtttgtgccttgcagtactccagtagttaatcagcggagagcatgtatttttcatcttggtgggccccactgtggataatttttgtgcgtctcttggttttgtttgcaaagaaaccttgcgacccggttgcaggtttgggttcggttcgacactttgcttttgcacaggcgtactgcgtacatgtgccttgagaatgtctctgtcaatccgatttgaaaataaataaataaaaagatgatcctagtgttgttgagatgaaaattgctaatcggcaccgttcgggttcgggttcctgaaagcaatgacgtctcaaggcggaaaacctaattggcgatccatcgcctcgggacgggggtagcgattaatcccccgccccctcccttcctccacctggtttccttttttggcaccacattatttttctattttagtaaatttctatccctaaagtttatacacctcaagtttacacatctaaagtttagacccaaagtttacacatctaagatttagagaccaaaagtttatatgtcaaaagtttatatatccgattcaaatttgaatttgaattcaaatattttctatatatagtatttctatacatctaaagtttatacacctaaagtttatagacccaaagtttataagtcaaaagtttacatacccgattcaaatttgaatttgaattcaaattttttaatatagtatttatatacataaatttttctaatttttattttttaaaaaaaatttgtgtggtgtactgtaataggaagagaagaaggggaggagaaagtggggagaggagggaggagtgtattgagtatagggg

SEQ ID NO: 12809 - DNA, 9861 bp, Oryza sativa
cctgcacccccatcctaaatgtccccatttgcatgtccacaatcctctgccgccttcaactaatgtttcaaaattatccatcaccggagtttcaacgcttccaacggttgagtggtccagaggaatattaagaatcggggttctcgatgattctgatgatccttcggttattgatgagccttctgatcagctgataacgctagacgacaaagtattgtcattccataacctgaggttcctaactgaattggtaatagcaggttgccaaaatctcacgtccatttcattgcaaggtttgaggcaactcatatatttgaggactttggaaatacgcggctgcccaaaacttttctcttccaatatgccaccagagcttgtacgtgagaacatggcagctacatatcacaatgccctcccatctcttgaatatctctttattgctgcctgtggaataacggggaagtggctatctttgatactgcaatatgcgcaggccttacaggacttagatttatatgagtgcgagcagataacagggctatcgataggagaggaagaaagcagtcaaccaaatcttatgtcaactccagaaactttgtcattaggacatcaaggtgactcgccaacaagctcagctcgagatggacttgtgcgcattccgttaaatctcatctcctctctgaagcacatatatattggtgactgccctggtctaacatataatgggaacgatgaaggtttcgctaaactcacctcccttgagagtctacgaattatgaatggcgccaagctactctcgtccttggtgcatggtaatggatacgatgagcggaagaacataaagctcatcccactatcacttgaagtactggagctcagaggttatgatttaccagaagaagtggtgcctgattttctaaggaaccccatccgcctcaaaaaattatctgttatggacactttaagtttaaaatatctacagttgcaatcctgcacggcactcgaagagttggagattgtaaactgtgaatcgcttgccacactagagggtttgcaatccctgcgaagcctcaagaatttgattatatggggatgccccatcttgccacaatggttgtggagttcattagagcaggtccaggagcttttgcctcgactggaaaggctcaagatcaagacgcctctgtccttaccacatctttctgcaagcacctcacctccctccaacgcctaacgcttttcgcttgcaactgggaattggtgagacaaacagatgagcaagacatcgcgcttcagctcctcacatccctgcaagagctctcatttacgtgttgccgcaacctcggagattttcccgttgatctgtacagccttccctcactcaagaggttgaatatctattattgtaaggacatctcgaggctgcctgaaaagggcctcccaccttctctagaagaactggatatcaatgattgcagtgaagagctaaatgaccagtgcagaatgcttccaagcaagctgaaggtcaaaatcaatcagaaatatgtgaattgattactggatggcttgataacatgatggaatagttctatcttccatcatgctatcttcagacttgacgtgtgcttagtgtcagtattgaactaagcattctgtgttcaggcattcaagctgctatacctatcactaccgcagtgaccgctttgaattggagtaccatataactacaagctgctttacttggaggttaagatgatccacggtataaaagggaccccccggaagggtcgcaaggcatcgaatcttattgccaacacacccacacagcctacaaagccgaagtacgcggagccaactcaccgggaggtcttgttgaatacatcgactacgatctcgtcgataccatcgatttcgtctacttccattgtaatctgtgattttccatcatcaatcccatataaactggactagggctattacctgacaaggggcctgaaccagtataatctctgtcttctgtttgcttgatgtcgtattacgtagatcctcgttgcaacgtaccccaataccctaattatccggtctacgagtatcactcgtcgacagaagtgttctaacttcttggcgtccctgtgttctcctgtggattaattatcgcagagctagctggctttggttaacctggcgaaaaggccaatcatgtggttcattacagagaagccagaagtatcagatattggttttcacgtgccaaactctgcactagcattgtctcaccttagaaccccatcctaatgttgttttttttgtaatcatgtattgttacggtgtttcgtattttaatctgtaattctgcgctatgaacctatactatgacttctgttgtactaagccagaaatatccgcaatgcacaagtttttgttttttttggtgaacttgatatctcaggaagatgaacagcgtcgcagatttactagtagaagtctaaaccttgtcagattacctgaggttcgccttccccatgcgcacgacttccactgagggcaggctgttgaaccagatgctcggatgctccggcttgtccttccgaagcctcggcaggatcccgctcgcaccgctgccgcatcgccgcctggatcctcggcggtgggcggtggcgggggaggtcccgtcccggtgaggctggctctgatccgggcttccggcgactagtcgtcttgtcgatgcggagagatggatagacgagagcgaggacttggcccatctcgcccgctaggcactccgacatcgagcgggcctcgtaccaggcctccgctgccggccttccgaatgggatggcctggtaacaagatgggccctgtcgggaaataccatgcaaaactcggattttttaaaattttatttattattaaaatatttacaacttttttattttaaagttttacaaatatgcacctctaccgtcggacttttttatgacgtggcacacggccgttgacatatgctaacgaccatatggaaggtggcatgtcattttgcggacaatccttttgccgtctttccaaagaggtgaagggggccgcctacaaaatatctagggcttttgttataggcagctcccttatcgccctcctatagagctacaagggaagcgcctacaaaatattataggtctctattttataggcagccctcttgttgccctggctgcctgtaaaatgaccggcgttcctccgtgcgaccgttacaacacatcaacgaatgtgtcacgtcataaaaaaaaccttttgagagggtgttttctactaaaggatggtagtggtgtgtgaggacgtcccaaagtctaggtggtgcaatgctccaaggcatgtcagcgcgaaatatctggatggatggggtctcaaataaagtccaaataaatacggtaaccatccaacctcatcgcagaccccgacatgtcttgaagagtgcactacataggctctaagccatcggatatgaaatagaagacaaccattggaatagccacaccagtcatctatgtcatacgcccgtcaaccactcaatggtggcgaccaaaagcgtaccccagagactcgatctcaacaaagacatattccccggttatctcaaccatttcaaacccatcctcatgtgggactagttgcccaggaatgcaacatattctcacataaatcatctcaagcatgatatccaaataataagtggttctaagcaataagcataaataatcttaataagtttctaagtagtacttggcgacaagccataaatattggttcatgcggtaagcgtgctacccaaaagcccataggcaaatcgactagggtaaatccctagttagaaccatcctggaaatctgcaacatcacaagctgcatcaaactccccatccaaacagtcattacctgcagcggggtctgagcataaacaagtaaaagaaagcaagaaatcagtacattaatcaaattaatgtactggcaagtcggaaaacaatcctagcatactacatgttggccatattcaaagataagctgtgtataggttaatttgcataaatgccaattttagttcacaacatgtttcgcaacgaaattttataacgatagtatagagtaagtaaaacttgtaatgtgaatgaataaataacacgcatctaccccttaaggtagatcatcaccactctccatcatctcatcaccatttaccgaactttacccaagtttacaaacaaaacattccaaccattttcaaaacattacaaataaggaattttgaattatattttttttacgaacgttattttgaattattcagattcgtagtaaaagtgatatctacctaacatctcttatattttattttagggcgaagaaacttgtatatagctcttctgcttgccttctccccgaaaacccccgatcctctctgtcttgtgcttaccgtcgcggcgtcggtcgccattatcgcccaagcgttgcgttgctccttttggacggttgggcctgacaaaggacaattctatgaggattatctgggcttgcccatcaccgacctaactggactagcccatcaaccagaagaggacgactcctccgtcaaagtcggtagccaccggggtcagctagcctagcgcgtcgtcgctgcgaaccgaatagctgatgaacattgctactagtctgctagctactcgcacagtaatctgtcctctccttgtacttaattcctcgcacagtaatctgtcttccacttcacctgctagtccgctttccccatcctcttgtcgtgctcacacggtcacgccatcggcgatcgccgatcgaggaactgcctctgttctgccggctgccgcgtctgatggaggaggtggaagccggtttgctggagggcgggatcgggtggctggcggagaccatcctggagaacctggacgccgacaagctggatgactggattcgccaggttgggctcgccgatgacacgaagaagctcaggtctgagatcgagagggtggatggggtggtggctgccgtgaaggggagggcgatctggaacaggtcgctggcccgatcgctccgtcgtctcagggagctgctctacgacgccgacgacgcgatcgacgagatcgactaccacaggctccagcatcaggtccaacgaggaggtaaagcatgtatgcaagacatacgcatccatttgcagaaaatctaattgttgtattctattgtattacatcgactctctcatagagtatatataaaaatacatagaagatttatctctaggactctatatataggagtacattgaagtacaatacaagagtagatttatatctaggactctattttatctttaggattatatcttatctctataatttatatttgactcttatctctaactatatatctatacttctaacgccatggagcacggcgtacgttgatttccagatcccttcctcttttacatggcatagtttactttttggttcagatgcatggcacggcgaccctgatgaaagcgcggatgggcatggagcagagcaaacagggagacctcggaggggcaaggttggtgaagcgagcggcagcggtggcaaaagacggtccgggatatggcagcactttgagagcgtggaaaataatgcgaaagccaggtgtgtcgactgtggcacggtggtcaaatgcggctccgacaatgggacttcggttttgcacaatcaccgcaaaagtggcaaatgtaaaaggacacgtggagcaactgatcaaccgccaaaccctccgaggtggtagtactttaaaaaaaaactagaatcaatcaattactgaaaactcaaatatttctcctaaaacacagatcatgttcttcttgtagtgccagcgagggcggagcaaattcatttgcagctggtaattcagtcggcagaaaaaggatgagaaccgagggtgcatcagcagacaacgtggctgctagtatgcacccttggaacaagactgaactttccaacacgatccaacaaatgactcatcagttacaagaggccatgaatgaggttatgaagctacgtggatcggacaattttgtgagttcaaacttccatcataatacaacttctgattcacgcctaaaaacatcgagccttctccaaaggaaaatgtacggtagagttgatgagaagaactccatcataaagatgataacagaagccaaatctgatggtgtaactgttatccctattgttgggattggaggtattggcaagacggctctcgctcaattcgtatacaatgatccagatgtgaaaagtttatttgaggacaaaatgatctgggtgtggctgtctaacaactttgacgaagagcaactaacgagagagatgctagatgttgtctgtcaaaaaaaacaggaaggatcatgcaacttttctaagcttcaagagatcttgaaaagccatatgaaaccaacgaggtatctacttgtattagatgatgtctgggatgatatgaataattaccgattgaacaaattgttggctcctttcaattctaacaatgcagagggaaatgtgattattatgacaactagaatatggtctgttgcaaaaaggattggcactgttaaaccaattgagttaggtgctttggaaaaggaagactcctggatgttattcaaacaatgtgcatttggtgatgagaaccacgaactatgtggaagtctaagcatcatggggcagaaaatagaagataaattagatgggaaccccttagaagcagaaaatattggagaactattacgtgagcatcacacagttgagcattggaataatattctcaagaccgaagactggaaatccatgcagctcagtggaggcatcatgccaagtttgaagcgtagctatgatatgcttccctaccagttaaagcaatgtttcttgtattgttctcttttccccaagggttactctttcagtaaagaacaactgatacaaatatggattgctcaaggatttgtagaaaaatccagtgagaggttggagcagaaaggtaggaaatatctagctgagttggtggactctggtttctatcagcatgttgaaagaacatcagaacattttgttatgcacgatcttatgcatgatttagcaaaattggtttcacaatcagaatttgcaaccatagatgggtcagagtgcgaagagctaccatcaactattcgtcatgtgtcaatattgaccgattctgcatacaacaagtatgaagatggagatttttctcgtaatgaggagtttgagagaaggttgctgaaagttagatcaagaagtaagttgaagaccttggtatttattggggaatatgactctcattttctcaaatccttccaagatgctttcaaggaggcaaaacacttgcggctgctgcagatcacttcaatgtatgctgattttgattattttatttccagtttggtatactgtacacatctccgttatctgggacttgagaacgagacccagcgaactttgccccaagctctaagcaagtgttaccatcttcaagtactacatattggctcatgtggaactcccaatatacctgaagaaataaataatcttgtcagccttcagcatcttgttgcacaaaagggagtttggtcttctattgctaacattggtgaaatgacctcacttcaggaattaacaaatttcaaggttgagaattctattggctttgagataacacaacttcaacgcatgagcgagcttgtagaactgggtgtgtctcgacttgaaaacgttacaactaagcaggaagccagtggcgcaagcctgaaagacaaacatcacttggagagactacatttgatgtggaagggtgtacggaatggatatgacagtgacgggaactacaatgaatacgacagtgatttgagctatagtgacagtgatatgaactctgaaaatgaatgcgatggtaacatgatacccgaaccttctatgcactcagaaacagaagaggagagactgcaaacgactgatagcaatgatgtccctagtttagatcatattccagacacagcaagtgaggtgcttgaaggtcttgaaccacatcgcaacctcaagtatctatggatatcttggtacaatggagctaaagcaccaacttggcttgccacttcacttacccatctgcaaacactccgtctagaaaattgtggagaatggcaaagactttctttagaaaggctatcactacttagaaagcttgtgttgatcaagatgaagaatgcatcggtactctcaattcgttcaccggaggagattattctaattggaatgcaaaagcttcacactgtcacttttggagagaagatagaaattggggatttcaactattgcaattgacttagctcaaagagcatataaatatgtacaagagaagtagaaatgtctataataccctcaatactcttaacacccccactcaaatgcaatgtgtatgcaataacattgcatttgaaaggtaaactaaacactagaacacaatccaaatattagcctatctccaaagccttgatgatgtcgtcgaagtgtgccaattctaggatgatgaagaagaaaagatgtatccccttctcaatgaactggaccttggagccttcacaaactgttcttcggctcttcattgattcggagatgttgatgatgatgatgatgacaatggaccttcacaaactgttcttcggtcctttgactgatgatgagacattgatgttgatgaaggtccttcacaaactgttcttcggaccttcactgagtgatgatgatcatgttgacaagctccgacatggagatgatgaagtgacaatgaaggccagctccgacggggaactggtgatgattaaagccaactctgacagcgagttggtgatgtagaaaagacgatgaagagatgaactggcatgactttgacgaattgagggtaagcaatggatttggattgactcgataaattgtagagaaatttgactcaatgatagtagcagacactaagtagtagcaaaagagatgaactggtgcagattcaacaaattaaaggatatgcattggagtattggacttggatggacttgatacgaaatatagtaaattgatgaccaagacatgaaattgatttgaaggcttatcgatagtagcggctgcaaaaagaacaatgacagtagcaggaacccattcttcaatcactaattagctgtaacccagctgcataaccaaagagtccaagagcctcaaatctgctcctatctatcctgttgctgcttgaccatgagcttacacgcaacagaaaaaacaaagacggagagaggggttgatgtggatctgaagttcaggaatagcctgggacgatgagaagatgatgacgacgagcatcggcggctggccggctcgatgggtggacggcagcggcttgccgcaatggacgacgagggcctggccggcggaggacgagcacccgcgacgggggcactgattggctgattgctgctcctgtttgtttgctcattggagatgaactggagaacgacaagctcgctgctgctgccgcttgaagacgagaaagcaacaatcagcgatgacgactgcctttgatgcggcgggcggcggcccagatctgggcgggacggatggcgccgcgaccggcggcgatgaccgcgacttccgccgcgatgggctgtcgatggacttgatgacaggagaacgaggaagtggtgctgctgctagaacctttgctgctgcttttgcttcttctgcttcgcttgctgcttgacgagggatga

SEQ ID NO: 12810 - DNA, 1068 bp, Oryza sativa
attgcattgaaaaaggagctcattcagcttaaatctaaagtgcaaatactggctggcacatgtaccatcatatgttctttatatgactgtcaacacaggaagcaacctgaaagtttcacatgtttgatgtagttggatggatgcttgtgtttcatgaatctaaaggttttgcaccttaaggctaacggtttgcttcattgtgaaagggggttttatacctccaaatgataaaaatcagtttatacagaattaacataaagaagcctaccaagtgatgaaattgccgatatcgcctgttcttctcacatcaaccctcctctaccccctccatcatggagggttagtagtgaggcatgttcccctgtctcagaacaatgatggtgaggtaagacaggacaattttaacattctgttgattccccacagaaacctaaccgcttggtctgtagctacacattggaagctgagatgtaggactgatcaaatttttcgctgggcaggcacaccaaagactctccgttaaaacacaatgacctcaaaggatgtgcaaaaggcaaggacacaatattattattgtactgttctttctagttatgtggacatggtgcaaattcagactaatgggcgatagacatgacatgaatttgtggctatatactgtttatcttggaattatttggtggcatactataaattagacaatcttttagcgagacaaccctctgccggatatgcttcagagcacttaacaagcaaaaaataatggccaccgaacatctcacacaatgactataggcgcactaaaaggcacaatccaaaagtaaagatatccataaatgagacagcaacgaaagccaacagaaaaaacattttataagagctgaacagtaaaataagaaaatggtggcattggaagataaagaaacttagataactagatccaccagcgaatattctcatataataatctgcaccctacatgcattacaatactatatgaatcatgcatgcatagaatgtccgcatggcactaaacttaacatgacatgcacttttgctgatctaatt

SEQ ID NO: 12811 - DNA, 2293 bp, Oryza sativa
gagtgagaacatatgcataaatcattcatatagcatccaacacgtactgatgcatcatctctctcattacgcgacatacagtacagtatacaatataaatgttgttttgtaagcattctaatgaagaaaaaaatctcggtacgcatcgccaataagaatttcagcaaaagaaaaacgatatatttagtaaagactactgtcaatttcatccaactttttgtagaagattgtagcgaggtttccccatggaggacggcaatcacatgaggcggataagatcggaggagttcctttcatctccttttaggaaatttaacttccaggggcgctaggctgtccctgtacaagccgtcctctgcttgctcagccagcaacttggcattcttcgtacagtaccatggtgcacgcatgggttatgaaaatgaaacgaaagtttttttaaaaaaaaacaaatattttgaagccaatattatagttataagaagtatttgttgccaagattgaagctatgtaaaactgtgatgatcaataggacaataggtgtgagtgcacctgtgatattggtataggcccatttgtcaatgtgtgttacaagattattcgacagtaatagttttcatgtatgggttgtcagttccatttccatgtccatgtcgaaatgaaatatctggtaattgaaacatcattatcaaatgtttatttttagagatcaaattgcagtaatttgccggaacggagctgatgatatatgatcacaggttttttttctttttggcatttcatctctcttctcatccacatgaacccagtgagtaactgttgctccacaatcagtgagcagtgaatgtcaatgccaagaacagtagtatatcaagattcagtgaacaacatcccgagagtacttacattttggatgtcgtttggtgccaattggcagcattcagaataatgtgcagagaatctcatgcccatcatcttacgtttcagaacagtagatgaaaattcgcaagccacagaatgatgacatggaaggccagtaggagcacagtaaattaaaatcagcacaatccattgctccccttctctgagcttggttaaaggattggagatcagtggtgctgatctatcggtcgaaatcagtgtagctgttactggaagcccttcaccctctgaaacacgctgtgagctttgtgaccaggtaggttcagccgttcaggggatccaaattccaatggcatcaatcaacatcgcgctctacgtcaatttcgagccggtgcttgccctttgcaggcagaaatatacagttgaacaaatactgtactacccctagcatgttcctttgcaaaccaccactttctgaagtcatacttgtatcatattcatatgcctaaccttggcgtatccctcttatgctgttatgcaaataggatggcataagcttcatggagatgtaaccaggcatgcaaattctaactcgaccaagatgacaggaggcggctgcagtatttgggcaataaaaatggcagtttcaagtttcaaccatgttctgcagctgagggctttggtggtgttttcttttcctttaagtatctttaaaagggatacaagtagtaaccaccagttaatgaaatcccagcaattatgtcaaaaaaaattgaaatcccagcaaaactaggctcttttggctctagttcctaccgggcatgctcccgtagaaaacaacattacgtcaaacttgggggcaaagcactcattcattttcaatatcgatcgtttaaattaattgttcgtcacacatacaccatcttgttcagtaatgatggctcacattgtccgtaatccctgcttaactacatattgactccctcattttatactcaacaatacacaccagactcccacactccattttcacagtgactttatttagcgcaccgcaagctgcaccagcacactcctcatgccaaggagaagcaaataagataattgctccaatgctgccttcctcgagcaatcaggggaatggcttagtgcgctcgccgggtgccaagtgccaaatggccttagaagactataatttttgtgcagctcctggtctgttcacagccgggagatgagcagtgggactgagacagtggcggtctgctcccccattgcagggtggcacatctccagcatgtccagctccctgaaccgctcaagaaccctcattcggcactcctcagctgccatcagaccagtggagaaggcgccatgcacgtgccagtgtactggacactggtggcttctccag

SEQ ID NO: 12812 - DNA, 686 bp, Oryza sativa
gacgagcggcggttcggtggtgagacctggggcagtgtccatgcgtgttcggggggctagccgagctaccacgcgagctagggagggagaggacgagcaagaagggagaacggagggtggcactaccaagccgagacgggcgcagtgacgagcggccgacggctcgggagcgagctctccggcctctggccggggaaggggaagaagagggatggccggagtcctcgtctcgtgtccacgcacgcaccggcctccgacgcgtgcgacggcgaagagacgaaggcaagaggtgggagcggcggcaaggcgtcaacaatggcgcaggtgtttcgagcgaggcggagacgaaacgagaggggagggcgcgggctttataggcgagggggagaggtcggtttggaggagggaaaccgacattggcggtcaagggagctcggctggtgttcacgggcggcagcggcggtttcgtgggcagtgcgaaggcggcgacggtgtggatgtgttgggcagcgaaggcggtggatcgagcggtggaaaatcgaaccgcgggagcgggaggattagcgcgggctggcgcggtcaaggtgggggcggcgagctggcgctggcgtctgcgtctctgcctccgagcgctagcggccaaggagtggaggcatggcgtcgttgcttgggagggaaaaagagaa

SEQ ID NO: 12813 - DNA, 2772 bp, Oryza sativa
agctcttcggccgccgcctcgtcgtcgagtacacgcgcccttccctccccggcccacgcaggtaaaagaattcaccgtcgtgttaattcccatcgaaaacgcacggtaaaactaatttggctgtggttggcaggcgcgggcacgtgtcgcaccagcccttggccccgacgccgccgaggctgcaggcggcttggcggccggcgccggcgccgtcgcagtctgcgcagccgtcgtcgtctggctccggcaaggcgagggaaggcgtggtgcttctgcgcaggagctccgggaaaggtagctcgggtagccagtccaagggcggtggcaatgctggccacgagcggaagagcaagggcggcaagagcgccgcggcggcgtgttcgacggcggcttcagcatcgtcgtctaccgcaacggcgcccagcaagcaaagccagaaaggcggcggcggcggctgctgccgtggcggtagctggagaggccaaaaaagcgggtgggaggctcgctttctgttcaaagaacccgaggacgaggcctgcggcggcggcgacgctggccgctccgagacgcatgagccggcgagctgcaaggacacgagaaccaccgtgatgatcaggaacatcccaaacaagtacaggtcactccgctagcttccacgttgttgacgaaatgctatatttcatgggcgccgcgagcccagaattgcctgcctcgcattgcgagcttggcactgatgcctgagcttgtcgtctgttgcttgttcgcagccagaagctgctgctcaacatgctggacaaccactgcatcctctccaaccagcagatcgaggcgagctgcgaagacgaagcccagccattctcctcctacgatttcctctacctccccatagatttcaagtgagtcagctcccgatatgctgtatttatattttatggtgcccaatgcaagaacactgcggcacacactgtccacgcccaatgacaatgacggcctccatgcttcatttccgactgagaattcagtcctagaaaactaattaattttatgattcttgaggggaattgtgcaatggaattgcattgccgtgtgaaggaaggacaaaggtatatgaaaggggcttggaaatgtactgggagatgaatgggtagttgggagctctagctgctggtagtgatgtgtgagcttgtggatcgagttatctttgggctgggtagtactagcatgttactgcactgtactgctagtctgcaacacatatggacgcctactctggtgccatggctgtaatagcccaaatggaaaggaaattggcagtccaagggagatcacaccagatccttctcgttttgatgcatcaaatccttttgttgcatgcaatcctctgatcatgagcatctgttcacatgtctacctttcttgcgcacctgcctctaggatctcctgcctgccttgctctctttcttgcttgcttgcgctgtcttgacctgcacttccatagcaaagtccaacgcaaaaaggaggggctagacgtcatggagtagcggtgaaaaggtgcatcaatgcaaaagcgttttcaattttgacatgtagtaatatatttcttttcctgagaaaaaggtatggtgaccaatgcataattaagcactttcttttcactggagtaccaacttttatctttgcacgaaccaagttgagaaaagacctatcaaatgccccaatgactagcgtgcattgtggaatcaaaaggtagctccacaacaaaaatatgatagaaatattgttgtgcaagtttatagttccccgagcttctgacttcgaaggcctcaattccaagaatatttgtgttcttgaccttgacaagtcgtttgttatcattcataactcatttttggtcacccggttctttatcgcttctctacttgttgagaagtttttaaattcaggcattaaattatcttttcggctgtgctaacctgctaaaatatgaggccatgcagcaacaagtgcaacgtgggctatggcttcgtcaacctcacctcgccggaggctgccgtgcggctgtacaaggcgttccacaagcaaccgtgggaggtgttcaactcgcgcaagatttgccaagtgacatacgcacgcgtgcaagtacgagcgccgttaaatctctcccaattgtgctgataaatctagaccgatcatcatgtgtggcaagtgctaaacccgtgcatgcgcgcagggcctggacgcgctcaaggagcacttcaagaactccaagttcccgtgcgacagcgacgagtacctgcccgtggtgttctcgccgccgcgggacggcaagctgctcacggagccggtgccgctggtcggccgctcgccggcaccgtcgtcggcgtccggggcgtcgtcgccgcccaagagctgcgccgcgagcgtcgacccactcgcgcaggagctcatgacagcgccgtcttcctccggcgacggcgcctcctccgcctcctcgtccaatgcccacgccgacgaggatgacgtccatggcgaaaccggtggtgaccgtggcgacgacgcggggctcgatctggagctacagcgcctaggctacactgactagctggcgtctggcggctttgcttcgagaggtggtggcaatgatggtggctacggctgctgcatgcaagcaagggaagtgaagtgaacaggtgatttcatttatggctttaagcagagataggagtaggaaagaactcgagaaaagaagcgatttgatgttattttgagagg

SEQ ID NO: 12814 - DNA, 5708 bp, Oryza sativa
  unsure (1)..(5708): unsure at all n locations
aggggggcgccgccgccgtcgctttagagaggggatcgggggcgccggtcgctgctccgcgccgccgcagccgctcgaggaaggaggggggcgccgccgccgtcgtcgctcgggaggggggaaatgaatcctagggttagggttagggtttgggtgtatttatttaggttaggattaatctggaccgtccattcgatccgacggctgtagctgctcccacgtcgggccgccggcctattgggccaccgaatggaggacgtaaaatagacttcaatggagaagaaaaccggccagacacatagaataaaagggagggaatataaacttttctatattcggcccaatcatagaaaggaggattttgattttttttccaattaaataattgttaaatgcttttttattattaaaaattagcaattaagctatgataattccaatagaattccaaagagcgtagctaatcatggaaaatttaataaaattaaatttaaccatgtcattttatttttcacaattgctttacttgtaaattgatttaattatacacctacctatttaaaaataccaaatattttaattaattacataatgtaaagttttcttaactttttctcaattttttttctgtacacttcctgttgcaacgcacgggcacctttgcttattttaattaattacataatgtaaatttttctttaactttttctcaatttttttttctgtacacttcccgttgcaacgcacgaacacctttgctagtgtatatatatatatatatatatatatatatatatatatacatcgtgggtaagtcaaaattacaacccgtcaacatatacacacatatattgacggggttgtaattttacctcgtttgcggcccaacttcgtcaacatatatacacacagcacaaaacattggcactttgttatgggggtacaacattaattaatattgtctcagcaacgtttcagcttttggcccattaataaattaggagcaatattgtaaaaaaagttatatttagttttcattcaactcaattatattcctacttaaaaaatgcacaagttttttctaacggatggagtatactctttatattataaagacaggtgaagaaaataagtaccaagttagttttagaggaccatttattttagaaagtttctttcattccttatttacaatgtaactagcatggtgacccgcgcagattgcccggctagcatcattatattttctttcatataatagtatatatgttttctcattatattatttaaatatattaaaatgacaacataattttaaattttgcaataactttacaaaactactaatgtgtaatattcatattatattttatatacatgttagttattagtttttttaatatcaaattttagttatttgtaaattatatatattcctatatagactctagactcttcttttaatatttttttttaattctgaattttctgtaaattgtatttctatatagactatgcacttcttccaatattatttatttttatttctgaatttttattatttctagttgtacttctatgtggactctaaactcatctttcaatactctttaatttttaatttcaaatttcagttacttctaaattgtattcctatatttgtatttctatattgaccttaaactcttcttcccatgtttttcttaatttcgaattttagttatttgtaaattgtatttttatacggactctaaactctacttttaattttattatgtttattctaaattccagttagttttaaattcctatatgaactatatactctacttctaatatttcttatttttcttaattccgaatttctattttttttcttaattgtatttctatatgtactctatactctacttctaatattccttatttttaattctaaatttatattatttcctaattgtatttctatatggactatatactctacttctaatattccttatttttaattctgaatttcagttatttcctaattgtatttctatatggactctagtctcctcttctaatattccttattttttaattctgaatttcagttatttcctaattgtatttctatatggactctagtctcctcttctaatattccttatttttttaattctgaatttcagttatttcctaattgtatttctatatagactctagtctcctcttctaatattctttattttttaattccgaattttagttatttcctaattgtatttctatatggactatatactctacttctaatattccttatttttaatcccaaatttatattattttctaattgtatttctatatgtactctatactctacttctaatattacttatttttaattccgaatttcagttatttcctaattgtatttctatatgaattctatactctacttctaatattccttatttttaattccgaattttagctatttctaaattgtatttctatatggactctgctttttctttttctccgattaatatgagaatttctagtccatgagagcgaacgtggaggctcctttttctattcctttaataataattgtatttctatatgaattctatactctacttctaatattccttatttttaattccgaattttagctatttctaaattgtatttctatatggactctactttttctttttctccgattaatgtgagaatttctagtccatgagagcgaacgtggaggctcctttttctattcctttaataatataatagatggtacggtagttgaaaactataattacgtaattaagagttcgctaaaataaatcccatgttgtagaggtcaggataattatattgtattagaccattcccaacccaaaacactagacatagtttccataaactccacatcatcaagaaactagtactagacattactcttccaatgcaaacaccactattccatacttaaatttaatgctatttatatcacatgatgtcttggatgttgtgtagaaactatatctcatgcaagacatgatttccttctctttcctcatttatttacttgccacatcatttttcatcctaggtgacaacttatttaatgctatggacactatcctagtcattgggttgggaatggccttactccctccattccaaaatagcacaactactcttaacccaaaaaacaaaaaataattattatcatattatagtttgaatgatcctaataaatataatgcatatatccaatatgattagataacatgagagtgaaggatttaaaaataataataatttaatggagaagatgccatagttaattgtatacttgcatgcatgccttatattatggaacatctaagaaaattggttgtgctttatattatgcaatggagggagtgtcttaaaaaatatactccagtttgtaattctaacatattaccatgttaattggataaaaattatatatgttagatggtggtggattgaaattataatggttgatataattatattcgaaacacaaatagcatatgtggagattgaagctataagatgtatttcaaatagaatcctacttaaatctactgtatgcaaatgtatctttggaaaaagctacgaattacattaagaaaatgtattttctaatatacactttctctatcgtaaaatatagctatctatagcatttaaaaattatcataaaatataacaacttctataccaatcacaaccttcgacattcaaattctccacctagtccttcttaaccaaacatttcttttctcatttaattttatctacttttttaatcccttatatccaaacttaaaactttctatttagaatggaggtaattctgtatatagattaccaaaaggtacaagagctaagaatcgtgcatcaaattcacttcggaaaattacataagaaaaacatttgctagtttgttctacataaatctcgagaattttcacaacggaacacgaagctaggagaatttcacattttataaaacttttataaaatgattaaaaaatattgaaaaataaattaaaaaaatctaaagtcaacttcaaattaaaaaattaaaattaaaattttggctaataaacatagcaaaagccgaaagatgagactgaaagctacccagatcaaacagttctatcgctatagaggatccgagcaaaaaacagggccggccggccggcagaagaacacaccacaccactccccagtccccagcccacccccacccccccccctcgtggcactgtagccagtgtactatactgccctgcccttcaccactttcacctccctcctcgagtcttctcctctcgtctccccctctccctctcctctccgccaccacgccaccgtgcttccctcccctttgttcctgtagcgttccgaataaaagcccacctgctttcctttcccgcgaccattaccataaaaagagcttgctcccaccgcctctctctctatctccccgtcgctagctaccagcagcaacaagtacactccccccactcctcccccacacgccgcgtacaactagctaatcagaggagagggagagagagaggggtggggttttgatggaagtacaattctagctatgttcttgatcggggccatgatcgcggatctctagaaagttctagatcttccgtgcgtggtggccgggtgggggtgttcttggtagggtaggtaagtgctgcttcaatggatgaaggaggtgggagtggcgtgggtggnatgcagggaacggcgtcgaatcttctggacgccggagctcaggcgttctaccctgccgtcggcgcgccgttcccgttccagcagcttccgcaccagctgtactgcccgcagccgccgccgccgccgtaccaggtcatgccggtgccgccgccgccgccgccggtgggcttgcctgtaccgccgctgccggcgacgatggcgccgcagccgggctactgcgtgccgccgtccacgacggtggtggacggtccggccagccgcgccgtcgtgctgagcctggtgccgccgcacgcgccggaggacgagatcgcccgcgcgatggctccgttcggtgcggtgcgcgccgtgaacgcgtcgccggtggcgtcagagggcgtcgcgaccgtcaacttcttcgatctccgctccgcaaagcacgccgtcacgggggtccgcgagcagcacatccgtcagcagtgccggctcggccagctatacgccgccgccgccgcagcacaccgctttgtctccgacctggcccccgccggcgtgggactggccccacgacgacaaccgcgggctcgtcctcggccaggccgtctgggcccaattcgccgccgcctccacagtcccagacgacggcgccagccgcggctccctcgtcgtgctcaattccctccccgccatgtccgtgttcgaactccgcgaaatcttccaagcatacggtacatacaccacccccgcacgctttcttccgcgaattcctccatgtttcgcttcttgtgtttccaaccaattcattctcttggtcgggtcgcctcgtcgtgtgtttgcaggtgacgtgaaggacgtgagggagtcggagcaaaaaccgagcaacaagttcgtcgagttattcgacacgcgcgacgccgaccgcgcgctccacgagctca

SEQ ID NO: 12815 - DNA, 694 bp, Oryza sativa
taggaaataacgcaattttccttcaatccaaagaaaatagtggaatcccatgaatgaacaaatatcagggcccctttaatttggaggaaaaacatagaaattttagaggatttcaatcatataggaaaatttcctatgaagctctttgaaacaaatgattgaatcatatccaatcctttgaaattcctatggaatgaacaatcctatagagatttttggaggaaatttagcaagagctccaacctcttgctaactttcctttgagtctatctctctcatccaattcctgtgtttttcctgtggttcaatcaaacggtcattcctgtgtttttcctgtgttttgcaatcctctgttttaaacttatattcctatcaaaattctacgtttttcctattcctacgttgtctccatcctgcgattcaaaggggccctcagaatgtgcactacctgcctctccggtcctttcaccccaatatctctttcctcctgaataaacgcctgatatgtttcgatcaagtgtttctgttggtatagccgctgattggccttgaatggactcgtgagctgtgcttattgtgactgaactctggagacttggagttgacccccaatttgttcatcggatgtgcatggaacatggggctactctactcattgcacgtccatccccaattccccatggatcaagcaagg

SEQ ID NO: 12816 - DNA, 725 bp, Oryza sativa
gttcctcatcggtaccaatccctacgcctccaccagctgttagattctagggttttagcgattttttttctccgtgtaacacgctcgtttatctctctgtttctcttcctagggctgcccttgctgctcaagtccaccgagatccaccgctcgccgctgccgtccgacgcaatcgccgccctatcccgccgcctccactccaacccgccctcgttcccctgcggcctccatgcggtcttcctccgctccggccgcgacccctccgaggcctccgtcgcaaatcgcatcgagcgggaaatctccacccaactcgtcgatctccctgacgcttccaccgccggtaaaatctccgtgtcagtcaccgttgagtccgctggtggctgctctagtagcagcaaagtcgcctcgccttggcgatgtggtgctgtgactaccgcggacttggggcgcggcgatgaggtgtttgatgaattgcttgactcggcattgggtgatggaggcggggatgggatgagggtttacactgttgtcttcgtggacagtgacgatttgaagagaattgtcattgggaaacaccggcatgcttgggtggtcgggaaggttgatgaggctgaggttgtgtccatcattgggaaggtattcgtcaagtatttcatgaatggtggtgtcgaggagggcgaagcaagcactgtgaaaagagaggttcatgccagttggatcaaatg

SEQ ID NO: 12817 - DNA, 2171 bp, Oryza sativa
gtgagacgaacctgcgagggggtcggttgaatggccaccttggaggagaaatcaggttcccccggcatggttccgtctcccccgtcttgcggagccgtttcttcttgcgctccccctcgggctgcgacgtcggcgcggccccctccgggcgccgactggtggcacgcgccgccccgccccctcggggaggagatgggggaggtgttcctcccagcttcctcttcccctgggcgtcggcagggcggctttttcccgagcccccggcgcggggcccaggagcacgactccctcctggggcagattgttcccctcggcggcgctcgcccgcgccatcgtggcccttaggggctctctcctctgaggccccgacccccatcataatggttagaatggaggcgcggtcgggatcgctgcagagggggaggatctcctgaggaatgcgagacgcctccgcggagctaagattcagcaccctttggaccacgatcttgaagtcctcgggagcccaatcccatctggctccctggtgggtccgcatgtagtcttcaggcccagtgtactcccaggcgttccgggcgcgccgttggagcggcgcaatccggcgacggaggtaatcgccgtacaccatggccccggtgagcccctgggatcgcaggcccgccaggcggtcgaggacggcgtcgtagtcctcccccagatctactggtgcccgccagctggagacctgtgccgggggctggcttggaagtcggaggcgcgcttcgttggtgaggggggtgtagaaccagtcgctcttccagtcgtcccacttcttgcgaaggacgcaggggatgtagcggttcagcaccggcccccgcggctggaagtagcagccgccaaccaccgacggcggtgacaccgactgcacggtgaagaaccaccggaacagctgaagagaggggcgcaccccgatgaacatctcgcacagatgcgcgaagatggccaatgtcatcaccgcattgggggtgaggtgcgccatctggaggtcatagaactccaggacatccatgaagaaatgagaaaatggcgggaccagcccagccatcgcgaaggggaggaagaagatggaccgccccgggtagtctggtgccgggcgcccctcgcccagcatcactatctcccgaccggtggcggactccggcatgaagcggcgcggcagtccggcgtgcctctcattcacgatgcgggaaggcggtagtacactgccgtcgagcagagcagagccccgtgccatggcggcggaggaagagatgattgagaacgagcgcgtgtggcgaaagtagggcgtagcagagaaagagttagagctcaggtggcgaaggcaagaggaacaatggcgaaaggaaggaagcaaatccttttctcgatgcttttatacccttgccatcgctgggcctgactcctcgtttctcgcgcccactacctcgctccctcgtatctcgctatctcgctccctcgtttcccgtgcccacgcttccactaatcccattcgcccgcttacggcgcattgagtggatatgcggttgtggcaatcgaaatggattgtatcgtgcgcgcgttaattacgctcgccgaccgaagcggcgttaccatatctccgggcgagacgaatctgctcacccagattcgcgcgctgctcaagtggtgtggcagtcttgaatagaccgcccattatggacaaccaaagttaccaataccaatgtgcatggattgagaccgttgggtattttgcccaactacggagaccggtcccacctgtcacagggtggcgtcacacctgaccgcttcccttgggaagggaaattgctctggcataacgccgggggctactgtcggtgatatgggaccgggagtatcatgactagaggcttgaggcagacacaatcgcccacgtggcctggcaccttcggggacgtcgggcccgagggtgaggtgtccgccctcctcctgatttcccccgagggggggtcgggttgcgcttgccccggccccgagggccgaggcaccccgacccccttaaggaagtctgcgccacatatatgggataagtgagcacagctgtgctcacctaacagcatttattgcagtctggtcaagcgtgtcacgctgcatgcagcgcagtacggcgcgtt

SEQ ID NO: 12818 - DNA, 1590 bp, Oryza sativa
taaggggtagtaactggtgtgacttttaaaaactatagcattagaaacacgagaatgataaggtatgtagtggacggttgtagaggagtataatggtaacgtttgacgggacttatagaaattataaaaatgaagcctaacaggacgataaactctatagtttagatccaatttttaaaggttccaaggagaataaatagaaacagtggtagatcaagtggtagatcaagcaaactaataaagaataatatgatagaagtaaggggtagcaactggtgtgacttttaaaaactataaaattagaaacacgaggatgataaggtttggtttttcaaaatcttaagacatcgaaataactatttaataaattttaagtaaaatcatattaaaaatatataattttatatgggtgctagccgtgcaattgcacgggccacccagctagtttttaataatttaaggggggtaaaatgagaaaacaaatagtttaaatgttaagtgaacaagttcgggtaagtaaaatggaccgttttttcaagtaaaaagcagcttgacatgagtaatttacacttccccgcaaaaaatgagtaatttacgctagcaaacctatacagagggttcaggacaagaagtttgttttggcacatgattttctgggaatagaccaattgcgttgcatgaaaatatgacattactcggaaaattttgcagttctcgaatacagccggtcgaatctacacagggctgataactaataaactagtagtatatataaacccccaaaaaggcagtatcgctaacagtagtagcgaacattctgaaatctgaactctgaatcacttatagctcagctaaggtgagcaacatcaccctcatcagggaacttgaacgtatcagctgcaccaaacttcttcctcccctcctcccactcatcttcgtcctccaagctgttgcgctcgtcgtcgtcgtggttgctacagcacatcggcgacgaggggtcgttgacgctcttcgacttgcacgggtcgctggcgagcatggtgacctgacggaggtgagagatctcgacgaccacggtgtcatcgtctttgggaagaggctgcttccatggctccccatcgatcctcatgaacgtgtgctcggctgctcctttgtggaactcgaaccggattctatgggcctgaaaaatgtgaaatgtgtgactgcatcagcaatgctagctgaaatgtagggagttcaggaaatgggttgagaacagatgcatcacctgtgctagacgagttccatggccattaggggcaagcaagacaagaccgtgccaggcatcgcgaaagccgacaacctcgataaggccgtcgtcgacaaatggtgcagtcaggtctctctgcatattgccatgaaaacttataaattctttgcccatggcaaagccattaggagtgaaacgacaacagaagaggcaagtgctctacttacatcttgtactttcctggtgccaggtgttccccaaggattcagtcctccagaaaaacttggcagattcagacagacgattgatcgaatgctgaaacaatagagggaatatatgtt

SEQ ID NO: 12819 - DNA, 1496 bp, Oryza sativa
cacgttcgctgtggaggctaaaaattcccacattaatcggaggaaaggagaaaaatattaaccgttagatcatagtatatctagattttagcacctcagatctaatagataaagatatcagagttgtacagctaatagaaatctttccacggaagcttaaagaaacatactagaaataggaatcggagtaaaaaggagaaacgtacttaggaatcagagtaaaaaaagagttcgagatcaatacgactaaataaacggcctgtacatatatgtgaaaccaaccaatctgaaaaggaaaagtttatttctaaccgggatatttaaattcgttttgtctatatgaagtatttgaactttttctcatattaaaattaatgtattgatccacagcttgcgttccttaaaaacgaactcatgtccatgtaaaaattagaacaatactgcctccttaattaatacggagaaaaaaaagaagagtctaagtagaaatacaatataaaaataactgaaattcggaattaaaaatatacaatattgaaagaggagtctagataggaacctaatacatgattaattaaaattcggaataaaaataaaataaattttgaaaatagaaagagtaaaaaataaaagttcgagtagaaatacaatttaaaaataactgaaatttggaattaaaaataaagaatattgaaagaagagtccatacaagaatccaatacaaaattaattaaaattcggaataaaaaattgaaattaaaaaaaagaaaagaaaataagagttcaagtaggaatataatttaacattaacttaaattcggaatttaaatataagcattatttcatgactacatataagaacccaatagtagattaattaaaattcggaataaaaaataatataaatccaaaattaggaaaattaaaaatagagttaaagtaggaatatagttttgaaacaactgaaattgaaaataaaaaaaataaaaatatcaaaagaacacaattcaaaaaataaaataaattctaaaattagaaaaataaaaataagatttcaactgggaatacaatttataaataactaaaattagtgataaaaaactattgaaagaaaataccatctaaaacaaatgacaagattatttaagtaacagacctctagaggagcagagtggtggctgttgatgagacatctaaaactattaataaaacaccaaatagaatcctaatgacgattaaaaggaaagacgactggcaggtcgtgaagcaatcgattcaaggcggttggcgatgacttcaagaaagtaaaaaaataaaccccaatgataatcatatttgatttttaaaatcttaattacaataaaaatgacaggcggcgggagggtcgtataggagtacaatggcagacccgccgatggttggtgggtcttttacaaagtaaaaaaatgaattccaacgatagttatgttaaattttataatcccaattacaataaa

SEQ ID NO: 12820 - DNA, 2195 bp, Oryza sativa
ctagctaattagatcgtgctatatactaattggtgttagactttgctctaggatcacctaggttagatctagtcgggtggttctatttgggtttgatgaacgacattgtagatgaaagggagagggtttagataccgaccggttgaggagttcgtggaggaagaggcgccagacatcgtcgttgtcgtcgcggcttgacgtggatgcggcgccggtgaggtcgacggtgatgacggctgcggcagtggtggtcgtagacgtcccggcgatgaggcgtggcgcggcggtggcgtttcccgtcactggctgcgccccctctcgatcggattagggttttgtggggtggagttggcggcggcggtgaatctcgtacgatgtgccgtgccggcctccacccctcttttatatggcgcagtgtgacgggggcccaccagccattgggctgggcgcccccgatcagggcgcggtcaaggcccccttgagccgttgggctcaaggggagagagatctatctaacaattgggaccccagcagctgaggtacatgaccgtcctcagcccctcctcggccttctccgctctcctcctctccgccaccgccgccgcagaagcaggcagcttcttgccctgagagacgccggcggcgttggccttggctgctttgtggatggaccgcagcgcgtagttccagcggcagagtccgccctggtccttgagcgcctccacggcgcccacgctcatcgccaccatccacgacgccttcgctgcacccgccattgatcgagctctcttctttcttgctaagatcgaccggattgtcctgtggtttcttgctcctgatttggtttgcagtagagttgttgcaatgctgagtagttgatgctgtgctggtgagaaagagggaactcgggttatatagaggagggtgtggagaggagaacgacgggttgggcgaaacaaggaggcgccgcgcgttggtttcccaggataccgggtgctttgctctgcttgattacgccggaattcgctttcgtccaggctcggtggcccgcatccacctcatctcgaggcgtctctgttggcggtatggaagctggttgtccgttgcgagggtccacatgagcagtgtaaccgatgaggacgcgtgtcacttgagatgccacgaagggctagtgtctgcatgggcctgagttttgtgtttagctcagcactgtaaaccattcttcctccttcagcaatagttattcaatcatctattctattattattatatactaaaagtccatgaaactttctataaacgctctcaagccgccacgtggcgctctaataaaatagagaaaatcctagaaattctaagaaaaaagcaaaacatctatcccttaatttttacttaaattggtaggtccaatattatacaccgttagataaaattgatcttaaaacaaactaaataccatggtcccacctatcctcttcccacacattggcaggtgtagtatatacgtacgtacatacgtacgcctccttcccccccctttttttttcctttttttcttttttttcttattttttccatttatatatataatggatatatttttaaataattaatcataattttacaaacaaataatctaccatcatataacttaaaccggtgtacttttttactttgtactactattttcaaataatgcactattttaaaataaattttacacaattatatcatgtatactaaaagtccatgaaactttctataaacgctctcaagccgccacgtggcgctctaataaaatagagaaaatcctagaaattctaagaaaaaagcaaaacatctatcccttaatttttacttaaattggtgggtccaatattatacaccgttagataaaattgatcttaaaacaaactaaataccatggtcccacctatcctcttcccacacattggcaggtgtagtatatacgtacgtacatacgtacgcctcctttccccccttttttttcctttttttcttttttttcttaattttcccatttatatatataatggatatatttttaaataattaatcataattttacaaacaaataatctaccatcatataacttaaacccggggacctttttactttggactactatatttaaataatgcactttttttaaaataaaatttaccacaattat

SEQ ID NO: 12821 - DNA, 1219 bp, Oryza sativa
cgacgaggggtcgttgacgctcttcgacttgcacgggtcgctggcgagcatggtgacctgacggaggtgagagatctcgacgaccacggtgtcatcgtccttgggaagaggctgcttccatggctccccatcgatcctcatgaacgtgtgctcggctgctcctttgtggaactcgaaccggattctatgggcctgaaaaatgtgaaatgtgtgactgcatcagcaatgctagctgaaatgtagggagttcaggaaatgggttgagaacagatgcatcacctgtgctagacgagttccatggccattaggggcaagcaagacaagaccgtgccaggcatcgcgaaagccgacaacctcgataaggccgtcgtcgacaaatggtgcagtcaggtctctctgcatattggcatgaaaacttataaattctttgcccatggcaaagccattaggagtgaaacgacaacagaagaggcaagtgctctacttacatcttgtactttcctggtgccaggtgttccccaaggattcagtcctccagaaaaacttggcagattcagacagacgattgatcgaatgctgaaacaatagagggaatatatgttgattttcatagctacattctgtggtgatgataacattctagaaatgtgtctaagaaacttggagatggaaaatggggttgggattttggaagaaccagacattttagatgaagcaaaatggaaattgccttgtacaaatacactgcaaaggaagcaaggatttatttacctgcgaggaatcttaagctcttcccattggccaccaggtcttttcatgatccgcacctttgcaagttgagcaatgttcctgaaaatgggagctgtacacgtcatgcatatccgacgtaaaggcatataatagctaagcgtggtacttgaaatgctaacaccgatcaatgaggataatttgatcaatatcaggggcatcatggttgcattagtgacaggctacctcgaggatgggtgagttagtgaagcagcaaaccatccttgtttaagtccaagcttagcatatgtactctgcatcaaagaaatgcatcacaacattcagcataaacaaaatgaaatgtgccacaagacttgccctacagaaacgagaagaacctgatttgttagctggttcttgaacttctcgggtcgacctaggcatgcctcttcctctcagagtgaaattcgta

SEQ ID NO: 12822 - DNA, 1166 bp, Oryza sativa
tggtcttaactaaggttgaacgtgaaggtttgttctcatggaaaaggtcaccaccaagtagcacaaaatcaacctgcaattcagtatgatttccatcatattataattcataattcataaatagaaggttatcccccaacagaatgagcaggccaataaattttgcaacacaagcagaaaagaatggaaaaatgtgcagctcctacaaaccttattctgctctgctaatgagcatatctcttcaaacgcctcaaatgaatcaaacctacgaatctcgtccttttccatgtagccgagatggcaatcggttgccacaagtacacggagtgtgttgctttcgtctcccctgaaacacaagttgacagtgaatatataatgagtcaagcgtcatgtctgtcgcagtgtaagtatcaggtgacagttaataggatgctctgtgcaaccaaatagttcattctaagcaaagcccaaagcaattcgacataacaaccaatatcaatgtacttatctaataccatcgctccaccagccaccagatactaatggcttaaatataccatgaacatgataactcacattgccggtgttggttcagcttcagacttgagcccaagcactttcctgatcaaaccctcactgcatcgataacagtaaacaagcagcaaaatgtgatatcaaaacaccacgattggttccatacgtccatattctattagccgaatagcatcctctaatttcatactaatccactaatgaaatatctgaccaaagcaaaggaactcaccggaccaaaccaaaccaaaccaaaaccctgcgagcaccggcgaagcttaggcgacgacaacgcggtggcggcttcccctacttcgcgagcagttcggagaccgtcgtacgggcctctgctctggtcagcgtcggcgagctgctcggggacggcggggtggaggcggctagggggcggagcatcagtcgtcgccgggaggggcgccgcggcggcgagctgtggacgagcggcggcggcggagtgggctaggttgtgcgcgcccttctcgatgtagcaatagcaatgggccggcccatcaaggcccattaatatcaatacacgagcccactttccatatacacggcccgttttcctctagggttaggccaaggtctcttcccct

SEQ ID NO: 12823 - DNA, 559 bp, Oryza sativa
ttggaaggaggcaaagaagttgctgtcaaaagactcggtacaggttccacacagggggtagagcattttacaaatgaagtggttcttattgccaaattgcagcacaaaaatctagtcaggcttcttggttgctgcattcatggagaagagaagcttcttatttatgaatacttaccaaacagaagcctggattacttcctttttggtatgtaataattatatattctctttttacctttttcacttttggtgggagaggccgagagggttcccaaagcctgaacaacaataagtttcctttcataatgtccgtcgtagatgattcaaaaaagtctatgcttgattggcgaacacggttcaacataatcaaaggagtagctagaggacttgtttatctccaccaagactcaaggatgacaataattcacagagatctcaaagccagcaacattttattggatgagcagatgagccccaaaatatcagattttggtatggcgagaatctttggtagcaaccagcatcaagcaaacactaagcatgtagtcgggacatagtg

SEQ ID NO: 12824 - DNA, 13964 bp, Oryza sativa
ctagtagcagcaaagtcgcctcgcctgccgatgtgtgctgtgactaccgcgacttggggcgcggcgatgaggtgtttgatgaattgcttgactcggcattgggtgatgaaggcggggatgggatgagggtttacactgttgtcttcgtggacagtgacgatttgaagagaattgtcattgggaaacaccggcatgcttgggtggtcgggaaggttgatgaggctgaggttgtgtccatcattgggaaggtattcgtcaagtatttcatgaatggtggtgtcgaggagggcgaagcaagcactgtgaaaagagagttcatgccagttggatcagatggcaatatagttctttcatttagcctgctgaatgctgatccaagtgattgggtgtatgattggtaagaacaagacatgtcttatgtttgtcttattgttgcttctctgttatatagaaatccactttatcagcatcgttaacaattgtcaaatgatatccctgtctcgttctatggtagtctgtttaaatcaaagaaaatatactggattgcatctacatttcttaggcaatgtgtaaaatgtcaaggcagtaaggctgtggaatcgcgcttattcgatgcaatcgatgaatatattgtgtatttggcatcttgcaaagatgaaaattattgtcaaattattcctgcttcttcattgttgtttcttttacatttagatgtcctgcatgcagggagtttgaaaatattggtcaaaggatgttgactcctgttattgaggcgttacgaccgattgcgaacattaatatagagagtcaggtgcaaaattgcctattttgctcaatgcttgtttcttccatcgtgtgaagctgtcaatgttgataagtactgactagtccttttgttttcaggttttgtaccacacaccaaaatcatcctattcttattctgatgataaacttggtggcaatgtccttagcgtgggagacattcctttctttgtatgtttctgaattcctctgtagaagtcatgtagccatgatggttgctgcatactacagttagctgctgttagtgtttatgacatttaactgttatagatgcactaattcaatatgcaatgaaattgataggttaattcaaatgagtggcacttggatacatccatttcagctacaggacgatcaaaagttcttcaatttgtggtgtatgttctttagaccagattggcatctttgtatttaatcttacagttcactcatcctgaacagataatggaaaaaaaagcagaataacctttcttttctatgactgcgccctgccactccattttatctgtgttctatgttcaactatatttcctgtgtcaatctcctgatggatattaaagtgattcaatgatttggtctttcttttactccttactgtgaatctaaatatcgcagactacctcatttgttaattgagatttatgatttacaaagtgtacaacagtcagaaagtattactgtgatgttctaattaccatatttcatattagttatatgatcagttgtggatgcccatatactcatttgaattgtctgtgcaataaccaccagatatattccatcagcaagggaatgccctttgtacctgcaacttccagatggggagctttccaaaactaatgcatttatatccccagtaagtgctgttttacctatcttccttttgttacccattttatcattttcttaacagtgtgtattatgttgtgcagatgtggggaggtgttgttatttggaacccacctggctgttcatttggttctaagccacatggggccctggacaaaatgtcatctgaggtgtctgtaatcaatttattgccctttttatatgatagaatgtacatattgaaatgtcacagtagttagtctgatataccttcttgcactcattatctgctgagtgctgacacatctatatggaacaggaactcatggagactattgaaatcttcataggacagctaaggcagttatttggtctaaaatcaagttatcacacacagagtatggatggtgtaactaagttcataactagtccaaaagggtttgcccaatggtgagactccctctatttccttactaaaattatctcagtaccaactcccgcttaactacgcacattagctggatgctgacacatgctacatgctctcaatttgaaaagcaaccatgaactattgattctttaatctgagattacattagttatctgcatctgacatgatgatcaataaagctatgggaattttatcacaagccacatgcatagaggatcccgtagaaatattgacaaaatacacatgtatggacaaatgtatccacataggatccaaccaacccaatttttgaggaagtctgagacaaccactagtctacaatcatcaccatctcctattgtagaaatgaaaatatgttgtgtcattggattggatcattggacaacatttttcttcatgaagatgttctcaaaattgtagtgtttatattctcaactcatcaatactgtagtctgcagtatgcaataatatgcatcaatcagggtggacttttatcaaagttagaagatcccaactacatgtcaacagctgaaattctaaatgtcccagataagattttggatgctatatgcttgatttccatatgtctcatagtaggtttttaaaacttacaagtttagtgtagttgcgactttagaagtccatctatcacatgtaacctcttaaggcgctaagccactaactgttactatcttgaccctttttttcctcagggaattggatttattataccggcaccatgcatgttccaatcttttgtcctgtctcaccaccttggaatccctttccagtttggtatgtaataaattcttgataatacataaaagactgttcttcatgctgtgcatgcactaatattattattattattatttttgtaggtccaatcactccccagaatgattgttatggatgaaattgggaggcaggtttgttcctattacattcttgccaaatggtagtagcacatagttctgcatagtagtcatttttttaaaaacaactttgcaccttctttactacaaggtctcgaagcagcatatcactcagatgataacttgggcatgtgtttcgtctgcctttttttttttaccattatgtgtactttgcaagcttgtacacagttatattctgtggatctagtgctttacaaaattaatttcgcactaagtttgtgtcatggtctaaaaaacatttaacagagcctaaatttgttatgacaagtgacatctctttgcaggttgagctttctcttgaagctgcaagtttagctcaaagaaacgcaagcctcggaataagtgactcttcagcaggcacgttaatcttttgtttgcactaaatgtaaaaaaatgataaattttatcaagaattgtgctgttctgcaattttattaagaattgtgttgttctgcagtatctgcaacaagagcgagggctttggctgaggatgcattttttcatccatctgttatgtctatcagttatgcttcaatagagcactattttgcgatttacatggtcagtatactcttctactttacacttattacagtccaatttgtgtttgacacttctgaattctttctttatcttgggcaatatagaaaactgaaaacaaaagagttaactattctccggttttaaatagtgaggattagagcttagtagcgtgcagagcaataatttcttgtccaatttgtttaatatcaacatgcaagttttacactaattgcaatcccttcaattctagaattttgctttattatttcttttgatcataaaagtaactactttagattaaaaaaaattacattgtagcacttcagagccaatactgatatgcttcgaattggcattttctgcagccattctttgcgccagtttccttgcatgtgctgttggcggtaatgaaagagctgaaacgatacatggtagagagaaggaaatattcagcatttcttgcttcccaggcgacatcttcctgatcttttggtgattatcagcagccctgtttcatgcctagtactatcatccacaccaagtctgatatagatggtagataatctgcaacggttcagccacagctgggggacgcgtcttcttaccatcaagcaactgctgggcagacaggtagaccaaatggtgtgtgcctgtgaactcgcagaccaggtgaagatgtgagggaacccagtttttgtcacaaatacggcgttcttccatgaaaccagcttggtgaggccttaactgatcgtcgggtatcattcacattttttggtgaggccttaactgatctctgaaactacagaccgctatctaaagccaatgcatctgtaaattgttgtataatttgagagcgcttgacaaactccccgcagaccaatgttggattagcagttaacacgaacttttacgggtttgatgtgtgtgttcacgattgtttttcatctgcaacgcatgcatgggattccccctctcgtcctacaacggcacacccggacgaaggaactacccgtgtggccgtaactgcatcctccggcctgagagagagagagagagagagagagagagagagagagagagcccgctagagtaacatgtgcgaaaagacctgcaccattcggttaatacaatttccaaatcatagaaataaaaagttaaatgattcggataggacatggacttcaatcattaagaatttattattttgtacaagagatcttaaaaattatatgaaatactccatccgtcctaaaatgaataaaactagtactacaaatttagaacggtactaggttttaggtcctttttaagttcccaaataaaaattttcactctgtcacaaaatgtttggacacatgcttggagtattaaatatagaaaaaaaactaaattgcgagaagaatcttttaagaccatttgctccatgatttgacaatgtgatgctataataaatatttgctaatgacggattaattaggcttaataaattcgtttcgcagtttacaggcagaatatataatttgtttttttattagtttatgtttaatacttcaaattaatctacgtttaatacttcaaatgtgtttccgtatatccaatgttacacactgaaaactttttacctctggaactaatcagggctttagtttatttaagtttgagatggggagggtaaggttataataggattacaatgtaagtttacaaggctacaatctttgaaatttgataggagctatttctccggaacgaacgaagcatatatggaaaaatcgtaatttttcaatactacgatatgtaatattttgaaaattcttttaaacctaatgagccccgtattgttaccgtggcagcctggcagggtgcaaggcaaccaccggcgtccagggcacaccgccgcttcgcgacgaccgccatcggcaaccgctcgctgtcgctgcagtagactagcgcggacgctccctccctccctccatcccaatccgtccccttcacttcactcccattcccatttcctctcgctcccaccaagaccaaccaaacccctgtttctccctcaaaacctccctctctttcccccccgaatgctcgagcgctgcgcggcggaatcccctactcccctccgatgaggccctcgccgcctcccgccgccccggcggaggaaccggtgcccccgtggctgagatcgctgtccgtcgcgcccgagttccgccccaccgccgccgagttcgccgatcccgtctcctacatcctcaagatcgagcccgccgcggcgccgtacggcatctgcaaggtcgtgccgccgttgcccccgccgccgaagaaaggccacctcttacaacctctcccgctacttcgacgcgctccaccggacgaccgctcgccgtccttccccacccgccacaaccaggtcggcctctgcccgcgccgcacgcgcccggggctcaagcccgtgtggcggtcctcccaccgctacacgctccggcagttcgagtccaaggccggcgccacccgcaagtcgctcctcgccggcctcaacttccttgcctccagcctgctccccccgctcgaccacgaggtgctcttttggcgcgcatcgcccgaccgccccttcgtggtcgagtatggcagcgacatgtcgggctcgggattctccccttgcgccgcgcagccgcagccgccgccgcagcagcaaccgacggcgcgggcggcggcgcaccttggggagacggcgtggaacatgcgcggcgtggctaggagccccggatcgctgctgcggttcatgccggaggatgtccccggggtcaccacgccgatgctctacgtcgggatgatgttcagttggttcgcgtggcacgttgaggaccacgacctgcacagcctcaactacatgcaccttggggccgccaagacgtggtacggtgtgccgcgcgacgccgcgctcgcgttcgaggacgtggtgcgcgaacatggctacggcggggaggtgaaccccctaggtgaggcgcttgaaactatcaattttcattaggaacacgctatgctctgttttcccaattctgaattggttttcctgaactgcgagttggtatgcagaaaccttcgctacattggggcagaaaacaacagtgatgtcccctgaagtgcttgtggagtcgggtatcccctgctgcaggtgttatttccttctgtttgttcagtaactagccaaatttcccgtgcaattttgcatggaactagcttaaagtttatttgatgtagaattgcttttggtatacgtcttctgcttctatttctataaatacaatctataccattataagttgaacccgacatgatcaaagcatacatatatctcttttctcagattattaatgttgtgatttctaggccctcagtgaatttggtggactcttttagccttctctttattaataatatattccataatagatagatatattttctatggtatgtgccatgtctaccagtggtttgattaattgattctctgtgtttgaacagattggtgcagaatgcaggggaatttgtggtcacttttccaggatcttatcactgcggtttcagtcatggtgagactgagcaatcacaatagctagcctcattttcctatgctacattttgtacacaattattcctgttctaatcatgcctatgacattttttttcatccctaactgcatgaaatatatgtcttacacagggtgcaatacccatagaatgccaaccttttattgagacatgcctataccaggaaaacttataactcttttttttttaaaaaaaaacatgtgtataccatgtgcagtgcaaaacaaataggtattctatctactgagttaatcagatgtgattgcaggatattgtgtaaaagatttgaagtgtttactaaaaatagtgaattaacctatatttgtgctaaacgtctgccctaccctagtacgttacaactattatgatgttaccatttcctgaattcgattgttcatcttgacacgggcactcttcatttcattccagcaacacaggtgtactgtgtgcaatatgcaattgcaaaatgtgtctctgttgtaaccactgcaatgcacttgatcactgcctctttcatataattaatctaatcaacctcatgactcatgagggcatcatctatttgggcaggattcaactgtggggaagcatcaaatatagctactcctgaatggttgagaatagcaaaagaggcagcaatccgaagagcttcaatcaatcgtcctcccatggtttcgcactatcaattactttacgatctcgcactgtctatgcgttttaggtatgtcataatttgcatgtttcatgatgtgcacttgttcttgatttcttgtgagagattctatcaacttctgccccccataaaatacttatctcacagcccagtttggcactttggctatggcgcatttcttctccctgtattaacttagagtacattagagtagattttggaaaaccctgtttcatgacgtgcacttattcttgatttcttgcgagagattttgtcaacttctgcctcccagaaaaatacttatctgacaacccattttggcactttggctatggcacgtttcttaatcactggataacttagattatgttagagtagattttagaaaaccccatgtttttgtgaaaccttagaccataatacctaggggttatatgacgtaagccataatacctaggtttttttttccaactttgatggcatgacctttttttccttaaaataaatcattatgctatcaataaaaatggtcagccagttagtgcagaatcaataatttccatgtattgacctgtgcacgactctgctcagtgatgcaagtatccccattcccacgtatgcaacatcaataaagtcttaaaatattccaccgtagtgtcttacggtagccaaggtttttatggtgatgcttcaatctgttagcggttagcgatgtatatgtgttatgagagctgctttctgacagaactcttttgatacttgctgatgctatatgaaaataagacaatcttttttatgcatttgcccccttcatttttttatggcaatcctttatcttgttttgaacttctacttcttcagggaaccatccaatggtgaaatggagacacggagctctcgaataaaggagaagaagaaatgcgaaggggaacaactggtcaagaagatgttcatccaaaatgttattgaagataatgaactgcttagtcatcttctaaatgacggatcatcttgtattattcttccagcaaatgcccatgatggtcctggtctttctactttgcgctcaacagatcaatcaaatatgaattccagaatatcacataacctatgcagtagggaagaagctccagaagcctcaggatgcttatcgccgaacaggaatggtgataccagaaattgtatttcatcagatacgcataacatggaaggtgataagggagatataatgagcgctactggattgttagatcagggtctattatcatgtgtcacttgtggaattttaagtttttcatgtgtggctgtactcaaaccaagagattctacagcacgatacttgatgtctgctgattctaattcaattaataaccagctttctatttctggagggagtattctggcagatgcgccaacaaatgaaaggaatggtgtcatttctcgtaagttttcatcttacaatctgtactgaagacattttatttcttacgctcttgttttcagcttatcttatgtacttccacattaaaagggtagtgagttactgatattttttttccttctaaggtagtaaaagaattgctattaggtgccatagattattgatctatcataactaaggaaaatttaccctgtacgaattggatgttttgaaacaaataaacctcctttataactccatatctaatgaaatgatctattggagtttcttatgtgtttttactatgggaatgaatggactgtggttctatatttgtttatctgcatttgtggtaggtataatcaggtgcttgtagggacatttaattttcagttaatttggtgagccgaatgctatttactattttgtccatgtgctttaacaatcattttcatctgatacagtatatgcatttgtaatcaacacacaggtccatattctgaacactgttgcaacgaaataatggccgatgatgcagaaatcgataagaattctgctcttgatctcttggcatttgctcatgggggtcaaccagatcctgaagaagatccactggagaaaatactgaagattgcacatggcattaacaaatcacaacctaatagttcaaataatgttggttgtgttggaacaaagctgtcctcaagtagcacagagcgccaagaaagaccatcttcccagaacgctcattgtaatggtagctcagttatttcaaatggaccgaaaggtgttcgcacgagaaataagtatcaacttaagatggtactttctgaaggttttcaggcaaaggatatctattctgcgaaggaaaagaaggttcaatcagaaccatcaagctcaaaaggggatgttaaggagacaattgatgttagtggcacagagaacgatgtcggatgtaaaagcactacaatctctgtcagtgaacacaggggttctacaaagaatatgtattcagtgaaggaaaagaaggttcaatcgaaaccatcaagcttaaaggggactgttaaagagacagttgatgtcagtggcacagagaacgatgctagatgtaaaagcattacaatctctgtcagtgaacacaggggttctacacctatgaccaatagtttagctgcatcaatcgtgaaacctgacaaggattcatcaagaatgcatgtattttgtcttgagcatgctattgaggttgagaagcaactgcatgctataggtggttctaatattatgcttatatgtcgtccaggttagtcatcaagctgtttgctcactgttatgaagtgcaattcattttcaaccatttttaagcatttttctgcatgccttttattgttttcattggtaattggttcatagtatgacttagcactttagcagtgacaccatatctgtacacatgccatcttacatgatgttcctattagctttgctgaaatcagaataagtaggttgaaccttttggtgcttctgatgttcataatactaaattttcaagactgctgcatatgttcttaaaacattaattaactttttttgttatgatttgtacagaatatcccaaaatagaagcggaagcaagattgttgggtgaagaaatgggactggtatatgactggaagggcattcatttcaaggaggccaacatggaggacaggcagaagatacaggaagttctgcgggatgaggaagcaatacctacaagcagtgattgggctgtaaaattgggtattaacctttattatagtgcaaatctggccaaatctcctttatataacaaacaaatgccatacaacagagtcatttatagggcatttggctgtgattctcctaatgactcgccagtaatgttcaatacttgcgaaaggaaacaaagccaccagaagaaaatagtggttgctggccggtggtgtgggaaagtatggatgtcaaaacaggtccatccatacttggctcacagagttgaaagccaggaagcggaagaagcagatagaatctgttcttatcattttgatgagaagcacaaagctgagccagttgggaattctagtagagtggaagcctccaaaagaaagagtagcagtttgacagacgtaacagaatcaagcaatagaaggggggaaatacctggtgaggaaacaaacaccaagaggcccaaacattctcaagagaacaatctcagagctttggaaaccgttgctgaagttgtggtgccctcaccagctggaacaggtctccgcgttagctccaggattgccaacagggcaaacaagctaaaatcaaagatggaaaaggaggatgtcccttctagccgtccaaagtctaacataaaggagaaaagcagtcatgctagcggtcagaaatcaaatgttcaagaggcgaatgctaattctgctagccatttgagagcaatgccaccaaaacagaaggctgaagcagaagcaaagaagcaaataagaactccaaaacctccaaagcaagcagtggagtactcgtgcgatattgagggttgttctatgagttttcgtacaaagcgggacttgtctctgcacaagagtgatatctgcccagtgaaaggctgcgggaagaagttcttctcgcacaagtatctgctgcagcatcgcaaggttcacacagatgaccgtccgctaacatgcccatggaagggctgcaacatggcattcaagtggccatgggcaaggactgaacatctcagggttcatacaggcgacaggccctatgtttgccatgagccaggttgcgcacagacattcaggtttgtctcagatttcagccgtcacaagcgcaagacaggtcattctgtcaagaagaagaagaaagcaaagagttgagctcgtattacagcaagctagttatggtagaaccggacgcagtaggaggtagtttgtacattctacttcactagtttagcactgatctctctatctgacggattctgttggcaccacaatcggtgtgctttgtgttagtttatattagttttcatgattactaattctcctagttagccttgcatcccatcatatgtttgatgtactgacaccagcacttgcttgcatggttaactagcaaattctaatgttatcttctctttgtatttactggttgacgtgtggatgataactagattctggtcacgtatgattttgcccttcttgcaggggaagaatctgactgctgtcgtagatctgtttgtgctgttgggctaccagttttgacgatgctgcttttttgttctttctttctttctttcttcttttttggtgatatcaggcctcagattgtagccatctcagaaaagaacaacggaatcataaaagcctttgtgatcttaggtgcgtcattctaggtatcaacaggagagcctctcctgctggattcctgaagggctgaaactgaaagtgattcagaagaaggctgcagccgcatcacagcctagtctgtttaacttgatcaatcctccatatcaagctaaactcaatatcattttttttcaaaaacaaaattagcaacgtccatagaactgcactaagttcgtctaattacgagcaccagaagaattcccgtgggtagcggtgcgtgaaattggagcagcctgaagccctgaaccgtgaaaaactgggctgtgagactcagagcgcgaaccaaatctgtcatggagaagatactccctccgtactcgtaaagaaaatcgtttagaacaatgtttaagtcaaaccttgagaatataaatcatgaataactatcaagttgttgagttttaaaatataaaaattatatgaatagatttgtcttgaaaaataacatacatatatcactttttaatgaatatttttataaaaataagaagttaaagttgtgttttagagaccgtgtcgctgtcctaaataacttactttacgagtatggagggagtaagagctagccgatcaaccgacgtatcaacaactcggtggtctctgcggctctgcctcatcgcaaccaattcctacacgccgcgcaggcgcagcccctcggcctccacgaccgccattaataccgtcctagccaagctacgatcaatcacagagcaaagcagccattcctcacgtcacgtagcccgaccacccagtgataaacttcccagcaacccagtactagcatccataaaattgcacacctaagctagctacactagattcaatcaagtcatgaacaaaaaccgatcgatccgtatttgaatctggccagaatcttcgacgccattggcaactcacgtagcccgccgctaacgtagcagccgtccatcccaactccctagctgaatctgacaccatcgcacgcatctttctgttacccccatttaaatccgtctcgtttcccgccgcaaatcccagctataaatacgtctcctcccttctccttcctcctcatcgccctcaccctccaattccaatccctcccaagaactagctgatcacgacgagcagctagtccactgctactgcgatcgatcggttgcaaagttaattaattagtggcgatcgatcgatcatggggagggttattagcagctggagggttcttgcggtggtggctgctttgatg

SEQ ID NO: 12825 - DNA, 5918 bp, Oryza sativa
caggcggtagatcgggccagtccatttggccgcccacgtggctgccgcgtggccaccgtgtcggcgccacgtcagcgccacgtggtgtgccactccttccccggcctgtcgacccggtccaccgtggaccgccccccctcgcgtcactgccttgtggggcccgcatgtcggcgccgccctctctctccccgggattttaattattgcgcaataaatcaattaaggatttttctgtttatagtaaaaacacaatgaatcttctaaaatttatatctaattcatccgagctccgtttaagcccattcaagtctcagaaaatcaagaaaaatacatagaatccattaaaaatggttttgttctctatttcagtagtcttatagcctgtttgtattgtttgctttgtatgtcgcttagattccggctctcccgacgctctggtgtactttgaaatagtcgccgaggttcctccagcagcagagcaaggcaagtcatgcttgtcacttgaacatgttgatcctatattgcaaatgctctaccgttttcccttaaatactgcattgttttataatgttactatgggatgtttgactactgttacagccatactattttgtaccatgcttctttgttagcttgggatataaacatgactagagattggactagggattgcttagccttgcttagttcaactagcacacaatggggaaaatcacattaatgcttagacttcaggttctagtgttggtgttggattaaggccgccgtcctggtgttagtcaattaaaatatacatatggtgggctgtgggtgcatggttttgatggtcgcgcccatggtacttaaggaccggttcgcgggaaaccctgaaagaattcctcgtacttgccacaagccagcgtgggcaacggctgggcttgtagtgtagctttcctttagctgatgcatctaggcaagggtgggcgtgatggagtttggatgggccctgcgacggcctatgcagcttccggattcacctaggcacgagaggggactgcccgctgccttgcgaggagtgggggtgaaacctgaggtgtggtgtacttggttagagggggttatgcgaagggtcctgtcacggcctctatctggtatgtcgtggtggcatgtcagcgcacgggaacgtgtcgtgggactgtgtcttgtggatacagttgtacacctctgatcagagtaaaactattcggatagccgtgcccgcggttatgggcggtcaaccagattcactgtgattagtctcaccctagtctagtctattagaattaattagttcaggtggatggttgggcctgttgcaacgtggagtagcgttggacaatggatggttaatattgattaattattacaactgttttactgctttcaactactgtttataaatgctcgctttatgcaaaagaacctctctagctatcctttggtaataccctgcatcataccctctattccggtatgactcgctgagtacggtggttgtactcagtcttgctctatttttcccaaaccccagagtttgagtacgcgtcagatggcggtttctccgaggagtaggcttcgtccgtgccgtcgaggatgcctgtggagtggtgttcccgctgcgatccaagtcaaggcttagctccagttatcttttaattttccgctgcatttatgtaagacttttataatgtttgtaagacgtggatctgtatgtcaactttgtcgtttgtgtaccccggccagtcctggacggtggttttaatgcacattctgcttggaattctattcgggaatttctgggcgtgacgactggccatcgcagccatcgccggcatggccaccgccgaggtcgcctcgccggaaacggccgtgcggcatggatctgggcgggaggagcaacccccaccgtcgacgtcctggtgccccactccttctagcgccgtcgggggagaaaagggccccgccgccgccatccttgcagccaggcagcttgccggcgggctgctcaggctgcggcgaggtggaggagaggggggagggagggaggccggcggtggcgcgtggaggtcgcccgcgtcgccctagggctggagcccgcgtcgccctagggctggagcgacgcgtcaagaggtttagtttaagaagggattagttaatgcgccggagtaactaaacaatgggttttgagcttaatctccaatcattttcccttgggcgcgcgcacgatgggcggccatggggggcctgtctctgtctgtcacgacttaacctcctccctgccttgtcctcatcggcgcttctccccctttaaaatcttcgctctcttgccagtctcgtcgcgcagagcaaccagagaccagcagaggaagagagattgtgagacagagaaagatcaggagaggaagtagtagctgaaatggtgaagattccgagcccgaggaggctgttcaggagcaggtccaagagcatcggcggcgccggcggcggcgtcggcgcggacatctgcgcgatggtcgcggagcacgagaagatcgagtgggaggtgcggccgggcgggatgctggtgcagaagcggcgggcgccggaggagcaggacgacggcagcagcagcatgtccgcccactccggcgcggacgccatcgtcgtcagggtctccaccgggtggcaatggcacgacgtctccatcgactccaccgccaccttcggtgcgtcccacattgcattgcctcgattgccattctcctcagctgatcatactagaaaggaaataaactgagctgttctttgccatgatcgatgcaggtgatctgaaggtgatgctgtcgctggtgaccgggctgtggccgagggaccagaggctgctgtacaaggggaaggagagagacgacggcgatcacctgcacatggtcggagtccaggacaaggacaaggtgctgctgctggaagacccggccgtcaaggagaggaagctccggtcgaccaccctggcgcagctcatgggagtgccctgccattccttcatcgaagtctagaaattaaattaaacccgccattttgacttgttcttttttggtctgcttgcaagagtgacaccacgcaaagatccttttttgtttccagctcaatcgtctaactgcattgttcggagtcactgttccatttctcgagttcgagggtagtctggattcagccgattgaatcgaatcgtctgcaccaatagtccaatacgacacaaagacataatgtaaattaatgtaattagataatgtcagtgtgtgttgtgtattatttcagctgtaatacttcttaccccatgtatattctcctactgcaatttgcaatacagattatatgatgcacccccgtcttcttgttgaccagtttgtcagctactgcacaactagcctctcggtcgtacgttccccatctttctctctctctcatcaactcgtactgatcgtacaataatccgtggtagttgaacggcattgttggttgctcgattacttttttcccaacacaatgtactgttgcatacctgctattcaagtggcagttaaccgacccaggtcgcagcaggtttacggctaccaaacatgtaacgccagcctgcactgaactgcctaacctggaccgaagaaatactattgcacaccgtaatcagtagtagaactgagcactgactaaaattgctcgcggaggcaatcgctgatactctgatagcacggataagatgggcatttgcaaaattcagtttcaacgtactggtactgcttcttctactgtaccctgagctcccttttcaggctgttattttctcacattttctcttggattaacatgccagtgttaaaagtaacatttagccttttgatcattgatcaagtagcagtacatgatgctggaccgtggacaggggcatgaatgaaatattgaaatctaacccgtaatccaccgaactgtacgcgcgggacctggaaaaaacagatgagacgacgctatcaaccagcggtccacctgtccccctgaactcgtgccgcgaagagaggagcgacttgaatgctgatctcaccggcggctcgacctctcggccaaatccgtccccgcgcgcgcatgtgccggcactgaccgtgatcagcgcgacgcggggtcgtggcagcgacggccgcctcctggtccggtggtcgtcgacccgtccactgcgcccattaaaacccgaggtggtcggcagcgaggcgggcggaagaaaaaacgacggcaacttggctatctcattctcgcaacgtgcgtgcgtgcgtgcgggcgggcgtcgcggcttatccgatcaggaggaggcccgcggatttggccccaggtcggcagcggcatgtggccatgtgcgagtgccgaacggtgcgtgcaccggggggcggggcggtacgtagctgagctacctgccgggcgctgctgatggctgggctggtgcggtggtggtgccggtttatcggttcggtgcggtgctgtgcgtgcgttcggtcggcggaacgtgcgcgggctcttcagtcttcaccgttttgggcactcgcgttgattacggggctaatcaaatctcgcgtagacgacgtcgtagccgtggccaccgctagccgaccggacgatgcagcattgtttctgcccagctgaagcgcaccagagtttgaagggggcacccgatttttaatagacgatgttgttaatttttttacacacatttgactattatttttattaatttttttctacaaatataatgaaaaatgaaagtcatgtttttacaataaaataaataatgatttatgtaatcatttaatagatataaatggttaaaagtgtgttaaaaagtcaatgcattatctataaatagatagatggcagtaattagttaatatgcaattaaatttagcgtataaaacttgtactaataaattcatcacactttaaattactttcagacaatattagttttatagatggtagaatattttatgttaataattgtggcaaagtttaggtcctgttgcccatatttctaataattcaaaatggtttattagaaaataattaatttatggataaaacttttatatatgtatttttagcgacttaaaaacaagtaattataaaaaaggaaattaggttgaaaatatcttaaattaactttaaaattagatttgaaaattcaaattttggctttgtatttagcttattagggaaaccgatggggctcttagtattaaagactttctaaaataaaaatatatgttataaaaaaattgaataggaggaatacttctctctctctctttcattttcaactatagaaattggatactttgttttgttgggcctaaatggtaagatgggctttaagccgggacacttcgagacaggccatacttggacctaacgtagtgacgttgccaccggggcccagcgtatccggacctgtaacagataaacttcttgggccaggccttcgagcacgctccgctcctccgctgcttggtcaccgacccctcggaacgccgttcatctgagaaaggatggcggtcctggcggagatcgccggcgacgagtccccgccgccgcttcctccttccgaaggcggcgaagcttccggagccccgtccacgtcttctccctccggatgccgacggcggcggcaagccttcgccgcgcacgtcgaagcccggcaggaagcgccttcggtcctcaccgccctccgtcctcctctcgttccctcatcggtaccaatcccaacgcctccaccagctgctagattctagggttttagcgattttttttctccgtgtaacacgctcgtttatctctctgtttctcttcatagggctgcccttgctgctcaagtccaccgagatcca

SEQ ID NO: 12826 - DNA, 6310 bp, Oryza sativa
catccaacttcaaatttgaattgataaacaaggaaacaattcaataaaatcttataaatagtatgatattcatataacctattgagatataaattttcaaaaaaaatttgatgtattccgtgtagttaccgaactttatactaggaaagaaaataatagcgaatgaaaaaaaaacgaaaacactttcaatttatctctttttatagttaccggttaaaatttcgatgatttcgctcagaatttcgccaaagccgaccggttttcgcgagcttatcagtaaacttagataattttctattcaaattttggtttatgttccatcaaagaaaagttccatccaataaacaattggtttatgaaatttgttcgaaatctatcggctttccatcagatttcgtgaaaaccgttattccgccagagcccgaaacagaaggccaactcaagtacccaacattcttttttaggagtaatgctcaatcataattatattgaatttggatgaaactcatcaaaatctcagacggcttctactttcgagcatcgtcgaaacctcgaaatttcacggaattcgaacgtttttcgtcggaattatgaaccctatatgttacccattattattgtttaggataaaacttcactggaaacagaaaaacaatatgagtacattcatctcgaaacaatagtagtatattcaactcgaaaaaataaaaccaatactgtatatgcatgtcaatgttattggtggacaacatcaacaaggaagaaaaaggaaatggaagttcaagtttagagagctgtttctcaaaaaaaaaaaagtttttcaaaaaaagtttagagatgtttggtgataggtaggtcggcgtgagggcttctccaaaattctagtccgtgtatattaatggttttatagcgagataaatatcagaccaaataatatagttcaaaacaaatcatagaatttaccgaattttaatcaattacatgatgtggattaacacatgagtataattatatgtaaataatttgaaatcaaaattgcatgcatggaagtctttttggtgcaattgtgttcttatccttgctctacagttcaattgtgattttacccctgatttttagggtttatgattttccctagttttttgaaatgaaacagccacatgtccttactctgttaactcatggtaacggtgttaaatgtgtagtgaatggacaaatatgcctctactattgagatcaacgacatggcggctgcggcagtacggcggcggcgcacgagcgagtagcaagcgcaagtggcacgccgattgggcgaggtgaggagcagaagacgcccgggctactctaggcgggccggtacaccgtgcatcaggcgtcgggcgcggcttcgcgaagcagcccagcacccggtgaagcttcagctccggcggcagcgcgcgagcaggtgggggcggagcccgtgaccccggcaggagcagttccaacggcagtgcgtgagctcgcggcgtcggcatccctggcagcagcacgcgagcaagcgagcatctcgtccatgggcagctagctagcaacttctcttggttcctcttttccttttccatatatgtttctctctttcttcttccccatctttgcaaggaattcatttggtgatcaaatattttcctggtgaatgtgatgaattccctgctcgctgctcgctggccgacggagccgctgatcctcttcgccgcgcgcgaggatgctgctcctctccgccgcagttggcccaccgccagccgcctcaatttggggaaatcgttcccaacaagtggttggccctttaagtaaaccaagggtaggatagtcattcacaaattataatattattttctttcttcatttaattaggaaattccgggcctaccaaactaccatcaaaaccaggggcaaacggttgtttcatttaaaaaagcaggggcaaaatcacaaaccctaaaaaataagggtaaaatcaactgtgaagtaagggcaaaaacacaattgccccaagtctttttcatgaaagtggcacggagttgaagctgatatcccgacgagatctcgatcagcaaaggctttagaatcccctcaatcatcgcaactgtttttcttttaaaatttagagaagctgattttgatttttttttatagaagctgaatttgaacttgaatatttgtgaagtgatatattgtattataatctacttattttttttaaaaaaaaagaactgtaactggttgacatgtccgtctatacaagtttgaacccgcggtggaagggaacggggaaccaagcggaatatgcgcttttctgcatctgcctgtcgctagcgtcaactcttccacggcgtctgacggcgatacatgcagccatgcaggttgcaggacgctccaaatacagcccccaagatgctgttgctgctgctcttcgtcgcaagctctgaattactcgcttggcttgatcacttctcctactatgtaccaagtatcaactgaactgaatggtcttctctgctgcttccatgaagctcatcaccaccgaaccatcgatcgaacagaaccaggtgcacaagcaatcaagcaaccactgccactcgatcagtcgatctgctgctctgcctcctcttgatcctttttgtctccactctgctgcctgcaactgcatgcaaacactgtgcagtacaaccgttgcaaactggaaaagaaagattaagaactgggagaatctgcttggctgcaggtgcaggcagagggaagttgattaagtgattaagccggttcgataaaactaatccctctaccagatcgacatcattaacgtggcggttccacagcagctgtgcatattctatccggcaagtacaggacctgatcacatcgatgattaaccaatctaacttgagcagcagcatccccaaccgaaaatactgttcgtctgtgcaagcaagcgtacggcgtaccctctcttctttgtcagcaacgagattagaatacggcatcggaggcccagcgcatgtgctgtatccgacgtagcaatcatcggaaaggaggagctgagatggatttgcttttgcgcagagaccaaatccaaatgcatctgatcctgtgttctaggtgcgtctcatgtcggctagattacaaatcagtaggggcattggcgctgggggatgatgatctgaatgtctcgctccatttcagcaccctcacatgccactgtcataagtacatacacaaatgcatttttttctacttatattcgatcgatgcagcttggtagaacgcgttgtttcttgctgaatcttttccaattatgataattcgattgggacaacgattagatatgaacagttgaagtaagaaactgataggtatattcttgcgttgccgtgccttgctgaacaggagacagataaaccaactgacaaccggtgagcggtgaggtgaggcaattcatgcaaaggcaaaggcggaaaaccgtgttgcggtgttgccacccacccatgtgggttccaaccgccgctcgcagctagcgctagctgcgtccgctcccgcgtattcaaccccatcccaaccggtctcaccttttcaacgctatcgccgtctcgggcgatgcctacaggtgtcgactctcaaggatcagaatcaagaggtttttttttttttgaatgactgaaaaaaatttttttgaatgactcgcacgagacggtgtgaagttctattgatagagcaggaaaaaattacaagattacaaccctgaagggtcgtaaccaggaaaaaggaaaagaataaaccaccacccacacaccgacaacgccaacacacaagaccaggagaaagctagcaccggaccggccgccgctaagcgtgaccgaccgccgctagtctaacaaaggaacacaaacgagatcgccccctagggaatgccaaaacaacgtcttcaagaagagaagcgacggaaaaaccgccgccgccgtccgtcgtggcccaaaggagccaggactgggcttacgcccggcaaccagccttgaggggtgagacagcacgacaacgcccttaggagggggaatgaaccatcattgtcggtccggccaaagccgggttaggttttcacccgccgctcaccacctgcgaatccacggctaacgccccgatgatccaccaccacacaagctctgccaacatgtgggacccctgcaccggcgcccctcgccagccagccttcatgcgccgaagaccgcgccacacccaccagcagctcctcctcgccccgaggtcgcctcatccaccgccggccgcgcctctcgcgccaagccggcctccatcttcaccgcccgcgcctttcgcgccgagccggcctccgctgccattggttgcgcctctctgcgccaaaccggtctccgacctctcctccaaacgatgccgcgccagccagatgcagtcgtctgccacgccctcgactagccgtccgaggccgtcatgcctccggtgactgcagtcacattcaccactgcagccgctgttgccgtcaccagccgccatcactaacctcctcccaccgtcgtctgccgatgccgtcgtcaccagccgccgtcggcagtgccgactctgctgctgtcagcccccactccacgcccatcgccgccgtccaaggcccggcatcgccccagccagatctggcccggggaggccggatcccgccgtgtgggggccgaatccgtggccgccctcgctggggcgcgccgccgctgcccgtgcctccatcgaccccgtcgccatcctcgccttgcatccaccgctctgccagctctagctgtagtgccggtctgctcccgcccccgccaggcgcacagcaggcaccatcaccgccactgacgccgacgccggctgcccacccgtcagatccagccggacccgtcgggtccgagcgcggaggctagccgcgccgccgtcgacaccgccgccagcagcaccggtgtcacaccctaaagttctttcccaagcctaaattgaatttataaatcacctagagaaaatatcggtgtaaaagcaagagagaaaccctaataaatttgtcggtgacatggggccgggggtatcgtgactaaaggcttgggtagccgtggtcacccacgtggcctgaccccctcggggggtcgggcccgagggtgacatggccacccctccctctgtctccctgaggggtcgggccgctcccgtttagacacagagggctggggcgccccgaccccctgtggttttggcgccacgtgtgtgggttaggtgagcacagcggcgctcacctaacggcatttatagcgggttggacaagcgcgccacgccgcatttaatgcggcgcagcgcacgcttatccgggccgtggcgggtcgcggtgtgtgaccggtcacagaccggtcagatcgcgggttaggtggcaacaggcggcctgtcacacgcctcgccccgtcccgtcagaatgatgagagcttcttggctctcgtccctagccgaagccggcgtgctaactcctggagttggtatgtcagtcccggtcagatccattccaggcttcagcgcaagtatggcaaggaagtcgctggccattaaatgaaggttgaaatgggcgtccaccggggaaagcggacgagcagggcagaaggcgtgtgctctgcttgtcagaggtcacttccggctgtagacgagccctcattgtaaaaagcatgtttcctttcttaggcagtgagaggcccatgtggtgacccctgaccagataaaaaggaggcccaggcctaggagaggagggggacggatgggttctagagcctaaactctctctcgctctcgagctctctgtattccatcacacacagatccaccagaacacaggagtagggtgttacgcttctcagcggcccgaacctgtctacgtcgcccgtatcttgtgcgtttcctctctcgctgacgttcctcagatcgagggcgaagaacctcacttagcgcccccggccgaaccggcaaaggggggcctacgcggtctcccggtgaggagccccacgctccgtcaaaattaatgcaaataataatcggaattggcatgtggaattttcttgagttctacgtgtcgaaatatgctaacaagatttttagtggaattttcagagctctagaaataattttaatcaattaaaaatgagcacaagcaatatttaatcccatgaaaattcttttccccctttttcttttcctttttcccctttttatttttcgaatgggccgccggcccattctcttc

SEQ ID NO: 12827 - DNA, 4706 bp, Oryza sativa
ccgtccgcgcccggcgcgcgccgctggtggtgatcgacgggcaccagaacgtgccggccaacagcgaggccgcgctcgccaaggccgtcgccaaccagcccgtctccgtcgccatcgacgccggcgaccagtccttccagttctactccgacggcgtcttcgccggcgactgcggcaccgacctcgaccacggcgttcgcggtggtcggctacggcgagaccaacgacggcacggagtactggatcgtcaagaactcgtggggcacagcctggggcgagggcggctacatccggatgcagcgcgactccggctacgacggcggcctctgcggcatcgccatggaagcctcctaccccgtcaagttctcgccaaatcgtgtcacgccaaggcgcgcccttggcgccaaggaaacccagtgatcgagccggcgccatctccgccgtacacgtgcccgcctacgagcctggatcaacggctctggtcgcgtctcctcctccagcttgcaaaatggtgctattattgttgctgctctttgttaattgccttgtgtttatgtaattcgtgtgaggcgatcagggaaaagaattacctgaaatcgtctaagttactagtgttatttcgtgtgtgctaaataagttttagatgtgaggtgaggtcgatctatcatgtaatgtactgaacttatatgtggtgttcttcgtggcaccgggaaatatatataagaaggttgttgttatgactaaggttatgccaaatttcatccaaaaaagactaaggttatgccaaatttcatccaaaaaaaagttatctcaattgcttcagtttttagcttgtctcgctgggcgttcctatgacttatgtgagttacgactcgtgggattcgcaaccaaaatcgaagacgagagctttgcaaccggagaggaattcggcctatttggtattttggtctagctagctctgcaattcgagtgagataacaaaacggcctacatgtggtgggctgggctctgggtaagtgctgcttgacttgtgaatagctatgtgggctgacgacaagtggactacgcactttgacagaaataaaaatggaaaaagtccaatctggctcctaattataggtcgaatcaatttttcctgaccacttaaggtgcacacgtcttttttttcatcaaagagaaccgtcctcaaaacagtaagttgttttgtatgactttaatagtttgaggagtcattataaccggttttacagttgaaagataaaaaaagatccgatctatatttgaggtgtcgaattggatctatttttttattaaataaaaggaaaattatgacttgtttggcgtatgaacatatggctatctttcttgcatctaacctttagcaaaagagtgcgtggttagccacaaaactgtgaccacatcttacaagaaattagcagatcatttttatatgattgaataccaagttatatttaaagtataaaatacttgagtataacttttgcttttttttccacgtatatgtagtactgtagttatttaactattttgtatatacaatgatgttgatcaatacacaccttataatcttcactcaccagtcaccgctaccaaacttcgcatatcttctctttttctttatctccaatcaacatcaacacctattcaccatctcttatacagttatactgtaactaatctactcaactcaatcaaacggatggcatgccatacgtgtgagagctaaatgtagacttctgcataaaacccaatggcgtttttaacactgaatgtctatataaaatatttttaaaacttacaccttagaaatttaaaactgaattctatattaatttttttaacctactccctccttcctaaaatgatcattatatatatttatataccaagaccaatgataatttaaattacatcaatcaagataccatgcacatattttgccacaatacatgcaacaattaaaacaccatgccaattacaccttagcatccacacattctctcgtgctgtattattgtattctgatgaaatccgtatccatatggctatatgatgatcaatttaagaaattttgaattctattatatgatgatcaattttgaaggagggaataataattacgtccacattactccagctatatagaagaatacaactttacagcgctagggtaggaaaattgttctatgacatagagtaggtaattaatgttgccgccggcttgccgccctataaataatatcaaattatgtgtgagagtataaatgaatttttcgtcttttgtaattagtaattaggttgaggttctgtatgaactgatcggtgcacaatttaacaggtcagcacagctagaattctatctcttgcatgcctatgcactctctccttccaaaaaaatatatatatatatgctcgctctgtccacattcatctctaggattagatttattttgggataaacggagtattacttttatcaccaaaatcaaataaaaattaactaatcttacatgtaataaagatcaagaagtgtatacatacatgtatgcttatgatgacttatcggattctgatgaaacatttaatttatctcttcatttaattaattattcgacgggtagaagcaacttatttgaaaatacttaaatataaaatagatataactcttatcgatggagggattgttttttagaaacagtaatttgagctagataatttacagttttacacgccgatttggagatgagaggctgtgtgcctgtgtgcatgcaagcgagcatgacggcatgagcacgccagcccacgcagcttaattgtggtgacccccggatcgagcgaccgaccgatcgaccagctgaggtgaaccacatatatctacgcagggttcaatggttgcattctgcagatggccttctctttcccggaattaactacgcgtcgtcgcttacgagaacgagagtcccaagagctgtctcttgtttcttccgaacgtacagtaatcgtataaaatcatgggaattacagtaagcgtgacaaattaaaacaagtttagtccgtaggacaacttgaacgataatcaaattgtttgaccactagtataatttttggtagcttatttaattctagagaaaatttaccaagaagtgatttcctatttgcctttgtcttgagctcgacgggtagtagtaagagcaagaataataatagactgtctgatgaatcttatttggtgactcagagctacttcctacgtctcttaatataagagattttgacatattgcttgtactgtttgaccattcgtcttattaaaaaaatttgaaattattaattattttatttatgacttactttattatccaaaatactttaagcataacttttcgttttttttatatttacatatttttttaaataaaacgaatgatcaaatgttacaagaaaataatgaatatctcttatattagaggacggaggaagtagctagttagtagtagctcttattggaattcacaacacaggaattttaaagatgatgtgtttagatatctcgcatgaaaatatccttttttttcacgaacatgcaaaaagattacatgtcaatatattagagggaaaaatttttttgatacacaacgcaatcagccagatcggtttatgctaggggaaagaagcgcatgaaaatatctgttttcgcgaactcataaactgtgatatcacgcacgaaaatatcataggaatttgattgccttctagaaatacgaagagagaaggatttaatagaggtaaaatgcatgaggtgtgagctcatgtgaaaaattcctatagaattgaactatggaaaagcaatactacaaagaaattatcaacttccagtcctatcttaggccttgtttagttggaaaaaaaattccggtttggttgtcgcatcggatatacgggcacacatttgaattattaaaagtattaaatgtagtttaataacaaaacaaattatagagtccaccagaaaactgtgggacgaatttattaagcctaattaatccatcattagtaaatgtttactgtaacaccacattgtcaaatcatggcgcaattaagcttaaaagattcgtcttataatttacacgcaatctgtgtaattagtttttcctatatttaatactccatgcatatgtccaaatattcgatgtgacaacgtgaaattttttattttgggaactaaatatggccttaattaaacaaccaaattagaaaaagaaaaatcctataaagctgaatccttcaaaatttcttatgagaatcatgagcgttaagagaaattgcacttgtacggatcgctgtaccagcagaacagcaacacgctcaaaaaccgaagcctggcacgaccaccagaagagcctcaacctttggaactacgcttgcatatatgaattgtataaatgatccatgcgctgcagtactcctcgctgctgctggtcgctgcaactgcaaaagcctcatgttgcccgctggttaaaccgcggtcacccgcacccttccaagaggcgcacagcaactcgatcgaagcagtgcatgcatcatgcatgcattgtatggcagctagcgtacacacgcccgcgcatgcacatgcacatggccccctcgcctcagctcgccggccgctgccggtcaaacccggccgt

SEQ ID NO: 12828 - DNA, 5111 bp, Oryza sativa
aaattaaactctttagaccagaaaagatcaaacaacacaaaatctagtctactttttgacttgcagacatgtggatcacccccagaaaaaacgaaaacagttcacctctacacaattatacattgcacctgcgcatctacttccctgctagccaatggaagaactccattgtagaataccaactttctaaatgacgggtattattccactttcttaaacaaaaaccgagtatttggactccttagtccgtaccatagtccagtacataataacggcggcacacgccctggtctcgttcggcaccagaatttcaaccgggcacggcaggcggccggagacgagacgatggcaaacgtcacggcaagtggccagctagctataggctatagcacacggacgcccacaaccacaaccacaagaagcacaccgtacgcgccgcaatttgcaaacctcgttccgcgcgcgagcaagagcgcggccaaccagagccacgcaattctgcacccggttttctgggagccccccaccgattcacccgcacgagtccaaaaccgcgcgtacgcccacgccacgccacgccaccggcagcgacggctcgcgctctagcgatcactaatcgggtcgcgcgagcttggtctctcccctataaaaccacggctccgcgccaccaccattccggcagaaggcaacacacacccaaacacaaacaagagcatcatctgagcgtgcagagctcacacaaacacacgtacagatcgttcgtacaagtgcaacaaacacatggcgagcggcggagggaaggcgaaggcgtcgtcgtgggcggcggcgataagcgtgggcacggtgaggcgctcaaggaccaggccggactgtgccgctggaactacgcgttccggacgctccagcagcgcggcaggcagcaggccgtggccgggacgagcggcgccaagaccggcggcggcgcgcgtgcgctgcagcctgcagcggcggcggcggcgaggaggaaagcccagcagcaagaggaggagctgaggacggtcatgtacctcagcaactggggcccaaacaactaattgttactgagctgatcagtcagattaggatcgtgttaggtggttagattggttttggtgcttgcaagatggaactgcttgtatatgcagacgagttttgcacaagatgtatatatacgatatatatgatatggcaactaatcaagagctttggttatgcacaattctgtttctcctgtcctttgtgtttggccatccagacgacgcattgtcacttcgcttgaaagttggaacttgccttgatgaatctggaataaactcagaatctgaacccgttttcctcccatcctccaggcgtgcatcagattagcagcagaccaaagaattcttcagtatcaagtgaactaacgccatcagatgagtcatccgtcaaccagtatgacgaggaaaaagctcattcttcaggcagaaaaggaattcgcctgatggtagttgctcacttgtttttcgaagtgatcctttccttgcattggtggttggtaggatagataattgagtatccttgagcggttcagcaacactgtgcccggctttaatcaatttgttgtaatacaaaatcaaattttgtctcgcacaagatggatcctgaaaccaacaaaatacccggaaaaaatgtcgccatcgataccacttcccatccaccatattccaatgctacctgtgtgctgcaaccttcaagtggcacaacagggaagaagtactctcatgcacgacgctttactccaacacctccaaaaagtacacgataatactgaaaatgtccccatccatccccatttcttcagagttcagaattcatatatccctcccctctgtgtgctacgtctcctccgatacatcgcgctttcctgctcccttttggattcagttaccattccgttttgtccttagcgacaaattgcaactgaaaattcagttgatggaataccactactcgcagtgacgagagcgcacaacacatcccacatactggcgcacaccggaaaaagaaaaacacggtcaggagcaggtgcagtgaatagttggttgaatacagccgccaatccagcatcaaaaccgatggttttggaacacgacggaatatcactatgctctccctgtatatatacgcttaccagcattaagctttgtacgtgcaagaaacttcaaaggtggtaaagattaatctctgagtttgagcgatcgatccatcgaccgatgagcctgaggtacgcgagcagggtgttgctgagagcggcggcgcaggccatgagggccgcgaggcagccggcgcctgcggtggccaagccggtgccagcggcgaagccatcggcggtggcgccaggcacggctcagcggcagcaggcgaagcggctctccggtggcgtggctgagccggcggagaaggcggccgtggcggagaggatgaggcggcggcgcagggagaagtccgagaatgtgatgcagctcgtgtgctggggacccagttagccgcgatgcttctgttgctgctgtagtgctgtgacatcagttgagcagagtgactagtgtgatttgtgccttatgttcgtttccttttgtaagatggtagaatctgtgaaattttgacggtattgtattctgcaagatgctatgaaatagtgaagtactgttccttttctgaaattttgtttagccaatttcattttctgaacttaggaatgtatgcatggctctatttaggatttctcttaacattcttcgctctaaggagctaagatgttctttttgctcggattatgtgaaacactgcaacatccactgccaaaaatcatcctcttttcccccttctttctgtctttttttgcagaacatacagaaggacgaaaagggtacatgcagcatactgaaatttcaagattggtagtaaaaaatgtcaaaatggaatcagtccaccctggagaagccgagaagacgggaaaatgattcactacttgtagaagaggggagagcaaaacaatcttcagataattgatccagtacttgcagaagagagcacaatgatcttcagaaaaatcactacaggaagtgtatacacagacagactgactaacagtatttacaacaaagagaagaggcttaacaacacaaccgaggtacaagaataaacagtactagtattttctgtaccatagatgaacagacagacagtattaacaagaagtcaacaaagaaggattaacaacacaagcgagatccaagaataaacagtattttcggcatccatagacgatgattcacatacttaattacatcttcattcacatctgagattttcacagacgcagaacaaaaccttcacaccaccgtatgcagataagctatcgctagcctacacatctactagtactagtcttcatcaggtgttgggaccccagacggagaggaacatgacggtgcgcagcgactgctccgcccgcctccgcttctcctccgccgccctcgccgccgccgccgcgctcaccctgcccttctccaccgaccccgcggcgggtgccctgctgccgccgccgctgctcctcgccgccgccgacgacgtcgacgtcgtcgccgactgcgccttgtccttcaccgacctccccgcgccctcccgcacggcctgcgccgcgcgcgcgcccactcggctcatgtgcctcaggctcatggatcgatcgccttgcacgcaaacttcttctccgggatctctctcctttgctttgctttggttggattgtggtttgacgtggaggaggaggagacgtggggggtttatatatgcggagaggagaggaaggcgatggccgctgggaagctcggcttctggtgggcggggagcgcgcttagccgctaaccggcacacgggtttcgctttcgctggcgtgcgatagttatcttcttctgatgatgacgacgaaacggcgggcgttagcttaagctccgcgcgggtgaagaaaagtctagaacccgtttcgcgcgtcgccgatcattatcttattactactactctacttataggtgccatctgggacgtgtacattagttgatcaataattgttcttttgtactttccgagatacacagcgaaagatattttcacagaagataaaactcgtgatatagttctaaaagtaaaaacaaaaaaaaatccgttttactccgtaaactatttcattgcttcactcaacatcttaaacctttttttttcttattttacactttgaactattaaaaacaggtcaccttcctctctaatgatattgcttctttttttttccctacgtaagtcatgtttctcaataaaatttggtaggattaatagatacaatatagcctacctatcaacatttttcataattttttatcattgtatatatattcgaagcactaaacctgatttaaacatcgaggttttaaatttcaaacaaatagtcatgaacttatttttttaaaaaatgaactttaataatcgtgttgtctatggctatataaaatttcaatctaaaatacaactcgtataaagagaaacaaataaggcaaatgcttttagagtgaaccatctatcttctattatattattaaaacagccttaaaagaaagcaccacgttcgctgtggaggctaaaaattcccacattaatcggaggaaaggagaaaaatattaaccgttagatcatagtatatctagattttagcacctcagatctaatagataaagatatcagagttgtacagctaatagaaatctttccacggaagcttaaagaaacatactagaaataggaatcggagtaaaaaggagaaacgtacttaggaatcagagtaaaaaaagagttcgagatcaatacgactaaataaacggcctgtacatatatgtgaaaccaaccaatctgaaaaggaaaagtttatttctaaccgggatatttaaattcgttttgtctatatgaagtatttgaactttttctcatattaaaattaatgtattgatccacagcttgcgttccttaaaaacgaactcatgtccatgtcaaatttataacgatca

SEQ ID NO: 12829 - DNA, 3106 bp, Oryza sativa
gagggggtgaggacagtcatgtacctcagctgctggggtcccaattagctaggccattagtgttagctcggatggatctcgatctgctctgctgggtgtccgtttgacggtagcagccatggccggagacgtaattggccggttgctcccagctgatcgtaatatatcacgatgatgatgaaaaattctgctacttgagtacaattgcttcatgggtcattttgcctttgtgattgtgtcgtctagaacaatttatgaactgaccacttttacggtcatgcacgcaaaaatccggccgtgtcatcaatttaagatccaaactttctgggagaaaggtgttctgttcttttgatactgcaccgtaaaatttatgatcgaaatgatggaagaaatggtagcaatctagtttgtacttaatacttaccacttgttactgaatgatagtcagatctgtaattcaattcaatttggtatggaatttttttaagagaatggaaagattctcaacctttgcttaaaagagctacagccgctctacataattcactgaatggagagcataaaaaacattaaagatctaaacaataactaattgtccctaactaataataccaacataaaatatagaagcatttattcaagtttatttgtaaatctccatccgaatatagtaaaaatgtgtatgaccattgtctctagcttacggcatgcaatatatataagtattgtggaatgcacgaacgagaaaacatagatataacaaaaatcgataaatgcaataacaaaacatatgattgtaaaacaagaagaagaaaaaaaattagagaaataaccgtttgatgtaacgtgaaaaaagttcacataaatgttctgataagattggaccgtatgttaaacttcctctaatacttacatttatggctaattattttagtgttactctcccagaatataagaagttttagagttagacatggttattaaaaaagtactctctccgtctcatgaaacatagtactggatgtgacatattctaatacaacgaatctggacaaatgtatgtccagattttatagtactatgatgtgtcacatccagttctaaattcgtttttttgggacagagagggtaggttgaagggaatggtggaggattgtgactgaatgagtagtgaagttagacggaaaaagtgaatggtggatggttatgattggttggaaagagagtattgatggagaagttgttatatgttaggataaatcctgatagctaaaaattgttatattttgagacggagggagcaggtgatatagcacttgacattcagatgtttgtgatgatttcgttaatcttaaaatttatcggctcaattcatcgggggttcttaatgataaggtgtatgtccaatcatttgttccaaataacgctataaaaagatatgaatcctataacatttatctgttctaaactctaaagccaaaagaggcctaaagttatctattatattattaaaagaatagaaaaaggagcctccacgttcgctcttatggtctaaaaattctcacattaatcggagaaaaagaaaaggcagagtccatatagaaatacaatttagaaatagttgaaattcggaattgaaaaataatggatattagaaaaggagactagagtccatatagaaatacaatttagaaatagttgaaattcggaattaaaaaataaggaatattagaaaaggagactagagtccatatagaaatataattgagaaatagctgaaattcgaaattaaaaaatagggaatatcaaaagaggagactagagtctatatagaaatacaattaggaaataactgaaattcagaattaaaaataaggaatattagaagtagagtatagagttcatatagaaatacaattagaaaataatagaaattcggaattaaaaataaggaatattagaagtagagtatagagtacatatataaatacaattaagaaaaaaaatagaaattcggaattaaacaaataaggaatattagaagtagagtatagagtccatataggaatttaaaactaattaaaatttggaataaacataataaaattaaaagtagagtttagagtccatataaaaatataatttacaaataactaaaattcgagattaagaaaaacatgtgaagaagagtttaaagtcaatataggaatacaatttagaagtaactgaaattcgaaattaaaaattaaagaatattgaaagatgagtttagagtccacatagaaatacaattagaaataataaaaattcagaaataaaaataaataatataggaagaagagcatagagtatatatataaatacaatttacaaaaagttcggaatttaaaaaaagaaatattaaaagatgagtctagagtccatataggaatatatataattttcaaataactaaaatttgatattaaaaataattaataactaacacgtatataaaatacaatatgaatattacacattagtagttttgtaaagttattataaaatttaaaattatgttgtcattttaatatatttgaataatatattaagaaaacatatatgctattatatgagagaaaatagaatgatgcttttggaggccaccatgctagtttgaagtaattaagcaccaggcaggtggcttctagtggtgtgtttgtctgcatcttagcacgcatgcggtcagcatcgtcagcaaaacgctgggtgcagcagaatgcagcacctggtatactggaaaccatgctgtccagcccctggattccccctgcccgcctcccataactccgcgttcaccgtcaccggaaagaacatgtggtactaatttgttactagtaacaataatctgcacctaacgcatgtgatgtgagtcagtgccggcaaagaaacgatccatcatccatatagtttattgctcaccaagaaggtaagaagatcacaagatgcctcaggcctcagattagtagtattattttttttgatgaaaagattagtagtattgctttgaacggattagattagtagtatatggcagatccttatcatcctgtaagctgcaagggag

SEQ ID NO: 12830 - DNA, 775 bp, Oryza sativa
gccaccgtgctgatcggcatgagctcaccggaggggccgtcgaccagctgggcttcgtccgtgatctccggcgaggcggcgaacgccgacgtgttcgcggcgacgaactgctccagcatccgctgcacgcagtcgacgtcgtagagcgtctcgacggcgtagccggtgttggggatcaggaggtcctccagcgccgcctcctcgagctggttcccggccatcctctccagcgcgtcgcggcacgccgcgccggcgttcaggatcgtggcggtgcggaggagcccgagcaggaacctcgtcgtggcgacgcccctctcgacggggagcagcgcgacgatctcctccaggagcgccctctgctccacgtccgagagcacggtccccgacgcgccgccgccgccgacgtaaccggagtggcgggtcagaccggagaggtggcgcttggcgtagtgcgtcagcgagccggcgatgttctcggggctcatgcccttggacctcatcgccgtgatgagcctcttgtacaccggcagcttcagcgacgacgcctgcttgtaccaccagtccgggcccggcgacctcggcttgccggcggtggcgatgccgtccacatcaccgtcttctcgaggcccctcgccgtgtagtactccaccatcgggcaacccaagagggtcgggtcggcgcaagccttgctcgccagcgcgttgatgcaacgcggaacgacaggagctcctcgcgagcgggaggagcgcgccggtcgaacgaccgcagcgcgcgc

SEQ ID NO: 12831 - DNA, 1429 bp, Oryza sativa
ccaaagttattacttacaaaagatatgaagcccagtttcataccaatctccatcttcatccttccaagcagctatctgttcaaggcatttccccaaaaaaaaaaacaataatccacaaatgctactaacagtgaatatgagctattaagataaaggcaaccaaaaaaaaaagaatgaataccaaaaaaaattaaatgcaacataaaagcataagagtaaaacctttccacccaaaacatcccttgcctcaagcaatatgggtttatgaccagcatctgccagatattttgccgttgataaaccagctaatcctgaaaaaaaaatcaaagctaaaaactacaatgctaagaccacgatgtgactgctatcaaagttagatatatatgtaaattattcatctgtcaaatcctagaattatatcatacctgctccagcaatcacgacctgtaatggtttagtgggttgttcactgtttctgaaaaatgaagatagttgtccagcttccaaaaaggttattggttttctagtggagggcttggaaaggcctggcaaacaacctgcagaaaagccaatcaaatatattttcacaagagatggaatgtgaggcaataatagagtacaaaggttgaacctgtagagcaccgagcctccgacggaatctttttcctttattccttaagacaagagatttcactccaaagctcacatgctgactacttttcagtgcttggatgctgctacttgcgaagcacctatgagtaggaagttgtcccgcaaagatcttgcttggctggttccagttatgttcatagatgacaggcagccagtatccatgctgaagcaactcctaaaattatattcagatctgatttgacaaataagcacgcaagagcgtctgcaaaaacaagaggaaccattaaacacacaatacacaaaaccgtttgttatgaaagtcagccaagtatcactgtatcagtatgtaaatttatcaagtttgtcatcactatttgatgaaaaaaaaaaaacgagccaaagaaacagattctattctagtccagtcgtcaaatggaaacatagcatgacaataacaaactgatgccaaaaggaaaaaaagagcaggaccagctgttagttgttaaagctatgtggacagtggtaatattggtttactccctaatcttccgagtttctctatgtggctgcggccaatcaaacttttatagttggagagaaacatgaaaggaaaactgcatatgacccgcataatttggttagtgaagtaaatggattggaacagatcaagcatggcacaaaaagcatgaaaggctcaaatgatatcacactagggcagggcagctggagaggacctcgtttgcctcctcatgcaaaagtgggggttagcgcaaactgaactcacaaccatgcgccc

SEQ ID NO: 12832 - DNA, 1229 bp, Oryza sativa
ctacagactgagcacaaagcttcccagatagaactgcaccctccatcgaagccaaatatttctgctttgtgtagtcaccagctagatagaacccttcaatcggtgatctttgcagaggtcggcaaggttcacagtccgggatagtcttgtaaacagatctgtaacagtgagacagaaaagaaaggaacgtgagagaagtgtgcatccaactattagacctacctatgatatatcagatagggggcgctcttgcaaaatgtcctcaccttggtgtcttcacaacatgatacttcagatctttgctttactctgatcagcagcaatttcatcaggaaatagcttggctagctcttgcatagttgcttcgatgatttcagtgtcactccgtccaacccattcctctgcaggagcaaagaccaactccagcattgaacggtttggatcatagtattcctgtaaagagttcaaaacaaaaggaaagaaaaccgttcagtaggcatccatgtctttaatttcctgagctattatggtccataaaatctagactctagagccaagtgacatgttgcctaaatgaatctgaaataaaatatatctactttccaagtttaataattaatactggattccttctgtaacacatgcacttttgggccttttgttacagctactaaaataaatatcatgtgatgcttgaagatggtaaacccaagaacaaatacacaagagcaataatacatgacagatagttactatttcgtaacatataatgtctcctagttagtaccttgcaagttactgacatgtccgcataaacacttaaaagtgaactcctgaaagaaaagggaacaagatcaatacatgggacatatgatatttggtattaatcaagaatgtatacaaaatcaggatagaatgtgcccaatttgggcaatacaaatcgttttagttcataaaccagtcatagcacagagcaaatgcatgaggcagtgaaaggacagcaaaactgatgaggaattagaagagacacctgctgaaaagaaggtggtcatatgtgttcttcagttttctatcaaacctgaaatgttcaaaccaacagaaatactaatatgagtcataaggagaaccacaaactcgatgatgagtaatttccgacttggaaccaaataattcaaccaccaaccatatatgaacatttataacaggaactcccaccaacttctccagct

SEQ ID NO: 12833 - DNA, 1011 bp, Oryza sativa
tattgttcgttggagcatggcaagaattggtcaaaaattgctatgagcatttcagctttcttttttttttctttcttttcttttttgcgattttcctcttaagatgtcatgctatttactcttgtaaatctgaatccatgcattggtgtctatgggcacttcaaatttcaagtttgctaatgtgtttgtttggtgacatactgacatgcattatacagtgttgcaattaagcccggcgaaaacgtgtagtaattatttgctctttttcatgcagttactgtcctcaatacgctcttcactatcctgaattctccggggcagctcaaaggttggcaggcaagtggtgaagcccttgtggccaatcatggcagggtatcacgtgctcaggatcatcagttactgcaatgtgagcctcatcatgaagcaaagtagtttactacttactcgaccaccttcttttttacttcttacaatattttctttgtgtttgatgttgtagcaaattaccaagcttggggctctccggtaatttggcgtacaatatgaataccatgggttcattgattgagatgtgagtatctgagattattcatatctgatcctgtcaagtgacaattcagttgataacagtcttaattgattttttaatgcagcgatatgagccaaaacaaccttggtggtggccaacagatacagtacaatcttcccactaataagcttgagaggctgtaagttcctcaaatgaagttgtggtttagaaagtacatcagcttttctggtgtctgtgtgctaagtggttattgtttgcagcaatctcgcaggaaaccagttcactggaaatttaccctactcgattttctcgatgtctaatcttaagtatttgtgagtatctttgcaaacatcaagttgattttgcttttaaatttgtataatttggtagagctaaatgttttctctttgtatgtgcagaaatctaaatcataaccaattgcaaggaaatataactgatgt

SEQ ID NO: 12834 - DNA, 1376 bp, Oryza sativa
ttttaagcaacaatgagtttttcatctaactttagtcgtccattttatttaaaaatatttataattagtatttttattattatgagatgatgaaatatgaatagtacctgtgacttatgtttttaatcttttttttaatttttttaattaagacagatgatcaaaattaagcacggaaaatcatggtagaagcactcgatattcgattccttgggacttcatattggagaacacggacacaagggcagtttccgccagcaatagattacctggatatcaaagttgactttgctgacagagagcctcatcgagttagcttatcacaaaagtccctttcgtcgggtaaccacagttcgcatccacttgtatctatcctgacgtccttcagttcgcaggataccaatatcgtcaattatttgcgtctgcgatgtaaacacgaaaaaggctgtagatttagccgatttgtttggacgaagtcttgaaggaagtgttctctgcggctatatttatgcaactcgttcacagtttagtggtcatgttttcgtttgggctactatactttgtgctctagtcaagttaataaacttatccactactcatctactggctagttgaccaccttcacgtagggtttcgtcaaaccattatacttggtcagaatcagaaactgtagtactcggtatgtactatcaatctgtactactcaagtatttaagaaagcatccgtacttcacattgtaagaagaaaaatactatgatcttcagcagaagaacatacaagaggataagactaaattccctttcaataggctaaattcctaattaaaatggctgcatatatccggttggatataaaggccaggtaaaaaatatccttctctaaaaaaacacatatgagaggatgaactcctactatacttacaaggaggcaacagatgatcaaaaacgtttttcgttattccttagaaaaagaaaaaaaagaaaaaacgatttgaaatggctcaatgctaattgagtacttgtctaatctctagagagtactccgtatataggtttacaagagtagtcatcaccagaaaataacttttggagggaaactctattgtactaaccagttcgcgttcacactgcacgctactcaaaccattcaatccgaccatctctgctccatggttaccccgggaagctctcgttgcggctccgccttcttgccgatgatcggcttggccgtggttccgtccgccacgtcccgtagcacgattgcaccggctccgatctccgctccgtcgccaatgtgcacattgccgagcacgctcgccccggcgccgatcagcacaccgtccccgaccttggggtgccggtcgccggactccttc

SEQ ID NO: 12835 - DNA, 1226 bp, Oryza sativa
atcattctttgcattgttactgcattcgcgcgggctgaaatgctggatccaggggcttgcgggcaggcagtattttctcccgatccgtgagcaagcactggtccgatcaaaattgagtttctcccacaccccaccacggagaaccttgaatccgttgccagcatcattttgttcgtgattgtagagttgctcaacgaaaaaagcctccattgagcttatataatgcatgtgccgctcatctgtccaccctgacgacatcatgtccaggattcgattgccctgtcaaagaaaaagagacaaccattttatttttcagagttcaggtatttgttacaacgtcagataaaagagggcctgaactagtgaaattcatgtcaaaaatatcagagtagtgttgattgcatggcttaaagttatactccacgagcagagtaattatgtgtcttcactgccccatgggcggattatattactatttcgacaagacagacattttttgaacgattgcatgacaaattcagataaaccattaactgtacaagactaaccccttttactaaagaaaaagagctaatggcaataattcaaggaaccatgcattcggtatgacagaatcatgagcccaacaattgctacctgaaattaagaacaaaccccatggtaaaaagaaaaaactttctgttctaatacctgagcaatgccgcctgcagctggctccgccttgatcggtcgattgactgacacatcacccatttgattcttctcaatgaaccaaggaacccacaaggggaggaaaatccgaagaaattgccaaaaatcttctcgaaccgtatcagaaaccagcccaaaatttcctctcttgaaatatgtacagctacagagaagtagggggaggtctagggatctggaagcaaatcggcgaacaaaccaaagtaaatctcctcgcgaccggatgattacgaagagggaaaacaaaaaaaaacaaacaaacacggacaagatttcaacttcaagaaacaaacaagagaaacaaaaatcacacctctcgctcgatttcacccgcagatcgaacaacccgcctccctcgcagcgagaaagaagagagaacgcatccaagacttggtctgagcggctcgatctatggacagacaagaggagctgaagaagaggaggagagagagaagcaggagagagaggagaatggaattgcaacggaagaagcaaag

SEQ ID NO: 12836 - DNA, 3007 bp, Oryza sativa
  unsure (1)..(3007): unsure at all n locations
cggcatgccaaatccattgttcttaagcccgggagcttgtatagtttttatttttggggtgatgtctcttgtcataagaacagaaagaacagaaaaaagttaaagttctactaaggttgctccaaaacagcgtaatgtgatgaacctagtctctaacgcctttcttccattttccttttatacagaggtctctgatcagaattttgctgatgatgaggcggaggttgatgcagaatcaagcaaagcatgcaagagaaggaagttaagaagtgctcttacacggaattaccaagtaatttctcaggattttaattagcttattctgttgcaaatattgagatgaagacagcacactaaaaaaaaaatcagagtatcagtagcactgacatggtttgttctatatatgcaggttgttccatctgacaaactgtttgcttccacaaaagctgatggaaggaaagatgctccaaagtaaggcatgcaagagtggatctggttgaatatgcagtcaatgagaactggatgagttagtattggcgatttagtagtatagttcttgaactctgtagagtctgtcttggtagaagaataataggatcgatcactcacaacatggtagatttattgtttgatcatattgttgtaatggttttttttgtgtgtgttgctgtgttctggcaactgtttgtttgccatgtgagtaatatgtttatgtttgccacaagatgagaatgatgcaaagcccatcattccttttgccataattccattggacatacatgtactcccatcatgatattgagaatgaaagatcaccaattttgcagaatgatatccaacatctgtaaaatgaccatatataattgtgttcatggtgtgtaaagtgcaaattttgagaagtactgaattactgatgatacatgttcttacttccctgtgcaaaccaacattcagcgctgtgtacaggtatgatggtacgcatatttgccactcctggccaccgtcctcgcaagagtttaccaaagaccccgatgaggggaaaccaaagaggcaaagaggaggaaaaccggagaaagaaaacgagagttgagtggaggttcgctatgaagaggggggaaatcgccggtggcggcgagctcgtggtgctattcgtcacttgtagaagaggaggggaaggaactgctgcccgggaaggaagttagaggagaggaagacgaagaagaatggatgctgatatgtgggtctcgtatgaaacgagttacttcctccgtttcacaatgtaggtcattctagcatttttcacattcatatttatgtgaatgaatctagatagatatatatatctagactcattgatatcaatatgaatatggaaaatgctagaatgacttacattgtgaaacggagagagtatgttaggaaaccacatttaaaaatcgctagggagttgaattataatggttttacaggttgagatgttaaaatatgagctggttataagtggtattgttgttgaggaatatgaattagattgagcctataataaagggagtcaaatcggacttattcctttgtagaaagcccttgattgggctgatcccctgggtcggcccagcatggcgccttgaactagcaccttctttgtctttacgggcataagcttctagcagctacagtttctcacataatctccaactctcttaagggtgtgttcgctgctgatggataggaacatatcacctaagcacgaaaaatgaagcagtccattaccgcgtgattaattagatactccctccgtataggaaaaaaacgtcgttctagccataacctcgtttgcgattttaacgacattctgaaccgcagcaggctatgtggacggaataacccttgtctgttcgatagccgctcccgcaattaatccgcagcacgcccgcgcttgcctcgtttaattccttaagcgtagcatgcaggcatgcagcacgccgctgaaacctggctgtcacgctcgccgccgccgcatgcgtcgcgctcgccgggcctgctcttgtcgctctcgccgctgccgccgccgcttgcgtcccgctcgccggccgcgctcttgtcacgctcgccgccgtagctctcgtcgcaatcgccaccgccgcngcatgcattgtgctcgccggccccgatctcgtcgcttgcgtcgcgctcaccggccgtgctctctcacgctcgacgccgccgccgccgctcgcattgtgctcaagatgcttgacgagaagcgcgaacgtgagctcactcccaggaaggatgatgccaaagaaatggtaagataacacaacttaataatcgcattacaaggatgtctctattaattgagtgcggaacctaactagcttcattctaaatgttcaatgcagcaagagtagccttggttcatctaggaaagatggttgacaaactgatctgcaacaactcttgtatctttcttgcctagtttcccattcttgcttctagccaacaaagcttgataaacttgttttctcacttcttcggtcatgtctttccttccttcgatggtttacttcaacgagagccatgacatgttctagcaaaaggaagaaaatcaagttcattgatagtacaaatagccatggcatgttctagcaaaatctaattgtatcaaaaagaagttggcttaccagcaaggtgttgtacataatcgaaatcgactgcaccaaattcatttagtggcaagttcaaatcaaaaccagttaaaaaaaatggaaaacaatgatatgagaaacgatatagagaagaagagatagcacagttgccgtacaaacatgcccaagagaagaaaaatcctgtcaaacagagaagaaaagtaccattgccgtgctccaacggaggctcgttcagatcaaaggcaaactcgccatcgccatcttcggccatgtgtactgcaatagtgagaggaagctagctagaagcctagaactagaagatgagatggctcagtact

SEQ ID NO: 12837 - DNA, 548 bp, Oryza sativa
acctttccaccagtaaactgtgccctgtatacacgtccaaaagtaccttccccaacaaggttgtccatgctaaagctttctgttgccatctgtagatctgcaactgaataaacagttgcctttataggtgccacattggttttcttcaagacaggcttgtttgataaatcatcatcatcgaaagacttgtggcgttcaatcttggggggtggcttcagactaaatgaagcaggggatggcaaagactctacatctattgtagtagactcttcaataggcttcatgtctgcacattttcagaagcaaattttcagataattgtacaaaatatataacaaaactaaagtatgatgatcagcaggcatcaggcaaacagacctttaacttcgtttgaagggaacgaagtgaatggctggtgctgttcaaaatgttcttccaatgccgctctgcggtttcttcttcttatcacaaagaatgcaacgactgctccaactaccagcaatgatatgataatgcctgctacacctccaccacctatcccagagctt

SEQ ID NO: 12838 - DNA, 1523 bp, Oryza sativa
gattttaatagctgtgagatttgtagtttctgaaacagatttatcaaagagccaacgaagaagaatgccggaccatctttgagtttcttcaagtgacaacggaacttcaccagcatagagcaaactcagtgccactgctaatgattccttcatcctgctctgagcattctcattttctatcttttttgcgatactacgaagaagatgaagacccttctgtctgatcacaaattttgactcattacaccttatcatggataataggaaagttgatagtgacatttgagccaatgccatgtcaccattctcagcagcccgagaagctgtcaaaagaagacttgagcaccagtcagggacagaaggagccaaagtcaagctctggtcttccaaaagagctcgcgccaccatggctccatgccacttgacagttctttcaggtgctttcagtgcagttgtgacagtatgtccatcactgtcaagttcttgaatacgagaacggtttaaatcagatgcaatagcccaattagcaagagcccaagtagcaaaagggtacagctacatgctccctctgcaaatcatcccagaggcctggagcagcagcagaacttagcttctccactagtggagaatcagtagcagtttcttgcatcaatattctactattcgaagctccaacaataccatcatccgagtgcccacctccaatgagtttatttctctagagaatcccaagacagtagtcccaccaagtaccttaatccctattccttttaatccactgtcaccatcatcactgttattatcatcatggtcatcaaaatgcatccccccttgctcaatgacttcgatggctgccgcaatatctcttgtatcagcatctgaaggcaataaaggctgaaatgatgaataatccgcattatcgcagttggaagtgatgatgtccataagtgcagcaacaagcatgctccttcctttagaatggtctgagacattgaatgaagagtattccgagttctgtattaacaggagggcaatatattaggtacaaacaactcatattgtgttaaagtccaaggaaaccagaactggaaaatctaaatggtttaatagacctacattgctagattaagatgcgcatgaaacataatactacatgtataggggaaaaaaagaagagataagctgaagaaaaagcactgccagcaagcaaaaaaagaaattgcctataggagagctgagatcaccaagccatcaaggaaaataaattatatttaccaactccaaggtcttgataatccattagacataactgcattattgcataactggcatgcaggtgcataacataactcattcccccatgagatcttttatcttaacatcaatagcatatattaagagtttgcaatctgaaaacctgaagggccaaaggttccatgctcacaaagacatgggatgaaaacataaaaatgccagaaacctcagagcacacgaggatgcaaattttgttttccacctataat

SEQ ID NO: 12839 - DNA, 3249 bp, Oryza sativa
attgctaggtgcaaattgttctgctagctcaacacaacgagatgcaatttctgtcttgtaatggtgatcagtgatgttaatcatatactcaatcattcgatcaacaatcacttcaacatttgttgattttgtcatcttgtaaagaagctcgaaggtcttgcgtttcaaagtgtcatcaggatcctgttcaaaagaaaccgcactgagtgagaaacaagaagggctagtgtgaaaagtataacacatccaactaaagatgatgacacagtgacatgcatctactgaggtagcaaattaaaaccacaaaactgatgccataagaacagaacaagccagcaactaggtcagcgatattgtatcaaacaacacaatataatcttctgaaaattataagtgcttcttcagctaacataattttggtctttctgcagggaaacgtgaaatgaattacaaatcagcattcttcgtaaaattaatttctgcaactatagcatgatttcagtaaaaaagtcttagcttcattctcttgcagcatgcaacaggaatatacgcatggaagcaacatactaaaaacccaatattttccatgaacacgcaagagctgaattttgctatattcctcacctctaagcaatcaataacagccagctggtgctcttctgcgatatctggatttattttaattaaccggccaagagcatcaatgcccatgtacttaagattatggctatcactctgcaaacataaaagagttaatgaagcaggttaatttcctatggacacaacatcatgaaaatcacttatgtctcacataagaactttgtgtgcaccttcagaaactttgatgttgtttcagctgcagcatcaagcatcttagcgttcgggaatatggatgaaatacagcatatgcactcatacaatattgcattgccaatgttgcttgcagtgtcacccttcctgaatatgtcacccaagaccatgtacatatttccacttgcctgcttatcaccgctacccagcaccgcaagtattttcaatagtttaatctgcaaataagaacagtaaaatctaatgacataagatggtgccaattgaagactccaaacataggaagttgaagctcaatagagttcacatacctgaataaatggtgcaggcatttggtggtaatcataggaagttggaagcctcctctctgcaacttgtttgaggatgttaacaaaactaacaaccaaatccttgtacgaatttggatcttccaaaatcaggtcatagagggggcataaagttgcacccatgaccccaggatcattatcacagagcctctgcaaaataatagcgatcaacactaagcatctctctgagaaacaaatatgtgcttcactaacagttgggaaaccccacaggctacagttgctggaaatcccaattgaggctcaaggtagatacgaagacacaatttaagacaataaacactggtattctaacatggaaacacaaacaaatagtaaacaaatttgcatctttggtgttaatcgaatccataactcttgtagacagaacctaagactagctaacttatcttaaattggcatgaacaaaacaaagcaaaagtcacatttctaggttaaataagtggctaaaaatgtaattggagaaaacagctagctgcatcatatgcaattacagacatatatacaaattaaacacagaaatgtgaaccatagtaggactgatagaatgattgtagccgagtgtgcatttcagaattgagacaatatatgactgaggacgacttattctacgttcatttcagttgggaaacgaaatgggagggatttagtttggaccttgcggaagttggagacaaggtgagagacggatgagggggatcgctggtagaatcggtggagcgccatgacggccttcttccgcacggcctccttgggatgcgcgagcagctcgacgacctggggcagcacggccgggatggcctcctccccgatgaggcggcaggcggcggtgagcgcggcgcagacgacgaggtagttgtcggacctgaggtccttctgtatggtgttgacgacgaggatgacgaggtcgtggcgctcgtcgaggaagagggagacggcgaggtagcccgtgcgcttgagcgggagggactcgtcgtgggtcatcttgacggcgtggatgtggccgaaggaggcgtcgtggccgagcatctcggcgtagacgaggcggaggaggagctccttcatcttccggcggggcacgtcggggtcggcgaggcggcgcttgaggtgatccagctcccgcgagatgatccggtcctcctccgccttggaccgcgcctcgccgatggacttgacaaggtcgaggaactccttcgactgcccccaccctccctgcgaccccatcgccagctcccgcccgatcgtccgcagctgctccattgcgcccctcttcgcccgcccgttgcccgggggcgtcccccgccggtttgctcggggaggccgaggtgatgtggggccgatccgccgccggcgacggcgacggcgagtgggttggtggcggcgcggcgaggcgaggcggtggagatctggatccggcgaggcgaggcgaggcaaggtgggtttcgggctttcggtgtagggaaggaagggggagatcgggatcgggattagtgaggaggaggaggtctagtctagttctcgtttttctttttttttccttttttttctctcgttttactacctactccctctataaagaaaatctcatttctgagtatgaatgtgaatgtagcgtatattcacatctatagttagaaatggggttttttaacggataaaatactctaaaagtaatcattttagagttttgtgaaagtaaaatataattacatttagagtaaataaagtgagaataattatatttggatctgataaaataacagtactctatttttttttattgatgtgtcgaatggataaaaaataaatttattttaaaacggagggagcaccagttgttttgctttgcaagggaggtcttgtactgtagtgtaatcttcacccttccataggtgtccttttgtttgatggagaattttgtaactttgttccagagtttttggtttcatgttaaatttgtgcgtttcgcattgcagtttgggttttatcttttttttaaggaaggcagcaatgcgtaataaagtttaagtaaaagtgttaaaatgcatttcggata

SEQ ID NO: 12840 - DNA, 629 bp, Oryza sativa
tactccaatgtctgcgcgcggttgaaaatacgaattcgttcatttgcatcgaactcgggggctgctgtcatggttatggataccacatacctaatagtagttgactaaatctcggcaggacccaccacataccatgtcctatacgaaaaccgacttcagatatggagggagttccgaataaggaaagacaactagagttttacatggaaacgacaaggactactcagattgtatccatattggtttccctagttctacttggacaaggggacacctatgggtataaatacaagcctccctaggaggacaggggggacacccaccatgagacgatcaacacgatcaccacgatcgggacgaccacctcatcaacgcccaacacaatcaacatacaagcctacatacgccaagacacgctgccagatatcgactttagggataggcatggctattcccctacggtatctccggataccggcaggagatacgaaagcgctatctctgatctcgccggcaccgattcgaggaggaagtctaccctgttggtgaaaacgagtcagactttcagtccaacatgttgataacagttagataggctgcccacatattgtactggtgtgattatggtg

SEQ ID NO: 12841 - DNA, 642 bp, Oryza sativa
aactattttcagtttaatttgttatttttgttgtaacatgtagaagttgaatttgattttgcatgttgtcgatgggtgataccccgtaggccggatatagaggttattggggtacgctggtacaaggatctatgtaatacgacatcaagcagacaaaagacaaagattatactggttcaggctccttgataggtaatagccctaatccagttgatgtgggattatatgatggaaaacacaggttacaaagggaacaatggaaatcgacggatccggcgagatcatagtcgagttggttcgactagatccctagcggtttggctccttgtaggctccgacttcatatgctgtgagggttgtgttggctctgagattcgatgcctcaggccctccccggggggtcccttttatatcacaggttaggcggtttccaagtagaactcggaaacatcgaactttacacgatacattgatgacccagtcttgtccgagtatgactccttccatttgtaaactccgtgaggggtttccttaatatatgcggagagtatcagaataggagtgggtatcccataccgatatgagacgtatatcaaagggtaaagggtatacctaacccgtaaccctgacacatgtttgtgg

SEQ ID NO: 12842 - DNA, 518 bp, Oryza sativa
aaatattgccaagaattgatgacctgtttgatcagctaaaaggagctaaggtgttttccaagatagacctacgatcaggctatcatcagttgagaattcgggaagaggatattcccaagacagccttcaccactcggtatgggttgtttgagtgcacggttatgtcctttggactcaccaatgcaccggctttcttcatgaacttgatgaacaaagtgtttatggagtttcttgacaagtttgtcgtggtattcattgacgacatacttatttattcaaaatcagaagaggaacatgagcagcatctccgcctggtactcgagatattgaaggagcaccaactatatgccaagtttagcaagtgtgacttctggttatcggaggtcaaatttctgggtcacatcatttctgctcaaggcgtggcagtggatccatcaaatgtggagtcagttacaaagtggaccccaccaaagacagtttctcagatccggagttttcttggacttgcgggctattac

SEQ ID NO: 12843 - DNA, 723 bp, Oryza sativa
cggtgagcacgatgtcggcggcgcccctcgcggcgtccgtcgcgtcggagacggcgatgccgatgtcggccttcttcagcgccggcgcgtcgttcacgccgtcgccggtcatcccgcacacgtggccgccccccccttgaatcatcctcacgatctcgtacttgtgctccgggaacacgccggcgaacccgtccgccttctccacgagctcctccaccggaacagccgcgccgccgccgtcgccgtggcggccgaacagcgacgccgacgggtacatgttggtgcccatcccaagacggcgggcggtcttcttcgcgatggccaggtgatcgcctgcaatgatcaagaagcttcttggcgttgctccattgacgatcaagaagcagtacgatcatcgcgtgattataccggtgatcatcttcacgcagacgccaagatcaagcgctcggcggatggtgtcggcgctgtcgtgccgcggcgggtcgaacagcggcaggaggccgcagaacacccatggtccgcccatggccgtgcttcgatttccctggcacctccttcactcaagccatcagatcagatgaactcaaccatcagacagatattcattagcaacaagtaaactgaactgaactgaacttgatggtgctacgactacctggtaagcgacggcgagtgaacggaggcctctctctgcaaatctgtcgatgattagctgcacctttt

SEQ ID NO: 12844 - DNA, 695 bp, Oryza sativa
aatcccttcctgtcacaaaaagaacaggggacatagtgttcactggctcaacatgcaagcatggggagattgaagctgttgtcattgcaactgggatacactctttctttggcaaggcagctcatctagtggattccactgagggtgttgggcattttcagaaggtgattcatcgatcttcaaactgtaataagaatctcacaagtggatgtgctgtaagctatttctgactactgaattttcaggttcttacctccatagccaacttctgtatctgttcaatcgccatcggtgcgattgttgaggttataatcatgttcccaatccagcaccggtcataccgggatgggatcaacaatgttcttgttcttctgatcggagggataccgatcgcaatgcctactgttctgtcagtcccacttgcaataggttctcatcacctgtctcaacaggtgtgccaagatattgttatcatgtttctgcaattaacagacagcatatcacatatcattgttacaaaaatacggtagtaatttgccgaaaagcgatggcggaggaagccatgctttgaaagtcggcaaatgcagggggtcccttccgttacctcttgcaggtcgtggtaggcaaatctagcacgagatatccccattagatccccagcttccaataccggtcccgtgcttgtttttcttttc

SEQ ID NO: 12845 - DNA, 764 bp, Oryza sativa
cctgaaagatagccatgaccagaagaaatttaaactgttgtgattcttgcagttaattgaacggtttaattggcgcctacctggttacataggagatgggtatgatagggaatcgttttgccatgttgacgacgttgttaatgggcacatagcagcaatggagaagggcagaccgggggaaagatatctccttactggagaaaacttatcattcaaacagattttcgatatggctgctaacattacaaatacgaaggcacccctattccatgtacctctctggttgattgaaatatatgggtggatttcagtttttatttctcacatcactggaaatctcccacttatcagttaccctgtatgtccagtattcttccttatttaagtttaccatctccagataggtcatgctgttgtgcttactagattctcaatgtggattgcagacagtacgtgttcttagacatcaatgggcatattcatgtgataaagccaagagggagctgggctacagtccaagaaacttaactgaaggtctatcagagatgctcttatggctcaaggatgaaaaattgatcaagttttagcactcaccccttgtgctaacttgtgctgcattccacaccatgtaaactgagatctgatttaaacctattaactgtaagatgtacatgtttggtgtggtgttaatgttgtatcatatcagtaataacttgagatgtaacatggtagtactggttccatggaagaaaggaaaaacatgt

SEQ ID NO: 12846 - DNA, 1793 bp, Oryza sativa
aatttttttgccaaaacaactaaacacggtctttgagacctgataataacccccatatggcacagcaaactgcatgcgtgctgacgtgccggtgggggcggaccggggccggggacaatttttaacccgcgggtcgatcgggtcggggccctgaacataaccggggccggggcggggatgaaagctgacccgcaggtgaccctatgaggccccaaaagtctatgtctatgttaatatggcccgttactccataggcccaaacggatgaaaggatgtacacatataaggaaacctatgccttatgatttaaaatcaatcatatgccttatcatcaatcaatcttatacatcgatacatgctcaatggtgcatatccagcgaaatcccctcgctcatccgcgtcgttgtgcgccacccgcgccgtagccaacctcccgtccactcccctcgctcgctcggctgcgtcgttgtgtggcctcctcaccacaacacgacacggcgtcggtctccctcccgctcgcctcgtcgctggtccccctcatcatcgtgttgtctcgtcgccggccgcgcgcctcgtcggcatgctgcctcgcggccgcaccgcatcgtctccgcactgccatcgttggtcgttgattcgtcgctacctagtcagtcgttggctcgtcgccgtgctgtctcgttgccattggcggatccagaaaatcgtttcgttggtgtcataacgtgtctattattaatgtcatagtatactaattatatttaaatcatggtgtcataatatatggataagcagtttcttcgttacaagttttgccccattcctccctccagggctagggccaggtgaacctgcacatgagcagggcgtgtgcgcaccagcaacttactccatccgtcccaaaaaaccaaaaaaataaacataagaaaattgtattaggattttataaaataaagaaaattttatttgttttatttgtgtgtgtgtgtgtatatatatatatatatatatatatatatatatatatatatatatatatatgtcggtgacatgggaccgggagtatcatgacttagagacttgaggcagacacgatcacccacgtggcctaaccccctcgggggggggggggggtcgggcccgagggtgatatggccgcccttctctttgtctccccgaggggtcggaccgctcccgtctcggccccgagggctagggcgccccgaccccttgtggattttgcgccgcgtgtatgggttaggtgagcgcagcggcactcacctaatcgcatttattgcggtttggacgagcgcgtcacgccgcatgtagcgcagtgcagcgcgctcgttcatccggtctgtgatcagtcacagaccggtcaaatcgtgggttaggtggcgacaggcggtctgacgcacgcctcgccccatcccgtcaggacgagagcctccaagcacttgtccctagccggagccggcgtgttagctcctggagatggcacgttggtcccggtcagatatataccaggcttcatcctaaccattacaagcaagacattgtatgaagaggggcgagcatgcagattgttaaactgacacgtggtgtacaagaatgaccgatttgagaccggtctgacaatggtcatgtcgtcagcagacagccatgttcccacgtcgcgcctgcttccggcggaagtggaggtaggtatgggccgtcccatcagaaggtcattcggatggcagccatacaaatctccgtccatcaatgaagagaagtcaattggagggaagaga

SEQ ID NO: 12847 - DNA, 1086 bp, Oryza sativa
  unsure (1)..(1086): unsure at all n locations
gcatgttgttcaagcagtttgatttctgtaacacctgcgtcgtttcctttttaatgctgctatctgctaatcatttgttttttggaatgtgaaaaatttcagatgagccttggcctgaggctatggtcgtatgtccgagaggaggcttctcatggaagggtaccatcggctgttcttatgctatttatatttcattacttaatggaatttccttttatctaaaattataccaaacatctatgaatataaattgtgtgtggtgataaaatggggtctgctatgcttgcagaaagctccaattgatccgtttaccaaagagaaatgtaagccgtctgcttcgcagggcgtaccgcttggtgggatggggtgtgtccgcctgaattgatgttttaacctccaataatctcatgtttatgcttgtctatttgcactatggatgctgtaattttgataccaatacactggttttgcaggagtggtagcatttcaagaggtttcaggggagagttcaagaattggcatatcattcctggtttatgtgagacttccccggtcatggagaaccagttttcagtaatgctttcttcttctttctgctgttgctggttaatcaacttggtttatggtgatgcataattgaattttggaccattagctagcttatctgaaggattttcttctgactgctgaaaatgctcctagcccctcactagtcactagtattatttttggggaaagtcttatgacatctacccttcactggtgtctcacatactcatattatggcaattcactaaatatgcgtcanaaagaatcttttaagtgctatctttgttgtgccggctgtgctcaagtgtgaaatcaactgttgagtggagtgtttttggggacctttgttgagataaaaaggcacgactgtttccactgtttaatgtttgtggagggacgagttccatctgctgcctgggaccctttttgatgagtgtggtaatcagtaagcaagttcttggtcaattcgccagttattacccacttatttttcctatcgatgtatataaacttccatggatgtgggacacccaatca

SEQ ID NO: 12848 - DNA, 976 bp, Oryza sativa
ccgtgatcaaggacattgcacaagttcatggatactcgaatgactctagttacatatactattcccagagtctcaagatctttgagggcagcgcgagtattcgagaaagccgtgatgcagaaaggagtgtggcagattctgataaagttgacgatgcatcaatagagagcagaaacgttgatcgagatgcagaaatcgatggcttcttcagctcaaaattagtggagacaggaactgccaggagtgaagacaatgtaccggataggaatatggagaggttcatgacaagatccactggccgccgattgcataagctggaagaagtccccgaaggagatgaggatgaggaagaggaaggtgcagatccagtagttctgattcctgatgatacaactaaatctgacaccgtactggagaaacttcatcctgttgttactcatgatcataatgataaagcgggatccaagatgaaaagggatcctcctgcaaaaactgctccaggtacttctgttattcaatctgctgccacaatgtgtcataagttggtccgagaagggtctcaagcaatcagcattactgaaactgatcaagatctgagcctcgattcatttcgaagcaaagaacatgcatctagtaagcagaaagttgacacatctggttctgtcatagaaaaagtaaaggaaggaagatataaatctgcaaatatcaatgaccgtaagcacattgagagagttcatgactctgcaaataagatgtcaactacttctgtggagaaaagcattcccgaaacagtcaaacctatgaaagcaacaaagaataattctaaagcaacagactatcatggaactgagaataagtcacctgatagtttggcttgttccaggccaacaataagccagatagaaaaggatgtttctgatgctgataaggctgcaaatcatccatccagcgcgatcacagagaatcgtctacccaa

SEQ ID NO: 12849 - DNA, 912 bp, Oryza sativa
tcttgaacttgtcccagacaaggatcaaggcgcttccagaaaccatttgcaatctgtggagcctaaaattcttgttgctaagagagtgcaaggcattgcatgtgttgccaaaagggatagagcatctgaaggggctcagagaccttgatcttacaggtactgtgatcaaagacgcggcattcagagtaggccatctcagaaacctcacatcattccgatgcttctccgtgacgagcaaagaggcgcgtaccgtacaggataccgcacaggataggagtgggtggcctctggatgagctcaagaacttgtgtcagctaaggacactccatgttaagaggcttgagaaggccactagtcagtccaaggcagctgaagtagctcttcatgccaagacaggactcagagagcttgaactgtcgtgcagcggcaccgtcaagacattacagataccgacagtggtccgaaatatagaggatatcttccaagagctgaaaccgccacgaggcctcgagtcgctgaagattgcaaactactttgggacaaagttcccgacatggctgtcatcgacctgcctgccaaatctcctccgactgaatataaccggatgcaatttctgccaatcttttcctctattaggtcgtctgccagagttgagatctttgtgcattgccgattcttcagcgctgaaggatatcgatgctcagcttatggacacagacaactcccatcaggtaccatttccaaagctggaagacctgcacctgcaaggtttgcataatctggagacgtggacgagcattgaggcaggggcgttgccatctctgcaggctctgcagcttgaaagctgccccaagctgagatgcttaccagatggcctcaggcatgtgacatccatgactgagctgcgcattg

SEQ ID NO: 12850 - DNA, 2273 bp, Oryza sativa
tcgtgaggtatttgtggctacatacgtataataaatcgatcgatcagttccccgaatgtggacgtgcgcaataacgaacatgtaaccgtttctttttcgggacttgtcaatgtcagtcgagcaatgcattataacctcgcccccaattatcacttgtagtccccggacagagagaaacagccgcacatcaacgtcgcttcttctgtccgttcctccgtgccatttctgagtggattgcaattttacgtatgttcttcactcaagtacagtgtaatatagaacaaattgaaaagagagaaaaaagaaataaagggctaagacgctgaaatgtagtggcccgtgtcctctggcgctgacgaggggcgcaaaaaccgggagagctcagccaggagataaaccaaaaaaaagctacaattatactactgtgcgagatacttatttaaattcacgaccaacgtttaatcattcgttttatttaaattttttgtacaaatatgaaaatatttatgtcatgtttaaagaacatttgatgataaattaagtcataataaaataaatgataattacataaatttttttaataagataaatggtcaaacatagaataaaaaattaagggcgacatatattaaaatatggagatagtaataaagaagaaaaggactcgtcgtcgtcgttgtcgacggtgcacgcgatggacctggacgccaccacaccaccactcgtcccgtcatctgctgtgtggacgagacgacgcagatgccactacgccccccaaaagaaaaaaaaaagaagcactcgcttttgtgagagggtactccgcgcgcgcgtacgtgacgacgtcgtttttccggcggcgcggcgctcgcggggtcggcgcgccgacgaagagacgtcacggcacggcgcgtcgcgcgacacgacacgactcacgagcgtctcggtgtgcgggtagttttttttcctctctccctctggagagatcgcggtgtgaaacctggtcggcactgggcgagcggggtggccacgcggtgcgagggaaactcacggcgttttttttacccacaagcggaggggatccactaattgggtgcttgtgtgtgctagttgtgtgacgaagaaaatggagttttccattaaaaaaagaaaatggagttgttaacttaacccttctttcaacagaaagtccatataaattttgatttattaaatatatttcgtgatttatgttacatgtactttttattcaactccaacaactttcttttttttccacatacataataggcaaaatttgctacaggacattcaaaatttatgtaattggctggaggacaccgtaagatcgtgtcattgccgagagacaccaaaaaatagtgtaattggctataggaatattattttataattttcgagtaaaaaggggagagagaaattaaaaagaaatacaagtttgcccctgccttggcctgagcatcagttgattttcgagtaaaaagggactttctgcttctgctcgaaaaaacaaagcgctggtttagtgatccgcacgtattcaaccaacaaaagatgatcaaataccaatcaatacaatgtaaaaaaacgcgtggacatacgtgatgtaccaggttggccgtgctgtgtggatgaacaaatacaaatcaatactggagcttcttgcggatgctaccatagtcgttgccgtccggctcgcctgaccgtccgccgacgacaccatctcaccgttgatctcctccacacactcccacttcaccgccacgccgacggacagctatataatgacgcaatgcgtagggccacggtcaccgtcgcagctgcatctgccgcgtttgtcaagcatgctcaggatcagcgatggctccagcgcagcaatacggccaccacagtgtgccgtcgcgttggtctcctccaccgctgccgagggacaggcccagcgccggaccgttactctagtggctgacgtccacctgtgcgggccgcccatcgcagcaggtcactgctttgcttgcactgccactcgccaccgttgaagctgccgtcgcctcctcatagccatggggagaaagggtaatcaggggtaaacttgtctttttaaaaaattctctctctactttgccttgaaaattataaaataatgtgttcggcgtcctgtagccaattacaccgttttttgatgtcctttagcagtcacacaattttacggtctcctatgaccaattacacaaattttagatgccatgtagcaaattttg

SEQ ID NO: 12851 - DNA, 677 bp, Oryza sativa
tcaccagttgcattgtttgatcagagactattttcagctatcttgaggaatgatgtggggtggtttgatcaagaggagaacaattcaagcctcgtggcggcacgcctttccacagacgcagccgatgtgaagtcggccatagcggaacggatatcagtcatcctgcagaacatgacctcacttctcgtgtccttcgttgtgggcttcatcatcgaatggcgggtggccgtcctcattcttgtcaccttccctctccttgtccttgccaactttgcccaggtaaaacaactctcaactcacaatattttcgttaacatggaggtgtcattctattatgtgccttttacgttctaacctggattagacaacgtgctaggaatctttggtggaataggagaattaccctttcacattaaaccgaatagtactttgcacgacgaactcactgagctcactgcaccgttgcgacgccgttttcggcgcagacaaccgtttgctgctcaattactccctccggagataggatgccagattaaatccatcagcattgctatggtaggatccgtggcccatgccactgccactgcttctgccgccgcagctgccataaattactgtgcgcggcatgtgcaaccctgccaagatgctccttggcctcctctctgcaaaggcaaagc

SEQ ID NO: 12852 - DNA, 2305 bp, Oryza sativa
acgtgaaaacacacccctagaatggcgatgaggacgaagctgatgtggagtttgatggcgacggagccatcgccgtcaagcacgcaaacttatctagctgcgactcctgatgttcctggccgtgatcgagctcctgcgttcttgcttaatttgagtggtcggatcggctactgagctggtgcggcggcggcggctaatcggcgcatgaggatcgcggtgacgggcgcgacggggtacctcggcagccgcctgtgcggtgcgctggccgacgccggccacgccgtgcgcgcgttcgcgctccgctcggcgggcggcggcggcggcggcggcgacgtcgaggccggcctgctcccggcgtccgtcgagctggcgtacggcgacgtcgccgacgtggagtccctcgccgccgccttcgacaggtgcgacgccgtcttccacgtcgccgccgccgtcgaggcgtggctgcccgatccctccatcttcatcacggtacgtgtacaatcttttaaaaagaaaagaggattttaaaaagaaactcgcgaaagttttcaagcaattccgaaaaatatatgctctataaaattgatttggtcatttggtgttaaaaaaatgggcatttaatcatatcctcggacgtgttatgattatcaggtcaatgtgggagggctcgagaatgttttgaaagctgccaggaggacaccaacagtaaagaaaatagtttatacgtcatcattctttgccattggcccaactgatggatatgttgcagatgagacacaggtaccatatttatattggagttctccttaattagctccctcagttttcaaatccttcggtctagaaaatctgccatttcttgtgtgagatgtccagactgagcatgctaaaaaaaattgtgcaaaatatgatgatatgtatacttcaaattcctttcgtgaaagaaaaacatttttgcagagtaacaataagttgctgatattgcagatgcatcaaaggaaaaacattttggcacggaggtatgagaaatcaaaggttctttgcagaccagatcgcattgcaggcagcagcagaggggatgccaatcaccatcgtctatccaggattcatgtatgtcctggaaaacttacagcaggaaatcttgtttctcgcatcgtaagacaatttctctactcctagttattcatcctgcatatatggtatatctgaatgacccaaaaaaaaagaacttgttcctgaaataattaacagccatgaatcatgatcagaaacttgaacatcactggctcttaatttgcagttgatcgagaggttcaatgggcgtttacctggttacgtcgggcatggccatgatcgagaatcattctgccatgtcgacgatgttgttgctggacatgtagcagcaatggagaaaggcagagaaggtgaaagatacctcctcaccggagagaacacgtcgctggttcagatcttcgacatggcctccaggatcacgaacacaaaggcgcccagattccacgtacccctctggttcctgaaatttacgggtggatttcagttcttgtttcaagaatcaccgggaagctcccgttcatcagctaccctgtatgtctctttctgtgctccttttatttccagtacttacttaggttcagagtttgtttttgcagggtctagttagattcagagtttgcacattggtgatgatgatgatgtattgatgtggttacttagatttcagttcttgttgggttttgcaggcagtgcgtgttcttaggcatcaatgggcatactcatgtgagaaggccaagaaggagctagggtacagtcctaggagcttgactgaaggtctatcagagacgctcttatggctcaaggacagcgaaatgatcagattttagtgttctacatttcactcatgtaaacatatcagcattgctgtaactgcataaatagttaaatcaaagaaaacatgtggtttgaaatttgaagatgaatgcgtgcaccaaacagggccaaatttcttcttagatggtcaaatttgttcctgctgatcactgatcagacttgagactcgagaggcaaaagcagatcatatttgggcccggcccacaagtgacttgggcccgcttgcttgtgggttgactaggggtactactggacaggctggtggctggcctcgccggaaggcttggaagcccgcgttgactagtggcggtggattggcggcggcggcggcgactcgacgatgggcggcggcatgagggtggtggtgacgggcgcgacggggtacctcggcggccgc

SEQ ID NO: 12853 - DNA, 1787 bp, Oryza sativa
gagactcatttccatcatactaacttttctgaatttggaaaggcattttgagggcaatcagttaagtggaccaatcagcccatcgctgggaacactcaccaatctcaaggagctgtaagtatcctaaccctctttttgttgcatgtccaaacagctgataactcttagtacttgcctcatgcatttgctcctgcgaaagacagatacctgaacaacaacaatctcacggccagataccagagagcctgaaaaacaaacctgaacttgacatgaggtatgattggggaacaaagtcttcacattttggatccattttatatgctgatggtattgcttttgcataaaaaaaaaatatatatatatatatatacaggactgaggggaacaaacttaattgaggctggaaaggaaggaatatctgagatgatcatttccaatctaatgttacatttatgtacagaaagatacagtttgatggatgaagggagaagagcgaaggcttcaaaaactgtaggatgatattcatgtttaatgctgtatgtgagttgaaagattgatgtgatatttagcatcatccttttgatccattttgtgttattagtatttgttgtacatgctgcattagatggcattagtgtaggataattgttaggtcaaagaagcagttcataatctaaccaatctaaacgccaaaagttgtaccatgttccatcaaaacttaattaggacagaaacatgcagtagccagacacataaacagcagatactccaaatctgtcagctaataaactcccgagtgtcgaattggcagtaattgtggacacaccaattacaaacaacataagagtggcaaattgttccttctcccaacatagatatgggctacatgatagatgctctgcaaactagcagagtaacagattaagtgcctaatggtaatactaacagatgaggcctaaacctacccaaaatgcaatttttcgtctgccgatgtgttagtagtgccgtctttgttgatgtcacttggttacctcatttccatcatcaacagtagctcggataatatgcacctggacaaaaatcaattttcaaggattattcacattattcatatataaaacatgcttaagttacaggtacaaatttattcagacatattgttcagttcagtaaaaattaataccttgaaggttgtaggcttgaccaactgaaatactgtcgcatctccatccaacaatccatggtccaaagcaaagccagcccagccaccacttaggccattcttgtaggcaaggtaattggtatcaaattgctcgtctttctcatccaacaaagtgacaatggcatcatgttttggcaggtaagtctcgcagaaatgcctcggtaagcccttttgatcatgccaccaaacaagtattagtaccacatgacaacagttccccttaaagaagggttgcagggatgggaatgtgatagtgcagtactcaccaaccaaaatcctcggaccacatgtgaatgtagcattggcttcacgaaggagggaaattcagggtcaagttgtgattccagttcctctgcttttcttgctgcctcgagcctagcttccatggaaattgatccacgggttgccaagtagatactgtcaattgcttttcgtggagacctgcagaagaaatcggacaacgggatgtagttttgcaccttttgctacttagtgggaggcaatacaggttcatacgctcatgtggtaatgttattgttatcacataatgacataccttttcatc

SEQ ID NO: 12854 - DNA, 1417 bp, Oryza sativa
atagatctactaagccctcggtgaataattcaatcacaagtaaataattgagtaaaatgaagtcacctttttattgtcaaagttttactttggatcacacttaaaccaatcttttcattttagaccggataactttgcctatagtatttggcttggatcaccccactctctttactattcatgtatagatatgagcagcatataaaaggggaagttcaccattataccgaaaccgatttgattgaggttatttatgggtgtttgaagaagttaaggatgatccaaacttaaaaaaaattgataaaattttctgatcatccaaactaaaaaatatacaaaactatctgattctaaagtgaaagattgatttgagggtggtccaaagtaaaacttaggcccaaatcacaatccactcgcaataatttgatccagtgatcacttgggcctcatttctctcatgggccgtgaaagaggtttcaaggcccatgacgcacacctaagattgaccagttcaactaacgtttgctaaatttaagcggaagccgttgaaaagccaaggaagcaaaaaccacccgtttgtggcgcgcggtgatccataaacagtaggggcctcccttcgggagccccctttcctcgcgtcgtccccttcgcggagcctccccttcgggggcgcgctccattgttttttcccttccaacccaatcctattatgacattacgatgcctatccccattgctttctttttcttcttccccttcttcttggcggcttcttcccatgcaacggcttcttcccatgccacggcttcggtggtcccacaaactcgaggtaattcatggtactcccttcattttatattataataaattttatcttttttattaaataatccattttggtaaacttataaaagaatataaaaatattttctacaaaacaaacatatataatcatagtatatctaatggtggtggtgttgtatatgttgctaattgtttatgtaaacttgattatatctaactgatcagaaaaaaaagtttaagccactaattatatcacaaacacggagtaattgattcttgcatgcaagaaatgggacgtgtaatggtgggtgatcgaaatgttattatagggttctatataaactgtggatcggagaaggaggagcagatagggagcatcaagtggatacaggatgaggggttcatcgccgtcggcaacatgtccgccgtcgacaagccgaacatcctgccgctgctcgccaccgtgcgctacttccccgacgcgacggcgaggaagtactgctaccagctccccgtcgtcaaggggtcgcggtacctcgtccggaagaccctacttttacgccgggttggacggcgccgaggttccgccggtgttcgaccagatcgtcgacgg

SEQ ID NO: 12855 - DNA, 643 bp, Oryza sativa
ccatgctgaaagaaaattatggaatcacaagctgctatatgtacctatgaattgaatccttagttttttttttgttcaactcattgattgttcttacttcttcttccccctccctgtaaatataatgttcatcctaatcatcaacagagctgcagcaaatggcgataaaattaattaactaaccgatcgcttaattaatccatgcacgcaagcaagcacatgcaatatcgattgattatattggttcttgagagatcgatcgaggaattaattggggaatttgatggatcgatcacaagttcatcatgtccttgacgaagccgtacttctccatgaaggggttggcgagctccttgggagggtagtggtcgatgcagtccttccagacgccggcgtcggagacgggcttctcgacggtccagacgcagctgttgcacttgaagccggcgccgaaggtgagcatgaggacgcggtcgccggggcggaggcggcgcttggcctccatgtagccgagcacgtaccagacgctgctcgccgacgtgttcccgaacctgtgcagcgtcatccgcgacggctcgaggtcgtgctccgtcagggtgagccccttgccgacgccgtcgatcaccgcggcgccgccggtgtg

SEQ ID NO: 12856 - DNA, 2866 bp, Oryza sativa
cgcgacggtcggcggcggctcggcggtgaactggtcggcctgcatccgcacgccggcgaacgtgttgcaggagtggtcgaacgaccatgggctccctctgttcgggggcaaggctacgtgcaggccatggacgccgtgtgcgctcggctcggcgtcaccggccggtgccgggaggaggggttccagaacaaggcggtgcgccgcggctgcgaagcgcttgggctgcgcgtcgaggccgtgtcgcgcaactcgtcggaggggcacttctgcggcagctgcaacctcgggtgccccaccggcgagaagcgcggcaccgacacgacgtggctcgtcgacgccgtcggccgcggcgccgtcatcctgaccgggtgcaaggccgaacggttcatcctcgagacgaacaccggcggcggcggcggccggcgcaagaagtgcgtcggcgtcgtggcgaagtgcttgggcaaaggcatcaccaagaagctccggatcgaggcgaaggtgtccgtctcggcgtgcggcgcgctcatgacgccgccgctgctgcgcaacagcgggctcaagaaccgccacatcggccggaacctgcacccccacccggtgttcatggcgtggggctacttcccggacagcacggcggagctcccgggcaagtcctacgagggcggcatcatcaccagcatgcaccgcgtcaccaccgcaccatcatcgagacgccggcgctcggcccgggcgcgttcgccgccgtggtgccgtgggagtccggccgcgacatgaaggagcggatgcggcggtacgcgcgcacggcgcacgcggtggtgctcgtccgcgaccgcgccgcgggcaccgtcggcggcgagggccgcgtccgcttcaccccgagccgcggcgacgccggcgagctccgcgccggcctgcggcgcgcgctgcgcatcctggtggccgccggcgccgccgaggtgggcacgaaccgcagcgacgggctgcgcctccggtgcaagggcgcgcgtgacgaggacgtggaggcgttcctggacgaggtgagcgtggagaaggggccgatgcacccggggtcggacaagtgggcgctccttgcctcggcgcaccagatggggagctgccggatggggaggagcgccaagcacggcggcgtcgacggcggcggcgagagctgggaggcggaggggctgtacgtctgcgacggcagcttgctcccgacggccgtcggcgtcaacccgatgatcaccatcgagtccgtggcgtattgcgtcgccaagggcatcgccgagtcgctcgcgtcgcgcgcagcgcgctcagtggaaaaccgtgatgtgtccacgaaccctcctctagcttgtgaatcgtaatacgattattaacttcttaattaatactgtgctttattttaagataatgaaaataaatctcagcgtttagcgcacgagcttccgggcaatttaacagtttattactctctctaattcatactccctccatccaaaaaaaaaaaagacaaactattatgtctgtgttcaacgtttgaccgtcggtcttattgaaaaaattatgaaaaaattaaaaagataagtcacgcataaaatattaatcatgttttatcatctaacaacaatgaaaatactaattataaaaaaaattcatataaaacggacagtcaaatgttggcatggaaacccacagtttgtcttttttttagaacggagggagtattgtttattactttctatatttaatattataagtcgttttaatcaaatatgtataaaaatataataatatttttaacacaagacaaatatattatcaaaatatatttaatgttagatttaacaaaattaatttggtgttatatgtgttgctatttttcttcacaagtatggttaaactttaggaagattgattaggaaaatgtgaaacgacctttagttctaaattttttcttcaaacttcaacttttccatcacatcaaaactttcctacacacataaacttttaacttttccgtcacatcgttctaatttcaaccaaacttctaactttagcgtgaactaaacacaccctaactcctcttcataaatcactggtgaaaatgtgttgttggtcacgtgttgattccaaaaatcagtcgtaagagcatcgaaccactagctgacaacttttaacactgagatttcaaattaaggggtacaaaaatattctgaaaagggaaggagtagaacaaatgatcagctctcgggcaagcatcgacaccaaggtcttattacggatagatgtggatggcggtggagcatctccgatgaacgcataagagtaaaggcaagtccatgccatggtggatggcttcgcgatgctctaggagcatcgaggactttgacgatctgcggaagacagtgatagcatggcagagtgctttacgacacactagaagtgttcagaatgtggtggcgacgtaaggtgatttggaaggcgatgacgaacaatagacacaaatagttggcaaccgatagtggttgtgatccgtatagctggagatggtgtggcaacgggtagcacggagtactttccattcacccctttcgccctctctcatttcgttaggaagaaaaagtcgttgataaaagattggagtataattaattttgaagggaaatggaaggcatccttcttgggtcccattaagatcttattcggttaatcccttccacaaaaaaattggggggatttggaaggatttttccatatctattgtgatgtattctcccccaaatcccttttttgggattaaacgaacaaggcctaatgctggggctgaaaaagaatcggcctacgtctgacgcatgcattctgggcc

SEQ ID NO: 12857 - DNA, 773 bp, Oryza sativa
gcagccctttgggccgaaagtcggcccaaaaccgctctctctctctccctcggcccaagccggcccagtccgggcgcgggcgcgccctcgctgccgctgacaggtggggcccacctgtcaggcccgtcgtcttcctccggccgaaaccctagcgcgccgccgccgccgccgctttccaatccggccgttcctttccttctccggtcgaattgattgaggggaaacaatctccgggatctcctctaccttttctcctttggaatctttggctaaatcgttttggaaagcgttggattcgagtttgtctcggattcattcttcccgatctttccttcctcgtcgtcggccgccgtgggcctttgccgccgcctccgagcccctttaaaagcctccccggtgtctcctctacccgccgccacccttgccttcgcctctcgtcgtctgaatcgttctagcgccgtgtgccctagctttgccgtcgccgccgccgctccagccgtgcgccgccgttgtttcagccatcgccgtcgctcgggaagaccgccgtcgtggtcgccaagtcgtcgccgtcctcgtccgccccttcgctgtcgccggagatcgccggagcttcatcgccgccgtcgacccgaaagtttcctccgtttcctcctagtcgccgtcgccgtccgttgatcttccgccgccgttttggtcaccggtgagttcgcccggtcgtcctctacgtgctggtgggcttcgtttgcgtcctaatgccgccgttcgccggcgag

SEQ ID NO: 12858 - DNA, 620 bp, Oryza sativa
ctctccgtgggatgtccaacaattatagcttggcatgaaccccgactcaaacaagtggaaatgaatagtccgggatgcagaatactccttctgattcttacacttattgcatggacaacaaataaaacccctttgcctgttagcttcggccactctcaaaaaatagtgcacgccgtcaataaactctttggaccgccggtcagcgtacatccattgccgatccatctacatgagtcaaaaaaaccgcacacaaataattattcttacaataatgacagtcatacaataattataagatatctttattcatacaaaaatcataaaatattacaccaaataattcttaaaaactatttgtaaagttttaaactaattttaatgtgttttacttcttttatttttcattttagtttgttttctattatttaagattaactttcactagagttttccttctcaactattttataaaaccttgtttagcaaatgaactaaatttctatatattctttcttccccacacacattttctctctcatcaacttacaactaaattttggagacaaaaaaaagtgtgcaaaacataggtgcaaatgtagtatgacaaaaaaaaacattgg

SEQ ID NO: 12859 - DNA, 549 bp, Oryza sativa
gttcccgctcgacctcaactacaacggaaccgacctgtcgaaactagatttcggcaataataaaagggggtggctatcaagctaggaaagtgtatgggtttggagacaaaggatttatacaggttcaggccttcttacaaaagaagtaataccctactcctgtccggggatgaatccgccgagtgtgttattgattgtatgatttggagaaaatccaacctccgcccctagaggcacccggaccccccttatatatgggaaagagtccgtgttacaaaagataatctatattcctaacggaatatgtaaatacagataaaatacagtcgtgaccgactaagtctcaaggtgtttccttgatgtacaagttaagaaacaaacccaggatacacataagatattctatctatattcggtatcctatatccagtccaaatatcatcgccgtgtagatatgggatatccataatctccacagtagcccccgagacctttgcagtcaaccatcatagccttctcaaagataataatccgagtgcttcaaaactt

SEQ ID NO: 12860 - DNA, 680 bp, Oryza sativa
  unsure (1)..(680): unsure at all n locations
tgtactgacagcatcggtgttattaggcaaacggagaaacaacaaaaatcagaacagaatgctgctaggaaaccttagatctcaagaactaattttttggaaaaagggccaagaatttttttaaaggggggaaaaaaaattttnttttttnttncnancatagttntaatttttggaaatacgttgtcgcggcaacaaacaatttcagcgattccaacattcttggaaaaggaggtttcggtaaggtttataaggtaaacaattcaggctgacaatcacaaacactggagaatcctacaatattttataaatttaaaatgattgtattacacaggggaaattggaaggcgggagagaagttgctgtcaaaaggctcaacacaggttgcacacaagggatagagcattttacaaatgaagttgttcttattgacaaattntngnncnaaggcaccanaaaaattctaaagttaggcttcttggctgctgtattcatggagatgaaaagcttcttatttttgaatatttacgcaacaaaagcttggattactttctttttggtacgcctaatcatatattcattttccctttatcacttttggtgggagaggtgcctgaacaactttaagtcttgtttcacactgttcatggtagatgattcaaaaaagcctatactgaggg

SEQ ID NO: 12861 - DNA, 681 bp, Oryza sativa
attcctgcaccccaatcataaaaagtttctagaaattggtaaaatttttggacaattgcccaaacatgctcgttcagtactgaagacccgtcactgtttcttgggccaccacgtgactgaacaaaatcagaaagtaaactactataaggtaaaacaacttttaacattaaatacgttgcattccaccgatgctctgcatcggtggcaaacttacgagctttcacacccggctccgcatttggcaaaaaaaacctcttccatgcagcaatccgcgggttagaagcagttaaccacgcgattgcttgacgaacagcatcgatgtggtcacctaccctcttcatgccagtcttaacaatcaaattaattatatgacatgcacaacgctgatggagtagaaaagattgagcatacacacaaaataaaggttgcaatatttcaatagccctagaattagcagatgcattatctagggtgacagcaaatattttatcagcaagattaaattcatttaattactttttccctttaatttccccctttttttttttccccaaaaggcccctatggtttttttttcccctttttccccctgatgtgagacatctattaacctaagccctaaactctcttttgtaattgccaatcatcatcaacaaaatgaacaactacgctaagataatc

SEQ ID NO: 12862 - DNA, 1678 bp, Oryza sativa
tgccatctatcgaataacagcaaaattatagtgacatttctccaaatagacgaatagtaataaaatatttcaaaatcataaaagttataatggcatggttccaattaatcctaaacattaccagcctataatgagctagtagcccatataagtgcaatttgttggctgaagagtttggtggttgagttgatatctacaagctagctaggaaatcatgaaattttatcgttctaaccaattttaaatgcaaatttctaattacgttatgtccgctttcatatttataaaaagttcatatttctcaaaattattggttggttatgaatctacttttgactaagacgttttatacttcttttagatatttaggctgtgttcggctggctaagttcccaactggaacagtgcgcataaaaaacagagcgatccatttgcacgtgggtaattaaatattagttatttttttaaaaaaatggatcaatatgcaattttcgtatagaactctttacaagaaacacaccgtttagcagttcgaaaagcgtgcacgcggaaaaggaaggagaggtgttgggaacctggatgcccgaacacggccttagtgtatcaagaatttgaaattcttaattaagacaaattcaccatctaaggacaagaaaattgttatagtatgtgtagcagtgttcttaattgtatacttgctctccctaaagttaactgtctttttgggatgtgtgcagtaccatgtttaaactttgacaattaatataatatcactttgaatattttgaattcaacttttttaaaattgtatgaatagatttctgtatcaaaaatggcttcaaaatattataactttgctacactttaccatacctttttattttatactagtagtgattactatcagaaaaattcttttggtgacttgatcaaaaacatgctgcaaatggcataggtatgggaattgaacatattatattggtcacgctttgattcatacccctgatcgtacattacatcttaaaaatattcttcatgttacccaagccaaaatgaatcttatttatgcttctcgtctagctgaagataatcatgcttttcttgagattcaccctaaatattttttgttaaggattgggtcacgaagaacacaattcttaaagggtggcatcaaaggggcctctgatgacgctctctctcgtggcccgatcttctggtgaggggataactctcgctttgatcgagtgcgacgtttgtgacgtggctaccaattagaacatgtccagaatgccgtgcaatcgctaaaccacaaacgatgttgtaccaaccgtggcgcgcggttgatgatccctgcaatgcaaatgagagaaccctgcaagaacaagataagatgcaatctaaatattgcgaataggtaattaagcacaaagaaatggttgcgattgaagtggtagatccaatcgacccgtcaaatcaacacaccgaatattgggggctctgaatctatagtcgccgactagtagagcgaggactagagacaaggtgaatagcacttagcaaaattcaactaaacaaaaccccattgtttttcaggatgtacaaagctatttatagagaaaaataaagctagggttaagtactaattcgtggaggtggagggagaaacttccgagatggg

SEQ ID NO: 12863 - DNA, 662 bp, Oryza sativa
ttctcttcgttcaaatccagcgcccgaacgcgagaagtcgagaaagaagcggcagcgacacgggcgccgcccacaaccaatgcatcgccgcggcggcgtgcctcacgggtcccgccccccaacagctgcgccgccgcctctcaccggtgagtctcctccccagccgccgcctatcctcagcgaaaccctaggcaccgagccggccgcatcgacgcgtacgaccgtgctgtgtccgccggtgaggtgctgacggcgcaccccaaccacgtgcttagccggcagtgctcgtcgcagcagggggcgatgggccggatacacatcgtgtcgccggagtcgaagctggagtgcggcgagatctacttcctcatcccggccgcctccgtccccgacgccaagagaaggacgagcaccggcggcgccgccggccacgggcaccacgtccgcagcaagtcggagggcaacgccgccgtcgccgattggttgggcagccagtgcagcgcgtcgccggagacgacaaggatgatgagggtgcagaagcaacaccaccaccaacaccggcggcgcatgagcaccgggagccatgcctcgccgtggcagccgcacctctcgtgcatcactgaggacccctgagcttagctttcatttttttttcttctcttctc

SEQ ID NO: 12864 - DNA, 589 bp, Oryza sativa
gtgtattcacgttgggctcttgtgtgttcaagatcatccgaatgatagaccatcgatgtcatctgttgtttttatgttagaaaatgaaagcacgctgcttcctgcaccaaagcagcctgtgtattttgaaatgaagaaccacggaacacaagaagcgacagaagaaagtgtgtactctgtgaatacaatgagtaccacaacactggagggacgctagactaagaggtcaagctttactatacatgatctcctcgcctgctcttcgtctctgtcgcgtggggccagcggccgacgacggcgcggggctggcgggaggtgggcgacgaccgaccggagatagagaaggagaggagaggggctgacgggtggggcccacgttactttccacgctggcacggtacagtggcacgtcacatatgcaaaaatagcaaatagttaagaaattacctctctccaatggcaaattattaagtgcaatatttggataattggcaaacctcaaaatggcaaatagttaaattcgggtcaagattggatcggtaccctatctgcctctttttatgggccgaaaccgccgaatccctcgccg

SEQ ID NO: 12865 - DNA, 581 bp, Oryza sativa
ttttcctcctttctttcggatgggccgtggcccatctcctcctttcctccccctcctccctgctgggccggccgcaggccgaggcccagccggccgcccgcctccctccctcccggggtcgccgacaggtggggcccacctgtcggacccgtctcccacctcccgccttcccgctcgcgccgtcccgccgaaaccgctgccgccgcacccacttcctccgctttccccgcgcccacgccacgtcgccgcgcccacgccacgtcgccgccctctccccgcgtctcccggccgcgccagcgcacgagaggggcgggattcgattttgaatctccccccaccttctctctctcctcccccacgtcgccggcgaaatcggagcgcctcccggccacgtccgcctccccctccgcctataaaatgctccccatgccctcctctctcgtttttcgctctcaccgctccatcccgtgccccctaccgagctcgcaccgccgccacttacgccgccgcccgtcgccgcactccggccgtgtgccgccgtcgctagagccgccgccgcactaagccaccgccaccactag

SEQ ID NO: 12866 - DNA, 697 bp, Oryza sativa
  unsure (1)..(697): unsure at all n locations
aattcctgcaccccctctatgtctccgtgcctttttgattttatcttccatgtactttgtcactacgttgccaaacactatgttgttatcggccatggacggaccaattttcttgtatcgatccctaaagtaggcttgcgtgccgtgaaggatgaattcaacaatagcaaccaatggaagtacccgaactcctcgcattacccagttgtacacctctgccaaattgnggttgtgtcattttattngnccnnccctaccgagatccatcggtgtcgaacaatagagcccacttctccttaggctcattctcaatccactgagagaaatttctgatggccgaccctgacctccttctcattgttggtgggtcatcatgtaatgcaccaagaggtatgggaggctcgtcaccttcaacttgtggtctgcgagattgctcatctgtttgcttcgttgtcaactcatccaacttgtcccacaactcattaaatttcttctcttggttctgtgcacagaaagccttcttttaaagaagaaatncccccccaatttttaaaaaaaagggggaaaaaatttggggcttgttttttccttttttttgggaaaattgcttgtagaaatttgcacccatgtgacgcatgcaccaccgactccgaacatcaggccacttagctggaagtcccttctcatcccaaccgtt

SEQ ID NO: 12867 - DNA, 679 bp, Oryza sativa
  unsure (1)..(679): unsure at all n locations
ttcctgcaccccgttttttactattacattgatttcctgaaaaatcctttggtacttattactaaaactgttaagcagtggttacatgtctcctgaatatgcaatggatggcgccttttcagtcaagtccgacacatatagctatggtgttatactcttggagattgtaagtggtctgaagattagcttacctcggctgatggactttcccaacctattagcttatnngtaagtaccncnattnngggcgaatgctctatgtccataaaaattcaaaataactataccgcttttatatggactgatctatttcactgtttaggcatggagcttatggaaggatgacaaggccatggatttggtggattcatccattgctgagagttgctcaaaaatggaagttttactatgtatccacatagggctgttgtgcgtgcaagataatccaaataataggccacccatgtcttctgttgttttcatgttagagaatgaagctgcagcgctttccagcctttccaattacaaaccccccctttggggttttggggtttttaaattttttttgccaaccaaattttaaggggggcctctggagcaaacaatcaggaggaaataccagcagctctaataataacatgagcctcacggtattagaaggacggtagatttacttttt

SEQ ID NO: 12868 - DNA, 582 bp, Oryza sativa
atggatctcggtatggcataatgacaaccaatttggcagaggtgtacaactgggtaatgcgaggagttcgggtacttccattggttgctattgttgaattcatccttcacggcacgcaagcgtactttagggatcgatacaagaaaattggtccgtccatggccgataacaacatagtgtttggcaacgtagtgacaaagtacatggaagataaaatcaaaaaggcacggagacatcgagttgttgctcaaggcacacaagtgcatcggtatgaaataatgtgtgttgataggagcaggcgtggtatctatcgcaagcaagccgtgcaggaatgtgtcttgaaggcggatggtggatgtacctgcagttgtatgaagccgaagcttcatcaccttccttgctcacacgttcttgctgctgccggtgattgtggcatatctcccaatgtgtacgtctcaaattatttcaagaaagaagcaatctttcatacatggagtgaggagatatatgggttcgggatctcaggatcttacacaacgctgagtgcccaagttttttatattccagatccatctaagttaa

SEQ ID NO: 12869 - DNA, 652 bp, Oryza sativa
ccaaagaaatctatgatgcaagattccctgtacaaatgccatcgccaaattggaagataatctggaactgtcgggcgcctttgaaggtaaaattgttcgcttggctactggtccgaaacagactgtcgacaaggatgaatctatcaaaaaagaaaattgttcaatcagcttcatgtgcaatctgtagtagcggggacgaaacaacaaaccacttattcctgacttgcccgtttgcgataaacttctggtcaaaagtgcgaattcagccagctatccaagatgtgcaactctttcatcggctgagcaattcaccgttactgccgtcgaaacacctccatgtcttctacatcttatgcttttgggcgctttggaaccataggcatgatgtggtcttcagagggcagcaaccatctttagctgcttgtttacaccgagcgataagtgaagcaaccctttgggcagaaacactagctgtgcaagatcgacatgtaatagatgtctggaaacatcttttctcttccgcacttcaaactctgaatctgttgtaacaaaacctttcaatctattatgcaatgacaattcaggtggggaatctctcccccccccggtgagttagtaaaaaaaaacaatttggtatcagacccagcctggt

SEQ ID NO: 12870 - DNA, 1066 bp, Oryza sativa
ccttgtttcagtttccatgcttattgttgttgcatgataatatttttggtacttgtttttccctaacatttatatgtgcagactggcaaactgagggaagaaactaaggaagacatttctattgcgaaggccattgcaattgttatggagagaaatccacacttgaggtttgtaccatccaatttctgcccatgtgcataggttatcctgatcttttggtcattttgcctgacctgtccttgttcacaacaggcaagaagggattgctcatgatgttcttcagtggtatttgtgccgcatggaaggttggtttgctactgatgcggacgcaatctctcttcagggttgggaccaggtaggactttggttcctgatatcagctacaattgccaatattttgctcatgatgtactcatgctagtttgattgctatgtctcatgttcgtactgtgctgtgggtgcaggaggtactgcttcctggtggccatggtctcatggttcgtggatatcgtccagtaataaatactctggcaaaaggcctagatatacgccttggccacaggtatgcatatccatttagtttttccttctcactttaaaagcaaaattcatggttccatccaccattccttattgctaatccacattattttcttttctttagggttgttgagattgttcgccacaggaatagggtggaggttactgtaagcagtggtaaaacatttgttgcggatgctgcagtcattgctgtccccttaggtgttcttaaagcaaacaccattaaatttgaacctaggctgccagagtggaaggaggaagcaataagagaactctcagttggagtcgagaacaaaataattctccacttcagcgaggttttctggcctaatgtggagttccttggagtagtttcatccaccacatatggctgcagctatttcctcaacctccacaaggctactggccatcctgttctagtttacatgcctgcgggtcggcttgcatgtgacattgaaaagctgtcagatgaggctgctgcccaatttgccttctctcagctgaa

SEQ ID NO: 12871 - DNA, 587 bp, Oryza sativa
catgtgtcccagcaaatcttttggaaatgaaagaatgcgaggcacctgaatcaaagagaactgttgctggatatgagttcactggaaacgtgcccaacacgacctctggtgctgcctgtgcttcctctgcagacacatgattggcgcgggcctggatgaacctgggtccagtgcgattcagcttcggacacttgccagcaaagtggccgtgcttgccacagttgaagcagggtcctggctttcctacagcccccttcttgggttgttctgactgaactgacacagttggcggatctgactgagctggtgccattagtgggggtggagtcgagttgtggttgcgctgcttactgttgttgtgactgccaccgttgtaatcgttgtcgaagttactcgggtgatagggacggtgctgacagacgatcagggtggaaggcccacctagctgtcccgtcatgaagcgaggcttctgattgctcccctgaggaaagctgatctgagctggctttctttttcggtccattttgttgcgttgctcttcctgacgaatagccctggacacaagcttatcaaagtcctcataaact

SEQ ID NO: 12872 - DNA, 904 bp, Oryza sativa
tttcattattatggcttctagatggatactatacgtatgtaatactattgtgtgctactaatgagacaaattggagataacttggtctcggaatatggtttctttgtttatttcatgtgtaggtgactcgatgcactagagggtttcctaagggttttaggacttctagtatgagtttggttcgttactttaggctgcctacctcgggtataaatagagggggagcgtgaggcttccggtattgctttagagagcaattgagttgagttttgagttagggttttgagtttagtcgaatttttttgtaaggagtgctgttggtgcattttgtaaacacagagagaatcaataaagtcgttatccactttaagagttcttcgatttgtgtttaccgggttttggcggtgtaaccgacgatataccggcggcatacgggcgatcagaccggcggcggcaacagtaagcggcagctgatctcggcggtcagaccggagatctaatcgcggtcagaccgatagcaaccaggcggtcagaccggcagagcaacttcggtcagactgcgatctgtcgaattcgagggtaacttttatttccgctaaaagtttttggttttttggatatatcaaccattcacccccctccgggtggcttagttattgtgattcgatcctacaagtggtatcagagccctgttttctgctttggatttttatcgatttagagtttttgccatggctactcctgctaggttttgaactaagcctcatgttttcgatggaacggatttttctcaatggtgtagtaagatgcaattttatatttggagaaaagtttctcattcttatgtgattcctgaagctattaatactgctgctgaaaaaactgcgtttgaacaaaattgtga

SEQ ID NO: 12873 - DNA, 1055 bp, Oryza sativa
tacctcaaagtatggctaatccatgtttttagcaataatcacattacttgatgtggtacagagttttttttggcaattattgataacaaaaaataatcatcaatgagaaatcattctgctaaactattacatttcaaacatcaccatttttagggctgtgctttgttaagatatacttcattggccaatatttcccaatctttttatactatttcagggctcagccgttttattgccaaaattaatattagcctttgttgtttatcttgtcattcattcttgtatatctcaccatttattgtttccatatcaaacaagaactcaaacatatctgccaagataatatctattaatagcctaaaaaaattttctatttcccttggctttatcctcatcgtttcctccacctacatgtacatctcaccatattctccccaatttccacaaaacaatttagagagaaaaatacagatcagaagaatgcttcaggttcaaggctctcttcgtgtccacactttctcctctgctgccatcgtccatgccgttgaaacctctgatgaagattctgatccatcccacttctgcgccgtgccgcagaacggtaagaaggcatcgaggaaggagatcaagaggaggataaagaagcttctgtcatcgctggggcagaaacaccacatctctaaggtgttcttcagatcacgttctgaagctgccaatagcaatgctgtcattgacaacagaggtggtggtcagagtgacatggagacttttgtgtccgcgaagagctccgagttgtgttcattccgtaccgatgatgacgactccgagtcacgatcgtttcgtctcagcccgttgccaatcttcccaaccggaggtattgaattccagccacccgcctctccagtgaagataatcaagaagctcccatttgggtatatcatcggccgtcagctcgacggcgcccccgcagcagcggcgccatcaacgaagctctcattgagcttcaaaaagttgatgcataggttggttgataagtcaaagtcgaagatgatcaa

SEQ ID NO: 12874 - DNA, 508 bp, Oryza sativa
aattcgagctcggtacccatccgcagaatttcaaattgttgaagctgacaagctacgaaagaaactgcacaatacaatattggtaattgtttcagcatactagcacttcttactaaaaacaatttctctattttactgacagaagaaatttttgagtaaatactgaaattttttcatcttgctattgctacttgttactgattagcctttctatttgcaggagcttaaaggaaacatcagagtgttttgtagggtccgaccacttttgcaagacaacgattctagtggtgcagaagaagcccttatttcatatccaacatcagttgaatctgccgggcgtggtattgatttgatgaaccaaggtaaaatcatattcattgttgaagctaaacagaaactatgtttcccccactaagttttcagtggtaaagttaatcggagacttcattttattgttttgtgttgatgtaggtcagagattttccttctcatatgacaaagttttcga

SEQ ID NO: 12875 - DNA, 599 bp, Oryza sativa
ttttcttctttaaactttcaactttttcgtcacatcgaactttcctacatacataaatttctaactttttcattacatcgttctaatttcattgaacttctaattttggcatgaaactaatcacagcctgtaactgaaatcatgaacaacaaaaaagggggaagaatctcaccagggtttctgactgtcgtgttgacagcatatcccttctgaagcagcatcttgatgagcgccgaagcgatatacccgttcccgccggtcacgcacgccgtcttcatcccaaccgctgacatcgccgtgccgccggctacttcgtcccctccaggctccactacgtcctcctgagagaaatagcttactggaatgaagacggcggttgtaagagtacaagagtacagtcactgtcactgacgttcatctgataggatatgcttgtcagttgtcaccaataagaaatcttttgtatttagatgcaaaggtatgtttgtatccagggagtaaacttattccatgtcacattggatatttggatgctaatttagagttttaaacatagaataattccaagacttattgctaaatgagagttaattcacgag

SEQ ID NO: 12876 - DNA, 525 bp, Oryza sativa
gtgacactatagaatactcaagcttgccgttcgccttgggaacgaccaccgggttcgccagccactccggatggatgacctcgcggatgaatccggcctccagaagtcacgccacctcctcgcggatgaaggcttgacgttccggggcctggcgccgcactttctgccggaccggccttgcgcccggccgtacggcgagacggtgctcaatcacctccctggggaccccgggcatatccgccggtctccatgcgaagacgtcagcgtttgcccgcaggaaagagacgagcgcgtcttcctatttgccatccaagagaccaccgatccgtgtggtcttggacgggccgtcgcccaggacaacctccttgactgggacctcatcgcacgtgactatccgctgcctcggggcggcgggggcggatgtgccaagcctctcgtcgccaccctcgggcttggacacgacggcgaggcggtccgcgcgctgctccatacaagcgagcgcgactttgaggtcgccatggacag

SEQ ID NO: 12877 - DNA, 1315 bp, Oryza sativa
ccaagtgtaacaagcgttactttgctaacccaatgagtacatttctgctatagacagatgcgctaggctctctagtgttagttgatttgtgcatatcgtcactctcaaacgatttatattacagactagttgtacactttgtgattcgttattacaggactgtttatgctgttggtaatcagatttactacaagcccatcaacatagctacggctgtgtttagtttccttcaaacttctaacttttccgtaacataaaatgtttggacacatgcatggagcattaaatgtggaagaaaaaaaaccaattgcacagtttgtatgtaaattgcgagatgaatttttgagcctaattaaacatttgctaataacgaattaattaggcttaatagattcgtctcgcagtttacaggcagaatctgtaatttgttttattattagtctacgtttaatactttaaatacgtgttcgtatacgagagaactaaacaggcatatgataccctacagaggtatctatttttggtcgaatggagggagtagattccagtacagcgagaggtgtggaattgactaaagtcagggttgctccagtctacacgcacgaccggttcacatcgaaattgactcgttgggtgccccggttgtccgggagatgaataatgtcacatacggagaagctgtcagctgtagtcatcgccgaagaacgttctggttaattgcttgcaagtactgtactacctccgtctccatctaatcctaggttatataacatttttggatggaggaagtattatcttagcatgaacacaactgcacaaggcacaaggcacatattatcttagcatgagcacaaagcacatatacctggtcatacatggcatgccgtagtcatgcccttcaagtccaaactgaaagttaatgaaaagcttcggaagattttcagctaaaaatttttctcctgtcattctagctggttgaggtgcacgctttcgatctatgtggacttgcttagctatgtaatctctttctactctcaatttcaaaataaattaacccagtacgagatataatatatcctattgccatgtaaagagatctcgtactaggttaacttatttgggacgaagggattattacagtacatttcagtgtgttacattgatcacacgtggactcggatcaatcaacgccccacatcggtggatgaaatagtaaccatacacaagtatgcttagaaaaatttggcagctctaaaagagtgatacatacacgcgaagaaccagactttgaacatgttcccacctaaattggact

SEQ ID NO: 12878 - DNA, 521 bp, Oryza sativa
tcgagctcggtacccttatattcaggcgctgcagtgaacactgcaccagtaatagcagactgggatgacaaagacagttcaagattcaattcaggcttatacaaagccctcctagaatcacaggcccggttatcaagcctggaagtaccttctttgcccaaagtaaaatgattcaaatccaaatcaatagaagaaccatcatcactacccttagcagaagatatggtgcagccagtacccatgctttgcttgctagattttgagcttgatgagttgcccagccctagtgacaagccatcaaactttgtcgtggtccctctaggcaggttgtatgaactgcaatgagctagcacatcaatttgactagaagctgtaggatgactgactgtgaagatgacagggaacttgcccacataggcattgggatttgaggaatttaagaacgctgaccgcccaagtagggggtccatagctagagattttctcagaaaacaaaacacagccaatttttttgccaagta

SEQ ID NO: 12879 - DNA, 624 bp, Oryza sativa
tgatttaacttcattttaataagaatgttttcaaattactagccagtgcattttgtcacttttttatatagaagttgttttaaattataagataaatatttttttaatatttaaagtaataaccctcaattaatcatgtacctgcagttatctttcgtccaccgcaagttctgtggttctgtggaatatattccaagtttgcaactgaaaaacttcatgagcactgactgcatttgcactgcagttcagtggatgcatcgacggagaatgaatacgcattccatgacagaactaaaacgcagggaaatacagagttacaaatcatatggcacgaaccgatacacatttcgtggcataaccatcattttgatgcaggagccagcagcgaagttctgccgggcaaaagtagtacaccattttggaacccacggttgcatacaaagttactccagaaaatacattgcaatgcagttaatattgctcaaatcagctacaacagaaagaaaacacatgatgcatgcgtgttctcttctgctcacagcgcactagcgcagtgccactctccttcctactgtacaagttacaagaagcaagcggcctcatcagcttcagccaaatgatatc

SEQ ID NO: 12880 - DNA, 662 bp, Oryza sativa
atcccccagatctaccggcgcccgccaactggaggcctgcgccgggggctggctcggaagtcggaggcgcgcttcgtcggcgaggggagtgtagaaccaatcgctcttccagtcgtcccacttcttgcggagggcgcaggggatgtagcggttcagcgccggcccccgtggctggaagtagcagccaccgactaccgatggcggcgacaccgactgcacggtaaagaaccaccggaacagccgaagagatgggcgcaccccaatgaacatctcgcacactcgcctggaaaccgcgagacgaatcttttgagactaattaagccgtcattagcacatgtggttactgtagcgcttatggctaatcacggactaattaggcttaaaagattcgtctcgcgatttccttcataactgtgcaattagtctttctttttatctatatttaatgcttcatgcatatatccaaagattcgatataatgtttttgggaaaaaaacttggggaactaaagaggcccaagcgtgctgaaagctcgctgtgaacaaagccgcaaaagtgggagaaatcacagcagctgagctgtgcacgcagactgtagtagtagtagagcgctagactgaccactggtccctatttcctgacgcgtgggttcccccgttgcc

SEQ ID NO: 12881 - DNA, 582 bp, Oryza sativa
catggctagggaggatgaggaaaaaactgcgttcattacccccataggaacttattgttatacgacaatgcccttcgggttaaagaatgcaggtcctacttttcaacgtactactcgaatttctttgggtagccaattaggacgtaatgttgaggcttatgtcgatgacttggttgtaaagacgcgcaaccaggaaacgttactttcagatctagcggaaacttttgagagcctccgctccgcccgcataaaactgaaccccgataagtgcgtgttcggtgtacctacgggcaagcttctcgggttcttggtctctgcccgaggcatcgaggccaaccccgagaagatacgagctatagagcggatgcgcccccccagcaagcttagggatgtgcaatgcgtcaccggttgcatggtcgccctaagtcggttcatatcgaggctgggagagaaggcgttacccttatttaagctcctcaaacgctccgggccgtttacttggacggaggaggctgaacgtgccctcactcagttgaaggtgtatctcagctctcccccagttctggtcgccccagagccaaa

SEQ ID NO: 12882 - DNA, 535 bp, Oryza sativa
ttgaactctttccaaagaacagcaacaaaaataaattcatcgtcctcttcgtcatctgggctggagaggttgtagcgaccgacgacgacgatgtcggcggttgagaggaagacggcgtgcgtcaccggcggcaacggctacatcgcatctgcgctcatcaagatatgctgttggagaagggatatgctgtcaagacgacggtcagaaaccccggtgaggttctcctcctcattttttcactctctaagttcatgttttttgcagtgtttcttccattcagttcaggtgtgaaatcataggccagctagtaccatatgagctttttagcgagtgttttcgcttaaccaattagcaaatggcaggcttagccgcacatgaggacaaaatcttatccttttccaacttccagctgatagttacatatatacatatcgtgacatatgatggatcgaattattatgagactttatatgatctcaaaaagatggtgtgaattttcagagttcagtttcacctctcaaagattctactaatt

SEQ ID NO: 12883 - DNA, 582 bp, Oryza sativa
ctccttgccggactcagagtggcagctggactggggatccgccgcctcctggtgttaggcgattcccagctggtcgttaaccaagtctgtaaggagtaccggtgctctgactcgcagatggacgcctacgtgcgccaagtacggcgtatggagcgccattttgacgggattgagcttcggcacgttcccagacgggataacatgatggccgacgagctctcacggctcgcgtcctcgcgagcccagaccccaccgggcgcctttgaagaaaggcttgcccagccgtcggcgcgacccgaccccttaggggagacggatgcgcctaaccggcccccgaggcccgtcggagtccaggcctcgggacccgaggggagtgctcccagctcccttagattgattgcttggatcgccgagatccaagcatacctcacagataagactctacccgaggaccgcgaagggagtgaacgcgtccatcgcatctccaaacgctacgtgctggtagaagggaccctctatcggcgcgcggctaatggaatcctcctgaagtgcactcctcgggaacaaggcgttgtgcttctt

SEQ ID NO: 12884 - DNA, 623 bp, Oryza sativa
tggcagttacggaattcaccatcgccgaaatgcagcgcgcgttagactcatccgccgggaaagcgagggccctccgcttggggggcgagatagggcccggcatgttttgggatgaagtctcccatttggatcgcgccggtcgcaaggcgggcctttggaaaggccagacaatgaagtactccaccaacaagggaggcttcgttcagcacctttcgaagatggccggggttttccagaagttcccgaggagttcgagaagaccgtcaagtcatcctcgagggacttcgcccaagaagcgttggagctcgtcttggcgagttaccaggcaagggaccccaatttttttccgtgaatggcgctgaatgagttccttcttggaattgaagaaagcgcgggggggaaggtcgggaatgccgcggacaaattggtcaaaagtttgaagggttgggcccttgggttggggttggccccaaattcgaagaagaaggggaagccaacgggtgaaaaggcaagtaagaagagggcgggcgaccggggggaatggaattaagccccagggccccggttatttttaggttttttctttttttttattttaaggctttcaggctttttttttgtat

SEQ ID NO: 12885 - DNA, 827 bp, Oryza sativa
aacatacccttgatcttctttcggaagcatagcttcccaaatggaattagtgtagtcatttccaagttcatggaacaagtccattatcactggctcccataccttgacatctaatcgcaaggatcgaacctacatcaaataagtacatcaaaagcaatccttaaatatggaccacactactgctaaatctgaaaatcaaatgatatttgaaatctacaaatcacaaagtcacaagagagtgtattgcaaaattaatgttcttagctctgaccatcttatatgcattagaaaatacaattgaaaggtacaacaagaaacacaaatgagcaaaaatctaaaataaaatagttaatctttccatcaaattatcattaaggtattatatcaagtacatatagcattatcacaagaaactgtgactgataactacatggagttggtaatagatgcataagtatcaggatatgtgaaaatggttttggtagattgttcatgaaaaaaaaaacactttcatacaattatgtttttaatatttctataaatatatagtcagaaaataatgataaaacatgtgaattagatactgtgaattgcctaggttggtaccacagcctggatctcattttaagagtcgaaggttaacagaggttggagtcgatattcttatgatcttatccaagctttctgcttctaatttgatttattaccaccaatccaccattcctttttactcgatgttttggacattgacaaagtttacaacattacattaagccccaatcatttcagtaatgattaatggcaatagcataagcattaaactttaa

SEQ ID NO: 12886 - DNA, 688 bp, Oryza sativa
cgctcccgaatgcggttctgaactgtctggcccagcctttgcagcgaggacattgggactcctcatcctccctgcatacgagcacattagagcacatgatactcaatggctcgtttgcaaagaaccaccaatataaaaagaagtgcaaaagaaggttgagattgattgggacccttggaggaaattaaaaagaaaaacacctgaaccaaatctggtgcttggcactgcaggcagcatggggagattcccggtgatgctctcgctgccgccgcgcggaacgagagccgcaggccgagcaacggcgagagcagaggccatcgcggttagcttcccccgagaatacggtggaattgcggaggtcgcgagcggtggatattgggaagaactactgcttggccttcgtctgctgcagcggatgcgagtggaaggctcctcgtccacgaaagcaccatcggttggcagatttgcagattgccccttgccttctgcagatattctgattaatttccattctacgagtattactgtaccgcctgcctgtccgggagaccggggaagttcacgctgggatacagcttcagatttcgctaggtttatagtgcctgactagtgacacacagatgtaaaaatttgtatcttttttggagtatattaaaaaactaaaccgtcacaacttttttagtaaggg

SEQ ID NO: 12887 - DNA, 547 bp, Oryza sativa
actatagggcgaattcgagctcggtaccctcacaatgttgttctaaatagatttgttttatccatcacattagacagatctatcggctcatcgagtattagattatcgtatataatctcgtgctgtatcggttaggttcgacctactatattgttgttgataatataaatcttgttgaactgataggttcatgctttatcggggtgctagccgataagttatctggatgttgcatcggcttataaggattacatataagttgggtttagccaatcgcaacaaatgttacactgtttaatctaatcttgtggattttacgacatcggacctgcagccgatgtatgctttaaccgtcggatcagtgcttattctatcatgtcaatgtcagccgattggtttatactggattaaattgttgctttcttgcattatcatcagccgattgcctttatgtcaatatctacattggacatatagccgattgctcaaaatcctatcgctatcggctggtatcggcatcggttggaattaatacatcggcttgtca

SEQ ID NO: 12888 - DNA, 1026 bp, Oryza sativa
ccagaacttgaagaagcaatctcatttgcacgaaaacaccttgaattgatgagtcaagacagtgttctcaaccctccattagctgagcaagtcaagcgtgcacttagcctaccactgccaaggactttcaagagagttgagactatttgctacatgtcggagtacgaacgagaggcaggaaatatcccaattcttcttgaactcgcgaagctagattttaacctcctgcaacatatccacttggaggaactcaaagcaatttctgagtatgcctatctatcaatctctttgagaattctccactggataaataatatgcggctctgtgcatcgtagatataacggctatgtgcatccattatctaaaaatataattaatatgttttttaataataatggaatgaactaaataacttaattattatgtgcaactgaattaacagtatcgatgtgtttttgcaaataaattattatgatagcatgaatatattgtcagtagtaatgcaggttattatataatctctgttttttttataatacctgtcattttagcgttgaattttatttgaagtaaatccacatccattattttggtcttatcacatatccaatacccacaagctagccgttaaaataaaacttagcaccttaattgtgaatataattaatggtcttgtcacacttttgaaataattaatttcagatggtggaaagatctttatggatatatggagctacgttacattagggatcgtacgatagaggcatacgcttggtcctacatgatgttctacgaagaagactttgcattcaccagaatgtttgttgccaaaataattgcactggatactgtgatggatgatacgtatgatgctcatgccaccgttgaggaatgccggcagctaaacacagccatacaaaggttggataagttcagtttgttttattgataacacatatatgataagtgaagacaaacagtaatatcttagcctacaaatattcaaaataagatatccaaatttg

SEQ ID NO: 12889 - DNA, 24340 bp, Oryza sativa
ctaattctcatgcaaaactaattgcagatgggacaaaagcgctatttctattttgccggagtacctgaaaaagttctatattaaattgctaatcaactttgaggagtttgagcaccaagtgtccgacaacgaaaaatacaaggttacttacaccaaacaagaggtagaagcatccaaatatctctatgggaaattttttgttattaccactataagttatattcttatttagcgacaaccaactaaattttgaggtagcgcgtggcaaaaaaaaaaaggaaacttgattttgggtgagaaaagcgaaattacatacttttcaagtgtcaacataaaactaatttttgcacatatatgttcgggtattattatgttgtagttattaattttgttttatttgcttatagtttcaaaggcagtctacttattacctacaagaagctgaatggtcctaccagaaacacaagccaagctttaaagatcaggtggttttgtccaccaaatcctcggccgtgcaattagtgtgtgtggctgctatgattggctggggtaatgcagtgacgacagaagcattcgagtgggcagctagtggtaatgatgcagtcatagcatgcgcaaagattggacgttttatgaatgatattgctgcatttaaggtacatatatagtagtattactctcactgttctattcggcttctggattgtgaaatcaatactagctttatcccataatatgcatagccaaaatataacctcataatacgggacagactgagtagtctgtgattaatagacatttttgtcattgccttttctaatcaatatgtccatcaaaattgtaaaaagtaacaatatgaaattattttttacaataagtctactaatgtcattttcgcttgacaagtcttaataactgtaaatgtattaatttttcatgattttgtggctcgtctacgtatattaaaaacatcatctatttaagaacggaataagtaaaaaaaactcttttcaccaagtagttaaatataattctttttcacattttcatatgcattatacacatgcagtgtggaaagaacaagggagatgttgcgagctccgtagagtgttacatgaatgagaatagggtcacaagcgaggtcgcctttgcaaagattgattcactggtcgaagatgaatggagaaccacgaaccagacccgccttgagcatggtacactgctgcccatggtgcagcgagttgtgaacttcaccgtttctatggtactcttctacgatgacaggaatgatgcctacacatttgccacacttcttagggagattatagagtctctcttcgtgaggcctgctcccatctagaccttaatggttaactttctagccaatgtggcaatccatctgcatgtatacttgtattgaatatgcttttggcttctgttattcatgttaacaataaacttgtgtgctaagctacttaatctgcatgtgtttcattttgagtctgtatgcgtgagcccacgatctatgtggatagccatcgcgaggagtcagttgtgagggcatccgaggctagctcgctgtccgcgtcgtgcgccgaattcaaagacacgtcgtgtggctgtggggatggacgcagctagatcacggcggcagaatcggtcctggtggttgtatttccagtttttgagttgctttttttaaggaagtaaacagaaaagcagcaatggttgcgctccaccaaaatgatttcctctgtttcctctctctcagctatttgcaggtttagctacagttcgcgtgtgttgtgtttggccaaattcccgggctcgatcgttgggtaaatcctgacaattcatgttatcgagtaatggatccatgttttattacttcactaccgtgtacaaaaccagcgtgggccttatgtgattaggtgacggcctacattaccctggcccgttaagctatgttggtatatatcgacgaccggaaccatcctatgattttcgtggggtaagaacctaggtcgaaggcatagcgtgcctatgacccgggaacacggcgcgtgcacatctcccgcgacgtcatgttcgatgaggcttcacagtggaggtgggatggcgagacggcgtctgacctctacaccgactttgtcatcgagtacaacacggtgtaccacccaagcgctaaggctggacaacatcaaggccacaatggatcacccacgccggccgcgacctcgtcacggacgacatcaagctcaccagcacgcggttgaacaccttcggtgcacagagatgcatctgaggtggaatttgtgtcgccaccacttggagctaaagagaacctcgacgctgatcatgatgacgtgctgctccgttaccgcaccatcgagaatgtgttgggatcagccgcgccgctggggctcgcatgacgggaagttctggaagaactgatgttggtgagcggagaagagcatgtgtccttcaggcaggctgagcaagaggaggcttcgcgtcgcgccatgctcgacgaaattgcttcaattgaagaaaacaagacctggagactggttgatctaccgcctggacatcgaccgatcaggttgaagtgggtgtacaaattgaagaaagacgctcgaggggtcgtcatcaagcacaaggcgcgactggtggccaaaggctatgtgcagtgagccggaattgattttgatgaggtattcgctctagttactcgtctcgattctttacgcctgttgcttgcccttgccgcgcaggaaggtggaatgttcatcacatggacgtgaaatcagctttcttgaatggggagctagctgaggaggtatatgttgcccaaccaccgggattcgaagttgagggggaagaaaccaaagtgtactggctggtcaaggcactgtacgggctacgacaagtgccccgagcttggaataccaagctggactgtactctgaagaagctaggctttgtgcaaagcccgctggagcatggtttatatgcacgcggtgctggcggttcgagactgctggttagtgtttacgttgatgacttggtgatctttggagcagatgatgccatgattggtgattttaacaagcagatgatggttgaattcaagatgagttatcttggccctttaagtttttatctggggattcaggtgattcagaagggggtgccatcagtctgaaccaggcagcctatgcgacgaagatcgtggagaaggctggccttgtgggatgcaatccttgtgctacacccatggagccacggctgcggcttagcaaggaaagtacaacgccattggtagatgccactgaatatagaagtttggttgggagtctatgctatctagtgaacactagacccgatcttgcgttcgccgttggatatgtaagctggttcatggagagaccaacggacgaacacctggcagctgtgaagagaatcgtccggtatctggcgggaacgatccatctgggatgtcgctacacaaaaggtggggagaagaagctgcaaggctatagtgacagtgacatggctagcgacattgacactcgcaagagcattaccgtaccggcgtgctattctttcttggtgaaaatttgatcagctggcagtcacagaaacaacgggttaacactctcatcatatgagtctgaatacattgcaacaggaaccccctctagcaatggatttatgtattgctacaagtccatataagtgctgcaaaggtctacagcaacgcatttagtatgtgttgcctatgctggcattgctaggttatacacgttgctgctcggtagtaatatatagataagtgttgtaaatatccgttgcaagttagcaacaaagtgcaaaacaataccagaagatttatatgcactgctattttcaattgccagtgatcattactcacatgacaatatttctattaataattcaccgcaatatgatgtacaactgatttcattttaaaaaaaataattcatatattataagcataaatctcaatattctttacaaagacctcacagagatacaatttgtcaatacaccacaacataatactgactagtctagccttacactaaaaatattttatatcattttccacaaactttgcttcaatattcccgtgttataggcaaatgtccaaaatatgaaatcttcctgggactatttaggcgtgaaagatcaacatttacttgtaagtatcaaagactggaggagataacaaaaaccactgatagtagtaaacaaaatgaaagctagttgattaccttttagttcgaagcatcttcaggattatgtattgtatgtcttttgctgaagaaaatggcacattgaaaatctcagcacttatatactttatttgggaactaacaagaagcaggaacaccttcatcgtttcattaaatagtttttggaataaggtttacatatgaggatagtaggaaaagttgcatgatttctttctttctggtactgaagataaattatatccaagtgtgccgctatggtcttatatgatttccgactctacatgctcttctgtagcaataccaagttatagctgatctaatcaaatgaaattgccacaaaattgacgtgctcaaatttatcactgatgcagtattgtgatatattatgagtatgtatatatacgacaacacttttaaatgctacaagtctaggacaccaaacatgaaagagtttaagacagcaggctggaggcatctttgtaattttctatgttgttgtcccctgcaaaaagggttggcagatcaaaacaattagttgatccagaagttaatacatgtatttgagaattaatataatagatgtaaaaaatctgtgaagtatgtatatatgatcttggttcttgaattaatattactataacgcagtttcagtttcaggaattattatcataggacacaaccccattgtttatgaactccatatgctctcgtttcagtcagaacatggctttgtttgtgtaagtaacataggaaaaattattattagagcttagaagactagggcataggtttacaatatcaatcttataggccttgttatttagaatatcagtattatggaaaaagaagatgaacaatttctgcaatccacatctgcctgtatgtattaatcagcaagatgaaaatactgcttcctttttgacatgcatatgtatctttcgttgtggcatgctcatacccatatatctaagatgattagaggaagttgtagccttctccgtggaacaaaaattagcaacttaactactactggttgattgctgcagcaaggattcgtaaatcatatgcaccatcgacacaagaaaaaaaaaagaaacaaatgaagtagatctgcagaggaacagagcagctcagagcaagaaagaattcaggagcagagagcaaaccttgatctacagttctacacggtccttgtcgcacagctgccgtcgtttctagccagactggatgtcccccatgatctgtgcgtcgccgctcgcccgtcgctgcaccctgccaactcctcccatgacgccgtgcctagcgtcctacctgcgcatcccaccacaccatgcctagagaccatgccattcccggaggccgacggtcggcttgcagccaccgcgccgcaagagattggacgggatgggggattcagcgatacctttcgggatccgcatgcagcagggacttagggttggccagtttgggtgggcttagtgggctgggcaattggggagctcatatggtcaatgcgttgctggattgactcagttactggtagttgtggacccagcaacacatgagagatccgttgcaagccatgtgttggtggaggggggttcgtgttgttgtggctggggagatcctgtcaacactggaggggaacttgtagacatcctgacgagcaaaattccaggaactgcgggaacaaattggtatgatttcggtagactcagcacataaggcttagggggagttttgttaacaataaacttgtgtgctaacttagtttatctgcatgggtttcattttgagtctgtacgcgtgagcctatgatctgtgtgaatagccatcgtgagggcatctgaggctagctcgctgttcgcgtcgtgtgccggaatttgaggacacgttgtgtggctgtggggatagacgcagctagatcacggcagtagaatcggtcctagtggttgtatttccggtttttgagttgctctttttaaggaagtaaacaaaaaagcatcaatggttgcgctgcaccaaaatgatttcctctgtttcctctgtctcctctgtctcagcgatttgcaggtttagctaaagttcacgtgtgttgtgttccgtcaaattcccgtggtcgatccttgggtaagtccatgttttattacttcactatccgtgtacaaaaccagcatgggccttatgcgattaggtgacgggctacattgccctggcccgttaagctatgttggtatatatgcttttgcccacttctttttttccttctcactggtggtatacacacttgggctttctactgggagagtatgtgggctggaatgctggtttgagcagccacatggatttgctgactttacagtataggggatctttttttttttgaacttctacagtacaggggatcttgattttgtggttcgccatgttgatttgtttttggctccaatagcttgaaattctgatttatatgtttgacatgtggtcatgtggagatgaaatgggagctttgaaggagacgaggccaatttttgttagaggtatagcattttgcatggtgacatgaaaatatcattgtgtggattggcggcctttactcgccagatgcctatgaaaagcacttatttttttgtaagcagtgatatcgataagggggcattggtttgtggagcacaattgctctgatgtattttggtgttggtctgagttactttttggtacatcaaagtgattttggtcttaatatgggttactttttggggggttttgattccttttgatgaatggactgggacactttttggttgcaatgaactgctacatctctgcaccctgcacagtgcgggatccgggattttttgttttttgaacgtgaaccaaagaagctattgctatattcctggtggttctgtttgtaagtgaatttttctcgaatatgcaggagaactgcatatcattgcatacacgcaaaccctcacttcctcacaacggttcagcaaaccaccaaaaacaaaatatcaaaacaacaaatcgaagaacaatagcaacatgacctctagctggcagcagcctcaagctacaccaaacctctggtccaaaagtttccttcttcagcaatctgcactaaagctgtatggatattttgggtacaataccaataaatgtataatcattctcatacttccagaacattcatgcgccaatatatgatcagcgtatttatgccacgcttctagctggtcgggatcaccaagttaatcatcagccaccagctacataacacaatatcctccacccttggtgagaagtctggcaacagaaaagcgatagaagagggacaaccaaacatacctagctagagaagacaatgtttgcaaaattgtatggggttgtctcctgctcctggtcaaatcaagggcagtgatttgggtgaggcaaaccaagggtaagtatatcaaccgtccaacgccttgtgcgccgccaaccatcaaatttagaaattgtaagaaattacatggctggctccatattttgccatcaacgagtgctaattgcaagaaatttcatcgtacaggtgatttagtctaataaatgccatcaccgtcagttttctaccgccatctactaagtgataagaaaagaccattttaccccttggtactactagaaaaataatttatcgccacgaaaaaactcgtagtatcaatgctaaaattgtggcaatagattaatgttgctacaatcttaaaatcgttgctagccgtggtaataaatagcgtggtaataggtgttgtcgaaacgacaaccgcatacgtcgaaagacgtggttactcaacagtggttggaaagaaacgaagtgtgttaattttagaattttttactccggatccccccattacatggccccaggggactatttatagcttcattacaggttcttactactagggtttaggttatacaggggaatttatatggttgcccttacgaaagggacatttacaggggtacataatgttatggaggctcatgggtccctgatgggccgtcgggcgatcgccggccctatagcccctaggcttgatgggccggaaaggcttcttcggccctcgcgggggcgaactcgccatggcgaagtcgtcttccttcggcagatactcttcgccttgcacccttcgcctgggacgcctctggcttactcgcacgacccctcgcctctcgccgttcttgctccatagtcttcgccacgggtttcagcagatttggtcgaagggcctcatgccatccgccaacaagcccctcacgggcaagggtgagaatggagcttcggccgagaccgtgcacaccatgtggtatggtacgcggcgccccctttcgaccgatgctcctgccgaaacctacattgttcctgcaaataaagtttgttatttgtacggctggtattattttgccgctcttcgcctcctgcggtcagtggtatatatatttttttacttttcctgggccgaaaggaacagtattgggctttcccttcgtgggcttttttactgtgctgctcggtcgatgggaatttaccgttttgcctacccttgtgacacgtggcgctttcttactggtgggtaggcgaaccatcgcccgggtgagctatatattcccacccctctttccttttcatcaccacacttaccatttttaccgcgtgcgctctcttcctccgttctttccttccacagcgtttcctgacccctcaggtgcttcgcccattctcttccttcgccaacgcatacacaccgttcgccatggcccctcgcaagccaaaacctgctttggcgaaagggccggatcccggccgggttgatgacgacagcaccgcctttttgggggtttctcacgtggacgacgtcgagctggcgaatttggtcagctctggggcgttggttgaggggcaggctttcgccccagggaaagccgtggtgccgaagcctatcgacaatcggacggtggtgttcgccgtcttttttgaggcagggctacggtttccgtgcaacgtgttgttgccggagatccttcgccttttccagttgagcccatcggcgctagttcggatcttcatcttcgaatgggcgtgccggacttccgggtttgagcctagcgccgaactcttcggcgccatatttttcgccaccgtgaactcgaaaatggtgattaccccggctggaacaaagaagacagtgttcgggagcgtgaactttaacgttcgccctgagtggtccgatctctggccggtgaacgccgccatgtcgaagtgggaccaccattggatggcgaggtggttctttcacaccatccccttcgaggctggttctgactcggcgaaagcccttcggtgccgtcgcagggcgattgcgccgaaccggaaacccaagatcgccgtggacggcgctatggaggcacggttcgttctactccgtaaggtttgctcctgccttagttgccgtgacttggtggaggaattttgtatgcttcgcatctttcccctctcccagtcatggcaagtcacggttgatcaagacgaagagattgacggtttgccgaagttggttcttcttgagggaatgaacagtaagactgttatttcgctatgcactcctgtgctttgttatgttgccttgttcgacatttaatgtagctacaccctttacttttgcagtgttgactctcgaccaggctgaagccgaagcccgcaggatgatcggcgatgtatcggtcgtcaagtatagcgagctgctgacacgacaagcagctggccgggcaaactgggtttacaacagtgaattgcctccccgggcgaacccccacaaagccgacgacgatgcaggaccttcgcgaaagcgaacgcgcggacaagtgaagcttgtccctaggaagcgaagggttcctgcttcgtcggattccgacgccgacgacgaggatcatgccgaagagcatgacggcgaggaggaaggggaggaagaagaggaggtggaggccgtggcgaaaaggccgcaaacgaggcgatcgaagaccgcgtcgacacccctggctacactcctactccaagtcccggccacaacgagaccggggtggagtcgaacagctccccccttcgacgaaaggatgtggaaggggcgaaggccctagttgcgttctcgtcgagcaaggcggcgaagggaggtccggtcaagaagatctctaaaaagaaaggactcgtcgacatcgctcgcgtttttagtgacgacgagtcttctgacgagactccgacttcacccgctggccgcagcctggacctttcgatcgcccccattcttccactcggcgctaatggggcaggcagcagcgccatcaccggggcttcagcctccgccgaacggatcatgatggctgcggcgagggtcttcgggagccctctgcgtgaaccagctatttcgccgttagtcaagacgaaggggaagggtgcggccgccgaagcatctgcctcggagtattcccttgcggcgccccacttcgcccctggtgatttcgagacccgggcggaccttattccctttgtggagggagtaagcaatcttgtcctacctgccagcaccccgagcctattcaccgaactaaatgagttcgatgaggggtgttctgctattaaaagcttggtagttcgggtatgctttttctcccttcatcattttcctctccccttttcttttacctgtctcataattaacattttgttctcttcgcccgctcgtatcttgcatccagattcttgcggctcactgttcgacagagcgaaccgcgtgggcccgtcttgacggatttaagaaccgtcttcgggccaaggacgacgaaataagccgcagaacttggagatggaggcactcgccaacacactcaaagaggcgaaagctgaaatcaagcgcctccaatccgagttggagaaaggaaaaaaggctagggccgaggtcgattgcctcaaggccaaactggagaaggggagagaggccatagcggaggttgatcgcctgcaggccgaattgaaggaggaaaaggcccattccgccgtgctgactgattactataacctcactgagccgaagatggaagctcttcgcctgaaggttagcaaggccgaagcgagcgttgtggatgagtcgcagcggttttcgcgggagatggcgaaaaccatcgaatccgcgagaacggcttgccaaacgctccgcctcgcgcttactgacatgggcgcgaaggtgcgaggggtctctgccgaagatgcctcagctttcgacttctccgagtggacccagcaggctggcggttcggtttcggactgtgccactacgtacggcaattgctgtgcgcgtgtatcagcggccttcactttgggccttttgcaacagttcgtctgcgagcacgtcgccgagttccctaactatgcgaagggggactgggagattagtgcgcagaacattacgcctgctcttcgcgcgtggcgaaaacagttctggcagaaggacggcccgtccgctgccaaggcgcggcttttggagcaactagcaaaggcggaggcggcagaccggagcgaagaagaggacatggcaggcgaagagggtggaggcgatgcccaggatcacccagaggtgtgaggccctccgccctttccttagatttttgtagttttccttcttctttttgcgtttgcctgttgaggcgaacgatgtatattcggcaggctgccgctaaccctccttactgtagccaaaaaaggtctctcgtatatttggaatgtatgacacaatcttagccaccttttgatggtcgaagtctttggcgtattattatttcgctcatttcgcattatgccataccttccttttttttcacctattcttacaatgtaaattgtgttttgccctttctgcactgtctaccagggtgttcgccgaaagtcgtgcattcggcccccttctgggagctggcgaagtcaaaacgagaaatttgtggcattgaagggtctgccgaaggtccgatgcccattttggcctttttatcgcgaaatggagataaacagtcgcagctataaggtttttaaggttgccggctggctgcgggcgtaccccaggcgaaccttagaagactacgaccttgttcattcaagacgtttggaggatatggctcgcttttggcgaaaccatcagaagactaatcgtcaggaagcgatctctcagtgtcgttacagtttagtcagtgtttcgccccctactcctcttagggttgtgtatgatattagtagtgatgacgaacctagttcgcctgaccattccttagggagagatagtgactacgggggcgaagatgtaatttacttgtaagctgggctgtattgtattgtaaaccttctattcttcgattattttttcgaagttaataacgatgtgttttattcccttttcgctatttttcgcattgtcacattttgtgcttttgttaggtcggaacatgtcatcccctttgcgtatattagcgaaataggtgtactgacttttcagcttttcgtcgttcgttttcgatccgtagcgttctgtgctgcaagaaacgcttttgtttttatgttgatcgaatgtaacggcgttcggctagttatttttcgaaacaagctgtggcggtttcaacgttcagcgagcgatgcttcggccgattcgtttcgcccccctggcctttttcgttgatcaggtgtttgccttggggtttttccacaaattatcaatcacacaaaaataaaaagaaggcggaggacacaagggttttatactggttcgggcctccgtggtggataatagatctacatccaattttttttgtcttttttcattttcctcttttttttcttttttttttcttgccgaaaggcttacaaagtgtcgaagggcttacatgatgatatgtacatttttacaagttggcgatttggatgccacccgttctagacatagaagcgcttgagagaggcggcgttccaggaatggtcgaactcgtcaccttctagtgccgccaatcgaaaagatcccatcctagacttgtgcttgatgaggtatggtccttcccactttgattcaagcttgccaacagcaatcgggttcgctttcttccttaggacaagatgaccaggcatcagctccgtcggttgaacttttttgttgtaagttgccgaagtgcttgtggtatactggcgcatgtgcttcgactcttaccccctccaagagttcgagcgacacctcgcgcccctcttcgcccccagagaacatcacccttggtgagttagcctctagctccgctggggtcattgcctcatcgccacaaagaagcataaacgggttaaacttggttggtcttgtgggggtcgtccgaagggcccagagaacagatagcacttcctctggccatttgcccttcgctgccccctcgagccttttctttagtgcttctaggatcttgccatttgtacgttcgaccgccccatttgactgcgggtgcacgactgacgcgaacctgatttccaggttaagtccttcgcacatctctctgaacttgtcagagtcgaaccgcttgtcgttgtcagtgatgaactcttttggcactccaaaacggcaaacaatgtttttccatacaaacttttgtactgctgccgaagtgattgccccgaggggttcggcttcaatccatcgagagaaatattccacagccacaattgcgaacttatacccgtttcgcgccaccgggaacagcccaatgatgtccagtccccatctggcgaagggccagattggcgcaatgggctgcaaatcatactagggcacggtttggcttcggccatgacgctggcaactttcgcacttcttgattttctcaatacagactttcaacatagtgggccaataaactccttgtctaaacactttggaggccactgttcttgcggcttggtgcgcgccacatagcccctagtgtatctcctttgccatttcctcgccttcggcgaaagagatgcaacgaagtaagggttgaagtaccccggagcgatagcgctgggccgagaccatcttatacttcgtggctctgagttgcaagcgctttgcttctgcttcgtcttccggaagccagccagtttcaagatgtttcacaaacggggttcgccagtcgtatgggtcttcgctcagtttcacctgatcgattgccatgacctccaagctgtccacgggcacacttggtgcatacaggacttcgaaaaagatgccaggcgaatgtgggccactagaagcagcagatttcgccaaggcgtctccttcctcgttccggcctctaggtaagtgttcgaccgttatgccggtgaagcacttttccatggaccgaacggcctccaaatacctcttcattccttcttcttttgcctcgaaggatttgtcaacatggcctgccaccagcttggagtcggttcggattagcaagcgccggactcccagtgctttcgcctttcttaggcccagaagaacggcttcgtatcctgctgcgttgttggttgtgtcgaactgcagccttgcagcataccgaattggcacaccattcggcgaaatgagtactgccgcaatgcctacccccttgtgcgaccacgaaccgttggagcacatcacccagaattgttcgacaggcttgggctcgggggtgaatactggtgtccattcagctacgcagtcagctagcacttgagacttgacagcagtgcgtgcaacaaaacgcaaatcgaacggggatagctctgccgcccacttgctgagccggccagtaacttccttgtctcggagtatttcgcccaaggggtactatgatggcactatgactttgtgggcttggaagtagtgcttaagcttgcgcgaagccatcaccagggcgtaagcgagcttttccatttcaatgtatcttgtctttgctccttgcaatgcttcggagaccaaatagaccggtttctggccgaactctgtttcttggacgaggacagcactaactgccaccggcgaagctgctaagtatagtagcagtttgcttctcggtgctgggcttatcagagctgacgggctttgcaggtattgctttagctcgtcgaacgctgcttggcattctggtgtccaattgaactttcccgagccccggagggtcttgaagaagggcaaacctctttcggctgcctttgagaggaatcgactaagtgccacaattcggcccgcgagcttttgtacctcatgtacactcgacggaggcttcatttgctgaatggcgtcgattttcttgggattcgcctcgatgcctttttcagaaacaaggaagcccaacagcttgcctgcgcgaacgccgaaaacgcacttctcaggattcagttttatgcctgctgcgcgtaagttgtcaaaggtctcctgtaggttggacacatggtcgaaagccttgcggctttttacgacgatgtcgtcgacataagcttccacgtttcgccccaactgcttgcaaaggaccttgtacaccagcctggcgaaggttgctccggtattcctcaggccgaaaggcatcctgaggtgacaaaatgtgccgaatggagtgatgaaggctgttttggggatgtcgggcgggttcatgtggatctggtgatagccggaatatgcatccaggaaactcatgagttcgcagccagctgttgaatccacgagctgatcgatccgtggcaaggggaaatcgtctttcggacatgctttgttcaggtctgtgaaatcgacacacatgcgttttttgctggttgacttccgcaccagcactggattcgccagccactccggatggtcaatctcttgaatgaccccggccctgagtagtttttggacttcggctttcaccgcctcttggcgatcggcggacatcttgcgcaacttctgttttcttggcttggcatctagcttgactgccaggtgatgcatgatgagatctgtccaaacacctcccacttcgtcggggctccaggcgaagatatcaatgttctttttgagcacctctaggatgctcccagcttcttcttcacccatgtcgtcccctagtgatacgagctttgtggggttggcatcatcaatctgtacctttattatcttgctgtgaggggtgggctttggcgcgtgcttcggtcggtcatacggttcggcctcaacattgtgcacttctctgttgattatggccagatcgccttttgaagcggccgaaggctgaagccccttgaccactatcactcctgtcaggccgggcatcttgagcttgagataattgtggtgggaaatggcttcgaacttgttcagggttgcacggccaaagatggcgttgtagttgtacgggatgtcgacgacgtcgaacagtacttgctcttcacgtctgttctcccccgagccaaaagctatcagcaaaagtgcttggccaaggacttgaactgcctctccgccaaaaccgcgaagcgatgctggtgctggggtaagggcttgggtgggcaaccccatcttggcatatgcttcagcgaagataacatcggccgaactccctctgccgaccaggattcgtcggacttcgaagccagctctctcggctgagatcacaagaggatcttgatgcgggaacataactccttcggcgtcttccgacccaaaagaaattagctggttcagatactgcggcgtccctttacccgccgaagtgatgttgtggaccgttcggatccgcatcttcttctgccgtttggacaactggcttggcgggtcagcccttgtaatcacttggattacccttcgctgtgcatcttggcgttgttcggctgggggtgctttctcctgaactgcttcacgaggtgcttcgacagttgctccctgctacggccttggatcttgcatgttgccgcgttgcctaatgtttcggcattgctccgtggtgtgcgaagagcgtccgtggaaggcgtagtagaggtctttttggaccttcttgcggaccggctgctgatggttgcttgcttgctgggcgtcgaactccttgcggagggcttgcacttcttcaacagccatcacagccttgcctgcatggtcggttctgaacttcctccaggtcatgagggcttggccttgccttggcggctgtccttgaatcgccggctaaggctagcgaacagcgaggggaggtggttcggcaacttgaacttgtgcttgagcttgagcagtggcgacggaagctttatcgtactcagcttgtatagcttgccgtcgcttggaatcctcctcgccccttgcgaaaccgcaatgatgcgaagtaggtgctcaagtgtctgtggctccttggtggcgatttttcttgtgagttcgccctcgagcagaccagccgaagcggcatttatgaccgatgcctcggttatgtcttgaacttggcaccgggcttgcgagaagcgacgcatgtactcccttatcgactcccccggcctctagcaaatgccaagtagatgttgctacgtcttcggctcctcataggtgcctcgaaagttaaggacaaagacatcgcgcaattgctcccatgagtaaatgctattggctggcaaattgaaataccaagaacgggtgatgccgtctagagcgagatgtattacctttgccttggtattttcgtcgccatgagccgcttcaatcgcggactcgtagatggagaggaatttcttcgggtcagtttcgcctgagtagcgtgggacgggtgggaatttgaactgggctggaattggacgagtcttgattcctccactcagcggtagccccttttcgccccccgccctatttacggcaccttgctgtgggtacggcgtggcgaagggcgaaatcacggcttgtgcatggggttgggccatggatgggtcgaaagttggctgttaccatctcatggaggcttggattggtgcttggtttgctccgaagcctggagtttgtgcttgctaccgaacggttggcgcctgagcagcattgatgaagtcgaactgcggtccttgactccatggcgaagcccccagacctggctgatttgacggcaaccaactaggcgcaccttgacttgtattcccctccgggcgagccaatggggttgtacttgaaatgttgtggggttggttgagctgctgaaggaaagcttggagctgcgactgcagagccgaagccccttctgccattgtttgtggcacttggccaggtggctgatggtgcacttgggcagcgaccggctgagcttgcacttgcatgtgaggggccggatccgctgctgcgggcgatggctacccggcgaagtacattggcgcttgcgcgacttgtggcggaaggtgctaggtcggcacttgcggatggacttggagtgggacatatcctgtcgaatactggaggattggggcccacgtgagcttggttcgccttgccgcctcgtatgcttgttgttgttcttgcatttggcaaagcatgtcttggagccgtgccatgttctgccgcatggcttccatgtcggcttcggtttgtgcttcggggtcagggttgacttggacctgcccagcagcgagcggagctgaggccgctgccagctgcgatggggcggcttggggcaccagcagttggcttgtcgaaaggatctccgccctggtctggagtgcccttgccgccgcagccgccttcgccacgttggccacgttcgacacctgcacagaggcggcaagggccgaaggcagtagtgatggcgcagatgcggaagcagatggcgctcctccatcttcggccacgggcgccgaaggctctgcttcctcttcggcagccatgtccactccggcgtcgctttcctttcgccttgtaaccttctccttcacgaccttcttctgtggcattcgctctcagatgtttcgctcggaggtccccacggtcggcgccagctgttgtcgaaacgacaaccacataagtcggaagacgtggttactcaacagtggttggaaagaaacgaagtgtgttaattttagaattttttactccggatccccccattacatggccccaggggactatttatagccccattacaggttcttactactagggtttaggttatacaggggaatttacatggttgcccttacgaaagggacatttacagacaagaagcagaggaatgcacattaacagatggcgaactccgcttttctcggtgatggcgatcgtgatggcgattagccatgatgcctccctcgccgccgagtgggtgggatttccaccctggtaatgagatcagggatcagtgtcgtcgtctccatggtactccggtgcactcttcttctttctattgctttcatcctttcaaattggtggtggacgtcccccgttccacttttcgtcttgaggagtcctctgttgccattgctcttagagcttgtttgggaggttcccctgctggattttttgtttcgcatctcaatgatcggtgttacaatttctgtgttcgtgacaaatctgttggtttgtggatttacaacctccgatcatatatttgccgtgattatcacatgaggtttttcttatggcgtgatggtggtcctaattggaggtttgagtttcgtcggtgggaatctgagcagctcagtgagtggtctgttgttaagagaaagaaatctatgtctgttaaatcaaagtctgttactgttgcttcatcctccattccaatctctaaggtttttaaccgcttccatgttcatgattcctctcgttcatgttccaaatttctgattgcaagctcatcagatccgaactctcagaatccaatctctgggcctaaagtttcgaaggttgttgataaaccctctgatccgattcctaagcctactcccagtgctgggcctaaacccttgggtagtggtccattcaaacggttttcccctagggttcgaaaagtctgggttaaaaaatcggttgtcaagcctaagtccccccgtcttccactctctgctgctgcggaaaaccccttttctcgagaaagctctccgtcttcaatggcgaaccttcatccaaatcctctccgattcatccctcccggactgcatttgcacccagctgggcctcatcgacgccggcgagtggactcagttaacttcactccctcaatcatgagtcatgagcagtacgtcttggctctggtccttcctccgttgcctgaagatcaatcggatgagcatcgtgctgagattagggagtttcttgatcaggtcaggaatattcgtgtgcttgcttccttcccgcatccgaatgctgtcgctttattccagattagttcacctgttcatcgggatgctttagttcttggtgagcccattgcttatgatgcggttcatgaggtctgttttgttagacataatcagggtccgaattggcgtaatgctccctataatcatagaggttgggtcatgttgcttgatttcccgctggactatgttactttgcataatgtgaaacaagtcatttcaacctttggtgagctggactggtggtatgattctgatactctcaagggtagggttttggcaagagtatggtataaagatttagactctgtgccacagtatgttgtttgggagcaaccaaatgctccaaacggccagtcatggactatctatgtttataccctaaatggtgagtttgctgatgctttccctcttgatgatgatctgccgatgggtgaaggtcctgtgtatcctaatgttaattttgaggatgttccagcttggcaatttggtaatgtgcagaattttgatcaggaagagaatcagggttgggataattgggatgagggtcaggacaatgtgaatgacaatgttgattttttgcctgagattccacagcctactgatgtgctacaaattaattcctcctttgctagttctattttagctgtcaattcaggtaactctggttctattatcagtatttctagtagtgaagcaagtgagattggggctgacaatagcttgatggtccaggaagtttcctgttgatgctaatgttttaaagaatttatgccagaggtttcctcagattatgtttgataagaattttgtcaaggatgcatccttttggtctgccttaaactctggaagtgttcttggtacttctagctgggcttcagggaatgatgttcctgttgtttctggggctaatgaaattcttgatcctgttccacttgctgttgcgccgcctcctagtgtttttttagccctcactgattctgacgccccagttaaaccagcaaaaaggacttacaagaagagagcagttggatctgccactcctgttgttgctacaggattaagaagcagcaaaagactccttgctatttttgatgcacgcaaattgagttttaaggatgatattcttgttgagcctgatcctaatcaaggaattgggaaacctaggggcaagtctgtaaaaaagctcaagcaggttgctcatgaggtgggccttcttttctcaggaagttctctgcaagaatctgacttcatggaaggtacagctgaagtggaaggtcctgctgattgccctattcctctcctccagaaaatggccactgatctttgtggtgttgctcctcaggatgtgacacaggaaagcctcctggcttctgctccaaagtctgttgatgatgaatcttgagtttctaagtctggttctgtttaggtttcctaggaataaatctagaactttgtcttgttctatgttccttagccctagtggctttgtttatcttcagttatgttccttcgtgtcctatgtttcctctccagactattgctctgtagtctgttctagcttgccccctttattttttgcttggaccagtcagctcttggctttggaatgtaatttaattatgttctatttaccttgttccttatctactttctatgagtaatcttacaagaaattggaatattctgtgttggaatgtgagaggtgtaaattcagcggataaatgcagagctgtcaggcaagctgttgatgatagtagttgctcagttttttgtttacaggaaaccaagaaggaaagttttgatactgcttatgttaagaagttagctccgaaacgctttgattctttctctttctctccttccgttggagcttctggaggtatcttggtctgttgggttgttgcaatctttgctgctaatgttatttgtatcacccggtctgctgtgattgtaaagttctttccaaaacactctgctgagtcctggactcttgtttcagtctatggcccgtgtgttgatcctgatagatccctctttgcccagtggttgtttgatttgcaaattcctgacaatgaaaattggatcctcttgggtgactttaacttttacagatctgttgagaacaaaaatagggcaggttgggatatgaatgacatgatgattttcaataatataatcagtaatcttggtctccttgagttgcctttgaaaggtaggtcttacacgtggagtaatatgcagaattcacctctcttggagcaacttgactggttctttacgactgtttcttggactgcttcctatccaagcaccttggtaaagcctttggctagatctatttctgatcatgtcccatgtgtggtccaaatagaaacttcaatcccaaagtctaatctcattaggtttgagaatttctggatagagcatgagggtttctttcagttgatttcttcaatctggtctaatcatgggactggtttggatgctgctaagaatataacatcaaaatttaaatctcttagaaaaggtctcaaaaaatggagtaaaggcttgtccaagttgtcctcactcatagcaaactgtaatctggtcatagcctttattgataatcttgaggagataagagatttgaccttggctgaatggaatctcagattcattgttaaaaggaaagttttgcagtacctgagatataagcaaatgtactggcagaaaagatgcactataaggtgggcaacttttggtggtgagaatactaaattttttcatgcagcggctactgagaggtacagaaagaacttaataactcacttgcagacagatgatggaagagttttaacccagcacaatgaaaaggcgcagataatttttcaaacttttcagcagagaatgggagtgtctttgctacctgttatgcactttgacctgtagagtttggtttctcacaatgatagtcttacccacttgtctgaaaacttctccatctctgaaattgatgaggttgttaaaagaatgcctactgatagagcacccggtccagatggttttaatggatgctttattaaaagttgttgacctattattaggcaggatttttacaccctttgtgctcagttttgtgaaggtaacttggctttggaaagtttaaatagatctttcattactcttgttcccaagaaatcaacacctgagagggttaatgactacggaccgatttctctccaaagtgtggctctcaagcttttaacaaaggttcttgctgataggcttcagtctgtaattacagaactcatccatcaaaaccaatatggtttcatcaaaggcaggacaatacaggattgtctctcttggtcttttgagtacttacaccagtgccaacaatcaaaaagggagatagtgctgttgaagttggactttgagaaagcttttgatactatagagcactctactattttggacatcatgagacaaaaaggttttgattcaaagtggttgaattggattgatttgatcttttcttcagcatcttcttcagttcttctaaatggggttcctggaaggaatttttattgcaaaaggggtgtaaggcaaggggatccattatcacctcttttatttgtgctagatgctgatttactgcagtctgttgtcaaca

SEQ ID NO: 12890 - DNA, 8643 bp, Oryza sativa
taagcagacagcacatgggtcaatacatacaggtgattggtttaagtacctccagccaaatccctgcaaaataaattgcaatggaactatcagatgttaccaacaaaagcactgcactatggttaaattttaaaaaatggaggataatacttatcaatgctgcacaattagagtaaacgaattggtctaagcatgtcatagcaaactaataactaagcaagtcaatgattacaaacatgaccagtactttagtactactactcatatatgtaacggaaaaggaagtaaagatattttagcagcaaccttacctggcaatgctcatgatactcataagcgggaggcacaaatatggagaaggaacagtgcgtattcgactctctggttctttgctaagaatttcctcaagagagttcctatgccatgagcgagctaccatcaacggggtccagctgcataagggaaatgaaacatatgcttttaactactaggttttaaaattaacagaaacagtgatagttctttcactatgccccgtgaaaaaagatagctctttaaccatgtatcaaaacttcagaatcatacccgctagcattctgtgcagaaaggctagctcctcgagcaataagaagctgcatcaaacagcttctggttagatatgttgataaaactagacaaacatttaaattatgaaaaagccttcagactggcagaacatacttgacaacagacagcattcccaccacatgcagcataatgaagcggggtgctaccagctcctggcagatggaagcaacaaaatattacatctagatatatgagaatataaacagagtagaaagctggaagaatcaagaactgtagatagtatggacaacttggtgatacattcaaacatgttaagcgctacatgccctaagagtgtgctccaacattatcaaattgaaaaacaccaagcacagaaaggaaagttaaagttgcaaaaaaatacctattaagtcaatagttgttccatcttcaatagtggcctcaataacagatgctcccaagtccagtaacaattgcacacactctacatgcccatttaacgctgccatatgaagcggagtcagtcctccatccgccttctgatttaccatcttgaacaaaccactgctaacacagacatactatttgaatgattcatggtcggtttaacaaccaataaaccaatgggaaacaatcaaggggctctaacatactcttcatcaagatcagcagatggaccttcttcagataggctgtccttcatcgagttccagaagtttggcatgctgggaacataatccgcaagcacaagacgaaggcaccgggcatgaccatgtagtgcagcaaaatggagagcactaccgccattcaaataatctgtcctatgaacctaaaatacgttccaatgcctcaggattagatatccaagcgactagaaatttctcagtgaacagcaagcaaaatactcacatttgcattgaaaagcatcagtgtctgaacaacctcccagtggccatattgacaggcttgcattaaagcagtctacatacaatgaaaatttatagcatattgccatagcatttcgcaagtgaaacttaaacgagtaaatgtaccagaaatcttggtttacctggcccctgtaattcctgaggttgatctcgacgccggattcgagcaacagagaaacaatctgaacatgcaagcaacagacaatgtgaatgcagttcttttacccatctatacagaagcactgatacttcagctacatttttggcagacaaatggcatcacctcatggtgaccctgcgcggcggcgtagtgcagcggcgagttgcggccgccgaaagtggagtaccgggcgagccgcgggttgtactcgagcagcgcgcgcgcctcctgcaggtcgccgtcgcgggccgccgagacgagccgctcgccggaagccgagcacccaaatgagttgcccacaaggctgaggaaccccatggatgctcgaagctgaggatctcctctcttagcgtgcacgggaaggcctcgaatcgaagacttcaccctgaaatttcccaatccacgaggccgcccaaaccgcattcgattcaagaatgatcaccagacaggatcaagctcccgactttaggcatgccgacgatctttaaccccaaggttcagaaagcccaaaattttcctgcaaaatcgtcaaattcatcacgggaagcggcaaattgacgggaaatttcagcttgacgcctaccaattgcagcgagactaccaacaattcgacccaaaaaagccaactttccgcgctacaccaagaaatcagagtggaactcactcctcctcgggaatcgcccagggtcgtcggtcccgagctggaagaaatgcaaaaccgagaccgaccgacaacgccctctaaatcaggcccccaatcctcgcaagaaaacaagggacctcgaactcgaagggggaatcctcggaggcgacctgccgcctcgaatcctcagaacccaccccacacccacgattccagcgaggggggggactggatggatggattggggaatcgcggggtgcaaacaacgccgatgcgattcacaagaaaatgcactcgttgttgcaatccggcgacaagggacaggaaggagaaaggaataatgatctgatggagacggcgacgtggagatgcaggtagtggccaaagatgatgtttttctttcttttggcccaaaatcttctagtgctacaggaacaggaagtaattaaaacaagagccaatagataatcagttgtataaactacctcctacatcccaaaataataactactccctccatcccaaaatatagagagttttagagttggatacagttattaataaagtacttcctccgattcacaatgtaaatcattctagcattttccatatttatattgatgttaatgaatctagacatatatatatttatattgatgttttagaagtaaatagaaagagaaaaactaaaccacggtatcccgtggggacgggatagcgctcatccacccgagccccatctgtttgtcgctctctcttcagataatttccatgcctcgtcaactcagctccctaccgacatggccagcggcggcgacgacgactccgcctccgcgctccgacaacgccccgcacgagctgttcatcttctccacgtctcgcaggcggacgatgacttcgcctccgcgctccgacgaagcctcgccggtggagccggagcgggaggcggcgggcgaggtcgaggagcataagcggctcggcaagcgatgcgcgcagcgcgtccaccagcggcgccgccgccacgagcgggaggtgcgccgacacgagctttctcgaaggtgtggtccaggtgtcgcgctaccgtcgtcttgcctccatgctccaccacgcggctgccttatcctctctctcctcctcctcctcctccaggctaccaggtaccaggtaccacgggtaccaggtatcgtgggtgtcgacgtttgatgtcgcgattccggtatttgcatagtatggggatcgttggtactaggatatacgcgagactgaggtaaaagagacgaagacgaggatttttatacaggttcaggcccctgaattgtcaggtaataaccctacatcctgttggccgaagccggtcattgctcttattcaccataatcacaccagtacaatatttggggtagtctatctaactgttgtcgacatggcggtttgaaggtctgactcgtagtcgacaacagggtagtcttcctcctcgagttcgtgcccggtgagatcagagatagcgctttcgtctctcctgacagtatccggagacaccgtaagggactagccgtgcttatccctgaagtcgatatccggtgtcttgtcttggcgtatgttggcttgtatgttgatcttgtgtcttgatctatgttccgtgtcgtctatggtgggtgtgtcccctctcctcctagggggtcctgtatttatacccataggtgtccccttgtccaagtagaactagggaaaccaatatggatacaatccgagtagtccttgtcgtttccatgtagaactctggttgtctttccttatccggaactcctcctatatccgcaggctgtttccgtataggacatggtatgtggtgggtcctgccaagatttagtcgactactattaggtatgtggtatccataaccatgacaacgggtaccaggtaccacctggtacctagtacccggtacccgtgatacctggtactctaggtaccatacttggtacatgtgagtattaggcttgatacctttcatcatcgagatggccggcggtagcggcggcaaggtacgtagtgtggttgtacatgacggcagtgtattgcagtagggaagggaacatggacaaactcgatgtgggcgacgtcctcgacgagcagctcgaagtggcggccgacgcacgtcaggaagagtcgcgtggcttcacagctttgttggaagcttgcatgtgggggtgaggtgcgcgacttcggggatatatgcggcgttatgctgtcgccccgagtgatgcgaagggcatcccgttcccacgggatcccgtgaggtagcagccctcaaatagaaaggagttgtgattggttgagaagtcgagataggtgggaaatgtgaatattggagggttacgattagttaggaagtgaatattggtggagaagttatattttgagacaattcataagtgctaaaagctgttatattttgggacgaagggagtagaactaaatgagacattttctaatactagcaatttggtccattcgattctaaattattatattttgagatggagtgagtgtcgacgtttgatgtcgcaattctggtatttgcatggtatggggatagtcggtgctaggatatacgcaagactgaggtaaaagagatggagacagggatttttatacaggttcgggcccctgagttgtcaggtaataaccctacatcctgttggccgaagccggtattgctcttattcaccataatcacacgagtacaatatttggggtagccaatctaactgttgtcgacatggcggtctgacgatctgactcatagttgacaacagggtagccttcctcctcgaatccgtacctggcgagatcagagatagcgctttcgtttctcctgatagtatgcggagacaccgtagggtattagccatgcttatccctgaagtcgatatccggcagcgtgtcttggtgtatgtaggcttctatgttgattgtgttgggtgttgatcctgtcgggtgttgatcccgttgggtgttgattgtcttatcccccctctcctcctaggaggtcctgtatttatacccataggtgtccccttgtccaagtagaactaggaaaaccaatatagatacaatccgagtagtccttgtcgtatccatgtagaactctggttgtctttcctaacccggaactccctcgaggtcagtttccatataagacatggtatgtagtggatcctgccgaaatttagtcaactaatattaggtatgtggtatccataactctgacagtagcccccgacttcgatgcaaatgaacgagttcatattctcaaccgcagactttggaggaactgttatcgagctcacatgaccgttctcggtgagtttagagataacgttagacttcctttattagcctcatgcgggcaccgaaagggtttgtctaagtcaatctctgatgtcgaccgagaaagtacagagcgtacgactaagtctcccgtcttgctgtaatcgagaatttggattgaagtcaagaaactttatctcggcgggtacaccatctcttcattccgtattctttgtcgagatccagcaaccgttctcgagtgatcgagaaggcgtagagtctgcgacggagccttgtcgacatttgtcgtactcgccttagtcgatcttggtgtagaaccatagagacatggagtcttcgataatgtcgaatagaattttcctgaaatcaatactcagaaaagaatattagatagaaatagcccccgagcgaattctcaaagggtgacatgttataatatggcagactagtgaattgaatgtacagaccagtgctttgtatatgagcgtcttctctcttaccgactccgatcagtcagtttgtagagtcatacactctccctagcccccagccttgtcgtcggagaatcgttctcagaagataaggctcttggacctttgacctgcctcggttgaacaagcactgatcctagcccccagctgtgaagttggaaaatccatttccgattacacagcttggttaatacgcacggcgagaactcttacatgaccagatcttacatggtctttcgtctctgaaggatccgacaaggccttatcggctctgggcgtccccaaccgaagttcccttaggttcctcggaggccttgtcaagacggcgtaaagggacagtaggataggtttcaacgctaggtgtcatctgggtaagggatctctgggtaaaacacttggcgatcttatgcacctgatatcaactttgttgaaagaggggtaatgggagaatcgctacatcgctggtcgaggaccaggcagtagtcgtaactcgaccacttgaagtggaagtagtgggagaaacgctacatcgctggtcgaggaccaggcagtagtcgtaactcgaccacttaaagtggaactagtgggagaaacgctacatcgctggtcgaggaccatgcagtagtcgtgactcaaccacttaaagtgaggcgagagagatcactatgttttactggttcgagaaccagaagtaggagtcttttaatcacctataggggcgctaaagttagtttattacatgtgcatatcatgtggccagcatgactcacatacccaacttatagcatatccggatgtccgctcgcaatcatgtcgggtgattaaaccgacggcgtttgcgaggaattatccgttaacgaccttttctcgagtagtccagccatggccggtgttatgagataggtcgtcggtcttcgttggtaagttgggtgcgacgactccgtatttgtcgagaatgttctcgatagtggggtgtactcgaccataacctactcgagtgctcaaatgttgctgaaaaatattttctagaaggcaagacatatagcagagaatatcgagtatgtactaaaaactgcatggatcttctagtaatatcaggatataacgagcagatgtaaatatcaggcattatgtaacaagcatgacttatacagaagaagacagagcgagcccccacctttagatcgtagtcgatttaacatcagggacacccgcgcaacagatattattgtataaaaagcgtgctctgggtaaacataataaattatggatctgacaatactgtatgatctgaataggtacgataaattgcagataaaatattgtgtacctttgtagatacatgccggatgtatctacgaaattagtagatcaattttaaaaaaccaatctaccaattaccttgctgcgtactcgttcgatatcaggcgatctgacatcttttggtacgccgcggagcttgaggcttggatgatctcgatagaccaagttgtcgatgacgatgatggttccgatctagtcagaagatgtacttggacaggttggatctccccacagccgaagtcgtcgagtagcttgttgtcggagagtccatctcttaaacccatctcgtcgaaatcctgaagcaccaaaatccccctacctggcgcgccactgtcgacgtttgatgtcgcaattctggtatttgcatggtatggggatcgtcgatgctaggatatacgcaagactgaggtaaaagagatggagacagggatttttatacaggttcgggcccctgagttgtcaggtaataaccctacattctgttggccgaagccggtattgctcttattcaccataatcacacgagtacaatatttggggtagccaatctaactgttgtcgacatggcggtctgacgatctgactcgtagtcgacaacaaggtagccttcctcctcgaatccgtgcccggcgagatcagagatagcgctttcgtttctcccgacagtattcggagacaccgtagggtattagccgtgcttatccctgaagtcgatatccggcggcgtgtcttggcgtatgtaggcttctatgttgattgtgttgggtgttgatcctgtcgagtgttgatcccgttgggtgttgattgtcttgtcccccctctcctcctagggggtcctgtatttatacccataggtgtccccttgtccaagtagaactagggaaaccaatatggatacaatccgagtagttgttgtcgtttccatgtagaactctgattgtctttccttatccagaactccctcgaggtcagtttccgtataagacatggtatgtaatggatcctgccgagatttagtcaactactattaggtatgtggtatccataaccctgacagtgagtacttagcacgccttaagatgagttgggtgtttggattcttaattaacgagggagaaagcagatgacagccaatgg

SEQ ID NO: 12891 - DNA, 8311 bp, Oryza sativa
ataattgtgctttgagagcctcatctcatcccctttataatctctctctccatgggaagcaaagtaaggtgtgaaggcacctgagaggagagagcttgacaaagagcatcatgcatgatgcccaactaggcccacagtatggatggtgagggcgtgtagcaaaaaagaaggcataacctttttgggtgaaaaagaagaaaaggtcagggagtttgagacaccaatgaaaggaagagaaaggattagtcacttttgaaggcagaaagattgcactactaaaagtcatggggagaaggagaaaagagctcctgtcttttaagatgggctaattgcgaagtgggatgcactctgcagcaaagatgcccctctttgcataaagggagcaccccttctttctgtttgctagggaggggttttttggccacttaggattccttaaaaacaaatgtgaggtgccaagggaaagttggagccccataaaaggggcaaactccggctttgtatgaaaagttcctcaaagcatttttcgcagtggcttccccctttttctttttattagtcaagcataacaatcccttgctttctactgccaacacatttgctcattctttgtactagtaccaaaagaattttatgactgtactgcctctctactgttccatgtgttcataagcattaggtgcctttttttccactcaaggacttgcatgcattgcatgataacgaaaagattctccaattacaaaagaaggggctctgaactgaagtgacatgtgcaaaagcttctttcagcaacgatttgtgtcccatttctgataaacgaaaaacaatacggtccatcataagttaatgactttgtagataaccccttgctattggattgtgtttgctactactaatgaacagcccaacataagaggcagaaacaagataaaggcccagaccatttaggcctcatttggaagggccttaatccaggcccatccacatgtgatgggctgggattttgtgccttaatccaggcccattcacatgtgatgggctgggatttcgtcctatccaaacaaggcattaatttcgtactgtgcaacagagggatcagaaaacacacagaaggtgccttggaaacaagggttgcaagttgcaacactcaatatccagcaatctcgatctataattaattgagtacatataattgctaaaggcggtttaagtaacatgctggatagacctaacaacagtgattgacagaaacacggtataagcaagtgatgaagatattccacttcaaggaactgagaagcaagcagctatgcaggtacatgcattacatggttgggtcgaataattacagtgaactcggtaattctagcaaaattctgataaacacacgatatttgaccatttttgagcgccgtaaccgtaagcggggtgagtaatagatatgacatgcctgtggcctcacctgctgggaactgcactgcacgcgagctaggtttcgtaattagtagttctccacaattctgagtaccgacgaatatgttccaagagcagcgcttatggtgcccaatattattataccaatacttgcaacgacctgagattgaaacaaaaatgtcaaccacggatgtagttgacaaacaaaagaaacaaaaaagaaagagagcgatttttggtgttggtctaccacgcgatgtgcattttacctgggcagtcgttgctttattttgcctaatcttcaagaagcacagtgcaggcattatgacggcctgtaatcataaaaaaaaatgttgaaatgagtatgtttgttgctccttgttcaagggtttatctgaaaacaagattctagcaaaaaagagttcccccaggtattctcaccaaggatccattaagagccctccgagccttgaataacgcaaggcccaattcagaaatccaaggcatacgcagtgttgccaccaacacagatttataaggcccattccccattaccaggcttctgctatgccaggtttaaatttaagatccggttaaaaaaagggtttaaattttggttaaaaagcataggaaaccccaaacgaaggttttgatttaataactggatttaccatgccaaacaagtatagttaattgcacattagacaacatattttgactgggttgcgtaatacaaaggaattagcaatctttgagcatagaaccacctaaactgactccacactccacagaacaccagtttttgaccatttgatgggaaaaaaggtttagaagaaaaaaaatatcgcatctcaaattgcataaagttggtattttttcgagctaactcttcaaatgatcaaaacccagttttgtggaacattttaattatagagggagtgtctggaggtgtaagcggctaacccacaaatccaccggtttattttggcctataagtgggttcgcaggttagtcacttacatctttagtgtcatgcacaaaaggtacttataagtacatgatgttttgagaactcaagtagaatataggtggttaaatgagcaatttactaaaaaaaattctttctgagagaatgcagctaagagagtttcaggaaaaatgaagcagaattaggtacatatgccagaaaattgtgtatacgtaccgaaaaatggcataagaaacgcaatgcacacggttgatgcaacaagggcagtcctcagtataatagagcagattgtttcgttcaaaaatccttcagggcgcaactcctctaaactccgagccaatgggtttaacaacagggcatatctgttgtggttaaggatcaagccatatttttttttaaaaaaaaggatgaagcaattcctatgaataattaggcaggcacataaataatcacaatgtaatcctagaagccagaacactacaagttttgatattcaaaaggatacttggtgaaagggttgataacctgaaacacatgacaattcaatggtaaatattaagaaaaaaagaacagttgcagtttcaaaaactgtaatcaacaattctcaccgtggtccacagtgcgaccttggaggcaaatgaatgtttaggaagattcagagttatttgcgagagagttttatctccgaacatgagatagccaatgatagcaaacgagccatatattgctgtgcaaattgcaaaactgcacgacatgataattttagaacattgaaacatttaattactcaacatagttaatctgcatccgaatgaagttcacacataccatataaacagtgccttagtgaatttcgtgcggtctgacattgattggtaaatatttggaaacactgagtgcccagagtagcagaaaccataaatgccaatagcaaacggtataccacctaagtttactgctttcccagtcaaatgaaaccctacgccatcagtagcgccaactaaaacgacagagaggaaaacaagaagagttgcaataacaccacccgctgcacaagaaattcaataaaccttgtcaattcaatttgctgccttaatatcattaatgatcgcagtgagaaaaatacttgaggttaagagtgttgagaccagaaaggtaggagagaacccgaagatctctcaaccatactgtaggcaagactattagagcagtcaacactccaaagaaatgtttcccatcaatatggacgccaagccaatcaaaaccaatatgagagaaaattgatgtcatattatctccttccaaaataatgaattccacacaatatgactgcatccaatgaataacatatataagataatattttttttagaaaggattgaataagataaaagagtgctcagttggattgatcaataaaaataactagatgaataccccgccgcattgctacggaaaattaagttatataatatgtacaaataatatgtaatatgatcaaaactaaaacaaattggtacaattttgagcctaaaaataattaagattgcatagttttatgagagaagaagaagagacaatttgaaccatagatgtatcatctaaaggctaaaaataattgaggtgatgtggtttaatgagagaagagagaaatagcattaactacacttagtggggatgaactatataggattagatggaaaactttgcaacataaagccaggtgaaagctacttacatatagctcagtatagagtataatctgcaaaaacattaaagaaaaagaatcagccattgtttcttctctaccagaagttaaaattagttgcacaaaaaagtctgataaagatcaatataatatgcatttcatcagtcatgaggtatcaaacattgaaatgccatattttatagtttacaaatatgccatatgcactcctttttagtgggagtcagcattttagaaaaggaaaaagaaaatccagagcttgagcaggcaggtgtttctaccagttactgaaccttaagagagcgcttttcataagcatggatcatatcatcaataatcgcatacaagcaaggttatacaaaatagaaaactaatacagcttgcacagtggtggtgtctccattgtccaggttagtcttactctttgatacacttgcacgaattatttcgtttattaccatcaatggttgttcttacattgcaaaaaaaaaaaggaatagaagtttctacagattgtcattcttttaatttaatgaaaatcccagattattaaaaatgactttgattggtgctgagatattcggatgcaatcttgcatgcaatgcaatacaattcacttgataggaaagaaaccaggacttacagagatcagcagacgaccaatcctttcaaaagcagcctcgccaatgtctggatatgtagaaataccatctttgctctcaaaacagggtttcatcagaactcccgtataacagccaacaatagcaaacatagctaggaccgcaaggcctacccatccagctttatgaattgtaaatggagtggaaagaagtccaacaccagcaagtacattaacccctaccaaaagaacaagtaaacattaagcatttcttttatcttaggcaggtaattgagcaatctaacatgttaatgatagtaccattgaacaccgtctgtgtcacactgcatccttgagcgatgtagacttctccagtatgttgcgtaagtaacgagcttttcctatctattgctgaaccaagagtctttctcaagctcttgacagagtcttgcttcccatctagcttatcagacaacaagggcaacttcaggtcggatcccagactactacgaccaccatcaaggatcgagtatttgcttgtagagggacccaagtaaccaaagctcggagatgcagcaattgtataggtgtcagttgtttctctgcaaaacaaacagcatatcaccatcataatgtttgcacataacggttgggaagaaaacaaaacatgtggtttaacagctggcattcatcaagcttgggtattagattgccagcaaagcccttgtcttaatttttttgagacaaccaaaaacaactatacgatgtgtcagtacaaacaatcccctgatcgacaaagcaaaaatgattttgtacatattagtttaccatgatcagagtcagtgttaatgaaagcaaccaagtccacatcagcacagaactttcactaacaacagttggaattggcagagcaacaccaccactaaccatggcgcagtagagcacacaaatcaaacgatgtctgcacgaggagtcgatcaaacaaagagtgcagccataaaatgattttgtacgttaatagtttaccaccagcagaggtttttttttttttgaactagggcttgaaagcccccatttctattatcagaaatgcaacagtagtactctgctaaaacaagagaaaggaaaggagattacagcactcaggctgtgaattttttatagaccatagcactgtgtttcttaagcaaaatgagaggaattccaccccacatcccaacctggggacacagcaagcacagtttaccaccagcagagttagatagtgttaatggtcaaagttagtagtatcagaactagcgcaacaatatcccatcccaatcatcaggaaattgaaaacacaaccgggtccccgtcaacatacaattttcacaagcaacagtggaaactgccagagaaaccccaccagagcaaaccgcccccactaagcactaattgaacgcagtacagcagacagatcaaacgatgtctgcacggctgtagtacgagcgaggaggcgatcgaacagtgattgcgaccgcgcacgttgcggtttcagacccgtgctgtcggagcactgtcgaatcaatcagatgttctacgagtgctggtaaattctagaatccaggccactcggatcaaacatgaactgtttgcccgaactatcccaaccaaacacgtcaacgatcaatctagtattatccgaacaagcgctcagtccagtcccatcacgaaactcacaagttattccgtccagtacaattcaacgaaatctacccatcaacatgagatttcacaaacagcggttgaaatcgatagaactaccatgaaccatcaccaccaccaaaaacaaaaacaacgcagtaaacgaggaggaggatgaagcggagaatgcaacgacgtaccggtagctctgcggccactggcgggactggaacgagcgaggcgatcccaaaccttcgccgtcgtcatcccggtcgtcgtcgccgctcccgccgtcctcgtagtcgtcgtcgaagctgcggcgcgggctctcctcgatgtcgccgtcctccagcgtcatctcctcctcgtcctcctcctcctccttccggtgcttcgcctccgccgccgccgccgccgctgccatctcgcagtacgttcacagcagcgggcgaaacgcacaagtggaagcacacgaggttggaattggattgcgtgtggtggaatcggggggagagagagagagagaggaggcttcgggagagatggcgaagcggaggcaggtattgatggctgggattgggttggagtggcgcgaagccggaggaggggggtgaaatagaaaggcgggggagcgcgcgtcgcgacaagctggcagaggcgcggattggtcgaagaagccaaggtgggcgtgggcgcgggggtttattgagacggggaccccagtccacgtacgctgacatgtgggggaggttgcggtggggacgttgggttgaggcggtttcggcttgtgggggcgcgtgggcgtgtaagggcccgtttagtttccaattttttttcttcaaacttcaaacttgtcttttatattgaacttttttacacacataaattttcgacttttctatcgcatcgttttaatttcttcaaatttctaattttggcgtgaaactaaacacagcctaagagcaagtttaatagtatagcccactactaactccaattcatctatagccaatctaatatccaattcatacaataattacttactatattattaatacatggtcccacctatcctatatatattgtgtcttagagtctgtgctgcagctggctatagttttatagcacgctgctcttctctctcatcatttatctcattaaaatatgtttgtagctagctaatagtctgctattgtacatgctctaatccttagggctgacatgtggggccatgtggagactgaattatcgtagcgcagttgcagaccgatcagctgatttggcaacagtgatttctagagcacggaccattttatggatggaccgagtccctactaggatgggccctaaatatcccggggaggtccatactagcagggttcggctggacgacaaatggtagacatttgaatcagctgcacatgcacaaatcagtgaagtaataggctaagggcatgtttagttccttaaaaacatcacgtcgaatctttgaatatatatattaaacattaaatatagataaaaagaaaaactaattgcacagtttgcatgtaaatcgcgagacgaatcttttaagtttaattaggccatgattagccatacgtgctacagtaacccacatgttctaatgacggattaattaggcttaagagattcgtttcacggttttcaggcgagtcatgaaattagtttttttattcgtgtccaaaaacccctttcgacatccggtcaaacgtccgatgtgacatccgaaaattttcatttcaccaactaaacaggccctaagatagcctaaaatatctcgctgatacaaccaaatcacaaattgcagtgccagtgtccagtgtccaatttccag

SEQ ID NO: 12892 - DNA, 1493 bp, Oryza sativa
accttacgacatgcaacaattaagaaatctgcatcttcatcacacttttgtaactgtgcccacagacgaagccaatatgttgccttgaaaatgacctgcatataagtaatagtaggtgatttgtcaaaaaccctatcattcctatcagccacagtgcccaacacaaggcagaagctccaacaagtatcagtttgctctttttgtttatgactccctgaagccaatcatcaaaaatatgagatatgctagtaggaatatataaaccaaaagaaaactgaactgccctccaaataaactttgcaaaatgataatcaatgaacagatgttggatagtctcattttcgtacaaaagcaacatcttaaattaccagtccaattcggtcttgctaaataatccttggttaacacacctcctttaagcaaataccacataaagatcttgatcttaaccggcatcttgagtttccaaattaacttatttctgtcaatgtaaccattattaattaaggctaagtacattgatctaactgagaattggccattctgatgatagttccatctaaaataatcaaaagtattattcaattgaatatgaccaatagatgcacacaattcatgccaaagtgttaaattttgaccaactaaagctctcctaaaagaaacattgagcggaacagaagccatcacactagcaacagaagaacttctccttctgacaatagcatataaagatggatacttttctctaaaggccgtatttcctaaccatctatcttcccaaagtcttatgtgttccccattattcacaatccaagaacccatagttaagaaagttttttttgactttcatgagtcctgaccaaaaatgggagtcaccttgtttcctgtcaacttgggtgatagacttattataaagatactttctcttcaataagtcttgccaaacaccattttcatttattaacttgaacaaccatttactcaaaagacatctattttgaatctctaaattatgaacccccaaaccccccctgttctttgggttggcaaataatatcccatctagtaagtctatactttttcttatggtcatctccttgccaaaagaaacgagatctataataatcaatcttttaaagaacccctttcggaatctcaaagaaagatatcataaacatagctaagcttgaaaggacagaattaatcaaaaccagtctacccccaacagacatatgttttcctttccagctgctaagttttttctctattctttgatcgataactttccaatcattattacatagctttctaaaatgcattggaataccgagatatttaactgaaaaagaccctaacttacaaccaaagatattagaatattgcttataacactcctttgcctgaccaaagcaaaataactcacttttgtgaaaattaattttcaagccagataatttctcaaagatagacaaaatcaattttaaattctttgc

SEQ ID NO: 12893 - DNA, 6748 bp, Oryza sativa
tattgtatatactggtcctcttctcttttaaaagattattagagtatatagttagttttagtgctgttttggtctcagtatatacctggagtttctcatgtactcactaaatttgccccttgacctacctcatcaatggaatatttactggttgcaattacttgattccttcatttatattagaattgatcttagcatcatatttggcaatgtcacaatgaactagaagtgattggattcttatatagcagcagtaactatttgatcctagttaagctagtggtgccgggttttgacaatagatggcccttgatcctaattaagtgtagaaataggcagtctgagattgttagtttgcatagttaccgcagggtccaaatattctggagattccaaacaactattttgaaactgtccaaatatacacttcttttttttaaaaaaatgcatttcttgggcaatttacactacaggtttgccttatacttgaccggtgtgctaattttgtctttacctaccacaatatttcaggttcctttcttctcccagatggacaatcaacttttggacgccatctgtgagcgtcttgtatcatcgttgtgcacacagggcacatacattgtccgtgagggtgatccagtgaccgagatgctcttcatcattcgtgggaaactcgaaagctctacaacaaatggtggccgcactggcttcttcaattcaactaccctgaaatccggtgatttctgcggcgaggaactgcttgggtgggctcttgtccccaaacctactgttaatttgccgtcatccactcggacagtgaaggcactcatagaagttgaggcattcgcactccaagctgaggatctcaagtttgttgcaaaccaattcaggcgtctgcacagcaaaagattgcaacacactttccggtactactcgcaccactggagaacttgggcctcatgcttcatccaagctgcttggcggcgatacaagaggaggaagatggcaagggacctgagcatgagggagtcattctgctccatgagatcagatgactcaaatggtgaagatgactcgccacctaagcagaatctcgctatgaagatcatgagtgggagtaggaaaggacctcagaacatgaaagagttgcctaagctaagaaagccggatgagccagatttttcagctgaaccctgtgagtaaggtctaaaatgcaacagccattgcttctgctaactctgctgctaccagttaaccattgctatactaccatatactgttggatcgacggcacgagttgtccaattgttgatgagaaagttcattaacttggaaactaaaaaacatggagaagcagcgaattcacgaagggatcgaggctttgagttgactagatgttttaggcgttggcaacttgtacatccagatatacacgtctgtgcttgtaacattcttgagatcttagaaacggccgcacccttacatttgactgcagagaaagagcgtaaaagaactgaagaaagatcaaacgtaaaggcagtctgtatttttgggagtctgtaaagcgttagggcggctattttttgcttttaactgatagacatttcgttgtattgtgcaatgtatttttgtggccaaaactgcaggttaacatctatactgtgcatacgttgtgcctcctttgtggctctctctcttgaacatatatactgtgctgtggtctgtggaatgaggagctgttccatttggtaacaaaccatggatacaatcagctgggctgcgtatcaaatatccgttgctacaagaaatttgataatttggcacttttatcgttgtcgacttgctttaattggtaatttttgagagtgacttgtgagatcatagtaaataaatgtagattaggatattaaatatttttttcttttttttaaggccaaggggaccatccaaatatattaagaaggaataaagtaaaaaaaatgacagaaaccacatgctaaccacgtaagcactaaaacgaccctgctatgcgtagtcgatcgtcgccaggtttacgacagcatcacaagaagagactctgaaaacggaagtgtcaaattatcaaatctccatacaagcgtggcacgcagggtggcggccggcgggtaggggagggatatgcatgtgggactgtgggcgactcatcagccgtcgctcgtggagaggcgccccacgcgcgcgcatggtgcgatgcgctcgttctttcgcgcaagctgtgcacgcggcgcggcggcctgggcaggacggtgccgctagttcacggggtggttcgcggctagcccaggtgaatcgcgggccgcggctctgcaggatcgatggcgccgccgccacgtgatggcccacgatacgatgatatgcaagcgtgtgtgtggcccaatccggcgccgcctcgatcagcctcgcgcctgtacacgttgccggtcgctgtgctgcgccctgccagcgcgcggcgccttggacgaacgacgtcgttgttacgctacgcacgctagctgcttgggcttggccagccgtctgcttcgccggcctttatcccagcacgctattcctcccttgcatcacacgctacttgtacggataattgagtcctactactatagtttcccaacccctcttctcgtttttcacgtgcatgtttttcaaactactaaatagtgtgcttttttaaaaaagtttttatatgaaagttgtttaaaaataatcaaattaatccattttttaaaaaagttaacaaatacttaattaatcacgtgttaatggatagctccgtttttcatgcatgggagatggttcccaacacccacctccgaacacacccttaactcgtactacaatattaccaaacggataaacttttctttagataatggaatgaaatagcatcccggcctttactcgaaagagctacagctaattattacaaactagctgtcacaccccaatctgataccgccgtacaacggcacctgacaggagcgtgtcgtagggaaaacggcgtgaaccgcttcctacgaaaccgcgatctcggtaccagtcccaggacatagtgctggtacccacggtgacaaatatgaatcatagcaatccttaaaataaatagatgacttatttaccttaacttaggttgcagctcagacagcccgagaatacaaccgacgacacggacgaggcgaacaccaacaacaacagcagcagcggaaccaacggtctaacacccaacaccacaggcgacggctgggaaccaggacgaaaccctaatcttcacttcactttatcttctcttcagggcggaggaactatatatatatatatttatatagagcaagggtgagtactttcgtactcagcaagtcacgggaacttaggtgtttaatgcaagcttggaagagaggcaaggtcgttttgcaaatcttttatttgaagactttttgaaatcactaagtgatttatttctttctaagtttgggccgaaaagagacttgcgtctcgattcgactttaagagatgtttttcaacagctcatttagtaatgtaccgacctcccgggtcagatcattacttctcggctcccagagccattccacttgattaatcggctcccagagcctttttcattttcttggactcccagagtccagctgcccagcagcaaagcaatccgcttccactcgggaagcctagtctatgatgcccacggacatcccgaatcacacagattcgtttctgaccactcaggtcatccatctgccacataggctgattctggttacgattcccacaccacaataacttttcacaaagcacaggcaaacaaatctacgcaatgggaaccacctcacatccgcccatgactgtgggcacggctgttcgaacagttagttaacctctgcagaggggtacactttacccacaagacacgaacttactctagacactggccggtgtcagaggttcgcgacaaagcctttcccaagccgacccagggatacctcatgccacatagaaggatcaaatcctcacataaacataggccattttaggcgttcacaaatcaaaccccaaccacctcgatcggtaattcagcaagcttctcgttcttgcattaccaggaacccggtttggctccaaccgaccccgtcccggcgttcccaactattggcatgcgaggtttccctgaaccgactagttacttggccagggtgtcccattccaccttgtggttgcactttgattatgttcgatgagtttcccacaggaatcggtccttatatgcgaatacgggacagtgccacataggcacaacccccgcatcgcaagttttcacaattcattttattttcaaacacaccgacaccacatgtcgggttttgaaggcttctcaaacccattccccaagttttcgacaaacagcggtgtatgtgggatatttggtatacgcgctcagagaacacgaataccgaggtaccacaagggtggagcgacaaggaatcagggtagtacgacctacgggaattagtgcgactactgggtaggtccgtcggtttggcacgcaaaccgaggccaagcaagttaagtgtgtgattctaataatgcaagttgcaaacaaaataataatgactttttagttataggggcaattgatcaaagggtgaattgccttgctcaaagtcttcacgaagcttcacgaatcttcaagaaaacccgcgatcgacgaaaatccggtaaccgcaactatacgcaaacaatcgaaaacctaaacaaaagaccaaaagaaagatcctatttagactaattagtagtgccattaaatagatctcaattttatgggaatactggaagttgagcggagtcaatcggagttgcgaattgggtgatatgaattttggaagtttaattggagtttctggaataggagaaatggtttatggaatttgtagaaataatattctcaagaatattattgacagtcactgtcatgcgggaccaaaggaaatggtttatggaattttggaataaggaattgatttatgggacaaaggaaaaaggatttattaaatccctggaaaaagaaaaggatggagggatgttaattggacttgggccgagcgaaggggcgcggcccgaagagatgcgcgggcgcggccgaggcgagcgggccggcgcgcgggagggaggcggcccaaggccgaacgaggcgcggcccacgcgacgcaagccgatggacgcggtccaccgagtcgggcgcgaggcgggacccacaaggcgacgacacggctcacgcgagcggggtgcacgcaaggcggcgcgttggatcggtggaccgggagacctttgaccggtctccgcggggccgggcaggtagatgtggcgtcctcgtggacagccacgttggcacgggcgagggaggaggccgggcggctcattggacggcccacggcgcgcggcgggatccggcgaacggcggcgagccggaaggggcggctagcactggcggcaggaggaggagaaggggaactcattccacggctcggatcaggaagaggacgcgcgacgacggccggcggcggcggccaatctcgccggcacgccgacgtggccgcgcgcgagaagagcgaagggtgcgcgggctcgggcttagccgaaccggtatggtgttgcgacgcgcacgcggtgacgcgggacccgatggtcaccggcggcgcacgcacggcagcgttatgcggcggcggaagcggcgacacggcgcggagacaagggagaagaccgacggccttggggcagccagggggaggtcaaggggatccccgggagcgtggcagcgagaggaatcgacgggagaggagccgacgacgatggattgcggcgcggcaaccaccggagagcaaaaaggggaaaacacgacgagacgacgagggttcgattcaaaggggtgggagcatctccggggttcaaggaatccgtttccggcgtcggattggacggagcggcaccgagattggctggcgacgagaggcggcctccgggacagagcaagagcgcatggcgagctatggcgagcggcggcgggcgcggcgcatcgcacggcaggaggaggattatggtggggagctcaccaacgaagaggaggcagcgttggcggcgcggtcggtgtcgcggcgaggtggtcgcgacgccgaggcggcacggcactgagagggcgcggccggggaagaagggagggagaggtggtgcccggagctcctcgtcacgcgtccacgcacgcaccggctcctccggtgctcggcaacggacgacaacggcgagagcgggacgagcagcaacaaggcggcgacggtggttcggcggcaatggcgcggtgggtgtgaggactgaggcgagtgaaaacgagagaggaaggggtttggggtggcttggttttatagcggaggtgaggtcggtttggggaggggagaactgaccttggcggtcaaggggagctcggctggcggcagcggcggtttcgtggacgatgcgaaagcggcgacggcgtggatgctttgggcgacgaaggcggtggatcgagcggcggagatcgaaccgctggagcgcgggctggcgtggtcaagtagatgaggcgggtggcgcgagcggtcaagcggcgcaaaggtggtgacgccggcagtggtcgggaaagggaaaaagaaggggaaaaaggggcttggtctcttgc

SEQ ID NO: 12894 - DNA, 12900 bp, Oryza sativa
atcggcccggcgctgcgcggggagcgccttgagctgtagcgccgggccgacgggggcggagaccctgggacccggaccaacctccagaacccacctcgggccgccacaatcgctgtcgcccgccgccgtcgccttgtcgacgaaggcgtaggtcgcccgccgctcggccggcacccagcgcgcggaggcggaggcgccgccgacgtggaggtacagcttcgccgcgttcggcgcctggtacttgagatcgagcgctttcagcttcgcgtcgaggaactcgagggaggagggggtagaggtccggaggatgtcctctcgagaggcggcggaggtggcggtctgggcgtcgtactcctcgtcgtcgtcctcgtcgtcggaggaggtgaggtcgaggtcctcgcggctgtgggcgccgcccatggcggttgcggtggtcgacgagaattccgatggatgcttctcgctgcgacacgggaggggggaatggagcggagatgaggggaaagtgagatcgcgggagaggggggtataagtacagaacgccacgtggccgcggtggcgccgtgatggtcggttggtgcgtgcgtgcgcccgacgcgacgcgcccggacgcggcggggacgacgaggtgagggcccacttggcagttgcttcgcccagggggtcaagagaaaagaaaagtaataagtctactttatctccctcgactcatgcgtctggttgaatcgcacccctcaaccgtaaaaccagaccgttgcaaatcgactccctcggtggtttcggaggcggttttctcttacctagcacttacgtgacgggttgacttggtctttatcctatgtgcatcgacgtggcgcttacgtagcactaaagtaaaaagaaacctaaatagaaaggaaaagaaattttgagcctacatgtcagttactcatctcctccctctttattctcgacgacgagcgagatgaagagagcggcgaggcggatggcgggagctcgccggagcgacgggacctcgccggaacggcgaggcagcgggagcggcggcggcgggacctcagtggagcgacaggagcagcaggacgtcggacatgagttgaaggaggcaaaatgaacttattccaaaagaaaaataggcaacctgttgggccgtgaagcccacggaaattcatggatagcatccgctaggcccatccgaggccacgcgtgaaaccagcggcccaatatatatcggctccgctcgaccaccacgctggccgcgtcactctcctccccctcgtatcgctcgggagcggaggtctcctcgcccctagagcgccgccgccaccgccaccgccgcggccgccgcggcggggacttgccggtgccaagtccacacgccatcgtcgctcgcacccttcccgcgcaggtaactccatgcaccttgaagtttcacctcatgcgttgagtgtccacgaccctcgatcccctccgctttcggaaccctagaaacccatctccactttgattccgtcggtttcgttgcttatgtggttcgatccgtcagccggttctagttgaggaaccgtaggaaagctcatctcgtgacgggatgtgatttttttttcttttttgggcggctctcgattagggctacttttggttgggctatttttggtttgtgcgcaagggtatgaaattggatgttgttagttctgtgttgctgtcctgtggagaatctgtgatgcttcactttaagcgatatatgttctttttaactcatactccctctggcccaaaataagtgcagttttagcactgttcatatccaacgattgaccgttcgtcttatttgaaaaaagattatgattagtatttttattgttattagatgataaaacatgaatagtactttatgtgtgactatttttttaaatattttttataaaattttcaaataagacggatggtcaaaacgccgagcacgcatatttatggctgcacttattttgggacggaggtagtactgattaaacctgaaaggtccgaggttgggttaaggattactgcaataggtaagaatctccaaagtcgatactgtggactattatggctgtttcatgttgtgtcgatcagcttcagatttctgacacctagctctttactactatgtggatgaaatgaattcagaactgcactcttagtaaaaagcttgaaaagcttcttgaattagcttgtagcaagtcatagtttatggtctgaaggtgtaacatttatcttttggtcctcttgcattcatgtagaaatatatttagggaagagctataattggttcctttcttacttcagggatttgttcacgatggcccgcttgtatgttggcaacttggatccccgagtgacttccggggaacttgaagatgagtttcgtgtgtttggagttctgcgaaggtcagtttctgcctaggcaatttttccacttcatctaattgggtgtttggtttttgcattgtgctgcattagtcttgtgtagtttttggatagactagttcattaattgtgtgccggaagggtaatagttcatcccagctgtgcataatgccataactgacttgtgcatattcatgcaactatattctgcttgcattataacatcagtcttatggtattttagtgacagaagttcattaatcgtgtaccaggaggaaaatagtgcatcccatgatagtcctacgtttggattgatgatatgtgttgttttaagtgtgacagaactctatgtccttttaccttttttttaataaaaaattcttagctaattggatggccatctattcctgactcaatatagtggtaccccttgtactataagttatttggacgttgcgggtatgtttgttgatgtaattttcaagtgtatttttccatgcagtgtctgggttgcccgtaaaccacctggttttgcatttatcgattttgatgacaagagggatgctgaggatgcactccgtgatttagatggtatgtaacggtgttttttctgcacactgtctgaagtttgtcagaaaattcttttgttctattttgatgaccttttatatgtcaaattagcaataccggtagacttcttgtcctttttgctctttttgaatcaagctttgagttaggggtgggcattaaaacagataactgaagaccaaacccgataaaaacagaaacggaaccgggaaaagacgtgaatctcttgggcatccgtcattggttgcgggtgtgacatctgaaagaccgaacaaactttggaaagattcggtcatcgtgccaatactacccgaagaagccgaggaccgaagaaaccaaatcaatacaatcactaagcagacaacgtgaccatcctatggaccaaaacagcccaacaacaaggtgaggcccaaatccacgtcaatgacccaatccccatgaccccaccattccattgaccgaagcactcctaaccctagttaggccacgcgccgccggcgcaccacttatctcgtcgcatcgcatgtccccttccttccacgccgccatcttctgcagtgctgccgcatgctgctgctcgccggcgtcgccgcagtgtcgcatgcaatcgtgtggtcacgtggaagccataaggaggccacaggctgctggcttgctgatcctgctgcacagccgcatgccggccgctgcgccatcgcgtgccgtctgcgtcgcgcggctgatttctgccgcgtcgtcgccttccgtcccgccagcacttgtcaccatgctagtggatatccgtcccatgtgactgaggtggagccatggaggttttcaggagcaagaagacgagaagattgaagaggacgcacgttctggttcgggcacctcggtttagaccgaagaccgaaccgaattttcggttaaccgaagtagcggttagtaatttttgcttaacaacttcggtttcctgtttccaaagaccgaatttttaaaagaccgaactaaccggaccgaaatttcggtctagaccgaatgcccacccctgctttgagtggccaggaaattttatctgtttgacaatgtctcttatctcgagttcttgaatttcttttatcctattgtattaaaatgcatcctgaccaatcatcttcataggttgtgcaagctttgtccctgtgtagttagaattaatttatgcattatcaggatttgttcaaatgcgtggttcctcttttaataggcaagaatggatggagagttgagctctcacggaactcaagtagccgcggaggtcgtgatcgacatggtgggtctgagatgaagtgctatgagtgtggtgaaactgggcactttgctcgtgaatgtcgtttgcgtattggtcctggaggtctgggtagtggaaagcgtcgtagcaggagtcgcagccgcagtcgcagccctcaataccgcaagagcccgacctatggtagaaggtaactttatagtgctcaatgttgtatataaatatagtagtatggttagtttggtgtcaactttattttccatgcccaatttttttttgatattttgtgttaaaggtggggacttacacatcaataactcttgtctcataatacgcttcgcgtgatccactttttacttgcagttaatccacttgttctattaaacacctactttgttgttgaatttattgtaatatatgatgtaaaagaaaggaactgagctaattattctgcgaacagaagctacagtcctcgtgatcgctctccaaggcgccgcagtgtttcaccagttcgtgggcgcagctacagcaggtcaccacgtggccgaggtggttctccttatgctgatgggtaaggcatattttgttaattttacaattctcgtcttgtatggctttataaatcatatattctttatcattcttatgcatgcctgcttttcaccttttttccagaagagatggtggcaggtaccgccgtagcaggagctagaccctgatgcctgtgcttgaccgtctgctctttggcttgcatgccatgaatgctttaagactggcatcaactgattgacttcaattaaggtttactactttatctgccttgatatttcagcctcttatttctgacgttaaaaaacttatgggatggatgtaatatgcaactaagacatattacctttctactatgtgctaaagagggatcattctgcttaagcgactcagccaactaccggctctgtctgcatggttttgttctgcactcttcattcctcgagcgtgttgcctgcttcatgtgaagttgcaagcaaaagagaatcttccattgtttcctgcctatgatgcctcgttgtggttggcactcttcgttgaagatgctgcatcgtcacaaattagtaacatatttcctctcataaaattgataacattttgagcaatactaactagtgattagtgcagctcgtgcaagtaaatagaccatttttttaatagaaccatgcatcaagagattgatacagcaaaataaatcttcatgtcagtcgttgggttaaaacatcgcattcatctgcagcctgtaattcagcgacaaaaggaatttgctgggttggcttccgcaagaggcagagactaccttttaagcggttccaccgactccaccccttggctttattctttctggtttttccttcactctgcgcatctgtcggccttcttcctgcactgcatcgccataatagtagcctctatatatgggaccttcagatgaaatattctcgttctgcattcttcctaccggcggccattagacaaaatatgttttttttttctttctgtttatgtggtttattacttttatttgtatctcaaccgttcagaacaagtggccagcacttcatgtctcaattgttgtgaattactcttttgacctagagctaataacagcctcagttcatatccatttcatatttatgtgctgtacgtcactcatctaatatatctgtactaagtatatgttgcttgtctggttctggaaccgtagagatccataccataaattagggtctgtttggggagcttatctgagaagcaactggttggtagccaatttctcagaatctgggaagctttgtttcccagtttctggtttctagtttattttctagattctataactatagcttctcagaatctggatcaaaaactagagaagctgtagcatcccctaccactagatgttgtgaaattcccatgttcggtgtgttccgtcctctctagtgattatatttttcctataacaaagttagctcaaaataagccaaagaaatgtttcctggaagagatttggatgtgagtttgctgttcctgagtcagttatggacgtatggtatagttaatcggagttcttgctgataactgtctgtgcttgcttccttttatttctttctttggtcaaatatgatattctgagatacctctcgcgtaaccaaatagatgtgttacaatacaacacttgggatatttcctcaagaagaggtaaaccctggtcggatttttttcatatccattataatttcttgcacgggcacaccacacgatagcgcacgcccacatgttctctaccctggcctctatcacggctctaatcagagttgcttttttttcgtatcaactactagtatcaggctgatactagtagttgatacgtttagcaaacgaagagatgctgtctagttgcagataaatcaaattaatctagtgaaggttggcgtgcaaatatgttaaagcagtcgtgctcttgtgctagtgactgtcagatgacgcgcttcttcgtaaacacaatttactctactcccctcatcacagtgtctatctgtcacaagatgctcgcctgaatatccaatcagcaaccaggcaacctcactgccaaatgaactagataacaagagatcgatttctaaacagaaccaacgagtgtgttcagtatgctactgcgccagatgacgattcgttgatttgtagtactccctccgtcccataatacaagggattttaagtttttgtttgtactatttgattactcgtcttattcaaaaaattttagaattattattttttttgacttgctttattatctaaagtactttaagcataacttttcgtcgtttatatttgcataaattttttgagtggtcaaacagtgcaagcaaaaatttaaaatcccttatattatgggacggagtgagtaatagagtaagtagtggagtagtactcccttcattcctaaggtggagagggattaaactttagttcctaattcctaaacaccacctaaatgatctacctatttcaccagcaaaagcaaggagcagttactaccccatcgatcaacataactttgtatgcagtgctgcttaatacgaagtgccgtccatgatttctgccgcttcctaacgaaatacgatgatcaaattggaacttttatttttggtaatacgaagatcatttaggaatggagggagtactagtttgtaccagatgacgattcgttagttggttttgaacattgtttaaccgccagcacgggacgagcgaatcgagctgcctccgagtgcataaacaacaagcagagtcgcccactcgccaccgccaagtccagtttctctattccccagctgtcgcgcgcacgaggcgccggtggggatcccgaggaaggagagcacgtcacgactcacgacgtggacgcgcgtgagatccctccattctttttgtgactcgtaggtggacttcccctcgtgcgcccgcgcgccaggaacgcgcatagccgcagatggccgcgccgcgtcctcggctcggcaatttgctcgcgatcgccatcacccctcccgtccgtgcgtccgcgggaaacttcccttgcgaatcgcgtgcccgtccgtcctccgcccgcggccccgcccgcccgtgtgtggcgccgcgcgttttctgcgcacgcgcgaggcgtttgctgcagcgacagtgcacagcgctcggagacgccgacgtaggtagttgtatactaccatgaaggcactgcttgtaaatatctgagtgactgtgtctatggcatctgcttttgctatgcggtttagcgtgtcacgctcggtccaacggatcgatcgatcatgcgcttttcgtcatccaaaatcattacgatttagacgagcaacaatgcaacactagtagtagtccttgactccttgcagtactaagagcacccgcaatggtaaagtaagatgttctctataaaacatgtacatctcagcaatagactagattaaagtaaactacctcaatagtatgtctatatgggtatctataactctctaatgcattgcctcgtttttttctctatagactatctccaggttagtagatagctttgctctctcttcatttaatctttttcaagtaggaaaatatgctgacatggatctcttgtagagagcctatagataatcattgcgggtgccctaatgaaacggaatctggtcccttttgctgccctttctgggacgcaccacggcagaaaaaagggtcaaaagagccgcgggcatcatgcagtagtactaagcagcacaaacctgtgtctgtgtttgtccgtccattcgctttcgttgacctctagctctaatcaagccattttgcggtgaccacttggggagttggggacaaatagctactgcccctccatttcaggttataagatattttgactatgtacaaaattgaactgttttaagtttgactatgtttatagacaaatatagtaatatttataatactaaattagtttcatcaaatcaataattaaatatattttcataataattcttcttgggttaaaattgttactatttttctctacaaacttaatcaaatttaaagcactttcgtcttataccctaacctgaaacgcagggagtactaggcaagtgtgcagcagcatcgcatatgccagatggttaatgccacaccatttgcctgcagcagctcggctggaacgtgccagcgatctagagatggcaagacaaccaaccaaacaatggcacctcagtcacctcacggctttcctctgacagatgccgtcattgggggtccaaaccgttagcctcaacatgtcgccacccgttgtttccacggccttttctgctctttttttcttcagccaggacctgatggatgctgatgactttcgcctagtactatttatagtcttgtctactactactacacattcaaagtgttctttttccggtcagttaaatcatttcggatcagaaaaaaaactcattttatttctcatacccttcttcgcctcgacgaccacctaccacccaccttctcatctctcccttctgataatcgccaaagaagaaagaaaaagaaaaaaaaagaatctgaacaactctcgcttgcttaccattaaccacagtaacaagtgcaccactaacccccaaagccatcgattagcggcgactaataaagtaattaagcccaaggtggggagcatccacggggaggagtttctgcttcctccaggctctacgatccccaccgctgcgctgaccaccctcctcgtgccgatgctgcgcagaagatcggtctttggccgcctccccgccagattcggccggtgaagctgccaaggctgctgcgcggtgtggttgacgagttcttgctcgctgactcgctgtagctgatgccatgtttggggcggggaaggtggacgatgagatggcgctcaagaggcagagaaccgtgaggtgagcctgcacgagcaaagcaaaagctcttctttggtctagttttagcttttcagctcttagagatccaacaggctctgcgacctgcgagtgatttggcatttgctgtgagctttttcttgttgttctaggaggaaggacgctttagcctggattgtgccagctttctaatttcctgttactctgcaaacaatttatgtatttgacctgttttttagagcatagactccttttaagaacccaaattaatccattcgatttattctatagcatggtatgatgaaggttttcatcccttttagttgatctggccaggaaagattaacctttcgtggataagaaatatagggcttcaaccaaaattgatattagaattaaattgtgttaatgtacaaaaactgttctaactgtcagttctttatgtgatttagtttacaatgggaggttctatttcattcccaacattatttttcttattttcactgttttggatggacatacgaaaatattcatgatgtagagttcaaacatttatgtgaggctgtaattcacaggttttatgatgagaaggcaaaaccaactataccaactcaccagaaacaggcagggttcgctgctagtaaacttggtgtggcaagctcaggaaagaacaaaatttttgtgccagaagaagagctgtggtacaaaaggattttggacccatcaagtgacttcatcttgacatggaaccacattttccttttttcgtgcttcgttgctctatttatagaccctctgtacttctacgtgccaaaaatctcctatggcaccccaaattcgtgtattgggacagacaggcatttagccatcactgttacattcttccgatcaatctctgatttactatatttcactcacattataataaagtttagaccggcatatattaatccgagctcaaccatgagggtatttggaagaggagaccttatcacggatccaaaggaaattgcgtggcaatatttgagatctgacttcgtagtcgatgcagtggctgcattgcctttaccacaggtaacttggcgctcttccttttattcttgtcaactggagtataaccagtattaatgatcattattgttaggtcgttttcataactgagtatatttgttagctctgatgttgtcttatgttcatttatctgcatgcggacataaatatgctactgtgctaatatcaatcgtgaagttctattgtggatcacctcaattaagtttctttacagcagatgctactatagtatcttgtggataaataatgatttgtaactgtgttagtgctgcccagaccacactaaggacaaaataattttcccctcgcttaatacaaaagatacgcatgttctgcgtattctcaaaaaaaaaaaaaagtgtcacttgctcaatcatcctgtctctaagtcagcatgaaaatcctagggaatcatcatgttcaatcttggcaaatattcttcatagtttaagagccaatcactaaactgaaacattttcatatgatgcattatgaatttaataactattattttaccatcagtgccgaccacatgtattgtctcttgatttttcttgtgaattcctgtaagctaaaattgaacctcatattaatgttccactggataagtttactacaatgggctccaaaatgcagcaacctgccatagcatctccagtttgtttgagctgattttcaatggttataatcttactcatcgggatttctaggttctctatgcttcatagggcaattttgtacatcgtcaaacctaaaagcactaaataactgaattttatttgtgcagctgtttatattgctctttccttcaaatggaggaatcttcgattttgactttgcctgctgcttatgtatctttacatttatgcagatcttaatctggtttgtgataccagctattaagtattccactgatgagcataacaacaatattctggtgctgatagttcttgctcagtattttccaagactatacctcatattccccttgacttatgaaattgtcaaaactactggagttgtcgcaaagactgcttggcaaggggctggatacaaaatgttgctttacatgatagccagtcatgtatgggattcgtaagcgtttacatgaaatgtgttctacatctcaaatattggtgtacagccaaagtcgtattagatgcatttgccagtctttaactccatagctataatgtctccaaattttcacgatctccattcatcttctttcaggtactaggtgctctatggtatttgctatctgtcgatcgccaaactgcctgctggaagagcaattgcaagaatgaaactggctgtgatattaaatttctagattgtgatgtgataccaaatcaaaactgggcaagcaaaactgctatcttcaatacctgtgacgcaactaacacttcaatcagttttgattatggcatgtttcagcctgcattgtttaatcaagccccagggcaacgtttcttgatgaagtatttctattccctttggtggggtttgcagaatctgaggtatttccttgtcaaaacatcttcgtgtcaaactacagcgctataagaaggaacttagtttacagtttccttgtgaaatgtgtgtgttcagaaatttcatgggaatcacggagatttttgtgtcaagcaaagcagtaaattaaatatggaagtttagcctagttcttttaatgggatcattactttaccaattttcaagatctatattcattttctaacgagctatatcctcctcttcctttgcaacagttgctatggccagactattactgtgagtacctatattggtgagactctatactgtatattcttggcagtacttggtctcgtcttgtttgcacatttgattggaaatgtacaggtaatttttaaatgtttagtgatcatgtctacactacgattgattcttttggcacttttttatacactgctactatttttccagacctacttgcaatctatcactgtgaggggtgaggaatggagattaaaacaaagagatacagaggagtggatgaggcatcgtcaactcccacatgaactacgagaa

SEQ ID NO: 12895 - DNA, 2184 bp, Oryza sativa
cagtagattctcccaccatgatacgcaaagcaaaataagactgtcagtgtaatcgtctattggctaaactgaaggagctgactttcatgggtgttgccaccaccagaggagcctcaggggagtcggttgttgcaaatttctcgtgcatgaaacggctgtcaacaatggattcgtctttcaggacaactttgtaacaatagcagctcttgagcccttcctgatcgcggtagcactcatggttgctgtccttcacctgctgaaagttccaaatgacactaaatttgccaactgtcgcaacaagatgcttttcttgcttcccattctctgttacctgggaaaatcagaacatatagaggaacatacataaggacatatacttaacaaattgaataattatgcagcatgtaggcattaatttagcaagaaagttaacatggcaaatgccaaatgccaaatggacataacagaactgcaggatgaaactttttataatgcacgattgacgtaagtgaaacaactgattgccactagaacaaaatcaacatgattgacgcaagtgaaacaactgatttactgcaattacttcatacactcttatgacaaggtcacaggttgatccgttaaaaacagagctagggcctaaggtgcagggttctttactttagttctactcattagccccttgacaagctgagaattggaacttcaagcaaccaaatgttccaaacaagcagtcaataagcttgtttttaatttaacaagcttatgtaaatattgaacatacttgctaccaatgaattaactgaaaacatatttattagccgtactaccctaaactgggatggatcataactttaccagtttctcccaaaaggtacagcatgattatttcaagatattaatgtgtcaattaacatacataggagatagagacatagagtgaacacattttcctggtcagattgtattataggcacagcaaattactgacaagcagccattttggatatgaaacgcttgcactgactgatcataagtgaaaacaaacttttactatagacaagatagataagtgtagatggtttgctagcatgcacatatgaagcaacattctgtttggctttactagattacaaaataggaacattcactaccgtgtgttctatctcaattatgaaaaacaatatgctgtacaaaataggaaattcacacttacccaagagaactgcccgccatggaatttgttctcggaccctgccaaaattgaatccaatggggagagcttcagcaatcttggtgctgcaatcctatttcccatacgcccactgaatcctgtcttctctttaccatccttgtccttaaagatggtacagatcaagatcaaatatgtatcagtagtgcccagaatccacttcccatcataagtaacatcaacatgtgtgattggtgatccaagccctgggaatgctgtcttcgccatccgcatcgaactcttggaatagagcctaatcttgccatccacagaaccaaccacaatcgaaccatcccctgtacttgcaaagcattggaaattggtgccccttgagaactgatggccctgcgaccattgcagcaccggtgactcagatgagctcccaattgtttgcaccctgcccctggaatccctcatatcccaccggcatagccggttgtcatccaatcctaagaaggttgatccagagggttccagctgcgcgcccttactgtcgttggcgatgtctcgcattgtgatgtcagttccatccttctcaaacctccactgagccacaaccttgccagtctctatatcaacatgatggacgccattggaatggcgagtgccagtctctccagggctcatcagaagcatattcgtctcgccacgcataagcagagccttctgcggtgtcatgtacgcgttcccaccaccacggccatcagatatcctcacagagacgcccttgccgtgcacgccatgccggaaattcttgaccacctgtatccctgaccctccaaccaagaagctgttgtcaagcgcgcccagcgcgaggctctggatgctgccgtccccggcctcctcctcgaactcctcgagcaggtctctcgccggggtcgcaacgggaggggtgaaggagtcctctgcgtcggcccagacggcgtccgtcg

SEQ ID NO: 12896 - DNA, 17278 bp, Oryza sativa
catatttcgcatccgaacttttaaagtccgcaagtctgatatatccctcttttccctataagcactttaaattttttttaagtcattcttatctctacttgtctcccaccccctcattactcatctttatctcaaactactatatgtctcaaaatcctctctcatttctcgcttctctcctcccgagctggcgaggagtggtgaggcatggtgaggagcacgggggacgaccttcccccgctcgggagaggagcggcaaggggcagcggcgggcgacgccattcccctacaggtggcgcgcgtgggacggcctttccccgcccgataaaggaggtgaggagcgataacgacgagcgcgcggctctgccgtgctcaaatccggctgtggcccttcctcgatcggatccagcgccccctcccctccccgcgtggatctgttgacggtagggcgaagtcgaccacggcggtggcgacgggaggatgaggaggacagcggctgcgacgacgacaggattttcggaacatttttcttcacatttattccttttcgcatgcggtcggcttaagtgtctacatgcggaaaacggattttcacatgcggttgtgctggttgcatgaaaaaaaaacgatttttgcataccttttggtgcatttgggccgcttgtccacatgcagaaatcggtttgagcaggatggaaaaaatgtttttagtagcggaatgtatgtgcaccatataaaacgtgtttaaagaaaactaacacttgcaactgttggaaatcgagatagagccaccgattgaatatgatattataccaaatattattaaaattttcactataagctaattaaccatatcaaattacgacaggacaataaaccaaatatgtatctgctatcatactaactccgaaaatttcttttctgaaaaactacactaagttggaggaaaatcctttgggtcgagcgttcgatgcgcgccaaaaaaatcgggcgcccgtgcccaccacagtgttacaagtgtaatcgtgatgtttcattttgttatggatcaaatgttgcagtggattttgatattgtttaataatgtcatcttgatggacacgtgggttgctgatgtacatggggtttaagtgctgcaatgacttcaaatcgtttgttgtatacgttgaaccaagttgttgcatctagcgatctgaccttgtttcacttttttttaagaattgaaacattattttgctatttgctgaaacattatttttatatagggtgaaacatcgtctaattttttgaaaaccattgcgcagagttaggcacggcggtggggcaccatggtgtcggttctccgcggctccagcgacgggcgacggcgtcgccagatctggtctccccgcttggccggggtgatcggcgacgggctcggtcgtcgccggcgccgctccgcggacctggcagggaggtggctagcagcggcgatggtggcggatgtggcggcgacgaagttggcgacgacggtggcggactgcggcgcgtgccgcgacgccggccctcatcaagaacctcaccaccacgagggaggcgcggcgccctcgtcaatgttccggctgtgaacgccgtgcccgtgacgccttcctccatgatgccggcgacccgcgcttcgtgctacaccttcgatccgcgccaccccggccggatctggacggctggcgtttggcggcgctggctagcaacggtggcggctgacggtggcggctggacggtggtggttggacaggggtgtccgtggtggtggcggtggcggctgtcgacgatggtacctatagcggcgatggttgaaggccatcatccggctgacggtgcgtcggcggcggcggcggtatgtggaggcggggaaggggtctagcggcagggaagaaggagtccgggtgcgggcgcgccgtcaacggcgggaacaacttcgggcggtggccttggccgaatcgctgaaaggacaatgttgttgaccgacgacgatccttcttgtgcggattggtggtgtgggtttggacagggaatcgcgggcgaaagccttgccgagccatttggctggctgacaacggcgacgccgtttggcgtcgttccccttcttggaggcgttgttttagcatacccctttcctttctctaccatattctccgggtgaaaaccttgcttcggttccgaacgagcgatggcgacgatccacgtcgcatcctccttggggcaccgctttggagaaacctcttcgtgcaaggatattgtcattggtctatgcattgacttcgaacttcagtcctaggccttgcaaggccttctagctccaccttttgtttttcttttctcagttgggtcatctcttctcttgtttggtgtgttcaacttgtcttgaactacactctcttctggagtagatttttgtaataattggctgtaattctttttgagcaaaggccgggatattatattttattatctaaaaaaatttggtgtaagagcatctataatatagtacaaaagtagtccataaaaattaaactattcccattccattcagctacctagcgacaaaagcttcgaaccaaatactcctactccgcgaccttcattctctttcctgcaaaagttcagtatcgttggttttaccaatgaactaaacaaagctcgttaggttaaagttaggtttacctttggggacagtaatcctgaccagctgtagaccccgtgagaaataacacagagacgtgcgaagagctgtgaccgcgttgccggctcagctccacagctgtaaggccagcacacaccgtaggaccggcacgtggcggccagccacgacaggataagccgatagactgccccggtgccgtggcgtccaggcttaagccccaaccaaaatctgccacgtaacgtggaagctcacgtgggcagccagcactgcagggcccaggcggcggcgccttgccgaccttgccaaagctgagagctccccgcgcctcgccgccgtcgccaaccggcggctttgaattgaggccccagcaacgttcaaacgtgtatccataccaaccgcagccgagcatctgtggtagtatatgcccgtggcatgtcgggaacgcaaatatcgcccagcgcctaacatactagtactaccaaccaaacattatctgatctgatcctgatcctgatccaatctaatctcacatggcgcactaccgttctcgtcatgcagatccagggaggacgcagacggattagcagaagatcagaagaatacgattttcttttatatagggtattttgtagtagttgtagctctaacttgtgcagttgtgcaactcctacaagtagatcggtacggattatgtgtaagacagcaacaaaacagattagccgtcaacgtagccagccaagctctttaaaaagcattaattaaaaccactaccaacagtcaaaccccccaaataaacggaggcgcgcttctactgcccgtgaggcacaacagatcgttacgatttcgaaccatctccatgtcgcatgtcgctgacgacggcagctggccctttttactgcagtcacgggtgagcgaacggccgaagcgacactggcgactgggccgtcccccaccggttgccccgccacgccgaagcatcgcgtgcagacgcagacacagtcaccacgtagtcaaacacatgcccactcgaggtgatatttttccctctgcgttgcacttgtgtgtggcgtacacgtactactaccggatacagtacagtcgtagcgaacgtggctgagttatgggcgtacacgtgggtgtcgcgaggcggagccgcggttgcagtgggaacttgggtctcctccaacctcgtatggtcgacacgtcacggtcggcagcgagggttgacgtgaaggggattgcgggggggactgacgcgtggatggtgactcccggtccccggcacgtgccgctccggcgggtcagtccatccatctggctcactcgtcgctctgtccacgtcggtcggttccaccacctgggtcagtctttttttcgtttttttgactcgtcgctggcttctaaaaagtgtagctaaatttaaatttcaaaaatatttcttttttttgttacgagtactcctactcctatcatttcgtttcacccttagggtgtgttttgttcacgccacaattagaagtttggttgaaattgaaacgatgtgatggaaaagttgaaagttcatgtgtgtagaaaagttctgatgtgatgaaaaagttaaaaatttggagaaaaaatttaaaactaaacaaggccttatcttcgaaactgttgaaaacgaaaacgcagtaatataaggtatgaatgaggtattggcctgttcgactgctagcaacagtatcggcgatacggtatcgcgcacacgcgacgcaaacacagctgcccatctgctgaacaagcttatttatgtgaaaaaaattgctccaataaaaattgatgttttaaagagacgagttaggataagcactcaacatgaaataagattaatactattcgcacacatgggtgcagccagtaatgaagtctactctctttaataaaaaaatataacttaatggaggacaatccaaatttattgttttatgtctcatttctaattaagatgattttcttttatggaggaactctatctatgtgaagctaggcattcaacgtataatcacctgcgcgtgtatgtgcgcgtgagcacaaaagtggtgtgtttactcagttaaaagaaacttacatctataaatacattttagtctacacaagagtataaaagtggtatgtctaaattcgtagaaatagataattgcttatttgaccctgttttaaagcataattatcaatttgaccctacttgtttttagtttacttatttggacctgtttttcaaaatggaatgaactatttgaccatgttccgttaaggcgggttaacacggttaaataggggccaatagtccattttacccttacttatttgacactgttatatcaaaatatacatatatttggaccttttaacaaatctaaatcaatttgacaaatttaatagacagtagctagagctcggaggttgatgctgggtgccgctgtggaccaccctttgcacgccgccaccactccaccgcaagacagcacgcgcggacgtccctacacgcaccgcacggtggcgccgacctccatctgcacgccgccgcccccgaagccgtgcgccggcgccgcgcgatggcgccggcgccgacttccctcagcacaccgccgccgccgaagcggtgcaccgctgccgacctccctacgcatgccactgtgatggcgccactgccgacctcccaacgcgcgtcgcgtgacggagtcgccaccactcctccctccggtcctccgccagccaccgtcgcctgcctcaccgtgcgccgccgccagtgctccctcccttcccacagaaccgccgcctccccatcaaagtccgccaccgctacaccgccttcgctgaccgccagagctagatccgtcgtgcgcgtgcctcggcaccactggatccgtcgcctcatcgccgagtacaaaagtggtctgttcaaattcgtagtactataagactggctgcgttcgttcattggagataggggagattgtcactcgttttccgcgcgcacgcttttcaaactactaaacggtgtgttttttacaaaaattttctatagaaaagttgctttaaaaaatcatattaatccatttttgatgtttaaaatagttaatactcaattaattatgagctaatggctcacctcgttttgcgtatcttcccaatcctctctccctcgaacacaccctaaatgttttattcggttgtatgttcttatattttagaatcgagaaagtaattaactggaatagttatttagggcttgttagtcagggatggaaacagttaaaatgggaacattaattataaatgtgggccatgaatggatcacggacagtagccacgcgttgatcctatccaatagcgtagcacggccgggggaacggtggtccccagcaaaaggagtacgagaagaaaagaatggagggacggcatggcaggcacagtgcaagattgtggggcgccgccacattatcctctctctccccccggcccgtatttcgtgccgcgtaagccaaccgggtgcgtgcccctggcccccactcgcaacatggcttttgctacagctatagagtagttgtactccagtgggccatgcctccatttataactccattggccgcccgtacggatttgctaccaacttgtggaatcaacaacgatatcgttaacccatacccgtaatagcttcgttagtttagtgatcatcgtcacattttctatacttagttaagtttagttaagtatacgggttttttaagttaagtatacgggtttagaaatgaaaattaaagttcgttactcggatacgcttacatcgttttttaatatatagtcgcaataagtgaaaccaaggtaatcttttagcttgttaatgttagcataagagatcactattttttttatataggccttgtttagtttcacactttcaactttttcatcacatcaaaactgtcctacacacgtaaacttttaacttttccatcacatcgttccaatttcaaccaaacttctaattttagtgtaaactaaacacacccatacttaatattttttaacttagaacttaatcttttaagtattttagctaatatttaattaattatgtactaatttaacgttctttttttctgcacgaaggattaggtggtgtttggattcagggacttaactttagtgtctatatttatacactaatttatagtattaaatatagactacttacaaaactaattacatatatgaaagctaattcgcgagacaaattatttaagccaaattaaatccataattaaagaatatttactgtaacatcacataggctaattatgaattaattaggctcaatagattcgtctcgcgaattagttcaagatcatggatgggttttattaatagtctacatttaatatttataattagtgtccaaacatcttatgtgataaggataaaaagttttagtcccatctaaatatggttttagttccaacccacgtaaaagaatacagcctaataaagtaatagtgctaacttagtagtattatcttcttctctttttttgcccagctactagttgctgctagactactgctgctgtgctgtacaagcttgacaggatcatgaagagaaggttagaatgtactaagaaggtgaggtgttattccaagtcttgatcagaaagtaaagcacgcgatctgcaaaaaggggaaatcctcggacgggataacataatcaaagcaatgtgcacagtgacttttcgcgcgaaaaaaaaacatatattagtacgtactgatcctgcatctggtcctggtgatggaattaggtatgggaaagagataaataatataatgggcgaacagtattataagggtggacccggcgctatcaagaacgtgaaggcagtgttttaggatataataaaccaaccaaatcttgacgtactggtagatcattaaagagatggtcctccacgcggccaattcattaagaaatcgataattaaagaagggattaccactacgctagcagtagcagtagtagtagtagcaggtaggagtaattgttatccggataaggttactgcagctggagctagcattatggtacttagtttgtttaggttaatcctcttctgcgcccgcactcagatcggaaaactgcaaattgctgtaatgctgaagctgtcatatgctgtgtctatgtggcccttttcatttgacccgtcttttagcaattttcacacgagaaattccgacgttttcacgctgctagtcgtgtgctcgtgccgggaaacagccaggcgcgcgccgcacagatcaacatcgtgtgctgcacgccgcgggatcggggcacaccagtgaaaatcaccaccgccagagtcaaccaaaacgtacgcgtcgtatgcgcgcgattcgtcgacgcgtctcgtcggagcaggcagcctctcgctgtcgcccgcgtcgcgctcgtcgatctcgatccgttgctaaactcgaacgggaatgcgagctaattacggggtttagcatgtgtaataaggtgcggtgattcgatcgatcggcatcctcgtgcatgcgagccgtacgtaccggcctaccggggggatcgaaaaaaatcgtgtgggtctctagggtcccaagtgtaatcgcttccatgatttttttggtgaggatgatgtatgatgttgacgagcaactcagaaaactactatctcctcaccatcaccacttttatcctctccaaaaaaagagtacgaagtagatttcatcagatggacacttggacggatggtggtgctacgatcacgatagatctcttggggccccttcccaactgtaccagattgcttaaaaaggatggcactccatgtctcacctgaaaggctgatgactcggagctatttccagacgtgctagaaggtgaggtgtcgtccaacgacaccaccacgcaacaatgctcgtcagaaatatatcgtgcgatttctgctgctgctgctgtgtgcgatgcgaacatttcgctggagaaaaagaccagcgcactcgactcgaccaccatgcatgcgctgcgctgcgctgcgctgccatgtgtgcgcctcggctcggcgacagcgcacggcgcgtatgcgattcttgccttggactccatgccattgcagcgccgtgccatgtcgcgccgtggccaggccgccgcgccgcgccgcgcccaagtctttgactcgcgggacgcgccgcgcgcgcgcttttctgcgccggaatgcttgaaattttcgaccgatcggggccctcgttctcccgacatctccgcgccgacactgcccggtaatccgcttgcgttccggtcaactcgtcgcattgctcgcgatggatttcgtcgcggtgcgtacactggttgcattgcatggccacttggccagcaacggcgacgtcgtcgtactcgccgttttttcactcatgtcgttcgaccacaacacaaccactacacacgactacacgagtcgcgactcgcgagtgagtacactacactgcacacgaaaggaacatgacgtagccgtagtatcgcccggtggtcgagatgtcgaatgattggtcgcatccaacgatcggagataagaatatcgtatgctactcgatcgtctgtactactgctattatcgcaaaggctaaaagggggattagctagctagcgacatactcacattggggataatgatgctgtggctatagtgcggcagctgctgctgggatgacaggatgagggcagtgggtacaggtgttgcttttgctttctctgcagatcttcttcaatccatcgcgagatctttgccgtgattgtatgggtttgaccctggcgaatttcggttggcaattgcttagacagttcgatcaggatcaattcccttttcatttcggcgacgtcgtcgttgtggatcagatcaaagagtaggttatggtataaaaacagtacggattcattggaccatcctatacttgattagcatgttcaaatcctttactccaggaatgtttggcagcattccggctcagcatgtttcaggccaccaatgccatcgaaacatgggtacttttttgcacagaatacgccatgttatccggggtatagggcttcggtttgttgatggcgatcttatctcttcccgttttgtggcgaactaattgcgaattatatattgcacgcgcgagaccgtaccgaattagaagtccattaagaaaataaccgaagaaatgaagttgttggaacgtaggagtaaatctactttaattcatatctgcaaatcttgctccagaggcaactaccagcacatttctgtgcctaatccataacaatattaaattactggcacacacgtatgcactactaccattgtagacttggtagtagttgttggcaccactactacctttcgttgctgatctgggtcatgaccattctgcccctgagaatgctatacattcacaaagtcaacaggtcatttgtaagtgtacccgtatatattggtcagctcctgtggtctccgttaatatcggctcgttttggcatgactttatcgaataaattaaatcaggtcaaaccaataatcgagtttgctcgaacaaaataggtgtgtgtgtgtgtgtatatgcaggatgcttaggagacaggtgctgggatgcaggctctccttgcatggtctaattggtatttccatgtcgtgcagaaataattgggaggagatcgtacggctccttgcataattgcattgtatattatattgggtactgtactaatttcttcatctagatatataactagatttagcatcgaccaatgaaacggagtaactggactgcacgcaatagctagctactccagcttgtagtttggtcacacaagctaggtgaggaccagggacaaaaggaagcagagagaggacactgcatgcgtgtcttgtgtcgtgcataatttggggttaaacatgcgttcctgctgctatcaatatgcacgaatccaaggcaaaccaaaacagtagcaaccgataactaactccgaccttaaattaccacggcaatttgtcacgaaccaacacaatcacaccaaatctctcacataaatgccaccgatatattacaatccactcaagaatataagtgtttagggatacaaaattgaggagaaagagaggtatagtttgagaagagagatcagacaagaggaagcaggagattgggactagagagtaggaattgagaggggaagcagcagcaaggaggaggaagaagctatcgtctgaggcgttctggtaattgattcatcgatgaccctggctgctggctgctggctgctttgcctcttttctagtctccttctccctagccgaatgggcccaaagccagcccacttgtctagcctcctggaaagacatcacagcaggccatgtacatgacattcttcccccgttaagaatcggcttgtccccaagccgatgcaactgactcgccagattaatgcccccaagatcccaaggtacctgcagggaaatgccttgttgggcagaatcccagaacaattgtttgatgaccttcgaaccatctgatgtagaccctgcccactgttgaatccacttatccaacatacataaaacctgagcattacaaccacactctctaccatgcttttgctgcctcaaccaccaagccttcacgccttcttcaccactactatcagcatatactccatgagagcccagatgtaacatgcaaatattgagatcagtgggctgagaaacatgcatatgcttctttgtctgaatgagagctacttctttgtttgcaaactcccaaattgctaaaaattgtatggttttaccttgatcaccaaccaatcttgcatcaactaatttaaccactcgataggcccatgtgtgcaagactatgctgtcctcacaaactaaacaaatgaggcatctctctgaacatttaaccagttctattccacgagaattcttactgaaagtgctagcttccaaactgagatggactgcaccaagtttcagctgctccctttgtaacaatagctcatgtgtctgcccatgttaattattccattgaagaataagctcagatgtacatagcaactgttgtagcactgcccatattaaatcccaagaattggcaactgacagccataacaccttgtttgtatattctcttctaataactttcacatttgtccataacattagtttcccttcagatatacacttccaagaaaaattgagcccttgccctcctgctgcacacaaactgaatacctcactcctccattgcgaaggaggaggccaaggttgcaagttgaccaactttcttgttgaaaccctaaatgcctcaccattgtttgatccaaattgagtccaagaagtatcatctagtacatcattgttgttactctgaacctgaaatgaaattggaatagtatagaaccgagcatggcgatgggtacgtctctcatgtgacttgcaagtgcaattaccatcaacattagctccactgaacaaacaatcacaccatgcatcgggtgatagatgggaaatcagcatcagcagcaagaacaattcatgatccccatatgcccaaccataggttgaatgatgtgtgtgctgataggccttcctaaaggcaccagagagacatatctcataccaaatacaccatccaacaatcagattttgcagcaagccctcagtggaattaattgttctactcatgaattgggcaacgctgtagttcaaggagacttgatgagactcaccatataaattcagtgtttcaatttcagctcaaacacttgtttgaataagtggcggccagggttgtaagagttttaccaccacgcctccgctgccttgacaaagctgtggatcaagccatggtaacggccgagaacctgaggtcatctcagctttgttccgtggaattgctgctctccaaggtggtactggtggagggctagctgtgtattctgagctccggtcaaagcaaccatagagtacttccaatttcaatgaaacgaaagagaggccgacaactccaaagtagtcacggctcaagcaccaactccagttcctgggaggaattgcattgatgattaacaatggatctctgaagcataaatacatagtggtgaacttggtatctacttccatgagctccatccactcctccttggccatgtctttgccaccatcatcatcagccaactggttctcacacttcattgaacactcgatggttgttcccatgccaagcttggctgtgtcaacatggttagttgagccggcctctgtactgacctccaatgcgatggaagttggatcagtgttggcgctcaacgctgccacatctctagtggaatccttgctcaaggataaatccaccttggtgtggcgaaatgcctccagcatccgatcgatcttggtgcacaggtcttgaatggtcttgtctaagttctctaccgccttgtccatgtcagtctcagccttcttggtctcgttgaaaggaaccgatgtcaccatggctgctgatgtaattgagggtatagatgaagctgttgtagcagggaacacgcgttctggtgtagcagcagtactcttggccgctggcctggcggtggcgctacttggtaccattgtcaaacaggtggtgtgcgtggtggtggcgccatctccagggaacatctggacgtgctgcacatccattaagcagcccccgtcgtagatgtcgcgaccgtgggtggcggaccgagccctctccgcgtcatggctggacataaatgacacaagagccttgacttgccatgtgctcactgcaagaacctgcaccgccactgctccataggtattgtacacttgatgcaacacctcagatgtcactggatatatgatctggctcacggtgacgcgaaggacagcagctgaatcgcctcttggacaggtcgacatttcatcgaacaggtggtgggcatctcctccaaagacaccaccaccaagttgttggcagttcctctgaccaccagcgctctcccacttcatctccacaccagaaaccccacgaattgactgctctgataccatattgtcacgaaccaacacaatcacaccaaatctctcacataaatgccaccgatatattacaatctactcaagaatataagtgtttagggatacaaaattgaggagaaagagaggtatagtctaggaagagagatcagacaagaggaagcaggagattgggactagagaataggaattgagaggggaagcagcagcaaggaggaagaagctatcgtctgaggcgttctggtaattgattcatcgatgaccctggctgctggctgctttgcctcttttctagtctccttctccctagccgaatgggcccaaagccagcccacttgtctagcctcctggaaggacatcacagtagcccatgtacatgacacaattccgggctagtacgggaccaaaagcatggaaaaatcatgctttctccaacgaaaggataaggctcttggaaacagctactcgatcgtactcccatgaaacctatattcaaatacgtagtaatagaatacgtcacatccaatactatgttgttatattatggaacggaggtagtagtatcgatggtgtttttaagaacttctcccaaaaaaataataataataaatctctaaacagtttttctttttatttcattatgtaaaaaaatagttattgaattaaaaaaaaggtaattttatcatccttaaatttaccagaatgtatcacactttctaatgtaaaatttgataaaaattagtctaaactttaaatacatcgaaatactttttctaggatcataaaatttctcactaaaaaaaactaaaagctaaaagctggctttctcatcttcttcaaattgctaggagctaattaccgatcaataatttgccataatcttttgcggatctaaggagttgttggtacgaatatcgccgacgaggcgcgccaaagatcacccacacacacaacacgcacctcacctcacctgccctccgctgatcgaaattagagcaagcccagcagagcttccatccggacatccatcccatgtttggcgtatggaggtgaaaaaacacggtccagcagagtctccattacacacgccattttagatgtcctccaaaccaagccctctccatgccatatttggcgtttctctctcctcacgccattcccccaactgcccagctccgacgaactcgcgccaccattcgaacttgtgccaaggggaatagagaggatggacataccgggtctgcagttggagatcgccggagtggaggccccgccgtccgcgccgccccactgctcccgccattggtcctccgccgcgcgccgccaccatccggactccgcctgcgccgcccccactgcaggcgccgctgctccttcgctcgtgctggagatcgccggagtggaggccccgccaccatccggcctccgcccgtgccgcccccactgcaaatcaaccggcgtcgctgcttcttcgcttgcgttgcccatcgcgactccgtccgtgtcgccgcgccaccctgccacctgcaccgctgtacctccgcccatggcgccctgcccccgtcggccgcgccatcctgccgcatcccctccgtcgctcctccgcccgcctctcactatctgttggtctcccaggagcgatggatttggtggattttgttttgttttgttttgtttttagcgagaggataaggtaaatgtggctgatgtggttttaaaagaggattaaaggtggtacacagtgttctcaaagtggtaactgcaattaaatcgaaccaacacctattcaaaccattgtaaatatatgcctcttaaaaaatcattagatatatatgggtagttaaaaaatattagtaaaatatagaatagtgtgatatgaatgctgtaatatggatgatttattggagtgggtaaaggtatagaggaggaatcttttttggatgaccattcaaatagaaatatagaagtccaaatttaaatgatctgctgggatgctcttaagcttcttctactagtcctctgttgcgtacgagcaggacgtccaaaggcttcgtcatttaatcgcgtctcgccttgcgcgatctccaatcgagctaatggtggataggtgatcgatgtgttggatattttctggtccggacacgcacactaaaccctatggttggtagcaaaacgcgctgcacggctgcactgcgtcgcgtcgcgtagcatcgcagtgccggtggttatgcttgtgcctttgtcgatggcgtttactagtacatggaaagttggaaacgggagttggttatcgatcatctcgccattattagcggtgatgacacttggctccatcaccatgattcacgattattcgtgtcatcgtgtgcgtgagggcaacagaaaaaaaaggagagaaagataggagtagtactagtagtacacgtgagtagctgttcgtggcatggatgaggtacggctttcaatagtggccggaggttgtggatttggagccttggaggacgtcctacaacggctacaggagtggagttcgtattattggagggcaatggaacgagatctcgacgacacgtcgatatggacacaccagcgcacagtgcatcgcactgccatttgagatgttgtgagtgcatccttttaaccgggagtccgggccattcgattgttctgcacgaggattactgtactgatgtgggccaggacactgctgccaatgtgggtacgtatgggcctctatggcccattaccatcatgtacttacatgatgtgggtcaggccactgctgccaccgtgggtgaatatgggcctccatggcccattaacatcaccagcaactgtatatggctcttactccactatttggtttctggactatgaactgaactaatcagcaatatgttgtgattcacgtcatgtcaagattcactgggcagaagttaaaatataaatggacggaagggaggaacaagtacaagcattcagataagaggatagacacatattgctttcaaatattcatatattctcactttcatagacatagggtgtgtttggttgcaagccacactttgccacacctaaggttaggcaaatttgacaggtgtttggttgtagccacagttgtgacaagattcccctccaacaaattaggtcccacgtgtcaatggctcaaaaaagtgtggcaagattcccttaggcttagtaagttgtggctaacaatttgatcacctcaccttaggcaaggtgtggcaacttttgttggcaagtaatggtaaagtgtggctgggaaccaaacagccccataaaaacgcagattagttacaactccagtcccagaagagattaggtcttcacccagaacgctatcgtcaacatttacaaagagtacaccgaaacctagttacaactaacaagtattacaactccagcaatcttcacaaagagtactagtattatcaacatgcctgcttacaccaaaa

SEQ ID NO: 12897 - DNA, 20276 bp, Oryza sativa
aggcgcttatgtggcattaaaattaaaaaatatatgcggggccatttgttattaacacacacaaaaattgtgggtcccacatgtcatcctctctttatcccttcttcctcctccctctcctcccttctccatctctccctctttctcttcagcgtggggagcggcgtccggatcggcagcagcgacggtgggcggggaccgaagctgtggcagcggcgggcgaccgctggagttgcggacccggaggccggatcagcccctcacttccttcctcctcccgatagaccgcgccatggccgtcgctgctgcgccgccgacgatagccgcttccccatcctcttcggccgtgtgctacaagcgggtgctttgctccattagtgcgtagctcaagacagggggcctggacgccatggccgacctcatggacgcggccgacaacactgcctcatatatgtcgttatccccatcgtcttcctcgtcagcatcgtccgacgaggactcaccttatgggcgtgcgcggcgtgcaagaaggtcttcgtcgggaagcttatggtggaggtcgatggaggacgtcgccacatgccatgctgggagctcgctggtggcaatcatggcgtaggctcttgcgcaccgagtcgggtacgtctgggtcgtcgacgaggtcagtggcgcgctaactggagtcgtgagcttcacagatgtacttgcggtgcttcgggagcatccatcaccactcctcgctttgcgccgccgccttgaggctgagacgtgcccaccaccaccgcaaaatcggaggcggcgcgcaaccttgagcgcccgctttgcatccgcaaggaggacctgctcccgcgcccgtcgcccgaggtccaccgcctggcactcgccgccgccgcctccactcgagcccccgcctgccgccggctcatgtcaaggggagagagagagataagggagagaggaggaagaagaaggatagagagagaagatgacaaattttgtctgtgtaaatgacaaatgggccccgcatataatttttcacataaacgtcacgtcaatgccacgttggatgaagaccaagtcaacactgccacgtgtgcgccacgtcagcgaaaccgccgtccaaaaccactaagggagtcaaactgtactgattttgacagtttgggggtcaagatttccggtattgcgattaagggatacgatttagattcggtggtccgttgagggagtcaaagtgatcttattccgctgatcttttgggaagtttctaccaagtcttgggccgggctgaaaggctgaaagcttgaaatggagtactacttaagccttccagcagaagacacaaatcacccttaataatgcagttaatgagatgatacacaaatcttttgcgtattccttaaagaaagacagaaatcacaatcaatcagacactatttctccacagaccattttgtcttatctccttgtaaacactatacttttccatgttaaaaaatatatatagtttatcctggaatgatcatgcagtatatactattcccttggactggcatgatttggctgcaactccttagaactgcttgcaagcaatccactcggtccctgcgctctgtgaattgtgatgcagaagagaacaacactagcagctaacaaagccaattattaagccaccaaatcacatttaaatccctcctgtgaaggtgccaaaacaccaaactaatgatcaaaagggctgcactgccactaaccacccttttttgttgcctactgctaattattattccaaatcaaatctgtgtcacggctaatggtcgttgcgagctagagctgtggcactttagcataaagtgatatatcagcagatactgaacctgaacctgaagaaacagaagtaggagtagcatgcattactatcactttgttggacaggcataaatcttgcacacaacctgctaacaaccataataattatccctataaatatccaggtattaattttgatgctgaatttccatttattcagtaacagtactctccttctagtaaaaaaattgagaagaagacagtctgaaaatctgaataatctcaagaaagaagaagacaatctgaagagagtagtagagaatcccgaggccattaaacccattgttactcttcagaagaacaattagcatcgatgcaaaacaaggttctcacatcccaaggacccatgggtttccatcaagctcgaggagagaacaggagacttcggaaggttcgatcgccttggtttctaggccatggtccatggacccccgtttttgccggcatgagttactgaattctgaatttctgatggcctcaacactgtaaacaaaatactcattccttcttgctatgctactgctacagctagtagtgctagggaatttccaatgtcaacaccccaaaaacagggaagaaatttgtagtacagtgcttaggtcgagattcgagaagctcactttgttgttcttggtcagctttgacaagttgaggtggcctgaggccctgaacaatagcaccgacattaacttttaaattacttattccgtattttaatgtatgacgccgttgactttttaacaaacgtttgacttttcatcttattcaaaaaatttatgtaattatcatttattttattgtgacttgatttatcatcaaatgttctttaagcatgacataagtattttttatttgcgtaaaaaaattgaataagatgatggtcaaacgttggttaaaaagttaacggcgtcatacattaaaatacggagggagtactaaaaacacacaaatatatatatagctgcgttacagcttataatcaaggcatgttctaaactacggtttggattggttaattactcggtatccattagcacacttttcaaaccgttaaacggcacatttcctactaaaacatttttataactttttatataaaagatcctttagaaaatcaaataaatctatttttcagtatgctgcactagtgctaatctgctagactgctaccactactctgtgatgtggctactacctgtgttccatgccagattgccagctaatgctgtctgccgatggcatcacaggccagatggctcattttgtgcactctgcagtctgcactgcgtttggtcatgcatccactcatcatgcatccacggatcaaccaatgcaaagtgagctcgactagtttcctctcattgttgatatgattgatgcaggtacatacaccactgtatcactaccttcttcaacagtgaacacacatgatctatgctggagatatcttatctgtaaatgttagtaacggtctaattcgtgtgtataaactgcaagaattgcatcaagcagtaacatcgtggagatcgtattaatgacaataaaagaaatatggacgacactgtagcagggaaagtgcagtaaactgaggtcactcgcactgtagtttctgtccacatttttcagtttgaccgtgaattctgggttggaccatgcgttgacttaccagtggtcagcactcctcagagagaggatcacaagagcagagagaaagctttggcatcgcatgcacaaattgcagcagatcaccatgcacttgcaagctttgcattgcaggttgcagatttgcagcctgtttttatgtccttttgcatggacaaggaattaatggagggcacttttgggaacctgcttcgccaaaagccttctggaaactggcaaaagtcaaattcacctcctaccgtcgagtactacagtagaaatcctcatcaaaatagccatcacgatcacgagcagcatggagtactgaagtatctggatctgaataatctgtgcctcgtgattcgcgccccattgttcttgctccctgatctcctgttgcgcttgtgcatcgtcgctctccctctctgcctcggctaatctcacctgagagagagtgaggccatcaaaccattcacaaggtcgtagtggatagtgatgatggcggccagcaccatggtctctttggaagcttctttcagaatcaaaaacttattaaacagtttagcttttgatttaaattctgaaaagttattgttgtagaatctaaaaaataaactataaattagaagataggaacttagcttttctaaattttaaaaaactggctatcaaccaactctttctcagccgtgaaacatatcgtgtagccattaattccgcctgctgcgtctgtccgtctgtatgcgtgtggcgtcggtgcccagccaacgatcagcaccagcggatccggcagattgcaaatttgcaatcttgtgaaaactgataaacattgccatgatgtgaaatcacataatcacagagagctagccatggatgttggatggaagggataaaaacagtaagaaatggtagcatctctacgtaaccgatttttaagggatcaactacaattatagagactacttatgtattttatcaatgaattttttcttaaaaaattgttagatataagtatattacaattatagtgtagatacattacattgtaatataacttgtacgtaacttttaaaaatcgtggtaacatatcgtgttcgtgaaatgaaagtcgtgggggtggggaggagggaccgaatcccctcacttgtatgatgtgtttttttttcttcctcatttacacgaaacttaaaacaaattttactatttaaaattacatgaaagttgcatacaaattacaatataattacattacaattatactaatttacgtttagcaaatttttggatgatagaatttttaggagaaaaaatatccataaatatatagcaaaacagttttaattattttttgataattgcaacacaatagtaagagaaatcaaattctacacatgattagagtcgaaaacggccagaaacgttacaacttttacgatacttcgttaccaaattccttcaccgttctcatacccatgtggatatattcttgcagaatttcatggctaccacctgcctagtacctctccgattactactcgctctacaatactccctccgtcctacaatataagagattttaagtttttactggtaacgtttaactactcgtcttattcaaactttttttcaaatgtaaaaaacaaaaagttatgcttaaagtaccgtagataataaagtaagtcacaaataaaataaataataatttcaaaaaattttaaataagatgagtggtcaaacgttgaaagtaaaaaatcaaaatcccttatattatgggacgaagcgagtagaattttagtactactagtactccactgctgtataaacagttactgaattactgatcatacgatggttcgatttgatttttagtagtagtactaaaatttttcccaaaatcatcacattttagacacatgcatgaagcattaaatataaataaatgaacaaactaagtgcacagttaggatgaaaatcgtgaatcttttgaggctaatttgtccatgattaaccataagtgctatagtaacctacatgtgctaataacggattaactaggttcaaaagattcgtctcgcggtttatagtgaattatgaaattatttttttattcgcatttaaaaaatatccgatgtaatacctaaaaattttcttttcacgaccgcatgtagtagtaatactgtacaacgtagtggtagcaggagccggaagggtgtagaacaatagccagtcaatgcaacctgagtgcaagaagaaagtacacgaggctacaaaaagaaaaacggccagaatcctccacacaagtactacacgttgaacgggacactgatggccggcgtatgcatcacacatcacacgcgccggcaatttgttaatcctgcaaaagtcaatgaagattaaaaataagccccaagtttagttactcgatcaaaacacctcaaaaaaaaaaacaacatcatgacaccgacaaaaccagcaaagaaattaaatgtcgaggacgaaaaaacagatgctcacataaaaacagcttactaattacctgtggtactacacttgctagcgaatcagctacaagaacagcgatgccacagattaattctttttaatacccatttttgtttttttctctggctattgttgcaatccaaatgacctcacattacagtgacccacacctttgcatgtcgcctcatgctttggttgctaacccttcacctaaacacacctaaagctaccccatttcttgcccattgattaataagctaagttaatccctccttgcacattttagtactaattcgcctacgacttctcacacacaaagcttcccttccccctaaacctgcaactgctactgctcctctttttcttttctttttcttccatcgccatcacctgctgctgtgtgtcctctgtccttcttcatcgccaatggctgccatgccaacaccaagatccttctcctacccctagctcatcgcaaaacaagctagaaatcgtctcttctcccaagaaaattcatctttggatcgtagagcgtatttgaagaatgagcaattcgacgtggcagccgtcgccgccgcagactccggcggcggcggcgtcgtcggcgtcggggattgacggcgtggagaacaagataagcccgagcatcgtgttcatcgtggccgtcttggcgatcgtgttcttcgtgtgcgggctgctgcacctgctggtgcggcacctgctgcggctgcaccggcagcggagggcgagggaggacgccgagagcgcgacggcgttcgaggggcagctgcagcagctgttccacctccacgacgccggcgtcgaccaggccttcatcgacgcgctcccggtgttcctgtaccggaacgtcgtcggcgtcggcggcgaggatggcaaggacccgttcgactgcgctgtctgcctgtgcgagttcgccgccgacgaccagctccggctgctgcccaagtgcagccacgcgttccacctcgagtgcatcgacacctggctcctctcccactccacctgcccgctctgccggaggagcctcctcgccgagctctcgccgacgtgcacccccgtcgtcatggtgctcgagtccgagagctcccgcgacatggtccacgccgccgacgatgagccagccgacgtcggtggcgaagacgcgccgggagcggaggaggtggtcgaggtgaagcttgggaagttcatgtgcgtcgaaggcaacgtcttcttcaacgtcaacgccatcgccggcgaaggggatagagccggcacgagcagcaacggcaatggcgacgccaatgccaaggctggtggtctcgggcaaagacggtgccattccatgggatcctacgagtacgtcatggacgcgcacgcctccctccgcgtgtccatcaagccgccgaggaagaagccggcggcggcggcctccaagtcgcgccgccgcggcgccatgtcggagtgcgagttcggcgcctccaagcgcggcgagtcctcgctccgcctgccgccgttccgcgcgacgccgcgcaagaaccccgacgacgacgcggccgcggccgccggcgcgaagctcgccaaggacagcttctccgtgtccaagatctggatggtgccgtccaagaaagagcccggcgccgccgccgagaggcgcgcggtgtcgttccggtggccggcggcgaaggactgggacgtcgaggccgggagctgcggcgggaacagcgccgtgtcgtcggtggcggcggaggagcgcccgtcgttcgcgaggaggacgctgctctgggtcgtcggaggcagcaggcagctcagcagagtcgggagctgttcatgatcaccatttcgatcatcaaatctcaaaatgaaaccaaaaaaaaaaaagatgattcttttgttcagttcttttaccccctccttttgcttgctaggttattggtagcgaactagcgattgcatccaacagcaagagaaattgtaaaacccatatgctacgaagagaagaaattttcctttcatttttaactgcatttgagattttgagtccgggttggtttcaattttcagcaaagtgactccctgatcattactcgaaagaaaacattacctattaggacaatcaaacaccacctaatcactcatcaaactgtacactacagtgtgttaatctcattacaaattagtccattcgattagaccagagaggccaagaacacaagctgcgatggttgcaattgatgatggtgatgcgaaaccgggggcaaaagcaactgtgcacagcatggaaaggaaattctcttgtttgatcccatcgtctgatcggccggcttgttggctctcggcgaccatcaccatgtgagcttgctgtgctgcaccaccaccaccgcactgtgccactgtgcgtgtgctcttttgtttgctcctcgcattcggaatttcgccaggacatctttctcttttcagaggtaaaaacaccacgcatgccgtcaagtttgggaagggatcttgtctgatctgtaaaggctcatcaaagattctctctttatcctatcctttttcctctatcagtttttttctacttaacccactgtgagtccaaccatgagtggatccaagtgtctcagctccagtacttcggttgcaggtacaagatctgagtgaaaggtttggtttcactaataattgacttaatgtagtagaaacaggtaaataagctggagatggaccagcatgtgaaaaggactggtccagctcctctgctactgctactgctacactttctctgctacatcttcacttgagaaaacgagatcttctcacgagtcacacgatctacactctgctgtggtcagtgagctgttctcccattactgcagcaagtccaccacaacgggaaacggtggacacacacacccctcacgttatcacacaggctgttccaacagctcatgcactcatcaattctttgagtactatactccggtggaggagtaaagtttctattcatacgcgtatgatgtacgaagtatatatctcatgaattttatgagttcggacagagatttttataactgcagtctatctctctgagattgacagttcaccggtgtgtggggagatgcaataattgatcggccatactacctgatcggattttactccttcagaatttggtagcttcgtggtcaccgtcgtgtcgtcgtcggccagtgtctgtggtcgtcccgggcgtttggttttctcatggcagccgttgcggtcggtcggtcactaatgctcggaggaagatgtgatcttcttcttcttttgacatcaaggaagatgtggtctttggtaaccgaagaatgatttagggaatgtttgagagaatggtaaaacaaggcgagtattagcgtataatcagctcctacaagatgaccctttccggtgcagcatatgggataaatttggccagaataaatgcactggcgatgaattttcaccaccgatcgccgcttccgtatagggatagatttgttttgcagttgccacttctactcccatgatgaagatgttgagcacctcttcctacgctgccccaaggtaaccagagcatggtcatccattggcttcaacgagtaagaaatcaggctgctaccatcgctcgagaacctctggtttattgagccccccaacacaacacaccacctatgtcggattcggcgcacaatactcctcgcgatcagttagaatatttgaaagtgccgaaacaacaaaagctttcaacagcatagatgaaaccgattaccttctccgacattgttgatgatcttgaagcctaaacgaacgctgccttactctgtatttagccggtgacggtgaagttaggcaccggtgatgaggagcgtagaaatgtccatggcctcgtcgccacgaacggcatggcaccgagcgttttcgtcgccgccgtttttgggatctcggtcgtcggtgcggtcgtcgatctccggtcgtcacgaggtatggcaccggatcgccgtctaatcgtaggccaatgggccccgtgcctcctatttctatttaatttgggcttgaaatcgtttatttctaggcccagttgagcggctttcattgggcttggcctatttgtgtgagagctcgacttgactaatcagtaggcctgagcgcttcaggcttttaccacctccagcgtccagtttgataggcccaccattcgaggcccatatatctgttattatatccttttctttttgcgattatctgctatttcctgctctagcttctccaataatgttgtttttgtgtcattagttgattacaacaactaactgttctaaaaaattacgacaactaactgaactaggccacgttttagaggaaacagtcgacaaggctgccataccaaccaaacaggtcaacctaaaactctccacgtagcgacctttcttactgcgacacatatgtatatagctagtacgttggagtgcacggttaaaattcagtaaccaaaccgagtgctcttgtacaacatcacgtcttgttagcccagagccgtcgttgaactcgtgcacgtccaacgctgtcgctttctcaagaaagtgcatgtgggcacaccaacgaagcaaggttgtagcaccatagattcttgagagaatataccaggccatcgaggcaccaaaccaaccgtcacgcttaccaagaaaacccgaactacttctcccattaaataaatagacgattatgttccattccaatctagattttgtattgagacgagagtagctaactagctaggaaattcagtgattttttttcattactgaacctttttatttttaattttaaaaataaactcttccaaagtttaaaacttattttcaaaatctgaatattttgaccacgctaaacagacgtaacagttttatcttgccataccagtcgatatgatgtggccaaataattgtcagccggacatgaccacgttttgcctactgacatgatcaaaagttcagttattggaaataatttttgaaatggtttctttttaaaattaaaaattaaaaggttcaaggaaaaaaaactcaaattcagtgcacagcacaaaactacaaacgcgcaccgaagggaataatcggcttgggcgcagtgcaggatcaatcaaccggccgcccgcccaggacgcacctgcacgcagcgacgacacggcgcgcacgtcgtcgctgtgggcgggcggagcatatgctcgatcgatcactcctcgatccgcacggatacgacacggggaaatcgtccaaaactagcgagacgtgtgacgactgtgagtatttcttcgtcggcacacatgcttgttgaattagaccaactctgtctatctctgctcatgaacaatgctggcgatgttgataaagttcataacacagtagaatatataatctcattggaagcctctagtgtcgtgttccttggacggacatgatgcttaggtatatgtatattgtgcttgatccgggggaggatttcttggccgattgatcgatgccatgcatgctaaagaagattttttccagctctgatcgatcgagaagcaagcaaggtcatcggatattctcttccttggttggctcaattattcgcacacattgcaccgagccttctgctgccttatcgacgatgcgccggccggcctgcctcatctcttggtcagaacattcggcgtcccatgccatgcatacagttgtttgtacccttccatccagttcagatgatcagatgagatcaccgggaaattaataactcggtgtgcttcatggctcatgtcgtgtcaccaacaggagtcaggcggcaataatatgttggaatttatggacaggcagatgtgccaatgggagagttgataataatagtccaaggcctaatttggtcatatccaaaacttgtcctagggtaggagtactagcaaacacaattcaatatcttttgacagggaacctatctcgatgagaaccaactgtattcgaggatatatggataagaagcatcatcgactgtgagatatctagctttattttcatctgttcttggttccggcaatcttcagatacgagataagaccatgaggatgtggattttttttttcatgtctcgtgatgcaaaaggatagacgaaactaaacagaacgaaacaaaacacttttgggagatagcaacgtatagcagtagctgcttctacgacctactacgatataaaactacctcctctctgaggagagaattctccacacgtaatttatcaagaatactgaatataaatggtttcagacttcacattgccctttccattccagctaccatcacaaaaaaaaaaagaaaaacttaagaagtgattatactcttgatctccaatcaatcaaaaaatatgttcatgtttgcataagttgaagattacattggcgtatgtaaaacgagaaaattattagcatataattaataaagttttaattattataaacttgacaaattgatatatttgttatttcgaagcaacttctatatataaaggttttgcacgaaatataccatttagtagtttagaaaacgtacaaaaatcgaggaaaaatctaaatcttaatgagaaaagaacatgccctaattttttttttgagaactcatgccctaactcgggtcaagcatttctgcctagctacagcaaaagcacgagatgccattcatggcacgatcagatccatgtagctgagccctaccaaaaactactagcactgtagtatcatttctctgaacctggccaggaggagagcagacggcacacagtccagacagacaagccatcggcgcgtcgtcatgcatccgatcctctcctcgcggtcgccctacgccatctgttacctttgatgtcacagtcttgcatggtaggccacacccatgaaaatcaaacaccgttcatggtaggccacacccatgaacttagttttggacttaattttgatttctttcaatcatagtttgtttttcagtattgattattaagttgttaagaaagcataaataagagctttacccgtaatttagtttcggttttggttcgttcaacggctaatcagctgtaatcaaacgatgagactgctccacatgctgaaatgcagaatggacacaagccggatcgatgctagtacagtgacctgacctaaagtaatttaacctgagatggcatcctaggtagtaagagagtttaattggttagtagcgttatggcaagccatgtgtccatatacctccatatcaagattgggtagtagcgaaaagaataagaaagctggaggttttcatgcatatcgtctccttatccttggctacctttgttgacttcagtattggtagaagcctgcccaaagctagctagctatcactaggaaagaagattcgtgctaccctcttaggccagccgggtcaaagcagcttgtcatttcgaccacagctgctaatatgggcgatcacagaagtttcatcagtctttgatccattggaaaaacaaacaaaaaaaaaagaacagcaatgacttggttcaggtttctgggtaaactcctactcctagcaacttcattaggccatagaattctctcctaatccggctgctagttgcttactcctgttcatcagcgacatgaggagattaaagatagatgaacatccacggttgccgacagagtgtggcgggtcagccggacatctgaattatttcggccaaaagtctcttgccggtgagatgaaatgatggatcgtctgtcctttttatcatcagcgttgtcctccacagcctctcgtgtaccacatcaactgtgcctactaacatcaggaacctgttgttccgagagaaaatcgttcccgccataatcatggcaaaaaaaggccttactttagtgccttttttttaaaatctcccaatccctcgtaggagatgtctgcgtccattgaactacaacttggcagctggcgaggctcccgtcttggtacagaactctgaaaaaaaaaaagaaatcaacgttttcacatcatttggattagcaatgtgcagcaattcggaagggggaaaagaaagaattcccagcgtcgttttcacagcatttggatgaggaatgtgttgcaattaaaggaaaaaaaaggaaattcaacgtttccacagcattcggatcaggagaggaatgtgctgctgctgctgccaatatcggcggcgatcctccggtcagcgtcaggcgccggcaagagaaaagagtggagacgtagccggataaggaggaccaaggtctgcgacactggcgctatccggcgtttgggcatccatatcggtctgtaataatgcagcaaaggtgaaaagcatggccaaaatgcccgaacgagacggccactggacggagaagggaagcaagcaagagacaacatgaagaaagaatcatttttccttttttttttttttggttctgatttcatcgtcatcgtcaactacatatacaaggtggctgaaaccttctcgcatatttttatcatacggggcatatacaagcatggaagaaggctgaaaatgttgaaagaaaaagaagaaaaaaaaacaaaaaaaaacctgtttatcctgtaacttctgcagctaacccctaaaccacacgaactgaatcatcatcatcttttccatttgttattggaatttcctccttggtttttatactgtgcagaataatccctgtctccgtcacagtgagccttcgaacgagacccgcagctgcacttgccttggccgctgcgatggcgcattggcgagaccctgcagcatcttgatcacgtcgaccgtgtcgtcgaggtagtacttggccatgctcggcttcttgccgaccgtgcaggcgaacacctcgctgctcgccgggagcttgacgctgctgttcgacgggcaaacgatgctctcgaacatgtcctcgtccgaccggtcgtccccaatgcacagcacgaaatcgggcgccttccctcggctcaccatggatgacaagaggttgtccacaaccacacctttgctgatgccctgcatgacatgaaagataatttgtcatgagagatgattttagtatgttatcactacagaaatttcgaggttggtggtttgggtggcgagattgagattgagttggttcctaacagggataaatattaaaaagaccggggactcttttcgcgaattttccagtccacacgggacatggtccatgctgattcatatcctatttgtcgagcagatatagattgtccccaagtatgtggtggatgaagactggattggattagagcaatccttatccgttgcctttagtttgacagcgacatctagttgatcaacatgttgtgcatacaagtctacaaccagaactaatcaaacatatactgtcaaacaactagaggaaggaaggaagatggcaggcgcttacctgtggatttacttcgacgatatgctgggccctcttaacaacgactggttcatttgcaagaacgttttcgaggtggtcaagcagttcctttgcctggcatgaaccaaaatctggatctgcctcatcgtggtgccaaactaacgcgctttccttgtcttcgatggttgaaccatctgttgcctccttgtaaagcctcatcactggttctgcagtcttcttccaatcaaagtccacggccaacccgcaggtctcccaagctgagtccctgctccacctgtggtatccatagattagtaaaaatcacaaatttcccagaacaaattcaaacgctcctctacctgtcttgtaactgaaaatgacactagataaatacgctaaaacctatgtttagcttaatggcataaatcaaaagcctcctcaagattatcctagtacaatggacatcacagctgcatctagatatgtttatgaactcaatattttgcttcatgttattcgataaatgtactggttgatgtactgtttcatgatttatatcatcctacagatttaatccaaatctaaaacactactaatatgcaagcaaagcaacttcgtaccaacaaggagaatggaagataagagattactaccttgtgaagtaaccatgctctgcagcaatccccagcttctcacaaggtgcaaaccatctgccaagttcatccttccctctaccgctcacgatgaacactctgttcttggggtcctcgcacagacgattcaatacagagatgacctcattgctcggtgccttatcaattgaaccctctggcatcactgtgccatcatagtccaagagaattaagcgattatcagacttccggtatgacggcacaatgtgatcgacagacagccgcctgaaattcgggccaagtgccaccaccttgaaactcatcccaaacccaataccccaatgccgccgcgagaaatgatccttgcaagctcgctgcaggtcctggtcgaaagatttcgcccagtaggcaacatcatgggtgctcacatacttgtagtgcttctcatgtcgcagccgctgctctggctcaggcatcctcagggctgcattcatggcctctgccatagactccacactccatgggttgacccggattgcgccgctgagcgacggggagcacccgacgaactccgacagcacaatgacgctgcgcttggccgcatcatccaggccagtgctctcctgccggcacaccgtgtagatgtagggtatccggttgaggccgtcccgcacggcgctcaccacgcagcactcggccgccgcgtagtacgccgccttctcgtgcaccgacacaccgcggtcgatcagcacgataggggtgtaccccggcgtgccgaaccgcgcattgacgcgggcgctgatcgccctggcttctccctgaacctcctggatgtcgcgcccctcgctgcgcgccgggttcgcgatctgcacgagcaccgcgcggccgcgcagctccgggtgctccaccagcagctgctccatcgccaggaacttgagcccgattcccttgaacaggtcgacgtcgtcgacgccgaccatcaggcgccgccccttgtacgactcggtgagccgccgcaccaggtcccccgtctccggcgccgacaccaccgacctcagctggcccatgtcgatcccgacgggcagaatcttgaccgtgacggtgcgaccatagtactcgatgccgatgtagccgcgcttggactggtaatccaggccgagcagccgcgagcaggcggagaggaagtggcgcgcgtagtcgaaggtgtggaagccgacgaggtcggcgttgaggagggcgcggaggaggtcctccctgacgggaatggtgcggaagatctccgaggaggggaacggcgagtggaggaagaaaccgaccttggcgcgcgggaatcgcttgcggaggaaggtggggagggcaaggaggtggtaatcgtggatccagacgaggtcgtcgtcggggctgagcacctcggtgaggcggtcggcgaaggcccggttcgccgagaggaaagaatggtagagcgcgcggtcgaacggcaacccgcccagcgacgacggcgtgagcggcagaaggtaatggaggagaggccacaggtagtgcttgcagaatccatggtagaatcggcggtggagatcggcgggcaagtacaccggcaggcaagagaagttcgccagcaagtagttgcagagctcgtcggaggccgcctcggttgcgggcggcgggagcgtgccgatgtggaggacgggcgcgccggggggcagccccgagcggagctggtacgcgacggcgtccgagtcaaccgtgaaggagaacccgaacggcgacgccgcgtcggccgcggcgcggagcgggaggcggtgcgacacgaccaccctccgcgcgggggccggcgtggacggcgacgtgggcgaggccggcgacgccgccgacatgacgcgcgggaggcgcagcgacgcgggcgacggcgccgcgtcgtccgccgcggcaacgaggtcgaggaggttgtggcaggagagcgaaggcatcgccaaaacaaaaaaaaatcaccggttcgtgcacccgacgaacaactcgccgcctccacgtcgcatcaagagaagaagaaaacccaacccggcggcgaactactccgatgaagcggaaggatggaaacggccgcaagcgtgatgggcgtggaggtggataagaacggacgagggtgggagagaagagaggacgagctataaatacggtggaagaaaatcgaacgaaagatcgcggggtgggaacgggatagatatatatcgcagcagcagagtctacagagttgagaggaggaagatggaaggggaaggaggaggtgaaggtgaaggtgaaggtggtggggtgtgcttatccatccaatctttgcacggggaggaaatgacggggctgcccctctcactctcgtgtaacggccgggttttatctgaaatcttctcgtgcctcgcggcgtcggggatcgcggaggcgcttacgggagggatacgtcgcgtggtgcgcgcggctgcagacgtattctcaccgaacggttctcacctttgggtgcgggtgggagacggagtgggagacggacggtgggggtggataacgccggggctgttggcaggtgggacagatggggaggagtactggagagccattacttgtgcacggtttttccaaatagtttttcccattattcttttaatcatacggcagacgtatacgtacgtacactataagagacatatatctgttcttgataaaatcatgttgaaacctatctacaaatgcatactccctccttccaattttaattgcaaccacgtgttttcatatccaactttaatgattcaacttattttaagaaaatttataattagtatttttattactattagataataaaacatgaatgctattttatacgtgttttattttttaaataaaatagataattaaaattgggtatagaaaactatggttgtacttaaaatgagatagattaagtaatatttgtgggtagcaggatttgaatcatgaataagtaaagtcatgcacacatgactagcaaaccactagggctttcctatttcacaagatattttgatctgctgcatcggaacgtgaattacgtgggtgatagtaatatggtggtgttgtttgtcatgatgtttatgtgaaaatgaaaagtcgtaaacgaacttccttttataatggtacagattatcactgttctgttgcatgtgttttaaattggactttcatgaccatatcattattgttggtgttgaaattactcctggttgctacgccaaaagaatgtgttatggtgctttcaaaaaaaaaacaatatgttattcggcgtggcaggctccaaatcacattcaacaaaatttcagaatcaaaatcttgcaatcttttagcttctgtcatatatgttgtctgtataggcgagtataaattaaattgaagtatattcttgtcagacgcgtagcatagataatactagataatattgttaactaaccgtaatttaatttataaaacaacatcataacttttttacataagattaaaaataaacacatatagcgcgcgcacagctaagagattcttaaccaccatgacaatccaatattccaagcaacaatacataccaaaattgttgccacaccttatgttaaaaaactattaagaaaaatgtttaagaacatgtgaatattgtgcgtcttccttatcttatacggaaagaagttgatgctaacaattccataaaatctatcaatgcaataaacatgtacaaaacgaagattccgtatcctctcttttttttaaaaaaaaatacccaccatttcacttatcgtactcgcaaacttagaaggaactctacaatccaatcacaacttaaaaaacgattttttatacgagagacaaacagactgtaatatggcgcgtctccaaaactcaaacattcaatttcacgtatggctccttacgaggcccgcatacaaaaatttattttttttaggcgatgcctcttaggtggccacatacaaaaataaacatattttcgcatgcggaacttttaaagtccgcaagtctgatatatcccttctttccctctaagcactttaaattttttttcaagtcattcttatctctacttggctcccaccccctcattactcatctttatctcaaactactatatgtctcaaaatcctctctcatttctc

SEQ ID NO: 12898 - DNA, 538 bp, Oryza sativa
cccccacattctcactctcactgaagctagctttctttctttcttaagctttttttctcgctttcgactgctgctttggttggccgagccagtgaagtagtgaagctgagctctcttgcttcctcttctcctccagtagctgctgctgcctttatgctgctttccccctcctttgacgtgagaggagatcctctcctcctcgctcttcttccttctcctgctcctcctcagctggggggtgggcccaccaccaccaccaccccaaatctccttttcgctgccctcaccacctccaatggcgcctcctcctcctctgcttcttcttcttcttcttcttcgccgtctcctccaatcttcactctctcctccatgctgctgctgctgcaactgcaagaaaaaagagaaaggcaatgtaaaagaaagcgaaagccagcacagctcaagatatattctataaacaaatccatggacaatgcaatgcagttgccgacgacgttgcactctctccctacaagagcacgctttagaccaaaagatc

SEQ ID NO: 12899 - DNA, 18197 bp, Oryza sativa
gtgttcactggcagctgtagagggcaattctcggtcaatttgaatatttacaatcatcaactgtagatgatcttgttcaaatatagcttcctttcaatcattcaatgacatcaaggtttcgtttgaatttatgtctttaaactcattccaatataacatgtaattttaaccagctagtgtttattatgagtgcaccatgaaaccaaacaggtttgggatgctatccacaccatctaaactatttcattagagttgccagcagtgaaccaaatggcaccttagttggttcggaattccatctcctgattgctgccattcaactcaacaattatttgatttctcacgatattagttgccactatattccctagcattaaccggcgatctgtgttacatgcatataataacatggatttacaaaagtatgttttgtgatgcaggtgtctctgttcaaaaggctgcttcaaatggtgaggaatttgagagcagaatcagatcgtatgcatgcattggcatgtatttgtcggactgctctttgtgttgatctttttgcaaaagagagtgttagaagaggtcagaagcctgttccaggaacagatgtgatctcactatttgaggatgcaaatgtgaagggtgatctaaacagcataacgagcaagagcttgttcagagaggagctagtcgcttccctagtcgaaagttgtttccagctatcactccccctacctgagcagaagaattctggcacagagagcagagttataggagcattagcttatggaactggatatggtgcattgaattggacagaacctgctttggatgtggtggaagtttgcaggccttgtgttctttgggactgtggtgggcgtacctatgcaattgattgctatctgaagttgcttgtacggctttgccatatatatgatactagaggtggtgtaaagacaatcaaagctggtgcatctcaagatcagattctaaatgagacaaggcttagaaatttgcagctacagcttatcaaggatcttcgtgaggttatgctcttagttaatcttaacttttaaaatctaaacacgatggcatgtttgttttacatgaacccacatagttctttatatttgttgaatgttgatgcttcgttcatccaccaaataaataaaacagtggtttatctattttatactatctttatggcaacccattagtttttctctgttgcactgaactcctatataatattacagtacatgattttgtttcttggcatgcatcattgttatgcttgtccttgtcttttccggcctcatggatctgactattgcaaaaacttgtgctctaaagtacatttcccataaacttctctcgttcaataactaaaaagcatacactttgacaaggctttactttagtttagattatattatggctgtctttgctgggctttccttttgctcttcttccccctttcttttttcaaatatttataaactagaactgcatcatctgtaaaagattcttttcctagttggtaataatcataaagtgccgatgttgacatgacttctactctatattctacttttattgcaggttcatacaccaagaatttcaggacgattgatatgggcaatttctgaacattttgatcttgaaggtctggatcctcttttagctgatgacccagaggatccattgaatatcatcatatctaacatgcataagattctattcaagatcgattcatctacaactacctcaagtaggatacaagatgtgcagtctgtcctcatatgcgctcaacgtttgggatcgagaaatgcaagagcaggccagctcctcactaaagaattggaggagttcagggcaagtacttcagctgattctgtcaccaagcatcagtcgcgttatgtcttgcaaataataaaatatctaacgaaccatcctgataacaggtgagtgtattctgaaactcgagtaactaattctttcacaaagggtcaccatttatttagatatatactgtcataaatgttgtacaacagagaaaaaaatctctactggaacatgcattaggaaattatgaaatgtctaactttccaatatttattcaggtgggttggtgtaggtgatgctacaggggattatccatttagccaccacaaacttactgttcagtttttagaggcatctgcagcacaagataggaaattggaaggattagttcacaaggccatcgaagagctttggaggccaaatcccactcagttgactctcctacaaatgaaggggattggtgctttgcacaaagagcttccaaaaacactttctttgactggcagcagtgatccatgctatattgaggcatatcatctggcagatccaactgatgggagaatcaccttacatctaaaggtatggcctgatcgatgcatctttcccttgtttgcttaacagtatattcattttattgtacttttctgttttggtctctgttaaatgctgtttagggacaatttagctcttaacgtggagatagttatcttggggggctggggtaaaattgccagcagttttttgccaacactgtaaatactatattattaaaaaataggaaccaatattcttatgcaacctattggccacagttttctcattttaaggccatattatgtgtggccttatcatgatggatcttcagtgttagctccagcactgtgcaattgtatttttgtatttgttacctggtagcaggtaggttgattttagaagttaaaacaaccatgtgtggttccacatatatttcttttctctgaactatagaattttttgacctggaattgtattatcatgttgtttgactagtttatgttgttgcagattttaaatttgactgagctggaactccacagggttgatatcagagttggtctctctggagcactgtattatatggatggattctcccgcacagttcggcacctacgtaatcttgtttcccaggtgcttatactaatctaaatgtgcctattttgctgatgttcttagtataaactatacaattacccatcaataatttaaaactagtgtagtgccccttgtgttgctagggatctgaaatatataacatcaccataaattctgaacttaaacaaattaaaataattatcctcgagtataaaatttcacacgcataattcacatattagatcaaccaactcttattttaatccaccttatgtggaaaatgcctttccattctgcaggatccagtccaaagtagtgtaactgttggagtttcgcactttgagagatgctccctctgggttcaagtcttgtattacccattttatggaagtggagggtctgcagactatgaaggagattatgcagaggaggactcacaaacagttaggcagaaacgctcacttaggccggagcttggtgagccagttgttttgcggtgccagccctacaagatcccccttgctgaacttctcttgccatatgagtgctccccagttgagtatttccggctatggccaagcttgccagccatggtggagtgcactggcacatacacatatgaaggtagtggtttcaaggccactgctgctcagcagtacgacagctctcctttcctcagtgggttgaagtcgatttcttctaagcccttccatcaagtctgctctcatttcatccgaacagtagccgggttccaggtaagcattttgaataatctgtgtcacttgagtcatgttaccatcctctttattctttcatatacataactatcaaaattcttgggttataactcatttgatctcctacagttatgttatgccgcgaagacatggtttggtgggtttgtgggcatgatgatctttggcgcaagcgaggtcagccggaatgttgatcttggcgatgacacggccacaatgatctgcaaattcgtcgtgcgtgcctccgatgaatccatcacaagagagatccaatcagacctccagggctggctggatgacatcaccgacggcgccgtggaatacatgccggaggaagaggtgaagagcgcggcggctgagcggctgaaggtttccatggagagaatagccctgctcaaggcggccaagccgaaggtgccaccggcgaaaaccaaggaagaagaggaagaggagaagaaggagcaagaggacctggacgagtttgggaaccccaagggcccctcgacgctttccaagctgacggcggaggaggccgagcaccgtgcgctccaggccgccgtgctgcaggagtggcaccagctgtgcaaggagaaagccttgaaagcacagtgaggcttttggttttatgttgtgattttgagtgccatttttgttcttttaacccccattttgtgtatgtattagccctgctgattaatttcactccatgtactactgccgatttgttcattgtattcattgttcacagataacatttgtaacatagatccaagctttggtgtgaaaatacatttttttccccggtgaccacactatattcctggtccatttttcgacgaaaatctacaaagaaggtgtgcataacataattcctaatgtttgactgacaggtggggtctggtgaattctacctgtctattccaatgacatgtggggtctcttgcaatggccccacaagccagtctctctcttcgcggtctgcgtgttcccacccctccaccctcgagtcccccgaccaggcgatcaccccgtgggcggcggcgccgccgtcctcaggccgccggccgccgcgtgcggtcgagctgccttgccatggcaaggccgcagccttgctgatagcgaacggaggaaaacgaccaggctgtatgcccgcatggtgttcgaaggggtcgggagcgatggctcggggtcgggggcggtggctgctgccgacgcggctgctgaacgtctgcctcgccgcgctctgccgcggggggagcctcgccgccgcggaatccgtcctcgtcgacgccatccgcctcggcctgccacccgacgtcgtcacctacaacaccctcctcgccgcccactgccgcgccgcgggccttcgaggctggccctcgtcgtcatgggacggatgcgggaggccggggtggagcccgacgccgtcacctacaactccctcatcgcgggggccgcgcgccgcgggctcccgatacacgccctcgacctgttcgacgaaatgctccgttcggggatcgcccccgactcctggagttacaaccccctcatgcactgcctgttccggtccggccacccggaggatgcctaccgggtgtttgctgatatggctgagaaaggcattgcgccgtgcgacaccacctacaacactctcctcgacgggatgttcagggccggttatgcgatgaacgcatacaggatgttcaggtacctgcagagggcggggctccccgtgagcattgtgacttacaacaccatgattaacgggctgtgcagttcaggcaaggtgggctatgcccggatggtccttagggagcttgggaggactgatcatgccccaaatattatcacttacacggcagttatgaaatgctgctttaagtatggtaggtttgagcaggggttggacaccttcttgtcattgctggacagagggtacatttcggatgtctacccttactgcacagtgatcagtgctttggttaagaagggccggttgggagaagctaataattattgtgacctcatgctacaaaatggatctaggcttgacagtgtgtgctacaacacgctgattcacatgcgatgccaagaagggaagctggatgacgcatttgagcttgtgagcatgatggaagatggcggcctggagagtgatgagtacacattcgcaattttggtcaacgggctgtgcaagatgggacatatcgaggctgcagaaaagcagctattttacatggagatcaagggcatgcaatctaatgttgtggcatacaattgcttggttgatgcgctctgcaaatttcaagaggtggatgcagctatcagattactgcagtgtatgaaactaaaggatgattttacttacacatcactagtccatggtctatgtagggtgggtagataccatatggcatcaaaattcttgcgaatctgcttgcatgaaggtaataatgttcttgcatctgcaaagcgtgctgtcattgctgggcttcgtagctcagggtttaaaaatgatttgaggaaagtccgggtagcattaaatatggctaagctgttacgaccataatccaaggaaaatggcctgaaagatcaattcgcaagagaaatgactggataatcctgcatggagtttaaggatgaatatcttgtcggtggctcagtgcatcattctatagaagtaaaatgggtatactctttttctggagaaactgtaggatggtgatcttgcaatatgcaatcagccttttcactgtcagtctgtcaaacccaagcggaacaaaattaaacatcatgggaagctgcagacatcaccactagttggcgaacggtatcggctcagtatgtgcacaaagccaccactaactggtgtatgccttgccttggattttgttgggaaggtaattgtggatttatattttatattcaagtcttctgcttaaattagttattaccttatcgttgtgtcacagtaaatcatgctaagtttaccctcttttgggtggttgttgcagattgattgggtttagttatctgttgctccagaccagacgatacagagcaagcaattaaaaagaagtacaaaaagctgcagattggtacagaaaaacccatttgtacatcatttttttgtctgttctttaattcttatgaagcagtggaaaaaaaaatctctttgggtgataccatatgtcacagttttaacatattgagcaagttttatattccaatgaaaaacatagcaagaggacagatatgtttgtggtatgcggcagtgctacctatccttgaaattttccattggacagccatttgttggagctctgcatgtcagtggctgctgagttcgagccgtcaattgaaacaagtcggcaacctcttcgtgatggagcatcgtagattggtttgcaaggtgacatgaattttttgaactcaattgaggtcaggtttgctttgggttgaagaattggggtgatttgggtagatcaggagatgtttggttgattggattggttctgggacgtatagtttgctaacataggtgggtctggaaacagtctagttttttaggcattagcaggtctagtccaaatatgaagttattgtgacattctaccaattcttttccctacctttgaaggacatcttgagtgggataactttaatttacagaacatggtaaatttaggttcaagatggatttacaaaagtattttctgtgacccagggagtcttcatacgactgcttcgagtggcaagaaacttgagagcagaacaagatcaaatccatgcattggcatgtactccatttgtaggaatgcttttttttttgccgattcatactttggaagcccattcgaggaacaggtgtgatatcacctttgaggatgcaggtgtgatgatacaagctgaaaaccactactgacgagcggccgaagatttacatggagaacgtagctcaaggcagcaaaactgaaggaacctttgatagcgacaagaggagaataatgagcggagagagtccaatttcatgtgtaattctttcgacatgaattttgcaaaaggagtccaatttggctttgatttgggagaaacgaattcgtacattcggaactacgcgaacatgcatgtcagatgaaggcggggccgtcctttctgttaacagacagtaaatttcaagatgtcaaatatacgagtttcaacacaaatcctacagagtttctgctacaggaaagtgattttcaccgttgtacagagtttctgctacggcattggtatattctatccttttttaaaaaaaattaattaaaaattgatactagcaacctactccagtcctgatccgagtttgtgtctaatccagtagtattgttatattttggatcgaaaaagagtagattttctgaatatagcttattttcagctggtatcttatccatacagaccaccaaattatcaaaatcttcggaatctgaaaaaaccccaacccaaacaaagcatctcgtgtccctatctttcgggtcatttgaaactggagcgaataacctctcgactccaatttccacacaacccaccaaaaagtctccgccacttcaccccgatcgccgccgccgccgccgccgctcgattccccgatggccgcggagccggaggagcgcctcgacgtcctcaccgccggcggcgagaagacaggcgcctccaaggccaggcacgccgcagctaccccctacccagcttactcccgccgccgcttcggttggattccattcgatcggatcgcgtgactccgccgccgcggtttgctcggttttttttttcattgcaggtcggaggtgcacagggacggcgactaccaccgggcggtgcacgtgtggatctacagcgagagcaccggggagctgctgctgcagcgccgcgcggactgcaaggacacgtggcccggccagtgggacatctccagcgccggccacatctccgccggcgactcctctctctcctccgcgcagtgagctcgctaccccttgctcccttgatagaatttcggaatgcgattatctgaattctgcttggggaatcgtagtggcgattttgcctagcagcgtggagaagcacttgtcactctgctttaagtttactatgcacatgggcatgacactcattgcttatatctgcgggagttgtagtctctgagatattgcggttcatctgatcgatgcaactgctgaaacttgattgaattaacttacgtgatgaatgggttgcacacgtgctattatcacatagtgtttgagacgctgttcatattttattttagtttattccacaggttcactgacttgcttgcatttgttgggttggctattactctattgcgtgattctttgctaggctaggtaaaaagggtaatattaaaatgatgcattctaattggtaatagcatttgacatggatcatcaggcgggagctcgatgaagaactaggcatcaaacttccatctgatgctttcgagctgttatttgtttttcttcaggaatggttagtacctctatctcttagtccatcatcttattgtgagtttgcaaactacgatagaaaacgattacttttatcttttttgaccgggtattaaatactattctatccctcatcagtttaagattgtatagcagcatattctgatcataactgcagcggatcttttacaatttcaaacagtacttactgagaggcttgctaagtgctaatatttcatatttcatcactttatgttcacatgaaatttcacactatcagtatctgcataaagggacgttatataatgttatcctctgattctttgctgcagtgttatcaacaatggcacatacaccaacaatgagtacaatgatgtttatcttgtgactactttaactccaattccacttgaggcattcactctccaagtgaggatacaatgattagtaatactttgcattatgtttttttcacttgctcttgcatattcatggttgtcaacatcaacaagtgtgtattacaagaaaaatctgtacttatgttcctggcaccaaaggaaatatatctgagcaagtaaatttatcaacatgacaaaaggaacactatcagaattgtccagtatataaatatttatgatgtaatttctttgttttactagttgtatggtttgtttcataatcaactgtagaagttttaattataggaaagtgaagtatctgcggttaggtatatgcatcttgacgagtacaagagctgccttgcaaaagaaagcggagaatatgtgccttacgatgtgaatgggacatatggccaactatttagtattattgaagaaaggtaagcatccaaattatttgtccagtcatgtttttgtcaatttgtggcctcgattgtcgaagggataattatattcactttggaagaactgaaatgacttttttctgtgatcgatatgaaatttactactaccaacagtctgtggtaacaaaggtgctggtgacaattaaaccatgtccaagctctcatttgacctccaggtttaggtttaaacattgggaagctggagtgagtatttgtctctaggttgacacagtaggttcttaggagttaggatttattgtatagttttttttttaactcatcagagttttaagttgaaaaaaaggatgtggtgtcattgagcaagtcattcgatgggtaagtctctaaacaaaaacttagcatttggtgaatcagggacttttactgtatgttttgagcagcatctgctcctgttaacaacccaccagaattagaactttcaaataactgtttctttgtcttcatctcttgccagttaccactttgaagcaattcaacatatcattcccttggcaatccctgttgcaccacgttttttgtcaaaattatcttgcttcaacctttcatgccatgtttataggtacaaagacaatatcgaatcccgcagtttaaccttgcaaaagcaaatcaaccgttatgctcccatccatttggaaccagaggtaagctgtctatattttttgtcagtcaccctgtagctctggttatttattttccatttcatatttgattatttatgtaactattcttgcctatttggcagccaccaatattcaataccaacaaaattatatgtatgggaaaagggaaacattcacttcatttatgcacatagctactaggtatgccatatgcaatatgcattggatgtatagcacatgaaagctaggtgcgcattgcacaaaaaaaaaagagtactgtttgtatcattatggtggtctgatagttggaaggaatgatatattgtgtcaaattgtctactattgggtagcacctaccagtttcctcaccttttcttggattaatccattcaagattattatttcttagaatattgtatgatacatatactatctataatctgttcatcataaaattctgtgtcataaaagaaagcaacagtttgatttcacacactaggatcataatatttagtttgaacattaggacggaaacaggaaatttgattcatcattcctataatatagtactcacatgcttttttttgtccctggcacgcttgacatttcaatctttggctttgcagttgactagtctatcagaaggagacagggaagccttgggatatattcttaaagcatcaatagttattgatgacatcttttatgagcaggtacatctttcaactttcttcatttttttttgaaacacatattttttattcttattcgttggatatgtcgtttacaattagttagcaaagattatcttcagtgataattattatttttactgcattgcaacttcttactaccctggttctcgattaggtttggaatagcaactgcacgctgagagactggctgaaagcacgtgctaactactcttcttttgataagttgaagtggttgtattattccattaataagagtccatggtaatttattttctattgaagtttcttcacgcatgttgactactttaggtttatttgtacattggatattttgttggttgcatggtgacttgcctatgagttaagatcatgatcttctgaagtctgcatttagtatttgtcttgtgttgccacgttgacgcatataagtttacatgtgttgtgtggatggatatagtttgtatcctaatttttgtgtatctacatctttatgagaaaattaaatgttttgtattgaagaatgcatactttctcagatgttctgtgcagaacttcagtactccatgcatgaaaatgttctttcataccactgttatttaaccattaccgaacaattggtttcatttattaaatttcttttttggtattcatttttttcattcctaaatttaatccttccaaaccaaatattcctggatttccggcctgtttggattaaaaaataatgaaatttgtcctgcccttatggactctaatgaatatgtacttgtgaaagatatagcaaggagcatatttatctatgattagggtgtttatgagcacaaatccattttttattcctactttgtatgcttgtttcgaactcatattatctaattagataatgtataactactatgtattttttagcatcttgatagatgttattatttgatattttcccataacaggtcctgccttgatgaaaataaggcttttctatcgactgcagattctgctgtgaaattactcacagatgccaccaaatcagtttcaggatggaaggggattgagtatcgtgctgcatttcctcgagataatcctcccggggcaaacttttatcctcctgatatggacaaaatggtaagattgtgcttagtcacttttctgcttcccagtgctcaaagtatccagtacaaatttcatatgcagtagtacggttgcttactgagtactgtataagtacgtttgatgtgtacttggtaccgtagtgactgaagcagggccaatttgcatatgttttgtatgtctgtaggagtttgaattatggaaaaatggactgcctgaaaaggagcaaaaatatgcaactggattttttactgtcataaaacggcatgatgccttgttgccttcaatactagcgcagtcagatggatcaaatcaaaccaagacatcagatgatcttttcgttgttccatactctgaggagtacaaatcatcccttgagaaagctgctgagcttcttcataaagcatctgaatgttctgattctccaaggtaagctagtacttcctccgtttcacaatgtaagtcatcctagcatttcccacattcatactgatgttaatgaatctagatagatatatatgtctagattcattaacatcaatatgaatatgggaaatgctagaatgacttacattgtgaaacggagggagtagtaatataccagcttttagtttctgaatttagaacttatatgcttttatcttcatgtagcctcaagaatttgctcaaaaccaaggcaaatgctttcctttcaaatgattactatgaatctgatatagcttggatggagctggttagtgtcctaactctcagttttagttcattattttctctttaaatttacaaatgtactggttttctcactagcttgattccttcgttcttggagaaattgttcttgaatgttttaaggcaatttgcaatcttttttttttggaaaaagagaacagtaggtgagttccctactgtagaatgtattgtcaataacacaaataatacaaggtcaagagttttatggtgaataatgtgtggtttatgagcactgcagtatatagtgtagaatatttgttgggtgtatattcataaaattggctgtatttgtcagatttaacagcaatgtttggcatgtacaaatcaggatttgctcatataacctctgtatttggcatttctatctttataggactccaacttggatgtcactattggcccatacgagacatatgaagatggtctttttagttataaggtatttgtctctctttcgagatctacaaagaattttctccttgggatcctttcctacctgttcttgtcatctacctatttgctggtcaagtatttagcatggaatttgcatcaaacaccacatattattttgaaacttcagtaagcttgctcgttatcacatataatgcaggtttgcaacattgttgagtgtgtgcctatttcctgtgttcaattgttatttgtgtttattaactaaatgcccgcgtgcttgctactgataaaaatgaatcatacacatggagcaaattaaatgaacatatgccctctccttttttttttcaatgaaggcaccctcaatacttttatcacagggagtacttctaaaactaactttaatactacatatacatgtgacgttggtcatcttagaccctttccgaatttaagtttgtactttagagaccaagaaaatgatagtatatgaagggacttatatgtaatattggcttcaggaagtatttggtaaaaaatatagtggggtggcagattcactgctacagcccaccagcaccattgacttcctttaataggagtataggtcttttgatggtcatgatattattttattctagtagctatgattttctcttcatacctcaatgctggggctgcccatattatttgggttaaatactaggattttaattcagttaggcaccaccttatccccaatgaagaaagtatggcctataatagtataggaatagagtaggcgacattaccatttagattagggcatgtgtttaaacatgtgtacaggatgtgcacatgcacttttatatcttgaatcaagtttatctacatactaagtttatgcatagagttcaataaaatatatcatttgtttttactagtattttctactattttaaaggcaacctttgaagcatttgttggtgtacgggatgacattgccacttctcaagttaaactcttcggtgatcaactccgggtaactctaatttattttctgtagaaaagtaccaacttttgatttacatgaaatttgatcttaaattcaggatttagagaagcatcttccactggacaacatttacaaatccgacaatgtatctgctgctccaattcgcgttatcaatcttctgtacaactctggggtatgtcccttttgtaacatttctttaatttttggggttcatttaatgctttattttattactgtgaatttgtgatctccctagtcatttgttaaatttctgtttcgatttgaactcattggtacttaaagttttgatatttgtagacacagaaaacttgcttgttttccctttttgcttggtggtagatgggcatcgtcaaaaagaagcttatgcccttaaatccctgagaagcaagtattcagccttttcgtaatatctaatgacaattgatgacacaccatgatttcatgacttttcgtaatatctaatgacaattgatgacacaccatgatttcatgagaggattgctttcttccttttgtttttatgatcaaaggagaaggttgtttactttgtgcttttcttactactgccccagttgcatgttggccaaagaattattgcttagattacttcagcttgagtttgtcactataattggctaaaccattctttgagatcttgagacaattgataggctgagagcgcgtgcagggcttgtgtatgtattgcagatgatttgttgtgccaacagcttcatgatgaactaaacagggactattgttgcaggatgtgaaaggcccacaaactattgcttttaatttgcccaatgatgagcggattgtgaatgaacgagggacctcgatggttatgcttaagaacatttcagaagctaagtatgttcttttaccgattattgtctataaattttaaattggtgactcaggtgatccacactatcagtggcaagtggcaacaaaagtatgggagttcctttttggatgattctaaattttctttacttttcaggtttaagcatatcttaaagcctatagctaatgcttgcatcagagaggaacaggaagattatgttgattttgagccttattatacacatattgtttgccatgaatgctgccatggaattggtcctcattccataacccttccaactggtaaaagatcaacagttagaatggtacgtaactttgtatattcatagaaataaacataaaccaatgcatgaaccttaggtgcactataaacatgtgctttgtttccctcaaaatttgccaccaccttcaaccatttttttacgtaatgtcactaccaaatttcttgtcagattattgacaaatatataaaaataaccaaatttataagtatggatgttgctatagaaaatgcagcatattcacttagcaatggaaaataactttgctaatactcaggtacatgtaggaaaaaaaagatgtgcttatttatctgtcttcacactttaaatttgaaatgctggttatttctctgttatctgatttatagatgacctcttcatgaaaaaacaggaacttcaagaatttcattcagcattggaggaggccaaagctgatatagttggtctatgggcactgaattttcttattaaaaaggtcagttgctttcatcaactatcaagctaccatggcacttagcttagtcgagaccaggcagtcaaatcctgctattgctgtatatgcataagcaaattttcatttggctatatcctcgtttgtgccgtcattactacttagggaaaaacagaaacagtttttccaaactgcatgaactgcacattgcatgagcaccaactgcatgcaattttgcattgactgggttgtgcaaaaccacttaacccggttttgaatagccctactaataatagcacatctgcttctgctctaccagggtttacttcctaagagcctatcagaatccatgtatgtctcattcctggctggatgcttccgatcgatccgctttggactagaagaagctcatgggtgaggctttattttccctgttagcaaactgaattatgtttctggaaaaaaagggaacgcaagtacttctcaattctcatagaatctgtactgtcctgagctctttatataaatcactgttactatgtgtgcagaaaagggcaagctttgcagtttaactggttgtatgagaaaggggcttttgtcttgcattctgatggaaaattctcagttgatttcacaaaggtatttctctcttttttttccttaacattatcattgtcatgctgtcaattctcattagaactttgtgccatgaaaggttgaggacgctgtcgagagtctcagtagagagatcctgacaatacaagcaaagggcgataagcctgctgcccagtctcttctgcagtcccatgcaagcttgacgcaaccactgcgtgtggcgctggacaaaatagaacacatgcaggtagctttcaaatttaccggttcatactaaaagaaaattgtaaactatttttcatggcttctctccgagtgtttgattgggttttattttccttgtttatattaacatgttcttgattattttaggtgcctgttgatatcactcctatattcggcacagcaaataagctgcttgcaaacgatcagtagggtgctcggtttagcaagctacgtgcttcagtggaactctgcaagaaaacgtattttgttcgatcctaagatactccatgacaagaaaagcgaaacgggaagttaggaataaatggacaagttatccataaacaataatgttcatgtcttatttttatatttattacgtctttgattgcgagaagaccccttgtaatatttcaggattatcatcagactgctgttgttctatggtgcatgagatgaccggggaaatcacgtgaaactacactggatagcagtaatacactgatcgttctgtccacaagctaaaagcccgagaaatcacattcaaacttattttgctttctaaaacattcaaacttatttgttctctttttgaaaaaaaattcggtgaacttattttgctttctaaaacattcaaactttcaactgaaaatgagtgcgacgtggactttctaaaaacatgaaactttcgattcaaattttaaacttccaattcaaaatttcaaaactttcaagtcaaatttaatacttttaactaaaaatttcaaaactttcaacttaaatttccgaaaatttcaactcagaatttcgaaaactttcttatcaaatttgaaaacttccaagtcaaaatttaaaagtctcatatcaaaattgaaaaattctcacatcaaaatttaaaacttttaatatcacaatgaaaacttccatatcaaaattgaaaatttcaacccaaatttcgaaatctttcaactacgaacttaaaactttcaactattttttaaaa

SEQ ID NO: 12900 - DNA, 2322 bp, Oryza sativa
ctatcattaacctcacttgcagccacagcgtgatcaagagattgctttgggggtagtaccttaactgggattggatcaagcatgccttgtccagaaacacctagacccattccctctcggtaccccatttttgccatcattttggaggcaacgcccctggtatggtgctcccactttgcaaagatcgcagtctctgtctgaacaccacttaaatttttggattccaaaaggcctagaccctgatgaacagattcatcctcttgatctccatcctcactaaaatcagatccttcatcacttgagcttccttcaccatcttcatcgctctcatcagcatattctgagattgaaagagaatcactgggaagccttgcagagctcccgtcatcttgaaaaacaacctggccaactttcagatcgtcatcccatgactcaagttcagctcgtctccaaaggccagaatgatgcccagaagcagccagtatgctggatcctaccaaggactgctgccatctagtcggagtgaattgcttcagggacagaataggaattacaatacctgaggataatttttggattagtcacacatgatactttatgtgcaaggggcagaaccaactgggacatcttatatgtgtaggaaaacacaaagatataaatccatgaaaatcaatacaatattcacaaaaaatgcaacatctgaaggagcaatccatcatatgaagttcacaccattttgtggtgtcatcattgcttcaggtgaaaggcaacggaacaagagatcaatggtttgaaggggtttaatccttagaagggtgcaaaataagcatttacataccatgggacaagcggcagttactaccaaaccgacatcgttgctggagaaaaaacttgcacatctgcactatgggcagattgattagttaatttgttggtaacaatgaaccttatgttctggacattacattccattaaccaacagaaaatatggttgatggtgaagggtacccacctgtgacctgttaacattttccccgtcccatttattcatgaatttactgtggtggtgcgatgcaagaggatagagggacacactcaggctttgctacaaggtttatttgggagcagatggacgtatggcttcattgcaaaataaaggactggtatatgcacaatgcacacatggttttaatgaaaagcaaatcatgtactgtcacattactttggagagaagttcagcaactgctcacacagaatagcctagaatcaatacagaaataacttgattatacaaccgctagaatgctgtatagctctgcagcccagcaaggacttgtattgcaaaagtaggaatttgtttcctaaagttattccgtcattccaaggacattcaacaaaataattgcacaggtcatatctcctatgtgctggagttataatatctcatgaaggagagaagttggaaaaacagtaaatactggcaaataaacacccatttcctaccggcggtaacatagcaagttacaaacataccagcacgtagagggttatgtttagggtttaccaggaaacatggagctactattcaaaggaaaaaataatggaaaaacgatagatcaagtggcgtgactcaccgacatgttttcagacgtaggagtcagaaatgagatccttgcatcacttgagccttcaagtcctataacacatccattataccagcgcccatccttatgcctgaatctacacttagatccaactgaaaattcctgtggctccaatggttctggctcaacatcatcgggtggatcaacagctacttcaggtgcttcagatgttggctcttggttaggaaatatctcatcaatttgctttactagtctagagcgtttcaaatggagaagtccctcctctgcatccttaattgcagcaagaagttcttcatggaccttcaaaacagtacatattgtaagttagcatttgcacaatagaagcatgaaatacataagtacagaactattgaagacaatggtataagggttgagattccccaaaaagaagctgactgctttctctgaatatttgttcgatatttttctctggagatattttggacaaggaaacctactatttggatattcacatctcaggaatccaaaatgcataagctaatcatctcacctacaggttacatcagtgagctatgatgtgaatatcactcaactcttgtcataccaaacttaaacatgttgagtcgatatctaatctaaacatactaaatactaatgtacaaaagttcccacccatcttcggctgatttggcca

SEQ ID NO: 12901 - DNA, 5487 bp, Oryza sativa
acacgctggagttcgtcgacaaggacggcaaggagcagtgcttctcggcgcacttcctctgccgccccgcggggcaggggaagtcgatgctgctcgttcggttcggatccacccagacgtcgccgctggtgaaggtgctcccgaggtggtacttccaccagaacgcgtgcaaggtgttcgagcaggacatggggttcctgtcgtcgcagaacgaggtgctgctccgggagaaggtgccgaccaaggagctctacctcaacctccggtcgtcggacacgtgggtggcggagtaccggaggtggatggacagggcggggcacggcatgccgtactacttcgggcacagcacgctgtcgccgccgccggtgccggccgttgtcgagcaggcgccggcgggggcggtcgccgggatgtccgcgtcgttcccggccaagggcggcgtcggcgccacgcacgcgcccaacccgaccaacaggtacttccgccatgtcgtgcactgcaaggggtgcagggacagcgtcaagaggtacgcctcgctcaagaacgccttcgccgcgctcgccgcggcggcggtggcggcggccatcctggcggcgaccaggcaattgaaggccgtcctgctggcgtccgcggccgcgctcgccgcggcgtcgtacgcgtgtaactgggtgctgtctctcatcacgaccaattttattaggacacacaggagactgtaaccgtggcaatggctgtcatgctttggcacatactaatagcaaggtagaatggtacagctatttcattatttttgcccttgtatatttgtatcactacatgagtaaacgacgtttagttatcgatagttttgttatgagtgatgaatgatctgcatcgtactgccaatgccttgcattctcaaatggttgcacacttgcactcatacaaagttagtacactccatcatattataaattacttttttttcaagttaaatttcctgaaagtttgataaaatttatagaaaaaatataacgacgcttataacactaaattaatttcattacatctaacattaaacatattttgatttttttttgttttgtgttaaatatattactatgtttttctataaacttgattaaacatataaaagtttaacttcaaaaaaaagttaaaatgacttgtaatataaaacgtaggcagtacaatgcgaatgtagggtactccatccagctgaggtaaaccaactccaatatatatacaaacacaaacaacgtacccaatttttactgttaaaatacaggcacaatgcctggtatcacacgttattaagtagacagactcgataaccatgacacggacaggacttcttgccactggtttacgcacggttaatattacagaccacacatagagagacggcttagctatttgcaaataagcttgacaagatagatgatgctccaaaaggatgcgatctcagcagttgagtacttacgctggttcatctagaattccctatcggggaagaggagtggggcgacaagggaccaaatgtacagacctgccgttgcccactgggttgcaatcctgacccaaacggatggccacccaacgtcaacaagctttccactctcaccaactgaggttgaccagccagtcaagagcatcgcggagtacatgcttgccaaggagaagatgaggtggaagaacgagtaggagtatgtcactggccttggcacatccttcttttccgcttcctcatctgccttactgaaaggaagcagtggcttgtcggcacctgaaaaagggcaatgtgataagcaacacaccttgcaaatatggaacattgatttagtagatagagcacgcaatctaaccagcacgtggtgagtctggggctgagagcacagttgcagatgagccagcacggacagccgaatagaccacagaaaggatggtggttagcaatcccagcgaaaggctaccagtcgacacagctttggaatggttgtgcagtccattgcattcataatccctcggctcacttgaaagtccactgtagcacaaataggtgcagtagagggcgataactgatgctggcagcaagctaccattgatctgcaaaattcataaaaaggaaccattcattattattacaagcgagtaaccatatttaagatgagatgctagcagctagagcttgtgggtgtaacagctataatttgataaaatgctagaaatcttacacaacaattatcataatgctacaatcttatgcagcaattatcataatacacggacacatttctgacagcttttcgtggtcaaactatggactaatgaactaaatactctatacacagaggctgtgttactatattataaggatacagaacagaccagaagaataatacctttgggtgcagggcgacaatagcaaaaacaaaaacaagaatcagtgtgaagacaatgaagaacagattgattccgcagtcatgtccagatggagtgaaccagtgaaagagcagacccgagaaagagaatgtgacaatgtaacagacaactgagacaaccaatagagccatgtacctgcagtaataaatatgaacaaattattaacaggttttgataaacagaagaagttcatactaaattaaggggacctgaaggtaaacaaggaaaagatcagctactaaccagaactgttcatccttggcaacccaattctcgttccatccatgaacaaagtccaacaaaagaacaacctgaacaagcaggaacagtccagatccaaacttggatattgattctgcaaaaacaaatgacagttaaaattaacaacctggaatggggagaactggctccaattacagtaacaaaaactgataatatagaattagcatataaaactattcaagaagcagcagagtgtatcatcaatcacaaaagtacaagcaacaagttcatccaacaagctgctaagacagtgtcacgtttaccatatatatcaaccaatcaccaataccaagcttggtactcatgtttttaattaccaaataaacaataattgatgatgtatcatcaagccccaaaactggagcaaatattaatactatgcagttagtacacttccatgcctactcacaaccacatggagatccaaaggaccaacggaattatacattaatagttaaaaacacaggcaaccacaaatgcaacaatgtcactcccaactttccaacacaatttcatcctctatatcaaaatactcaaccacaagaacacatgcctcttgaaacattaggaattactacaatttgttcagctaaaatcgcctccaaagttgcaaaacttaagtcttcttcttgataacgacgaatccacacacccacctaatgttttgcagattagttggttcataatttcatatttacaattttatgatccctatatgaaaatatgtcaaccttaaagcttgtatattctttggtttagaaagtgtatcagaccaataggaatctccttgttcaaaaaggttctagcgcagagaatcaaaagttaagacaaccctaaggaaactcctcacaactcccattcgcaccttctctttcactctagcagtgttgaggaaggacttacaaggaaccttttgccactcctatctttaattctctaatagcctatcacatacagatatactgattttaaatattagtgcaaccatctcccaatataatgtcactgcagcatctctataattgtgtttcagaacgattcaattcgtcgtatacacagctacataggtgaaagggggggcattaccgtagaagcttacgacgccgttgggcacgaagaacatgaggaagacgatgacaacccagcagaatatcttggccatccatccgccatggtgtatcttgtcgcgggggtccttctggtccttgatgccagccatgatgatggcgaggatggtgaagaagacgaagttgccgaggctaaccctaagcacggcatcggtctcgaaccactcgcggtcgggcgtcttgtggaagtggttaatccctgcacagatagccgcaagaggcgcgccatgagaaattccgatcgatttcgagagaaaaaaaaagaaccaaatcgaatcacccggaagggattgcgaaggcgctcacatgggatggattggaggaggggcgcggcgacctcgcggagcgcccaggaggcgaagagggagagcgcgaagaggccgcagtaggcgatgcgggcggagcggcggccgatgctgccgaccgccgtacggcacgcctcgcacgcgcacgcggcgcagcacgacgccaggcaagacgccgcccacatggctgctgctcgtcgtcctcctcctcctcctcccttgcggcggcgcggtcagatcgaatcgatcggtgggtgaaggagctcgacgatggctttggcttgttcggatttggggatttcgccgcctctcgggggaagaagctttggtggggatggggaacgcgtgcggcggaggggcacggaagagaagaggaaaggaagccgatccggttttttttcccttttcttgttttttttttccgttacggagtgggtggctaccgggccggttgggttggaccggaccagcccgggccgatcaggagaccgagtcagtcaactactgtattattccagccttctacgtccattacatcaggtcaagcaaaagtaacaggatataggttccgtttactacttccgtcaaaaaaaaaactaatataattgaagatatgacataatttagttcatcatactacattgagcctgttcggtagttctaatttacagccagccactacaatgaaatatagagaacaatcgtagcagctgcagctgttgcggctgcacagccgctgtatagggctgccgaacaggcccattgtgtttcatgtacagctaggttaggttttttggatggaggaagtaagatgaaacaaggatgaaataaaatgagttatctacttacttaacatgattaatttatattttgagaagtaaatttaacaaaatagctagaaacaagtgatctatgtaatgtaatgcagattttttaaaaaaagatcgtatttctagaagcatggagcatgatcaattgtatctgatcatcactttcgaacgggaccataataacacacacatcatcgtcagcttctggcagaataggtaccaaaatgacaatagggagcataagtttgtgagttcagaactcgaaacaatatggtcctgaacttctggcggacaaactagatatcacatcctatattttccctacaacagagctcctaaaacattacagccacagatcacactgtataaggcatgaaagaacaagcaatctgaagtcgcatgccacgacaaccttcaggtatcaaaatggatattgattgactggcagatgctaattgatactgcatcgaaaattgacattagaattttaaccatttcttctct

SEQ ID NO: 12902 - DNA, 4767 bp, Oryza sativa
ttgtcaaaatcatggcataattaaactcaaaagattcgtctcgcgaattagtccaagcttatgaaatagattttataattaatatatgtttaatactctaaattagtgtctaaatatccgatgtggctgggacttagaataagtcactgaaaccaaaaatgctggatcactgaactccgccgtactgtgcgactgtgcacacacacctcacttcacgattaatgtccacagctgcttactgctcgaatgctttttttctaaaaaaaatatttgccgtatatacgacgcgacttttgaccgtgacagaaatttcaaaaatatattttcaagtactacatccgttctaaaatatagcaatctagtactggatgggatatatccctttatctagatttatttattagactaggatgtgtcctatcgagtcctacattgctatattttgtaatggagggagtacttcactccccgtttgaagatttttaccgtttaaaatttatcagcatcaaacaatcacaactatcccgtagaaatttctactgtaaaatcagggggagtaacaaattatcacaagacgcatgctacttcctccgtttcaaaaataaattaattttcacccatcccgtatataccaatgtaaaacaaaaaaaaagaataaaagagcaaatacaagtatacaattgcagatttgtagagctagtacaaaaatgctaagcacatgtgaagaaaagattgattagatgatgtgtcaatttttagagttagcaagttgaccatactacttccaatgcaaatatttttttttactttatttaattcaaatatttatatttttataaactctattacaataattatttaaaaataattttattttgagataaagtaaataggaagagtaaaataaaagcttattatcggacggagagtgtagtacagtacggagtatttgtcagtgccagccaaacgcatgctcatgcatggagaggcgtgcgcatgcagcaactcgatcaatcgttcgaccgggaggcaatacacggtggtactccagtagcatagcacatatacgtccaacccagtcacggccacacctccggccggttagctacatgcgccgcgcgtgcaacttgtcgacgaaaaccatgccttgcacgccagaaaatagccagaagaaaccaaacccggtggttgtttaattgctgacttgcttgcttgcttccctgtctctaagacccatttcagtttggaggaatttcaacacacagaaataacaaaaatagagaaatagaaatacatgcccacttctatcaataggaattttttccatgagatttgtagggatggaaatttttgtttgttttctctctacaacttgtaggcaagaaaattttcctttggtttcattatttctaaatcctatgaaccaaatgatattcatagaaaataatccttagaagttaaaatcctttgaaatttgttcaaaacgaattggtcctaagccacgccgctgtcgtcgcctccatccctcgccggcgtgtaaacgccgccaccgccgccgttgattgggatggacggcgaccttttgttcatctggtgacaataggaaatcgatcgatgggtgggagttgattatggatagggccagcgagccatgagcgacgcgagatcgagacctctcttttgttcttgtcaggtggtgactggacccaacatcgtgtgcttgtgtagtggtatcctaccgctacagggaaaagactatgagagcaagtttaatagtacagctaactcccatgcatataaatagttaactataaaaatatactacaccacagatatccggtctcacttcttatacacacatagcgtcttagagtttgtcttgcagccggctataaatccgcagctcactttcttatcttttctcttttcttctcgatatatggttatagctggcttatagcctgctattgtacctgctctaaagaggcccacgtaaatactcctacgacgatacttattccacagtattactccatccgtcttagaatataagaagttttagagttggacacggttattaagaagttatgtataagtgagtgatggagggttgtgattggttgggaagagaatgttggtggagaagttgttatattttgggataaattttgaggtctaaaagtttttatattttgagttcgaaggaacggtttaacgatgacgtgctactgtgcggtaaataattggcgagtcgcgaaggtgtgccattggtgaagagaaaggtaaaagttgccggagtagttgatggagcaatgatgagctctgggccgggtttgtcatgtgatgggccgtgcagtctgttgtctgggcctgccactgcacagtgaacccattttactacttcatcgtttgacaagtcacacggatgaatggatgatcgcattgccggactagtcctgccaatgccctaccttttttcaagcccctgagcgaatgcaattcgtgctcatgagtcatgagtgccacttttactactagtagtaggataggttaacatacaaattctgatacatggcctaggcaggattaccattgatctattaactttcaactgaaatcataagctactaagagcaagttcaaatagtatagcaaactaccagctctaatttatctatagtcaatctaatagcttatttatataatagttacatactacactattaatacctggtcccacatatcatacacacacggcgtcttggagtccgtgctacggctggctacaaatctatagcccactgctcttctctctccttatttatcttcttaaaatatgtttacagctgacttatagcctactattatacctactctaatagcgtagtgatgattaattcctgagctacacatgccacttagttatataactagagatatgcaaccaataccaatcaaagaagtacaaggtagctatttacacccgttaatcaaattcagtcatatataaatcgaacggttagattgtatgcataacaatctattatattgttaaaggaacagaaaaagaagtctccacgttcgctctcatggcctagaaattctcacattaatcggagaaaaagaaaaggcagaatccatatagaaatacaatttaaaaatagctgaaattcagaattaaaaaataaggaatattagaagaggagactagagtctatatagaaatacaatttagaaatagttgaaattcggaattaaaaaataaggaatattagaagaggagactagagtccatatagaaatacaattaggaaataactgaaattcggaattaaaaataaggaatattagaagtagagtatagagtccatatagaaatacaattaggaaataatagaaattcggaattaaaaataagaaatattagaagtagagtatagagtctgtatagaaatacaattaagaaaaaaaaatagaaattcagaatttaaaaaaataaggaatattagaagtagagtatagaatccatataggaatttaaaactaactaaaattcagaataaacataataaaattaaaagtagagtttagagttcgtataaaaatataatttacaaataactaaatttcaaaattaagaaaaatatgggacgaagagtttaaagtcaatataggaatacaatttagaagtaactgaaatttgaaattaaaaattaaaaaatattgaaagatgagtttagagtccaaatagaaatacaattataaataataaaaattcagaattcaaaaaaaataaatattaaaagacgagtctagagtccatataggaatatatataatttataaataactaaaatttgatattaaaaataattaataactaacatgtatataaaatacaatatgaatattacacattagtagtttcgtaaagttatagcaaaatttaaaattatgttgtcattttaatatatttgaataatataatgagagaatatatatgctattatatgagagaaaatataatgatgctagccgcgcaatattgcgtgggccaccatgctagttttattaattccttccaggtagctgtcaaaggagtagtgtgtagtgtcgtgtggaattcgcgaggatgtgcatgaacttgccaaggcagggatgcagttgcgtgacaaggacacacgtgaaatgtagcgagagaagagtcgtagtagcgggcgcgaccgcgggagtgtatacggagagatgaagcgagctctctccaccaagcaaatcgcgagccaaaccaagaagacatccacatgacgacgcctcgcgccaccaccaccacgtcgcccttctcctctctcctcctcctcccgatctccccctccgccgcgactcctccgcgccgcgccaggacgccgccgccggcggtggcacatggcggcgtgcggtggacggctggcgggaggcggcgacggcgagggtgccgggcggcggcggcggtggtcgaggacggcgtgcttctccccaaagaacaggaggacgacgcgtcggcggcgagatacgactggagggaggagtggtacccgctgtacctcgccaaggaggtgcccgacgacgccgcgctgccgctcacggtgttcgaccggcagctggtgctgtaccgcgacgccgccggcgtgctccgctgccacgaggatcggtgcccgcacaggctagccaagctatccgagggccagctcgtggatggcaagctggagtgcctgtaccacgggtggcagt

SEQ ID NO: 12903 - DNA, 1196 bp, Oryza sativa
cctctcttcttttctcacttctgcttatttttgctgcttgcttgcttcttcgtcttttttattttccttcttcccctcaattcatgatgacacgttcttccttccttgtgtaatttatcaccgttcttggcgttttgcctgatttagaatgcaactgaaaaaaaagaaaaagatcgcagaggaaaaaaaaaggcagcagcagtgggtggtgaaagtatggaaatctctcctgctagtatacgtttgtcgtgtcctctttgttgtgttcttgtcttggggtgttgagatcatgcgagacgagaggtggttcgagagcatcatgagcaatgggaaaatccatatctgctatatcttccctccgtatctctgcctagctgttgcgagtgtgagtgagtgctcgccatgatgtccgaggaggaggacgacgacggcgacggcgacggcgaggtcggaacggagacggcggccatccatctcctgtatgttgcttgttgagtctctctctctctctctctctctctctctctgtctctctctgcgtcgccttgtccgtttcgcctcggtttgatcaaccaaccctgtgtgtgtctgtcactgtgtggctggctgtgcacattgccattgccatgtcctgtgccatgccatcccatgacacggtgtgtgcgtgagagagaaggcatagtagtgtgctgatccgtggggcccacggtggaatggtggtggggcccaccaaagccgatgataccaatgatcatcgtcataaacgcctctccttccgtttcagagttaggagcattaatgatgggggaggggagagggaggtccgcatgtcagattacaggtctgattagcccgggcccaccactccgtgatactaacagtgattacggatgtttttggcttagcttgcagctttgcccccactgcatgaatatatactttacctgtgcagtgcagaaaaaacatgctctaatttggcaaaggcaaatctcttctcttgctaatggcgagtactgtagtactccacttacactactactaatactgttgtgagaaacatctcccattatcttaagaaagtactgtagttagagtaggtaggagtggatgcatgggtgtgtgtggccttggtgttttgctgtctgtatcattgttgtgatggggaattggaaatttgcattggggttgtggtagct

SEQ ID NO: 12904 - DNA, 12207 bp, Oryza sativa
tattttttaaaagtcttctaatcaatatatttatgttttttaaaacaatgctaattatggtaactaatactaattacggtaattaacgttgattaccataattagcggcgcattgtgggcgcacactaggaaactcacgccgcggcctccatcgacttcttccttcctcctcaaaaccaaacgtccatggcgaccaccaccaccactgatatcaccaacgccgccactcctcttcttcaaccctcgatcctctttggacacccacgtccacatcggcgaccgccgccccaacgccaccaccaccgcggaagatgcccagatccaggtctccatctccccggcttccccgccgaacccctcccgcctattcgtccgccgcctcaaccgggacaccgtctccctcctctacgaggacgcccagatcgtctccgccgccgatggcctcctcctcctccgcgtaaccatcgtcaccaccaccgcgccatcgcggctggagaacgactacttcgtctacagctaccagtggcctggacgcccctcgctccgccgtctcccctcgccgccgttccccttccacgacgacgaggctgggatccttccccttcccgttcccggcggtgagcagcaattcaagatcgccgtgctatccgtccgcctgaacgggttcaacctccgattgttcgattccgcgtcatggagctggaccaatgtcggcaaggtgatcgtagcttcgccgcagagaccgttcccaatcaagatccccaggaacgccgctcgcctcaaccagcacatcacaacaacggcgatcacgcttggaggtgaagatggcacgatgggctgggtcgatctctatcgcggcatcctgttctgcgacgtgctaagcggcggcgatcatcccacgctcgttggtgttccattgccgctgccaaggagattggtcgatcgcggcgcggaagtcgaaggatgccctaaggccaataggggtattgctgttcttgatggttgcctcaggatggtcgaattggaagttcatggcgagatacttcctacgcgtgaccctgaaactgggcaccttgatcgtgagatcaagaactgggagctctacatgtataccaacagcaagatcaccggtgcttgggaggattggcaattggtgcacggagttgaagcttctcaaatcaatatcgaccaagcgattcatgacagcttactgcaaccgggattgctgcgtgataaaatgcaggatggcaaggagaggaaattgcacaacctcctcacatctcaacctgctctcagcctggatggtgaaggtgttgtttacttgctgacaaaggccaaattcatgcaacgtcaggcttgggttcttgctgttgatgttaagggcaacaaaatactaggattagctgagtttggcactgacacatacttgggtttgtccctcgcgtattgtcctagtaggatctccagttacatggatgcatggactgtccagacaattagttatattttagtactatataagttcctagtcctatgatttatttgcatgtataaggagcaatcgataggataattggttcatcgaaaatatgctgaaaagaggatgctccattatcgacaggatgtagacttcaagttaattttagtctatgcatttaagaattcaccgatgttcaaaaaaggtggatcaaatttataattgctttatagtggcctactgttacaactacagatctacctagtacctacccatagaagtaaattaccctagaagtaaatgtcttcttagctggtcactgtggtatattatagaggtgggcaaaattcaattgagaagatcgggggacctgaaataaattgagaaggtatttcttttttttctcaacattattatagtcatgctgtcaattctcacgtgcaattacactggatagcagtaacatacactgatcattctgtccacaagctaaaaaccgaaaaatcacaagcacagatacgtaataacacccccaacaaccaagaaaccggtactgaattgaattttccatatacacttcagagttcagagagcacatgggatcgtcaaacacaggacaaactgttcactaacattgaaatggaaaaagaagccatcacaattgttgtcaaacattgcacaacctggtgaacaacacaactcatggattgcaaaaggcacgatatatataacaaaggtcatttttctcctgctaataagtacagagatatcaaaggaacgaactgcctgaacatatgcagaacaccatcagctctctcacaacttatctgtcgggaaaagaaagaggtagtacagcacgcccttaaaccgaagaatactacgggtactcagatattggaacatgatcagccgttactgaggtcaagaagtgaaatttggcaaacgagttcccctcgttgatcctcttcttcagtgaacacatctgcctcttcgtccgtgggaacttacacggccttcggatgtccttacacgtgtcacacgacagcatgttgtacaggaacacatcctccagattcacggccacttccatgatacgcttgataaacgcaaccaagaagtcttcagattggaagcagaagatggtgagaacggacaggttgtggtgcttgaaatcctcagcagaagattcccactctacactcttgttcgagctgtacaaagacgccctcatctcctcgtccttttccatgttacaccaatgatcccatacctgcatgaatgccacgcatatacaagaaaatggtgataagaaataagtttgtggttttgcttgcagctgtatgaaaactgaaaaagcaagcaaaagttttatatcaggtgcaggtgcttgcagctgtgtgaaaatggagtgtcagatagcaacacaccgtcatgcgtagctccttcaggaaaggcgctgcttcgagaatgaacattgtccatgtgagatcacatccttcaggaacacgaaacagattcacaagccttaatttgtagaaaacagatgccagtttttgtggtaattctggttgaacccaaatctggaaggaaaaaaaaagtgagtcgagtagagaggaggctagctcagcaaaaacgattaccaccaacttaccttttcactcttaaaattcaaacgtagatctcttacagagatctttccaaggatcttacttagcttgaccaacttgtgccttttaagaccaacacctgcaagccgtaccgcctcgagtgagggcacataaccaaaagtcaggggatcttggaaagatagccaaccctcaaccatcaattgtgctagtttcggcaagcagttgagcttgatgctttcaaaacggcagctggcaatattgagcacattgagctgtggatgttcaagttgcagcacggtcaaatttcctgaatcgcagttgaacaaacgcaaatactgtaaattctgacaggtcttgaggacgttgtggatgtccgattcaccaaatcttagattccctattatgaggcgtgtgagaccaccaaatgcagttgggcaagcatcgaaaaatgacatgaatcgtctcccgtaatcgatcaaatcatcatcagtgcaacgggtgggtagcttctccactataattgtgaattcggccatctcaaccttttgtgttgtcatggcatgtccaacagtttgtccaattgagatacagtcaccttcattcaggtagaacagcatgcgcaagaggtggatggtatattcatctggattcctgcgttccaagatgctcttcgttgcttcaacaacagcggcattggtccagaccaacacatcatcagataacatggatgcaccattaggcatgaagtgaacaaagtctataaccaattgagaaagcatagaagggagatgcctccaccgtctggagaggacactggttcttgcagcatcgcggacatggagccggtcaaggatgttaagcagaatatcatcaggtaacttgcttagcctgtcactgcctttctgcatttgaccaccaattacaaccacaatcaattcaaaatttaagcattattactggtcaaaagtaaaagagtaatagatgccatgcaaatgatatcatcctactcctactgggcacataacatagcaggcaaaaaagggagggaaggagatgacttacgcggttcatggttgctccaatgcaatggcccttggatgccgctctgttctgcttgccctctatgaaatcttggtggtacaaggcaaccagcagttcactatcttattttcctccaaccatagaatccttctatgaacgattctgtacaataaggaattgttagattgatacccaaatgtgttccaaaaaaagctgataaccaaataaactttaccctttttggcaatgccagtgtaattcagtactgtttgattagcttccaattaagtcacagtgttttgccgcatgatttccgtgcagccttgctcacggctgcttcctccactagatcaaattcccaattgccccccccccccaccccaaaaaaaaaacaacacatcaatctgacggaatttctcgatccaaccgcatacaacgaagcgtgcactatccaatacagcatgccaagtagagagactagagagaggggagcgacgcaacgtactcacaggttgacgacgagcaacgcgatgcaccggtgatacgagcggcggaggaacgcaggcggatggccggccgacggggaggcgaggcggcggaggaacgcaggcggacggctggccgacggggagggcggcgccggcgacgtgagcggcgcggctcggaagcggcccgcgctgcgtcggcggcgggagacgaggaaggccgcggcgtttgcgccgcgtgacgtactctattgagtgggccggccttaacggagcaacgcgagatagtttatatacccaatttaaattcgaattcatatttaaatattttttatagagtgaagtgcatgagcgggccctaaacttgtgcgggcgtgtcatctagatctctaaactctcaaaatacatttttagtcctcgaacttgtcttgagatgtcatctaggtccagaggagctctaacccgctccatgcgctgatgtggcatgtcacgatagcacctacgtgccacgtgtcaagcacatagaaaaaataaaaataaaaggcataatttctcctctctatcttaaattttttttgtcttttttatgtttacctaagaggagaaaatatggtttttaattttattttttatatatgcttgacatatggatttcaatgacatgtaggtgccaccgtggcaatgccacgtcagcgcatggagccggtttgaaccggttaggacctaaaaatacattttggaagttcaagaatctagataacacacctacacaagtttagggaccgctcatatactttactcttttttatatataatattcatacggtatactatatttataaatataaaatctatgcacatgaatatatttttaggttattagatttttatctagtttcttttaatttttctaacttgtttttttttaaaaaaaattatggtgcaggaggagcgtatgtgttagggggagggacagggtgcctgatcgaccacagcgatcacccgtccattagccctcccttaaacaaggtctcaaagcgtttgtttgatctgatcatcgtctcacgtgacgttgttgtgacactgattttgataattgaaaaacacgttatatcgtgcattacggttcaagtataattcaaacttgcgtcaatataaggttgtgttcagcacaaggagattgatatgaaaattctttaattttccacacacacgcttttcaaccgccaaacgacatttttaaaaaaaaataatattcatattaattattttaaaattttaaatagttaatatttaattaatcatatgctaatgatttactacatccgtcccattataagtgcagttatggttttccgtgtccaacatttaaccgttcgtcttatttggaaattttttatgattgttagtgttgttgttattagatgacaaaaatgaataatattatatgtgtgtttaatttttctatatttttttaaaaaataagataaacggttaaacgttggatacgaaaactcacaagtatatttcaactagaaaaaaatgcccgtgcgttgcaacggatgaagtatattttaatcttgttattgttatatggttaagttaaaatgaaattcattgtgggagttcgcttggatatatatatatttaaaaaatcattagctgtagttaggggtttgatcgtttcaagttagcatgtgagttttttaaaaacaaatttcttatatgattccttctatattaccaaaagtgaacaatcttgaaaaccgattcaaatacgaatatgtatttccaaaagcaaacgaacttaaaaactgactcatacacggatgacgtaccaaaataccggcaaaaacatcttcaattttcataataactagaaaaatgcccgtgcgttgcaacgggtgaagtctattttaatcttattattgatatatggtttagttaatatgaaattcactgtgagagtttgcttagatatatatatttttagaaaatcataagctgcagttaggagtccaatcgtctcaagttggcatgcgatttttttttaaacagatttcttatatgattccttttgtatttaccaaaagtgaacgatattaaaaaccgactcaaatatgaatatgtattttcaaaagcaaacgaacttaaaaatggctcatacacgatacacgaatgacgtaccaaaataccggcaaaaacatcttcaacttttataatagtagagatagagatatagattaaaaccaaaacataaaattaaaactgactcaaacacggatgacgaattataaaaacatctttaatttttataaccgactcaaacacagataataagatgtgaaaagatcttcaatttttataataagtacggatagtgattgggacggaggtggtaactcgttttacctatctttctcaatctatcctattcgattctcgtcatcggcgcatcgcctttttctccaccgcttcacttccccactagccacaaggcccacaacccaacaaccttccactgatccacacacagccgcgaggagagagaaagagagaggagagagagatggcggcggagctgacggcggcgcagctgcgggcgtacgacgggagcgacccatcgaagccgatctacgtctccgtccgcggcaaggtctacgacgtcacctccggccgcggcttctacggccccggcggcgcctacgccgtcttcgccggccgcgaggccagccgcgcgctcggcaagatgtccaaggacgacgccgacgtctccggcgacctctccggcctctccgacaaggagctcggcgtcctcgccgactgggagaccaagttccaggccaagtaccccgtcgtcgcccgcctcaccgaatgaaaaaaaaaaatccccccaaatcaacccttagattattgtatcctcttgtgctctacagcttaattccatccgtaattccatgtgtaacttattattacttctccctgtgtgtcagtgtgtctgtgcttgcagctttgctctctggttgcttgattagctgcccaataatctgaacaataagaaatctggggagtaatttaagtattggattgtctggtctttcttttttgtgattgccgcttgatttcttgtgccataggttgttcttaatcttgatctgggtattcttgtatagaagaagcaatgtgctgaatgccttgaccacagaaatttcatggctgttgtttgctgtacaggttcatttggttgtgttcatcttggtgctgtcatagtcagataggtacaacaaaagcaggttctttataagatttttttcttgtggtagtcgatggatggatgttagtgttagtttttcgttctttcatttctggtggatatgctagctttggcaagtgattattttttggttttgtgtgtggattgataaatcattgaagcaatgcacagagacatcagacatcaattcagtcgttaactattacagttttgaacaatgaataattctatatagattattgggatatagataattgttttgaccaatatattgtaaaagttgattacttgataagctttatgactatttcctgtgtcttcttctctctgtcttacctgtttaatatctgactgttgtacgtggaggaagacatgaatgaataatgagtttagctcctaaatgttctcgtggatgttctgattggggagaaaaggtttgttactgatatttggtttgtgtaggctgataattccagcagtttcctgcatcctcgctgtgtgtacattttattttgtgtgaaaaggatattgatatatatggactctggatcgtgagaggggggtatcaattgttataaaggattcctttctttgttttctttccaatttccaatcagcttccatgtgtgttctgaacttctgatacttcaggccgggaaggtggaaaattcgctccgttcccatgaaaaccctacccctcccatggggagtttttctattatattaatatgaaaccctacccctatgagcatcctatggggagtttttctattatattaatatgaaaccctacccctatgagcatcaatcctggagatattgacaaagtttccgttaaaccctgaaaaattcgctcctataggagtcgaatccaggacctcagatgctaccgaggctcttgtaactactaggctacatgccctttcacaggcacaggcaaattgtttgcaacattgttctgattcactgcatatctgaatgaaaccatgaatcaccttacagatattttaacactagtgaatgcactgtgcgtctgtgcccactgccctgttacgaagaatcattatcgttagtttcggtccaacccttgttacgtgcaatcacattggccccagttcatcagttagaacgtgttcacttttgttaccactttcaaacataccaatttttaacattaccaaattaattttaataaggcaacaaactaaacacatccttatcgatgctaccttaccaaattaacttatacattagtaactgtagaattttctacttttaaaaaatctaccaaatattgataaggcattaaatttagggcatgttcagattgtagccaaaataaaccttaccaaattttggcaggatttcttatgtatttatcaaatttggcaacaaactaaacatagatattttttgaaaactttaaaaaaaatggtatggttgaaaatagcatcaataacagcccctaaatacaaccatcaaaatgtgtcaaaattggcagggttaaaagtggatgtaaactgaacaaacccttttactattttggccgccggttgttgggccgagctgcttcatgggccgtgcacaccggagaaggagatgatggactgatggctagttggacaaacctgagccgtccgatgcagatggacggtggatggagtggggggaaccacacgccgctgacgtagctacatgaagtcatcagactccagccgatccgcccacacatgcgcgacgcgcgtcccacgcagccatcaccggctcaccgccgccgtcgcctcgtcgccgccggcccggccgccgcctcccctcgagctcgtcgtctcgaggagcgctcgggttccggtcgcctcctcgtagggaggaggaggatcggaggaggaggggtttcacgccatggtgcagcaccagtatgtcccgcgcaagcggcgggccgagcgctcgttggcgccggcggcgccggcggcgatcttcaacgtggaggcggaggagggcagggccggcgatgtccccttgcacaagcgcgtcaaggaggagctgcagctgcagccgccgccgccgtcactgcaggtagattagattgaatttttatttttatttttttgttttttggttcctcgtcgtggctacgtgattgcggaatacttagcctgttccctattctaaggaaatggtgttatggatttctccattgagaatactaatatattttatccggattaggagtgagatcagcaggaactatttcgtacggtcagcgaaaattaccaccagaaatatcttacagaaatcacttataacgatacccaaaaaaataaaacattgacacgggttgtaaatatttgtgctccttgctttaatctggatatccaggccaacgtgcttcttgatggagattgtcaatccaattaattaggcactcaagggtaattggagattagtgaggagggatattatattggttaagctttgcgtgagagatgctattattacctttttattttgtttctttttcttttcagctctggcaacaaatggatttatttccgaacaaacaaaaaaaaaacatcctaattgagttgctagcgttgattttaggagacagactgaaatgggtaagccaaactttggcgcaacatgcataaaggtagaggatacgagtccgcaattgtgatattggatttgggatggattgttttgtagggttttgtaacgtaaagtgcggctggtaaccgaacacacccttcgtctatgtgagtgaatgctactactacattgaatgctactttattcattccatatctcgctaatttggatgtttgctctagacgctccagacaaattaatctggaaatggaaatgccatgacatgtcctatatttgttccatatctcgctaatttggatgttttctttaggcgctccagacaaattaatctagaaatggaaatgccatgacatgtccttttatgctcagtttgatgacacgctggtaaaaatatatgacttgacatttactggtaaaaaatcaccgtgatacttcctctttagtttggttggtgcgggtatagttgtatgttctttgcaaggtggtcaccaagaaggagaggaaagcctttgatgcaggcctgattttggttacttggctgatttggaaggaacgaaaggctcgcgtgttcaatggccgagcctcgtcaccggcctgtttgtgtacgacgatcaaggatgaatgggaaacgtggctggcggcgggtttgatccctcttccttgagtcggcttgtttgtagctctgttcggagaggtctctgtgtgtttgctccccatctcctttgagcggcggttttttcgcctcacttaaagggatgtggccctatttgtaaccaataatgtacattctttgctcttacttaatatatttcggccagtattttctttgccggcccagcggaagtgtttgaaatttcattgctatttgttcagttattatgcatgtccgttttttataccgttaatgagcgattgtggcaaaatacttattgaccgtgtgtatgggaatatgtaaatcttatagtgcattgttagacattattataagttaggagtttttaaaatatcaaaatctgaaaaattatcagttgtaaaatggggcaacatacaaaatatatctgaaaagtttgggatttgattaatagcgttgtatctatatgtatttgtacaaatatccttttgcgtgctaacataataatcatatactatgtgattagctaacacttcaatttatcctctaagtaccaacatgatgttttgcaggacatgcacatcctcgatggaagtagcccattagggttgagattaagaaaaagtccatctcttttggagctgattcaaatgaagctggcaatggaaaatacaaaaaaggaagacataaaatctaggtctcttattgctagtgaacgagtgaaagcttccaactttgctgcagattttttgaaaattggcacttgggaggtaagagatttcctgttaactgtgttagtactaatatatatgttatcatgtaggagtagtaagtacaacttagatgctctctttcccaaaattttggtttaacattgaaggaaatattgcttatttgcagtgcacgtcacagtatgaaggtgatttggtggcaaaatgctactttgctaagcataagcttgtctgggaagttctggatgctggtctcaagagaaagatagaaattcagtggtcagatattattgctttgaaggcaacttgcctaagaagggctgcaggaat

SEQ ID NO: 12905 - DNA, 5848 bp, Oryza sativa
cattgcacgactttagatacctgtagaaaagctctatatttatgggtcgtaatatatcatatgatgaactatgtttttattagacatatagaaatatcatgaaattgtcctttccctcaatcagggtatccaacttttcttgtattttcatgtctcgcatctttagaagcttgctccaagttcgcataaaaagatggccctgaaattgacttcaaatggtgttttgagaattttgcttcaggctccatcttgttccatgcttgccacagcgctattgttagatctgcatctcataaccggataagagtacaatatgatccatgcatctcaaaattaatgggaaaccttctggtttctatgaaatcacaacctggaacatggcaggtgcagagggcttggcattaatcacaactgcaacataggagcaaaccttctggttcctttcgccgtttccataggcgagctggctgggcaaaagacttagcccagtatacatataagccctgtatacatagaccataatatgataatgggattaactcttaatttatttttcttaaaaaaacataggacttggtaaatagttagttagaactaacctatatttgcaagtaaggttcaagtaccatgtagaagatcttttggtttccaaagttcagtcatctcatccagtggctagtacatgcttattccacaatattttctcataaaatacacaataatttaatttatgactttgaaaaggactggacaaacaattacttcctccgtttcatattataagactttctagcattgcccacattcatatatatgttaatgaatctagatatatatgtctagattcattaacatatatatgaatgtgggcaatgttaaaaagtcttataaactgaaacaaagggagtagttaaattctgaatctacgtgaaatcaaccattagtttatcatgaaacttataatggcaccattagaccattgggcgaacaaaatattaaatttaaagtaggtgctttctaaagttgactaataattattattattattatcatgcttgcacaggacacaacctaaatgtaggtagaatttcacttccaggttgttacatagtatgatactgcactaagcattataagtttgaagttgataagcaatccacatggttgaacacatctcagaaagttagaatcagcgtctctgaagttccgagattatttgtacattttagtaccaagaaaaatattacctggtttggatggtgccagcttccttgttgataagatctgcaagttccaaaactctcaaattttaacagaggagatacttttacggttttacctttggggagataattgcacctgttgcgtctgtaccatcatttgagggtgtttctatcataggattcaaagtatatatttggggggaagtgaagccaaaacactcagtatgaaatggttagtatctaacctgtgaaaaagatgatcacaataccatttatttggggacatatgttcagatgtcatctgctaaaccagtggaatcatagcttaaaaacaaaaggttgagtagatacattccaatttggttaaatgggtatatacaacattccaatttgattaaatgggtatatgcacaaaagtttgggtggtttctagaaattttgaaaattatgctttggaggcacaattgaaatgctttcttaatagaatttgtgtgaagaaaataaaaaggacttgatttaatgacacagtcaacaacaataaatttcttgttctatcaaacaatattattcctcaacaactcgtatccagtttttaccattcaagaagtactaatgttcatgattcataccttagatgcatggtagcaagttaaataaaaaatgaaaccacaaattttgacaggacgtttatttcataattgtcacttcaggcaaagaccaataacgcaaatcaatattacagtcattgctttaaaactcataacatcaagaaaaagaaatacctgataatacaatatttgattgctttattatttgcttcataaattatcaaaattcattcttaatcagtgaatacacccttcacagcaaaccggaagctaaatgtgtacttagagtcaaatacatttgatctttaatagtcaaatttcatttaagcttaagcaaacacattgtagaattatcttttataggtttccactcccctgcttgctgcagctttgctcgttagacaaacatatatagatacacaaatatagcaatacaccagtcatttatataatgttaggagcaaccttttttttttctaaatgcatgaatagctagtactactccttactttttttcgggaaattattagtattagttatatcccggtgaaccactgccatcgaattgattcagtgagttggacgttgggcatccggaggaaaatactatttcaatccacttataaattcatttgttatcacacatatctttgataactattgaaataattgtatgtaactatttataattaatgaacctgaagttacattttgataggatgcattctttttacagtgctcttaaatgaaatttgcccacccaaaaactgaaattacatgagaggcttaattaaggactccattatagaacttattgatcacctttttagtctaaatcaacttcttagcactaggtgaagccgtggttcctgtacatcgtacatgctttaccaagacgaacaccgtaaggagcaaggagtttagatacttaccacagctgtcgatgttgggactttttgtatttcccttggccatcgtcattggagaagtggcgctgcagagtaggtcctggggaaccagaggcactcagatggagatgcagaagataaggcggcaagtgaaattccgcgtgcatcgccgtcaggtcgagccatacctcccgaatccgaatcagccccaccatcgccggatccagaacaggtaggaggaggtgatgccgcagtagtgttggggatgggaatgaggaggaataggatggggtgtggctagggcagggggaggtggaagcggagaaaggggaggtatggattcctttgcttcccactgcaggctcttcttcttacctctccggtccccattgatgtggtggagattgggaggagacatagcggctttggagatgggactagcacacaatctagcacctccgcctcccggtcccgggagtgggggcggcgtagcgaccagggaaggggaggcggcctcccgagacggtgtcgcaacagatccaggtagcaggggtgaaaatgaaaaatggtaatactagggaggtggaaggatcttattgcgaaagattttgccaatcaatgaatccaacagctcacatcatctgtaggggcaatcggacggcctatgtttttctgatgacgtggcgcaatctggtggcgaaaaactttagtttttttcactactttagatttcaaattaaagtaattaaatcactataatttgttcggttggttcatagatgataaaacaattaacacaaaaaattttaattaaaaattaggtattcgggaaatatatctttccattgcaacgcacgggcataatgactagttttttttaacatgaaaagtacatttcattcattaagaagatcatctgactaaatcattagccacgagaaaatatgttttcttcaactaggaggtcataggttcaagtcctagttcttctcacacatatatatactagggtttggggaaaggggtgagggttgcaaaaacaacccctaaacttctagttttcagagcgcggttcaattttccgttttttcgcttcttcatatagaatattgttttcttaagaggtcctctaagtaaaagcgcacaacattagaactaaggaccagggatctataacaaattatcaagtaaatgaagggtgtttttgcaaaatcaccaacgacgacacggacgtgcgggagctcacgaaaaccacccgccatccagcgcctcgctgacgcgtcggcacgcgcaggtggccacgccagctcaaaaatctccaggagccgcaaatctcggcaggtttgtatataagcgattcttccgggattactaaataatgcattttgcaggtttgattgtggtcatctccgtactgctcgctgcagtgacccttgtttgctgcaccggctggaaggccgccgcccggtggtgggccgcagggaggagggctcgcacggtacaccccatcgacgccgccaccgccgctgccgccgtcgtgccgactgcctaaagaagcatgttacagtatatatagtgtgttgttgtcatagtgtgcctcgtcctatgtgttatatagtgttgtattgcgataaaaaaatgtactgcatgttactgcaataagtatgattgtgtatgtatttttcttgaacaaattatgtatgtgttggtgcccgtaaaattgcatgttactgcagaagtaaacggatgtataggcaatcccaatcgccgtgccttttttttagatcaaaggcttgacgcctgttaacaatgaaatttggtaatcggcaaagacgtcatcggcttagaatcattattggctgcagcatctcggaatcagccgatgggagttatcaagtcgccaatagtcggattcctgctatatttggttaaggaaatcaatgtactaaaggaagcttatccctaagtgaccgagtttaaagaggatgcggcatggcagtttatctattaattaggaatagtttgttagtttccttttatctttaggaaaatgtgtttagtgtccgataagcactttatattttccttttatctttaggttagtttctttcttgtccgacaaggacttgtatcaacccctgggtataaatatgtacacccggggtctatgtaatgaatcttcacgatcaatacaattcagcgcatcgcccaccctttttacttctactttttttttacgtgccggcggaacttggcacccgacgtggggctgcatcgtcttcgatctccggcgaagggataagtccaatgttccgtcggcccaggcaattgtctcatctacatcggcgtcgttcaaggctgcatcagtacattcgacctcttggattgctctggtttggatgatatatttgctacctatttatcatatgtatctattaatctagtcttagcatatcaatttagctctatcggttgcttctcgttttagggtttctgccggtattggctaaatcacgttgctagattagattagcttagatatctaccacacctgaaaactcagtcaaaggcttaattgtctagatattatgtctcttttcatatttagtgctgcatcagttaagtttgatctactaagtcgtgcttagaaccataatctctagcctacttcttgattgccaataagggtttcatcggggtttcagccggtgagttatctggacgttgcatcggctcataaggattgcatatacatataagttgtatttagccgatgacaacaaaggtttcactgtttaatctgatcttgtggatttcatgacatcagacctccagccgatgtgtgctttaaccttcggatcgatgcttatttatcatattattgctagccaattagtttatacaggactatattgttattttattatatcatcatcagccgattgcctttatatcattatctacattagacatatagccgattgcttaaaccatatcgctatcggctggtatcggcatcggctattatcggctatcggctgacattgctccatcggctgtctagccgatcggctgttttgtctgctgtttacatatcttgtcagttgca

SEQ ID NO: 12906 - DNA, 16712 bp, Oryza sativa
  unsure (1)..(16712): unsure at all n locations
cagcccccagccctcattcctccccccacaaatccagtaaaaaaagaagaaaggggaggagaagagaagaaggggcgaagccctgccggattcagacgccgatttcaggtaatattcatagatcctatatgtgactattgagttaaatactgtgtattttttaaaaactttgtttgaataaatgcattatatttttagggttttagttgtactaatctagaagtgcgtattgtagatatcggtaactacgtagatctgctagtttggaatcagtactttaccgttgcattggcatacacaagaagatattacgttgtagatgtttattgcatgaaagagtaatatgatctagttattttgttgacagatatgtcgaacaaacaaatattccaagtttaccatggcctaggaaacgtccgttacgggccaactgtggtagatctgtcagaatttattgtatcaaaaaggggaattgatagactggctgagaggagtgtaccttctataaaaggatggttaatgaggggcttgagagttgatccacagacaagtgacataacaatcaatgttatagtaagtcaggtaactgagggtttttattgggaactaatgccagttcaaaactctcgagtgtggagatggtatgtggaaaatgcattgcaacgcgggtggtctctagctatggttccgtttgttcacccgaaggatccaggtgtgcagatgaacatggatgatggtgagggaccaagtgctgaagtaaatgagacttctgtggaagaggtcaacgcacgagaggacgggggcgtagtagctccagtgggcattcaaccaggtggagtggccgacgagggggagattgtctgtgccattgtggatgaaatggagagggaggattctgacaacgagcgtgtagaggaaggtgattcgtcagatgatgagacggatattaatccagcagattgggctagtgaggatttttctggtttggtcgtctttgaagaggatagtgtgagatgggagtacaaagaaaatgaggttattcagggagcgatttatactagagcagaaaatatgaaggaggcggtaaaacattttgcagtgtcacttcatagagagttttgggttgccaagtccaaccggtcgcaatatgaagttcggtgtgttaaggaaaaagatggttgtccttggagagtgcacgcttataagggaaaatggaaggattattggacagtgtcatttgttaccaagcatacatgttttccgcacggaggtaagtatttttaaggatttttttgtacatgtctcgcgcatctatgtgagtcgattcatccgattgcttcagggtttcgtgcaccgttcagcaccccgccttcctcggctaggccttatgttgtgccccccacaggtacttaaaaaaacaacagtacttcgacaatcaatttacatgcattttatgtcttagcttataagggtcccgttgtcgatgtgtaggtttcgcccagttcgctacgacgcaggccgcccacttctcccaggctgcagggtcagtgtctcaggcagctgcgtcgacctcgcactcagcgtagttctggtagtacgctgggacttcgtcacaggcagccggcacgtcgagtcagggtccaccactggaccatgctgggacctcgtcggaccacttggtggcttccaccttgctcttcgacatcactgacttcgacttcgcttcaggctcgacagaggacgtcatcggcccctcacagctgggaggcgcaccgccggtgcagacgcaggaccaggcgcaggccactccgccgccagacactcgtgctacccgtgctgtgccaccggatcgtttcacctactcccaagaccacgtgcgagcacaggcccggaggaccaagcgtggtcgcggcgcggggcagggccagtagagcagacttctctttgtttatttgcttcacatgctagtactgtatgcttgtgtaatgaatacattgttattatatgtgcacgatacctttcggcacatgtacgactactttctgccgcaccgatgcagcctcctttattcgcgtgcgatacgagtatttgcccgccattttccgcatacgaccaatgtaactttcggcaccaatcaggcatgtaactttcggtgccaatcaggcgtacccaatatgccccgccacgttcacatgtcagggatatcactcgatttttggtgcctatataagtcgccttaacgagcgaggcctcacaatctttcagaactcaatcacattcagtactctcttccccacttgcttcattacaaatcctaccggctttcgtcaatggctagacgcctgggcgttgaggatccgaactggcgtagagatccttgtgtatacctactaccaccttggtgccagcgtcctctctgcctatgcggtgatcgatgccaactaatggcttcgaggaatcctgatattcgaggaaggcgcttttttaggtgtcctaactatgaccatgaggtattttactatctgcatatgcttattcattccgtatgggcaatcgttttattctttgtaacactactctattcggcagacccgcactacagcttgcgcatacatcgagtgggtcgatacagaaaatctcgttctcgacctaaccacttgtttacaagaaggtcgctggtatttcgcatccgaaagtactgagcaatacttatagagaaaagcggcttacgaatgacaatgtcgtgaacaatagtgcgactggcgggtgctaactacggcactacctccatgggaagcccgtccaagatgcaggtgtggtgatcgttgtcaggttcttcgttccataaagcctacaacattgggtcgaaggttctttgtttgtccaaatattcttgatgacgatttcatggtaagaatattttgattacatgaatccttattttctcacaacatttactaattttgctcgcttcacatctattctttcctcccaggaaccaccaaggagatgtcaatatagagaatggatagacaccagaagtgttctaactccacctagccgtgttgtgcagcttgaactatcagagcaatacagggttactaaagcgcggtttgagagaggagagggatcctcacgtaggggttagctattatcggacaacttggcatattgaaatttctactgtcatgcttccttatcccattactacatcgtcgttgtgttcaactattgcactacctccctcctagttcgaatctaatatcatctatgtaaccgcaatggaaatagttgtatcatgttcaaattgtactactatttcttcatgttacataattctccttgtttaagtccatataatgtttctacgaccgagactgcgataggcctatatcaattatccgagtactaatacgtcaaataagttacaaaataataccttacttaacatatgaaattgcgaaacaaccaacttcaatacatttttataacaatattaacaagttttaccaataaatacttctttaattattattaacataatatagaaaaatcatttgggggtactttttgcatatgggtcccttgccgccctctagtggggcggcaaggggcccaaatgcaaaaaagtacgagccccgagctttttatgggctgccaaaattgcatttagccttgtaggggcggcaaggggctaaatgcaattttggccgacggcggcagacggcgcggtcaacccgccgtctaccacgtcagcttgccgcccacctctggggcggcatggtctatttttgtaatttttttggccgatagattatttttgtaaatatttttaaaaaaatctaaaaatgaaaaaaattcatttaataactagagaggcttgtttgattggagcaggaacagccagatcgaggcccacggggaatccccgttgggttaagcccagtagggattctagcccggtcaactacggcctttccttcctcggtcggctgcggtgcaaggcgatgttgcgacggcaacacagcactgccccttcggtggtcaccttctccgcagtaagtttctttcttccttcccctctcctctcctgtgctgtgtgttatgctagaaccggatgtggcagtgcagtatgtatgatgagaatgacgtgtagagcctaggctctcatgtcaatgacacatatgatggtgtttttcaactccgagatttttaggatggtttcaaagcaaattggcccttctggccttctcaaaatctcaaaattgttgatgtatgaacttagttgaggtttaactgactgagtgctcgagtatgttctgaaataggcacgagtggcatgtttcttaatcttgatcaggcaaggctgtgagtgatttgaaatattgcagatcagtttctgtaaacgaggttgcactaattgtattacctggtttatctctactgaaggcagtaaaaaaaacttcattcgtttgcttaggccaaaagtgtactttgcatgacttgggttgagttcagactctcaagtcctttcagcaaagttcatacttaagttggttgtttcttaatgaatgtcaagcacatgaaaaacatgggttttgtggatatggatgtcgtgaaccagagtaccagtggtctagtgctgctgattggttccttaaataaactagagcaatgaagatggtagatagcttatctgaatttattatccaatcactctaaataaaatggatattggagagagtttaattaaggcatgatgttgttttatgcattattaaatcatgctaaagatagatctggttgaaattttgttgagaattactgcttcagatgctatttatttcctcctattcgtgcagtggttcatggatgtgactagctaaacacctttgtgctgtgtctgtttttgactattcagggccaatgtttgcaatttaattagatttgaaactaatgaagcatattttatctgtggtgcattctgtaaattcatgaannnnnnnnnnnnnnnnnnnnnnnnnnntgcaaaattcagggtcgatgctggacgacagataggctggagagaaggaacatacaaaatcatggcacctgcgagttatgctcccgggaagaagaatcaatcgatcatctggttgccgttggtttgcaataatgtgctgaatttctagttatattttgagggaaccttatcattttagttattttttatgctcttggaaatgcttctgatgttacattctaaagcttagctagtgtgcagtgagcatttggagtcctacaatcacattgtttcttgattaatgctctgattatcttaagtggttgctgatcagataggcacgacaggggaggggtgtgctttttgtgtatatccaatattactaatgagatgatttgtctgggccatccttctcttaagattttccgtgaatgattttcatgatattatgctttcaggaacgcaagctgctgactggtttaatgtggttggatgaccatcagagtgtcgtaacaccatttttgtttgctctaaaactttgtctatgttcttgtcataccgcgcgaatggatcatagtctgctagaaactaattgggaatttatagtagatccctccttatcaaactgaaaaagcatgaaaatcgacagctatatatgtttagagttttgtcccctcaatagatgttcggttttgtaatgcaaatttattacaattgtcacgtcggttcgaaaagatccttgtgcaccgaaagcagttataacttggtgaatggtgatgctctatgttcactaatagtttattgcgtaggaaactggcaccattatgttcagagctgatttataggtttaattaatcggtagtagcaggggcgaagccaggaaaaatagttaccggggccaccactaactgactatagcttataataatcttaagataatcctagaacaaaactatcgaccatataatatgataaaataaagtttttttagtaaagtggttatgttttacatgttacaaacttctcatgtgtacagttacgatccttcatcttgtgaaaacgaacaaccacgtcgtcatcatttggaactgtagctatattttaaaacgcaaggagtaatccatatatttattaccgatacgattgcgtgcagtattgtctacacaactttaattaccgagaaggttatctccaatgataaaggagaattagtaccacatgaactagtaagtgggtatttttcttctcaagaatcacactccattatactttgcttgcctattaatttattaaaaaatggaatgattaatatgtaaaacaaaatacccacgctgctgtagatgatcaaaatcactaatttcttaccttccacttttctagaaagaataaatttatgtttatgtaacagaaatttggagaaatttcatatttcagaaccctaacttcctaaaattttggacttgagaaaccagcctacaaccaatttgtgatgataataattaagaaattgtgatggggttagtgggttacccttgccaatcggcgaagattgggcgaagcgcttcgagccagactgcactgcagcaggaatacagagcagcacaacaaggcaatttgtggacttgtttagcaggaatacaaagccttctgggctcaaatctcatacgtatattgggctgttgtataataagtgctagctaattttctatttactacttgttagtattgtttagttgctaattgagcttgaccagaacaatatcaccggaccaccggggtctagtagtttccttgactggggtcgtagctggtaaattagtgctggtacaagatgtttgtaaaaaatcgtcggggtctactgaccccgataagtgactctagcgtcgcccctgggtagtagtaaatcgtgcccaacccaaaaagtttgaaatcaattcctgcacttacactcccgtttctggcaccgagatattgtaaacttgtgatcagggagttgagtgttgcttttgcttgcctattcagcatggctgacctggtatctccatatataattcgttcaaacaaaataaaataaaaaacatggtatctccattaagaaacctataaaggttcgcacgctgggcgtcttccggggcgagccacgtcagattactgtgcagtaacttggtaactgttgctgtcctacgtggaccaattgccgcgcggctttgtgcgcctagcggcctgtttggttggagggagttttgcctagcggcctgtttggttggagggagtttttaggagggattgggagtttagaaggatgaggctattaaatgttttgtttggttgagagacatgggaattttggtgggatggagatgaggaattgaggaaggaactccctcctttttaatacctgggtaggggcaggtaattgggaggatgggagggaattcctcctttactttctctattactttctctaagcaaatctcagtcatccgtttttattaatgacctaatctccaactaaactccctactaattttcattacctctaccaaacaatgtattgggattaaaaatcaaatttatatcttaatctcatcatcacttctcttatgtaaactctcagtccccttccttcgagttaccaaagaagccataggtgcaggtgtggagcagttgggtagtggcctcgtggttggtaggtgcatgcgttttctgattaaatcatcgttgctgcgtatggtggtttgcggtgcctgtgtggtgggcctttttttgttttgttgggtccattggtcagcgtttgattgagtttggtttcggttgtacttcctccgttttaaatgtaagtcattctagcattttccacattcaaattgatcttaataaatctagatagatatatatatttaaatttattagcattaatataaatgtgagaaatactagaattactttcatggtaaaacggagggagtagtatttttgttgcttgcacgtatcgtcgcttcggctgccgcgcccacgcttggtgcgggatctgagttgccaatcgcgtcgcttggtctttgctaggcccacggatcattggctgggtgagccgaagccgaaggggcgcgcgggcgtcgtcgcctcgagtggaaggcacgccgtttcgcataccgcacgagctttggtaaacttgcatctgcatcaatcactgcagcgtgggcctttagttatgtgggcccatagatcagacaaatctttatatacgatttcaggggtggaaatgaggcgtgtgattgggccacgtggctcactgattatttagggttagttcatctgaaaatcagccacgtgtccctgtgcaatcttagatagtcagatcagtaacttctcaagctggcctgtcttctcctacctgattggtccacatggacttacaaaatgttgacatgtggaacaaagacaagatgcagcctgcagctagcctgctagctacgctctgctttcatggttacaatcctctagatacttccaagctcgtagaagtatagtcaataaattaaattaagaacacctagatcctttggatgatctcaaaaatattaaccctagaataaacattacacagcgaaaaacgatacagcacaaaatttaggaaaaactaggagaaataccataaattggaaaataaataatgacatgttatagtgaaaaaatagttgtcaaaagaaataataaggccaagactttcttttgagaaaaatcaacaactcaagtctagagcctagatgcttttgagctaagggtacaagcggctacccacaaaaacccacttataggctaaactaacctgcaaactcgtttattttgacctataagtgggttcgcgggtgacccgcttgcaccccaattttgagcaggtctttaaaactggagctcaaaaaataaatagagaaaacaatggaaaattaaaatgtaaaaaaaaacatatctctaaatttgaagctccaaaaaaaagataacacaactgaaaatcaaaatatgtaaaaaaaaagggagctaaaaaatagagaaacaaaccaaaatccaaaatgtaaaatttaacagcggagcctcctctactgtgttccttaaaaaaatcacaatgtaaaagaaaaagaaagcacccatggatatcagttgcactgtatagctctgacgatttcagatgctagatgtggtcgattgactatgataataattgaaaatccaacagctcgcaaacaaaattttccaatttatgaaagctacacgtaatttcttactgaacatgcatttttaaataacaagtaggtaacataataaggcatatattactattgtatttccactctcaacctttgataattaaattaattatgtaaaaacttgcaaaattattctgatcatgtcacaggctataaattttgaagcacgccaactggcgtgctgatgatttttctagtattagaactaaagaaagaagcgtggggatggaaagcgtaggatcaatatgctaagctcatttatttgctcacgttaccttccaactcactgctcatctcctctaagagcaggtttaagagcaagtttaataggatagccaactactaactccaaatcatctagagccaatataatagccaattcatacaatggttgcttactatactattaatacccggtcctacctgtcatacactcgttacgttttggagtccgtactgtagctggctacatatctgtagcccgctgctattctctctctttctttatctctttaaaatatatttatagctggcttatagcccgctattgtacctgctctaatagtatcgccagctacaggctataaatgtgtaccatgtcatcttatagctagagagtacaatagtaagctgttgacacgttaaacaagtaatatctttattaattttttaatcacctcaatctctttcttctttacccttccctctctcactccgctgcaagactgacaaaaagcaatgcacaggcgcctaggagctcgtgtgcactggcgactaaggccctgtttagatgggactaaaacttttaagtccctattacatcggatgtttgaaaattaattataaatattaaacgtagactattaataaaacctatccataatcttggactaatttgcgagacgaatctaatgagcctaattaatccatgattagcctatgtgatgctacagtaaacattctctaattatagattaattaggcttaaaaaatttgtctcgtgaattagcttttatttatgtaattagttttgtaagtagtttatatttaatactctaaattagtgtctaaagacagggactaaagttaagtccctggatgtaaacaccacctaatttaccgtccgctcgcaccctctttcctcccttctctcgtccatgtcatcatccaatctgacgtgtagctcatatcgccggctcaatctaccttattaaacctgctctaggagcaaggataataatatagccaacttcctactattagcctatcttaaagccaacatatataatagattagctataaggttggtacaatttttttctcctctctctatctctcacttatacatttaatgtatttgtcttggagcttgtgataagctagctcttgtatgagagccaacatccttaatttttcactacctctcttatccatctaagtttatagtaggcttataggtcactattatacttgctctaagggcacccacaatggttatctataggttctctacaagagatctatgtcaacatatttttctacttggaatgtattaaataaagagagagagcaaagctatctactaacttagagatagtctatagagaaaaacaaggcaatgcatgagagagctatagataccaatgtagacatactattattaagatggtttactattaatcgagtatattgttaagatgtacatgttttatagagagcaccttactttaccattgcgggtgctctaagacaccgctgccttcgtccgctccggtcgcagccggcggcgccacaactgttatcctcccactcccaccagccggtttcgcccttttcgtcgccatccgctccttgtcgccgtattggatgagaagctccacggtgccgccgagctcaaccttggcagattgagggacggtgtcaacctcggcggcggattgaggcggcccctcttctccaccccttatcggtgaacacagatgcaagtggtgtgggtcgacgactgcagatcgagcgatgaataacatctcatttggtcatggatcctgacgggtgagatctactcaggtgaagtttccttgccgatatgtttcttggtcttccatgctcacgtttgattcgttctattccttgtctttgtttctatcaacaaatttcaattgttcttcgtttggatcgtctccattactcaaactcgcagctattttgcattcgtgcatggtgggtaccgactcaccatcagcctctccaccacttacattttcctggtttttcctgcttaggtaagaacgccataagatttcctgtttgttcctttggtctgcttctgtcacatccttcgctcacatgccctcgtcgatcttttctccagcagagtttgatcgttgcgaagtctctaggccgcatcccgtgcagctgagcgcaactggcgctctggagactcggatctggtgtacctgcgggtcagccatcgtttagagagcaatcttctttatactggaagaggtaagaaacatatttgattgactgattgggtacggtgttctaaatgccattcaaacaagtgtttcgttctgctcctgttgttactgatctctgaaacgtgacttgttccagctttggattttggagattggtctagattgtaatcacagttgttactgttattaatgaagtgtgcgtgtttatatttttcttttggatgctgtctgaactgagagaggccgacctttgttgcatgttgtaaaatgttgccttcccctgcatattcagcttggataataaccatcgtgtggaccgcaagctacatgttctcattcttttagcctaatcagcttatcagcatagacagatcattaatcctatactttaaattaccagtccgtacattacgaaaacaatatatgagcaatgaacattgaaacaacttgaaggacagaatcaacacatgcttgttgttcatatactttcttccaaatacaattagaattgtaagatgctctacatatattggctgcttgcttgtgttctctggaaataagcaggagttggctttccttaaaaggaaatactctcggcaaactcagacgtggctggaaactgcgcgcggtcagggggagcgactgcgactggaaggaatacttcctgccaatgcgtgtcgctacccagcccaggaaccagcaaagcgacacactgatattatacatgattgtttcatcatgaggttgatttttcctttttcagcttgccatcagtatttagattcgtgctgcttatgtttatcagagtaagcttttccatgttagagtagtttttattttctacttttatggctgacagggcctttgatttggtcccggtctaggtctagctattagcttgcttgatctgatcaaacaaatcaatttctttgttcccttggaagcctgtatgcaagtttatggaaattgaattgtgcctcactacctcccaccatatcgtgcgctttcagcttgaaccatgaaaccaacactatattcatggtcccaatgccccaatgctaattttatttttgtgtgcctgttcttttggttacccacacattccctggtgtggttctcatcaatcaaggtatagattttaatatgaatctaaaacactgaatgggacctcaaaactaaccaactatatggtattataaatttaatacattgaacaatcccctattagtgtaatacttctttatcataagactaattccatttccaatgctgcagaaatcatggcatctatggaagacattggaagtgcattaatccccctagtgggtattggtgattaatgacaaatgtggttaagagattaatgagtttattgagctactttcagatgcattagtccaaggtgtggaaggtggatgcttggagaccccccaaaagtataaaatcaaagcggaccggaactcgagaagtgtatatgatagtttatttattgcaatcgagtttttaggataaaccgtactattaagagggattccaggtgatgctctgagatatgtcaagtgctcttagcgtgaaccaagtgtcaaagtttccctaggagttatttttgcaaatactccatctgtccaaaaatgcaggtccggaacttcttgtcttccaagtccggaagttccggtctgatgaaagaaattttcctaagtgttatccggaagttcctgtcttctaggtccagaacttcatgtctagtttccagttcaaaattgagtaacggctagatgacgtcacctagccgttaaacatatacagctcgtttccagctcgttttttggccattccactttcacttttcatccctagagctgttgctagcctctcctaagtgtttcttgccatctccactcaatctagagcctaattcttgtgagaaagagagattgagagggagagaggaagatttggagatgtgtgaagactaggatcttgggtgagcacttggaatatctcgtgggctgtcatctcggtgcttattactcttggagatgatctcctagacggttagatgtcgcccgcgagaatccgttgcatattgtggatgtcctgggtaagtttgtgaaggatctcctctcctccgaaagggaacgaggtaagttaatgaagttcttgtgctgagattctaaaggttttccaagtagagcaacctacacttgtggcggatttctagaagtaggttgagttggatcttggtggtcactcaattctagaaatttgcctaggagtgtttggggttgaaggttgtggatttcctctggggttttcgcacaagtgaggcaaggggttaatcgagacccagctctttggagctcctcaacggagagtaggatcacaagatccgaacttcgggaaaaaatcgctcttgtctctttctgtgatgtttttgtggatgtttctgtgatctatcccctgcttagaatacctgtgcatcatcttgtgaagattggcttagtctcctgttttgaaatttgattttcatccttgttatgtaacccggaagttcctgtcctaacaacactggaagttccgggcctggcaggccggaagttccggagttccttaccaggaagttccgggtctgtttgaattttaccgctgcgatttgtttttaagttttcagggacagtctattcaccccccccccccctctctaggcttcatcagcacgttcagacatcgctgatgaggatccccaggtagatcaaatggccaatggaggagctccattagctcgagcaatgtggatccagaagggagctgtcaaagttctatttgagtttacgtctgatggatattatcctcactgccgctgttccgtcgagagagcaatggagatatacatgaacaacctcaaggaactcaaggtggatgagccatgattttgctatatctcttgtgatttgccctttgaatacagcaaggtacataacttactccttatcatataatattacaaacagcatgtattcatatcatcttccccatatgattaatgatttcctacttcaccaggtcagttcgatgcttatactttctatcctttttataataaatcgaccacataacgtcaaagctatcagtacaatagtatctgcagtatgacccttccacttgtatatttcaatcaatactataccctttcgtaacgtgtgcctcgatacataaatctacctatgtacctaaacttgccaacagtatagccttcttgccttacttgtataattatgtgatgattgttctcctgtaaaaatatatatgtatctatgtagcaagttattggtggtactatgacgagccttatgaatctagatcagacactcttccttctgagattgctgcaatggcataacaaatatttacttttgccacctctgtgaggttgatgaaaaggaacatttctttaatagtgtcgagacgtttttaaagggaacttgctattctagcaaaatgtgtttctggttctggtgctacatcttcaggcacactgcacacatggtacacctgataatcttattgtcaataaaaaagggtgtcacttttgtgatttgatgttttattttttttctctgtgctttttaagtcaatgtacatactttccattgtgattttgttctgtttttctttcttcaccatgaacaagctttctgctttcaccttatggtcaaaaggataaaagtagaaaaaaaaggaaaaccataagatccaacaacattttcatctacttatacccattcgtaaatttattaagttgcttttttaaagcatgaattaacaatactttttaaatgtaattactcaactggtagcatcttacttgaaggcatcaagctgtaatgccaaagttatatataccatacagatgatgttatcgatccatttatagcccgcgaatattattattcatctgtttatgaacaaacctgtgtttgaaatggtggcgttgttcctctttaattatattagtagtaccgtaaatggttgtcaatatttgaatggttctcctacaggtagaagaatgatgtaaaaattatcatgcatatttgactacacatgaatttagattgctaccgtggctggcaaattttgctgtcaaacttgccatgtagacaccaaggcccactacttcaagcgaggactcctaacggacaagctatatgatgttcatatttaggagtaacaacattcagcaacctatatccccaggaggcgcgccaatgctagcaggaaactgtaagatttatttctatggagacgaaacacgtacctactctgccactgttactatgctaattagtttttgcacctgaagtgcttatcatgcatactgcactcccttgtcaatataagataccatctatgtatgtacctgctgctagagaccacgaactaccaatctgcctatatgtagttaacatggcgattacatgttttcttatattttgttcggtatgtgtctatttgcctttcctaattttcagctccttctacctaactgtctactagcggcgcacattatcagcgacggttaatattatgcttccaccgctttctaataatggaatcaacttttacaccacaccagctatatgcaattggcgcgcaaaggcgcgccacaggctctagtaatattaataggtagagccgtaatcttgagggtagagagagccgccgcccgctgctatctttgttattcttgcatactgctattggtgcttcgaccttgtgtgaataactcaccttctcaattccattttgtctctacatgttaattaatgtgttcagctaatgtctttccgcatatgttttcaagtagatggatgagtctgagtcagagcctatgagagagcattcttccttctttaaattgtcattggttcctcgaaggttagtgatttttttgtactgtaggtg

SEQ ID NO: 12907 - DNA, 12178 bp, Oryza sativa
  unsure (1)..(12178): unsure at all n locations
atgtgactaaaaagttgtgtgtgtatgacagattgatgggatggaaaaaaaaaagaaagtttggatctaaacacagtcaatatagtttattttgaatatccaaattcattgtactagaatatgtcacatccacccaaaatctcttaatatatattaaggtacggagggagtagcaagcaagcagcgcagagcagttggctcttggcaagccggaacgccgaagaagtacttagcgacgacgagggatgaaagcggtttaaaagttttcggtttttagacgcgttttagaaaatgggaaatatcacttggaatttttcggagagtttcataaatagaaacgaaatcaattttttttagaaaaaatgtaaacgaatacgatcaggctatcattttgaaaatgggaaataattttcaattattttgaaaatgaactcagattttttttcttggaatcggaaatgaagtacttttcatatttttctagtacggcgttttagatctatttttcttttgactgataaatattttttgtttttattaggccacacatactacttagggccctttaaatcgcaggactgagaaaacataggaatagaacaaacacaggattttgatgtgaatgcaaatataaaaaagggattgcaaaacactctaataacatatgaatgaccatttgattggatcgcaggaaaagcagaataattagaggagagataaagatttgaaggaaagttttcacgaggttctaccttatattagattttctccaaaacttgcaaggtattaggcattccataggaatttcatatcattctataggatttatggatttattttttttgattcaaagggttatatagaaaagatttctataagaatgaaatcctctaaaattcctatgaatttccttcgaatgaaagggtcttatagtcttttacttattgtagttctcatggaaaatcaagtgtacaactagatttttctatatggtttttctggtggatggtatttttgttggatggtcttcctcgtgggttgattttcacgtgtaaaccctaatttgagtgggataatgtttttctttttttttttggttgagatggtgtttttagggagttgttatttttataaggaaccatgatagtgggaaaaaaggggtagctccgcttctaaagtagtacatatatatcaacccgacatatatcgaccaagttcaaaaatattccaacaaaatttttatttttttcataaaagttgttcaattttcttggttcgtggtaactaagcttactgcaggaggagtccggctcaggtgcagggaaccctgcacatagtaatatacaggccaaatcaaatcgcgacacctgtacacaaggtaggtccacccaatcaaccaagtaacaatgtaaacggaggtttaaccacgatcccacaaaatcaggtaacagaaccattcacccgtttagtcctcgttaaacctccgttgcatgcgtaattaagtagggccaccctggacaggtgtcgcaatttgatttggcctgtattttactatgtgcagggttccctgcacctgagccggagatgggtaatccctcgctccggtaagataaacctgatttgcatgcggtggtgctagtcttatggccgtcttggctgccgctgccaccgggcatgttccggcctgcccggccattgccagtttgccaccaagctgtagtgccccatatgtagcagcaagtatttcttccgtcccataatataaaaaattttaagtgaatataatatattatagcacaataaattttgagtggtctgtccagattcattgtaacaaggatgtgtcagattcacaaaaaaattctcttatattatgggatggagagactattacatactccctccatccaaaaaaaaaagacaaaccctggtttccgtatccaacgtttgactgtccgtcttatatagatttttttataattagtaattttaatattgttaaatgataaaacatgattaatgctttatgcatgacttgtttttttatctttttcataattttttcaaataagacggatggtcgaacgtttgacatgaaaatctagggtttgtcttttttttttttttttttttnnnnnnnnnnggacggagggagtatacattacatgtagtactggtactgatgtactcctacatcctgcagtaagtaaaaacggagagtaaaaaggccgcacatggcacagcgaagcaaatttccattttccagcagcaatctgacgggcggagctcttaatcgtacgggcaaccgcagctgtgttctgtgaccgccttacagtagggtagtaaaagtacttccgcctagattaaagagtactcactccggcacatttcaaacgaagccataagttttcatgtccaattttaattactgattttatttaaatttttaatgattagtatttttgttgttattagatgataaatataaataatactttatatataacttatattttatatattatatttttttaataagactagaaaagaatctcgtgactgcgtttaaaattagggagcactaaattttttctttcacagacagctgccggcccatgcttgcgtacgtacaaaccgtcgtcgccaaccggggacaaaagtcctataaatacaaacaagtggcctgtatgctgtgacacggccatgagtggtaaactagtacgggtgccaaaatatggctcgctgattatcgatgagtatgcaggccggcccggaccactggagcatgcagtctacttggatcacagtactactatctcagaatggcattgtacagtattagtatcaactgaaaccactaattgaaatatgatttcactaattgatgaaccttatcataaatttagttagctttttttttctctttcagctggccgacatgatagggtaatcaaatggattaatcaatcatattccctagctaagctcaccagtgtacactgtaactcgagcagagcacagcacgcgcgcggcagcatttccttcagttttaacgacaccatcgctgcagcgtactccgcggttttctttctccgcgacgagcatctcgaggcacccggcgccgtcctctgcacgaatctcaacgcaccacgccttcgccgttgccgtagccgcgcccgcgcgagctttcacacacgctgtcaccgacaaagcaatcaccgggagaggattaattggcaatggtggaggatgattagggcacccgcaatggttatttatatgctttctataagagatccatgccagtatattttcctacttggaagagattaaatgaagagagagtaaagctatctactaacctggagatagtctatagagaaaaacgatgcaatgcattagagagctatagatacccatgtagacataatattgaggtggtttactattaatctagtatattgctgagatgtacatgttttatagagagcaccttactttaccattgcgggtgctcttagagcaagtttaatagtatagccaactactagctttaaatcatctatagttaatttaatagctaattcgtacaatagttacatactactccctctagttctatattaattgacgttttggacaagattgaggttaaacttttataactttgaccatcaataactttaaaaatatttagtttaaagaaactagaaaaacatatatagatttgtctttcaaaacactataataaaagtaaatatgcatttatttattgtatatattataatagaaaaataaggtcaaaggtatatcttgtagagcgtgtcattgttcaaagcgtcaattaaaatgaaatcggagggagtacactattaatacctggtcctacttgtcatacacacactgcgtcttgaagtccgtgctacagctggttataaatatgtagtctgctgctctttttctcttctcttttatttacttaaaatatacttatagctggattatagcatgctattatacctggggtgatctgattaactaaatccgggtgtttatctcgagatcgtcaggtcgtgagcttttggagagcagctatttcatggcaaaacttatggatttgagctcttttcctcctatacttagaacaagatatcaacagggtcaatcggaaaatattattttcttttattatgaatttctggagtggtctatttcatactgcgtagaccattatatttataggttcataggtatcattggtgctatttaagagatatggagtaagattaatgcaagatatacaaacattaaattacaatgcatttaatgacatagaaaatcccggtattaattgcatcagatatgatatagtaatggccgtcttgtaattgcacaagtatcattgctttcatgttccatctctttttatattgtataaattttaaaataaccttatttcctgacacacgtttagaatcgatacctcatttatttataaatttgatagcactcttctgttggtaaaactgacaacattcaattaataggggcataaggaaaatgcaggggataattgtcttgaagtctatagacttacatttagaaaaaaaaattaacatattcaaagtaggtactattaattttctccatattgtcccttttttctttttacaaattgaaccttttccaactcttgatttgatttttcttaggttccttttttttcgttttaaccccctcaccccctgtgcagttacaacctgtggactagcaaagattgatacagatatatacacagactgactatcggactgaacttcaccggacatcgactcgccctgtttagttcacaccaaactttccccaaactctcaactttccatcacatcatatcacattcaaaacttttctactcatatgaactttcaacttttttttccaaactaccaactttcctcaaacttcttcctaatttcaggaactaaataaagcctcactgaacggctgaacctgaaccaagcaagaaaagtgaggcgctgagctgagtgcacactgcagctggaggcctcccatataggctgccgctggagggagaggcccatcgggtaactaatccacgcgtcaaattacttgcgtgtttgggcccacgagatggaactagggagcaaacaaaggtatatatattgcttcatataatagtctcctgtccttacattgattggttcagagtggattggttcagagttgaatctcttccgagaggctgtgaattctacaaaaaggtttgagagagtttgtgcagatttatgaaggggatatgtaagttaactattcttttctgaacataccgtaatgctgttcttcctgcaatggactcatgatatttctttacatacagtatcacatttctgacagtaacaatggacctgcagtgcttgctcatgatcaagatactatcctccttcggcctttttgtccttgtcgacaaaacatgctagagattgcccaaactagaggctgtaattgcaatggaagatgacatgagctcttgtttacaacgtgttgaaatttgaaaagctcgagtcggtatttatgtaatcatcttgtaagcaaaccatcagaaataccaaaggagaaagagtgtctaatgctacaatcttttgatcgggtaaaatccatctagaaaaggacgaaaagagtgtgcattgctacttcttggtgcatttcaggcagtggccacgccgacaaggcttcgttttttacgggcaatgaacacttttgaaattaaggactggtcgagaaagtgtttaagctcataagcaatctgtagctgcaaaatataaagccagtcgacacgattcagacattcagtcgcacagcccaatccatccagagcttcagatgagagggatgacggtgaaccacatcgtcgccgggcggggccgcggcgtccagatagctggggcgatggtggctgtggccgttgctgtggtcgccgtctgcatggtgtgcggcggcgggtgcaaggcggccagcaatgaggaggatgcgtcgtgttcatccgtcacttgattctttttaggggtggagacagaaaatagtatgagtgagggctaaggatttaccgtttaggtagactaaggaagtaaaaagtgtcaaaggggcatttgcccccagtcacctaaattgagtggggccaagggccccgctggttacactctagatccgaccttgattcttttgaagtactccctccgttttatattataagtaagttgaaagtttcaaaaatttgaatgaaaaagtttcacaatttgagttgaaattttcaaattttggctagtgttttttgggtagatttttaaaaatttggagctaaaagtttcaaaatttgaattgaaaatttcaaatccgagttggaagtttcaaaatttgagttgaaagttaactcacttttttaatatttgaaataaatctatttaaacaagtcttggttacaaattatttctcgaatttcagagaagagtagaaaattatagaaataattcaaaatatatcaaaaactttcaatacagtatttaggtaacttccaattgttcaaaatgaattgaaagaagaaaaacaaaaaaatatccatacatgggcttgacctataaggcccataagctaccaggagagtaaggcgcagctgcaccgaaaagttctggcgaaagttattaggccggtccctcccaactagaatgcataggatgagagagtcgaccttgcttgagagagagaccaaaatcctcgtgtaatcccgttctcattcctatttctctgaagtttaggtaggataggatagcaattatgtgcagagagaacaccttcatagttcaaaggctgcttgatgttgaatttttttggataatgggcttggtgttgaataaaaaaggcttggataatgacctttgttagactagacgatgtgcaagctacagatggcgtggccctaactggctcttggggaatgaagtgtgttatttagttcaattcttgtttgcaaaattaatctctcttcacaatttacatcgaactatcataggagcaaagtgcatgcaaggtgttatgatgccacatatgtagcctttgaatctcattatttccaataaaaaaacttatgatactacagtttgcaaagcacaccattagctatatttgcccggtccaccgtagtatacatgcatactatcatcattaagtccatagtcatcataggtgtataattttggattgtcgtctcgaggatgggcactacggatgcttggggtaaccagcttgttgttctcatcttcaatagcttgaatattcctaacaaaagctgctttgccaaatccttcagaagcgaagtgcccactaccaatttgtggtgggtccgaagaagctgttggaccttgaacatatccaccccaaaatgcaaaattacatttgtccttcatggatgaaaattgtgaactcggccaatatccaataggtgtattatttgaaccatatgctagccaccaattcttagtctttggatcctaatataaataaaaaatatattgtaaatactccgtagtttgaagtaaaatgagcattgaacactaatatgtcttgagttatcaaactcggaaaaatgtaattagttcatcttggtttgaattggtttgggctagtttcatgatgtatgacaattgtagccatattgattccagaaggcaactaaaatggtttcagttatgcttactcgacttactatagttatatatttcatacctagacaattcaaaaatatttttcatgcccaaacattttttatgttgatcgtgcacaaatattatataattatttatgtgggtgagccttatgtagtttctcttgttttaatggaattgtaacaaaaaaattcattttaagaaatttacttacatgcatataaagtatctgagtatgagatgattacttaattatcatagatagttcaactaatattatagtgaactgactagttttgcaagaaaacaaaaatctaggagctttaccttgtacaaaaactgcatgcctagacatggaaccaatataactaatcatacatattttaagaatagaacaataccttaaaaataagaacatctattacatattgtggtccattatagacggagataggatgtactcttcctccaagaccaacactgcgactaacttgcacgaaaccaggacaattatgatcaatacaattttttttcaattcttcattatcctgttatcaaaatttattgcaaagtcaataaggaaatatatcaaatatatctatgatatccctattttaaaatttatatggtcattatagatgcttattgaaaaaaaattatgcacatggtaaaaaaaaattgtttatgccttacccaagaaatatggaacctagcaaagctgtcgccactgaagcttggataaacacatgacccagcacctatcccaactcctttgcctacctttggcacactaccaatttgtatccatgatgcactaagatcattgctatcttgcttcacttttggttcatagacatttattgacgcctgtgatccgtatatctcatcccaatatttgattcctgctacctgcaatgaaaaaaccaatgatattttgttgtgaatgaaaagagtagcataagcactatagagataagatgatggagttgaaaaatatcattggtatgtccaatgtgaggatgacaatgtgggtcctaggcccacataccatcctcacattggatattattttccacttatgcatgtttcagtgctacaacatgatgacatattacatagaagtcaatcccttattgtagttaacttgatggcatatctatactcacttcgtccgaaaatataaggtaatttggttggatggaacacattttagtagagtactacgaatctggataggctcccttatattttgggacagagggagtaccttctaagttggagcctactagctctaaagcttaacatgcaaccataccacatcatcattcactataaactgttacatttaaagctcatgcaagcatgacacatcatctacaacttattacattctatagctcaacacactagcatgtcaaatcatcatctcccacatattttctataatatttcaaaatgtatccatccatcatttcaacaatactcaacattcaatcatccatatatttcaaagcaaagcatgaggcaccatctagttacatagaagttccaatcccttattgttgtcaacttgaaccaacatcatttgaccttctcaagaagtacttgtaaaattgggtacaataaaagattttatagtcctttcaatgccattgaaataatattcatgtgagcaaatatcatgtttatggaacagtatcaaagtttcagaatgattacaagctacttgttacttaaaatagcactaaagctttgaaattatagttttctatataactggtcctaccaatggacacaacatatatttaatcttattgtttatcattaagaattttaatgttaacatccaaagattgatttgaaaatgatcatattccataaataggttatgaatagtcacaatcgtggttttgaaaatagtagtgtgcaacatgtgttcatgggactacacacaaattcagtatgatcgtaatcagactttgatcattatataattttaaaattttatgagaagaaacttaccagttgttgtaaatcattgctagccaacgtgctgataccttgcaccatcgtggtgtccagtttgttgttacgcagaattggaattgttcctatggggcagtcgatggtagacaactgtgcatgtgagactgcagctaccagtggcgatttgatatccaaccttatgggggaagagcttggttccatctatttgagatgtaaaactgtgtcaccgtatagtaaatgattggataaaatccttatttgctcttgaaagttgaccgtatcccttattctcaatgatatgcgggtttgggcccaggtgtcaatgactcgtcatgggcaataagggatagggtgatttttacatgcacaaataacattatcaatatagacttgacaaaagacatccatgaagtcttcgcatgtatagttgataatagcatagttacaaaaataagttaattatttcatttcttaatgttaaatgagagtttaagtagtagataaataatgaatattaataaaatgcactcccctccgtttcatgttgtcagttgttttgggtttgttctaagtcaaatttgttcaagtttaaccaactttatataaaaatatagtaatattttcaatagaaaacaaaatatactatagaatatattcaatggtgaattaatcaaactaattgtgtgttgtagatgctgctacttttcctatagacatgttcaagcttgaagaaatttgaccttgggcaaacccaaaacgttttataatatgcaacgaatgggaagcaaatagtatggcttgtcgtgaataaaaaccaatttaaagaattttgctatcatgattttagctacaacttgcagtacctatttattatatataatcatgaatttgaaagaatctacatataatttttggacgaaattaaactaaatcaaatttagccaccatgtgaaagcaaataatagctttgagaaagtggtttacctgaatttcatggtctttgaacagcgggtgtttaaaggttggctgttgattgacgtcaacacaatcgtatatatcaccatcttctgtctaattttatgttacctatgcttgttagacatcaaacgatgcagaatacaccctccaaaaaagatcaatagtcttgcacatacctgaacagtcttattaacttgttgatttgtgaatgttagacctgtgttttctccactatttgtggatttgagctcctttcctccgatagtgagaataatatatgacaaaagggccactcggaaaatattgtttcctttcattgtggaaatcttgagtggtgtatttcatagtgtgtacaccattatatttataggttcataggtacaactagttgtttaaaatgtattatgctgcaatcaatgcaagatatttaatgcatttatttacttgtatagaaaatcctattatttattgcacaagatatgatatagtaacgaccatcataattgtaggtatcactggttccatctttttatataaatgcctaaattttaaaataactttgtttctcgatacgcaatttggatcgatacctcatttattgataagatggacaacattcaattaacaagggcagaaggaaaaggaaggggacaagtgtcttgatgttctatcaaggtttacatttacataatttgtaacatattcaaataaggtggtattaattttcttcaaatttatcactttttaataagttgaatctttcccgattcttgatttaaaattttcatgttagattcttcaaaagaaaattgtgttagtgtttgagttgattatgtgtataaagttagttacaaattaggatttggattggctttgaactttgtttgagatttactttaagctttgctttccatttttccctctctcgattttcatgatttggctctatgtgaatggattggattttgggacttgtgcttggacagcttggtgcattcttgctagattattgagtattagctttcaacccaagttcttttactcttttgccttactggttcattcatttaagtgagtgaaaacccaatcccatagtcgtatttctgcagctcttttttagagatcgatttgtctgcaccccattccattccatcgtgctgttattttttttcgcccttttctcatcaatgtctacccaagaggcctaatttaataacaatttttttttcatttttagttttttttaaaatatttacagaaataaactatcggccaaaaaaattataaaaatagaccctgccgcccacctccggggcggcaaactgacgtggcaaacgggggagggacgggcggtgacggagggaggtttttttgcaggaaaacccttgccgccctctgttggggcggcaaggggccccaatgcaaaaaagccagccggggccggccattttgcaggc

SEQ ID NO: 12908 - DNA, 14054 bp, Oryza sativa
ataagcttctattcatttctgaagttggcccgaccaccaactttcttcaaagagactgatcctcaaccaagaaaacatacactgtggcaagttgcatcagatttcactggtgggcaagcaagcataaaaaggtaaaatattagtttgtagtccattatatatagagccatgtgcccatgtttcatacattaagattggttgcatgaaagttgtgagctatgagcctaccgtggtactttttgctgaacatgttttagttttgcatacatgattattcttgtgattttttatttagtgttacttttgctagttgttccacttatattattatttgtttttgctgggatgaccgaaggaggtcatctaatgttattaagataggaaacacttattgaccgtatattaagataggtcaaccatttatattattattattatctactgacctctttattttgactactaaaatgaaaatgattgaaatgcaggaggcatattctacagtgtcaatcaagtttattaagcaagaactttgaaaagcttattcagtgtgatcagcgactaaattatttaagcctccaaccatatatgatagactctcctgttttcagacctaaaacggaaggctctatattcgaaaatccaaataaatcaaagagctatcatggttttagttacttggaaggtgaacatgaatcccacttatccaagtatattgatcatgtatcaccatgtgattttcctttaatgtctaaaaaggatggaatgaaggacgatattgcgaaccaacaacagtcattttctcgaccaatcaattggggtaaattattctttcctccaagacatggatgatatgtttatatatgacctactatatctatctaattatctaatattaaatgttttcaggagccagtgatgtagatttgcaagttgatgtatctcaagaactaaagagccctcaccccaactcattgagtcaagctagatccttgtccatagatgacttgttaagccatctagatgattgcatagttgagcaaaagcctgcagggaataacccttcattgcccattagtgaggcatcatccaatgaattgttggagaagattacccagcagcttttgagcgactcacatgttgcaccagcctcagatgagaaacgggtgatggcaagggttggttctcttctttctctgcttcagaaagacgcagtgccagccaatttacccaagtttgagcccaatgacagcggcaagattggtgtagttgaagtgggaatcagctcagcacttgatatgggaatcgcaaatggcacaaaccctcctggcatctcaagaaaggattcctacgaggagcttttgtcaaacttgttcaacatatcagaggatttcgatgactgaagcaggttggctttgcggttctcattccaagaattagatatatgctatgcaaaacatgtaaatatgagtgataagttagctccttcaaaacaaaaaatatatatattttagcatctcctttgtaaacttttaaatgattcattagattgcgttgcgtattcgttagttcattgctgagtaattttattttgcaacaatgaactgccaacttgttcacattcatcatttcaaaagggcatgcatttatgtgatagtactgttctcaactagcacttcctagctgcatgtaggcttcaactgaaggtgatgacgagtgcatgtatgctgctacctgaaattacaagtttattatgtttttgttcggaaatattgcatgggttatctagtgtgggagtttgttgaaacaacatgaatgtttggaatacaagctatatttcctcagtgtctcctattataaaaagtctgactatttttttaaaaaaaaatgtgcaagagctaataaatgtggaattaactataaaataaattgtacaaactgttgatatggttcttaaattgttatcctaatttgaaatcatcttgttacttttaaactctgaacatcaataactaaccataaagtacactatttactgtagttctcatgactcatatctgaagacataagtttaagttgtgatacccatgaattagatttgaaaggattgcattggattcagaagcattacgctatgtagcaaaagagctcatgcaaggaaaaggagtcttgcaagagctcttataacatgtaaacacttgcatttaaatagaatacattacaagcatctcgcatacacttgcagcctagaaacaaataggtacagcaaacagaaccccttcatctacacacaagccataaaataaaataagataaattgaattttacacaagataaagacatctgggaatactcttaaactggtatccgaagatgtgtagaacttggaaccttgataatattacttaatctaagcctataaggtatcaggtggtggtgcttctccctcctcatcaaaggcttcattttcatcgagcatgttcatcagcatagatacctgctcatgaagcatggaattttccttctctatctccgttcgcttcttacgctcatctgcgagctgcttttgtagaagctcaagcactcgggagtcttcttccaactgttcattcaggccattgatctcacggtcctgccacagcatttccatgaatataggagtcaatgtatgcttcagtgagcaacaaatagaatcgcatataattcaactttgggtttaactagaccaacacacgtcgtaaattgaggataaagttagttttttcaagccttgatcatcgataaaaaaaaaggaaaaaagtataccaaatgcatcacgatattgtgctagtatgtggtattgtggtacggtagcaaactattaaaaagatcatgaacctttctgttcatttcttggattgctatcctcctcatgctctccaccacatcaacattcacaagcttgcgtttcttgccaaccagccatcccttgggatatgacgcgggctcaaagtctggtggtgggagcaacatttcagcagaactgcgcttgccgttgattggttccaaaggctcaaacagcgccttcctcttctcagataagttagcttttggatctggatgaacatcgtcgtcagtacttactgcatttgcatcatctattttcatggcctcttcatgagcctgattgttcagttgttcatcagcagcctctttgttaagttcttgttgcaagctccggccattggctggaacatacatattgttagtcagattcaagagtcagtgcacttctctagctaaaatctaatgcatacaggtgaacattataactacatgattatatggaagttctttaatttcagagtgtgttctgctatcatgacagcctgataacttgttagcatacatcagctcaagaccaacgaacggtctctcaatgtatttatattgacatatgtagaccatccttggtgatgaagcaaagtatcaaggtacaaaaacagcaactatttggaacatgcacaattaaacaaattatctcctgcaagttctatgcattgacaagccttacattttcaagagcaaaaactgattgatttactttggcctaaggcctaagctaactggtcaacaacacatgttcaaaaaaaaaaaaaggttcaatattgccacatgcaacgacaccctaaccttatttaacactgctaactgctaaggtcgacaacatgctatttaatctgacactctgaccccgggaaaaattattgcacgtgaggccataattactgtatgcgaccaagcaagttcgtctatgtctttgtcaataccaaaattatctagatgcagttgcaacttaattgggagttgaccaaaagagcagtgaaatcatagaggatacatgagcaacaaaagaagtagcagccagatgcaccaataaaaaatctcattccacaaagcaaggcagtaccaagttacggagaggaatatgatttgtttctgcaagcatattcgcactagcactggtaagctacctagcaccgacaggtgcagtttcagaatcttggcggtaaagacaagcaaattaagcaggccacatcctcttagtttagttatcaaggcgcctctaagtcttaatcctcatgagcttgcaccaaatggaccagccaaaccggtgcgtgattaacgtgtacggaataataattatatatcgattcagtgagctggcaataatttaatcccccacgaaacatctcactcagaaattattccatgctaccagctacagtacgtttagcagcaggaaatttcgaggatactaacttgtaagtagccaagattaccagtaattaggtgtaaaaccgtaaatcaaagtgttgtatggttcatacaatttttttaaaactgaaagaaaatgcagagaagcttcgaaagggactgaatttgaagctagcgagatttaatcaacaagagattatgagagaaggaatggatatctcatatctgagcagagcaagaagaagcaggagtcgaaatcagcatgatttacatttgaatgaagcatgtaattaacaaagcacctgaggctgatctcctcctcgacttccagaaaatccgcgggggatcagccgaggccggctcctccatggcttgctcttgctcctcctcctccttcactgcagcagagagaatcaaatcacacaaaatcagcttggcctttgatttctcctcacctccatgagcctcttgagggggtgaggctctcgactggggaaacaagaaccacaccaaagcaaaaacaaacagagagaaaatcaaaatcaaaatcaaaatctcacctcttcttcttcttcttgattgcgaagctacctggacccgttctatctgcttgcaacctgagctctatctctctctctctctgtccctctctctatcaatctatgggtgcgtgccttgtgagttgcgttatcttgtggttcttggctgaggagggttgctacttgctaggacggcgagaagagagaggagaggtgggtcaccgggtcgccttcgccttggaagcaactcccgtttgtttcttgaccgtctcgcgtgccttcgtctccgaccgcctttggctttttacttttgaagggacgcagagagcgagggcagtgtagtgtgggggaaaggctgaaacggcgttggcgcgcacggggggcgttggcgttggcgttcgttggttgcggtcgcgcttggattacccgccaacaacctcctctctctctccggatcctctgtggctgcttctgtgttgtttgtgtccaatcctctttcgatgagatactggttcttcgtcctaaaatataacaatgtattaaatgtgatgtccatcttatttaaaagaattttgtgattagtatttttattattattagatgataaaacatgattagtacttgatgtgtaactatttttttataaaaaaaatcataaatatttcaaattagataaacggacagtcaaatgttggacacggaaacccacaactgtacttaaaatgaggcgaatatagtattactgttatgaatctgaatactatgtccagattcatattgttaggatacgtcatcctttcgtttatgctcttcattctaggaaaaaaaataaatttagaattgaacttactaatactcctttcgtaaaaaaacaaaaaaaaatcaacttctagagtttgaattttgtcccacaaaaattttactatcctatctaccctcagcacgtaaaagaagaagttttataccttcaatactctttacctacctatcacatttattatttttttattgattaaggacatcttaatcactcttcattttcactaatttcacctcgggatattaggaatggatttttttttatacggagggatattaggaatgaattttttttatacggaggaagtacatctaatactaaattcgtttttagtcggaagcagtactgtactaataggataaaattggagacaggccaccagcagccgtgcaacccaaagctgctaatcatcatcaattccggtgtactggcagcacagcgactgacaccggcatgcatggaaggatgcaggctatcaatgcgagagctaccgcatagccatgtgaacactagcattggatttgtaccaagccgcgagtacgtagtactactaccgtccttctctccaaccttttccatcttgggggcccaacactcactgcactgggccatatctgagcccaatacctcaaatagtagttttgaggctttggctggcccagttaaagacatcagaattctcttcctcaaaaaataaaaaaaacaaaaaaaaaacactaagttatgcattgcccagtgcccacgctgctacaatgactggcaaccaatagagcggttttatcccctgctatggcaacaaaacaaggcacacggacatgtcaaacgatccatctcactatcaagacccagagattgctaattacatcatctaaagcagtcaggtaaagaaaaagggactatccaactccgacttgagccataattgacccagaaaatttctaccaacagattattgttgagacctcaacctcccaacctacattgtatcctaaaacgaaaacctgtaacctatatcatggttcatccggtacaaatcgatgctgctgctactgatcgttgatcagtgcaacgtcaggccttggcagaatcaaggcagccaatacactgggaaggctcagcgaggccgtaaatggcctcaatgcagctgctatggaatgcatggtggcagcccaggacggccgcgactggaggagcattgtcgcgagcatcgtcaccttgaggcctgaatgctatatcgagcttgcacagctggcaccttgtccccaatggctcaactggtggcgcctcatccttgtccgtcagagctgaaatcgcaacgaagaaaatgtgatttaagtcaaatggttaagacggacagcaaaaaagtaatctttgccttgcactgaaactgtgatgaagaactttacctggtcctttgatgtggacctgcggttgtgaatttgccgatttaaattgctgcagcagctgttcttgctgcttgatcaacaatgccttcacgttcgcgtaagcaggatctgagagaacattggatgacgagcccttagctttcccgatctctagtttcggtgagaccaatggagcagttgcaccagcctggccactgggctgtttcctagcaatgagtaacttagcaagcttcctttgaagatcatcttgcaagttttgtctgggagctgcaatgaccggagaaggcaacttattgtgtgcagcaacttgctgtgctctgttggcaatagctttggcattgactggagcaactggtttattaacaaggcttgttctgttgatcatagcttttatatttaatggaccagctgagtggttgacttggtgagttctgttgggtatagcttctgcagtgactggaaaagccgacagattgacttggcttgatccgctggcaatagcatcagtagtgactggagcaacaagcagatcagcttggtttgttccataggcaatagcttctgtaatgatatcattggaattattttttgtatcaagctgcagctgctgtgcaagttcagctgactgacaattgtcatttgtagtagcaggaccaatttttgaggaagcaatgacagaactctctccgctttcagtctccaacttaaccatagacagtggagcagctaatttaccgtccttatttctgatagttggtttcctttttggaagtacatcagaagggctcttgcccgtttgcagcttctttgatggagatgggatgactgccccatccaactgatcacctttgctcgcgctttcttcatttctctttttgcctggaataaaataatcaaaatttggattacaacatgaatgataaaaatgagttaacaaagcatctagtaagcacctctgtgaacagttgggctatcttcagcagcttgagacgaagcaactctggagcgcttggcagaaggattggttgaaggaacgcttgcccgcttcaggtcttcactcataacaataggctgggtaaggggcttccaagcagatgaagccactttatgaggggtgcggacacgggttacagatggtcttgcagcagcagattgggtgttaaagcaagggtctgtagaatctctacgcttgcttgtactagcagattctcctcccttcacatcagatgaagcagcagcagcagcagtaggcttacgggtcatagaccgagtaacagggcggaaaacctgatgatgagcaggtgtgctgcaagatggctcagcatggccagcatcgctactcactgaaatggaaaaggaaaatagaagtcagaataaaccatccagaatatcctttggatgtaatatcagcagacattaacttgaaagaaagtggccatttttaataaaacgggtaaatcttcctctaaataaaataacaaagattctgagaaattggaactctgatttaaaaatactccattcttaagacgatatagctgatcctctaacaaaggatgacactcattgcagattaattcagtcaacggcaaaatccagtgcgatgcagaactctacacaagagagaagcagcacacaaaataaagaaattaacccatctagtaagttgtaacatctcccgaaaaacaaatggccgcgtacaacaaacaacatgttcagaccaaattgttggccactcatgaaagtgtagcagagatatttatcagtggaagcaaaggcattgtagcaatgaaatctgactaatgatttgatggttggaacaaaaaaagttcccagtattctggcatctaaattatgcacatataatgcaccaacagaacatattacaactttacaaggcagggttacaatgttacaagcagagctgaattcaaccacaacattagggaggtttacacctaatatacaagagatacatgcacaattctatatcaggcaaaaaaaaactggggaaaaagaggagcacatcaacatatagcttccacatagcacgtgcacacttacatttcaacctaaacaggaccgaaccttcaagggaaaaagagcagtttgattgccaccaattaacagttcatacagccaattctcaaggaacagattacatttctttggaaaggaaacccagcagcatgatattttttcttttagtgaaacagaccatcaaaagaaaggcatttgattatgtagctccccaatccaacacaaataaagaaacacctgcccatctttacaagattccatagcataacaatcaaaacaacagcagttacttctgaattatccctacatagcggccgctgtggagccgcgtgccgaattcccaaagccaaaaaagaaaaaaaaattctggcccggctgcgtctttcctgatgacatttctctactcccagtactaaaaccactcgattaacgcgacatcaggatccgatcatggatgattcgagcaatccgtactcaagtcgcaactaaaccgtggggcacatctacgcgaaatcccccccgaaccaagaaccggaatctcccgaaccaaagccatcaacacaacccaacaatgcatcggaattaccaccagcccgcggccgcaacgaatccacgcgaaccaaacatcctaacaaaaaaaaaacacgaagaacccccacgcggaggaggattgggcgggggggttctcaccattctccgcggcggcggcggcggggggagggggattcggggccctggaggcgcgcggcattggattgggcgaatcgggggcggcgcaatcgcagggagcacgaggagaaagccctaatttattttttttttctcctcctcctcctcgtcgttttttttttttcttttcggggaggaggagaggggggaggctttccgtgtcgatggagaagggagagaggagggggttagaggagaggaagagagaagggaagagaagagaagaggtggcgggttatataggcttcgggcgtgaggcgtacgagatgggcccacacttcaggcggaggcggcggcggcggcgtggctatctgtgtgaagagacgactcgactcctctcactcctctcggctcggtgggtttgtgcaagtgctccttagagatggagcccggatgtttttttttgttttgtttttaagacaatagcccggatggtttttgaagtgtgttttggatgaaacaaactcaaggagggatttcggcctcattttcttcgcttatattttatacttaagaagatataatttgaattttcaattttaaatttgaagttgattttgagacttttcatcgaagtttattttcagcatttacttttagatcgctaagaacatatatagaaaagttttattcacaaattacttctttatttacaaatatgtcgtttgccttattccacgaataagctaaaccatgaggccgttttatcttctgcactgcattgtcactgtgtgttgtattttggtgagatcaaatattattattagttgttttacattcacatatgtaattatgtgatgtcactccggttgaaattctacgtcttgttacattttaataagatagattattatttttattatgagataattcaagaaatgctattgacaaacaccaaaatttaagagatgctatcaacgagtgcaagttctacaaaatgtcattgtacagtcaattttatcccataaacgccatcatcattggggtgccgttcatctcgcaccattaaatgaattgttcatcttatagcacttaatgagggctactaatggaaccctaatggtgatgttttttgggacaaaatcacttgtataatgatattttatggaactcataattgttgataacatttcttgtaattgaatgtttgttgatgacattttttggattttctcttttattatagaagatgcaattaaagttctacaacaattacaagtagtacaacatataccaatggtgtttaaagatatatgcaacaataaatgttctagttgaagtgaaggtccactttcttaaaaagaaacttctattaagcaatagaagtttgtttttgaataagtgtttaaaggtatcccaaacatctaattaattaaagaagtgttttcaatagatgtttgggataccaaatttaatattgggtagagatatcataggtaacatgatagatttggttttgcttttatttgttgtaggatggactaggtctattttacaaggcatgcaaaacggcaataaattataggctcatatttagctgcgaggcctataaaacaccttgagcaacgagccattttgatcctaagagtaaactgcattctgcatctgatattaaggctgtctttggttatttatcatttattacaactttgtttttcgcaatggcaaggattggtcattgcctaaaattttggtaaagattagcaaggcttttgtttggtctcctattaaagcatgcaatgggctaaggcaaaatagggcaaataatttaacaatgccatttaattgattccgactcccaaacctgatgagtaactaaattttttgtttgccaattatgagcatgttaagattgggttacaaatcaaacatatcctaagcctaccaatatacttagaaaatttcctatatagccttaaaattttaacctatccctttgatgcatcttgagttttgttcattttcttatctacattccaaaattagtttagacttccataccattttcattagttcactattacctctgtcccaaaataagtgcagtcgtggaaatccgtgtccaacgtttgaccatccgtcttatttgaaaaatttatgatttttttttaaaaaaaactagtcacacataaagtactattcatgttttatcatctaataacaataaaaatagtaatcataaatttttttcaaataagacaaattgttaaatgttggagatgaatagtgcaaaactgcacttattttgggacggagggagtattaactgacctaaaatttttaagagaagttcattatgtcctttggtacgaagagacatataattataatttttttatggagtgcgttgttggagtatcaaaatttgttgtatgggactattatattatatttatgagcttgtgtatgcgagatattatttatgacacaaaatagaggtggcataaaaataatatttatttttcaattactaaaatttgtatatttcgtattttgtacagcagcataactttttatatggagtatttttttcaatagtcatagaggcagggtgtgcgagtggtgcattcataggggtgagtgtgcacgcgttgcgagtgcatgcgttgtactgtgtttctaaaaaaaatcattacaaaaactctatatttaactattttcgagggacaaaaatgtaaaacgtaaaatcagggtcacaggcggaaagccagtgaactgttccgggccggttcaggcctgcactgggatgagatccggtctgcttgcacgcgcagcccaccaaaggcccatcaagatcaccaaaaggcccaaacatgactccggactccggagtccgtaggccccaacaggccgcaaaagaccaatcccagaagcggcccaccgaaaacgtggcgagtggagaacccagatcgccgccgcggccggccacgggcgcgaaaccgatcagccatggcatcttcctccggcgaatcgccgggttttcaggaggcctcgccgcgccgcgcatcctcctcgtcggacgcgatgccttctccgacaaccactaggtgagtcgccgctgttttttccccttaatctcaggagggagttggggttttggtagtgcgtgcgggttgcggcggcggggatcgcgagagggtggggggggggggtcggcgattgatttagggttcttaggctatcagcgctactgcctactgcacccgtcaagtatgattcccgtataaccgtattagttacgcacgtgacatcatttcaatctagtatgaactacctgtactagtacccatcaagcaaaagagtaccaagagttagctttttcgctggctataactaattcataatagagattgtggtaacttttatggcagttcttccaggctatctgtgggcttcatcaggactactgtaaaatggtccagcgaaatttcgctttatgtcaggttatcagggcttctttgagactgtaatttggtcatgagaaattcgctttatgtcaggttggatgctgcaaattatcgaccaggacattcattgtccctatctgttgcttgttgtctgcttagccgtgattttttaggttgtcaatgatgataactggagtatcactgaaggatgatggtaaagatcgttggagtgtcatgtacaggcccttgcagacatttcggtaaggtcctcctgttgctgaaaagaaactgtctgctcatgttattatctccctagtacttcgtatctgttggaaacttagactagggaagacctgcatacttataaataaaactaataattctgcattggtttgttggaatagaaaaagctgcagtgctccattccattattgcctttcagcctgttcataatatcccacaacaacgatcattaatgttgatgataccataggtgctcaaattgactaacaaagtcttccttttctagaaagggaagaactcctagaatataaaaaaagggcatgtttacctgtatgttgaatcaagttgtatttttctaccacagaatacgagcactcttaagattcagttaactatgccctggtttcagactgtcagttgagttcttcaagaaaattcctcaaagtaacatccaataaatttaccgaaaaaaaacaaggtaattgctatcggtccataactaaggtagttttggatttaagcttcaatagccacctcacatgatctttcgatctctgatggaaaatatgagagcacatcaggacattttgctatcatatttgatgtatgaaat

SEQ ID NO: 12909 - DNA, 649 bp, Oryza sativa
gcagccctacaacagcaaattaatttaattaaatttaacatagaatatattttgataatatgtttgttttgtagtgaaaatgttattctatttttctacagatttggttaaacttaaaaaaaattgactaagaaaaaaatcaaacaacttataatatgaaacggagggagtaatactcagggacattcatcgtctgctgagcaccctcctccctctgttacatacggcatatatcaacaatatcaattgctagttattctataggatacaagtatcatgttccaaacttctatcctatcgaaattagtacacaggaagacatgtggttgccattatcttagcaaacgcaaaacaacttaaccacccagataagattacgcactttcatttactattattagccaataaatccatacacaccttacgatcatttgcttgatcagcatgtccatcttgtgaaaaatatgccaaaatcaagttccccagaaaggccccaatatcgtaacccattagaccatagaaagcaaattctggatcaatcacttgagtagaatctggtgtcaccatgatggaactagtgtggagatctccatgaagaaaagcttatactctctcaataaacctgcatatgcaaatcatgtccatcatc

SEQ ID NO: 12910 - DNA, 705 bp, Oryza sativa
tgcagcccgttctttacacttagcttctcacaacataatatcctgaagagcctccaatttaaccatttatgacggttttcagtcatacttataatcgtcaaaggtggtcttctggaacatctcttttaggatagcacatactgatatacatttatgaaaaaaagtgctgcatcaaaattggcatcagaaacctctactttggactaacttactgtgcctttgagcttcttacatttaaaaagggcaagtctagtatatcttcatagtctacacgtaaataatattcaccaaattgacttagtagtacagactctacataattgtactgtttaattacctgatcatttttgctgaaccaaatccaagactgtcatgaaataggcttgtcatgtacttcttctatacaaagctcaaaagctctgagctgttgtatatatggggcagatatgcttccccattcccatctttgtgtttattccataattcgacaaacttcttataaaaaaaattccatgaatcttcaattgtcttcaagatccatttcttgtaagcctgcaaaatatgtacagacatacaacttattttatgcctggcgaaacatcatgaaaataccttctagaatctagatgttgcaattgcactttaccatatcataacttatcatttctgcagtgcccattaagtactccctccatttcatattat

SEQ ID NO: 12911 - DNA, 717 bp, Oryza sativa
acaactagtacatctgatcagtgaatttcagaacactgattacttgtaaggatccaatggaaggatgcaagaatgttcgtgtttgcatccttccctcttattgcgatgtgatatcagattgttgtcagcaatgcgtcaggctgagatttgcggcacaaattggtaggccgttttccgtttattgaccaacagttacaaagtttggaatcatgcgatctgaacgacaaaacgctgacaaagttggtgatcgctgatcagttcagttgccaccacctccgccgccgccgccttcttcagctgccacagccgaaggcaacgccgccgccggcggcctgaagcccggcaggtcgcaggggatgtgcggcacgaaggggcagtgctgcggcgggtcggcgtagaagcgggcgcactcgagcgccggccgctggtgggggaagttggggatgcagttgaggcgcacgtcgagcaccttgctccggacgagctcgaggcaatggcggcggccgacggagtggaagtagttgtcggagagggagaggttctgcagcttcccggtcttggccagcgcgcaagcacgtcggggatgtggccgtacagctggttcccggcgaggttgagctcctcgacgagccccaggcagccgagggagagcgggatgggtccggtgatgtcgttgccgccggcgtcgaacacggtgagcccctcccccaatccgat

SEQ ID NO: 12912 - DNA, 689 bp, Oryza sativa
ctgcagccctgtgtgagcatcgatggctttgaggatgtacctcaaaatgatgagaaatcacttcagaaggcggttgctcaccaaccagtcagtgttgctattgaggctggtggccgcgagttccagctctatcattcggtaaatgaacttgcagatatcaccccatgcatataggaggttttggtcgtaacaactattgatttttacattacagggcgtcttcagcggtaggtgtggcacaagccttgaccatggtgtggttgccgtcggttatggcactgacaatggcaaagactactggattgtccgcaactcttggggcccgaagtggggtgagtctggatacgttcgcatggagcgcaatatcaatgtgaccacggggaagtgtggcattgccatgatggcatcataccctaccaagagcggagcaaacccacccaagccatctccgactcctccaactcctccaacaccacctcccccatccgcccctgaccatgtctgcgatgataacttctcttgcccagcgggcagcacctgctgctgcgcattcggcttcaggaatctctgcttggtttggggctgttgcccagttgaaggtgcaacctgctgcaaggatcatgccagctgctgcccgcctgactaccctgtctgcaacacccgggctggaacctgctcagcggtaatct

SEQ ID NO: 12913 - DNA, 1103 bp, Oryza sativa
ggaaagagcaaaatcaccaaaacagcacataaacaagcatgaacagtacatgtggatatttttaacatgtagatctcaattttagaaaaatttagagacttgaaccaactaaatccgagctaagatgaattagttatgaatttttgaagattaaatcggattaaaacacttatatggattttaattgaattatgacgcaataatgaattatttttgaaaaggaaaaggggtttattgcgtcagcggctagggtttgcggtggaccgggcgcacggcagcggttcacgggaacgaacggccgagatcgatccatccaaaacggacggccgagatcgatcgggtctacggcggctcacggcagacggccacgatgacgtcagcggcgacgtcactccggcggcggctcggcggctcagcggctcgggcgcgcttgctcgccggcgaacgacggcgcgacgacgcggacggagggcaccaggacgtagagcgcggggcggcgaactcaccgatgaccaaaacgtcggcggaagatgaacggacggcggcggcgacgagaaagaagcggcggagaccttcggcttgacgacgacggcggtgctccggcggtctacagcgacggcgaaggggcggacgaggacggcggcgacttggcgaccacgatggcgacctccccgagcgatgacgacgaccggaacgacggcgaagcacggctggagcgacggcgacgactgcggctcgaggttacacggcgctagggcgcttccgacggcgagagacgaagacaatggtggtggcgggtagcggcgacaccggggatccttttataggggcaaggaggcagcggcgaaggcccacggcgaccggcgacgcgaaagaaacattggggttcggaggaaagagatcgatccgattcgacctcgaatccacgaacttccaaagcgatttagacgatgattccaaaagagaaaaggtagaggagatcccgaagattgtttcccctctattgatttcaccggatcgggaaagacgcggccgaatttggaaagcggcggcggcgacttggcgctagggtttcgggcggcggcggccggaggtagacgaag

SEQ ID NO: 12914 - DNA, 2103 bp, Oryza sativa
gtatttacctaaaaaaaaattactgtcagtacataagaattacgttaatatcataaaataataatgtaccataaataattacctggtggcagcctagggaactgatcaggatacttccttattggacttagcagaacccggtggtcgtgcactgaccccgaccatccagttacatcaaaaattacacggtcgctccagtctgacatgaccaacacaatttgggtagtttcacctacccggttatggtactaatttgctaggtgtgcagggacgacaacttgcacttttgttcatctatggctccaatagagttttcaatttttttttacctatcattatagcggacacatggatgggtagtactggaagttgggtccaccggccgaactatatcacctgccatacgggctatcgctcgaagcaatggtaaaaatatttggaaatagttgacccgatctttcgaacctattgtttgctctcctattagcttcaccccctgacatagttcacaggaaaatgctaccgcttccgcttccagtgcgctaacctcataagacactaagttgtacttgaactgaaggatgtcactagcctaggtaaaatcacctaatcaggtcacatacagaacatgctcctgcaccgagcaatattttgtaatgtatgcatcacccactgttggccagtcagtaggggcacgcgacgtggtgcccttttgcggtcgtacaagtccagatgtaatgaatccttcgatgaaatcctcaatgtattcttcgatatcatcgtcggatatctcccccatcgaacatttagaatcatcgctgctcctagtgctcattgcttcagaactgcacagatatgattcatacagacacataagtaatccaaaatcaattgttgagctaacacatataacattgtgaactggacgtttcaataaatctaaaatgcaaatgtgaactagactcatgacataaaattgttacaacatgacaatcgcagcacaacgtttgggaataaacgaactacacaaatccaaatttaactagacgaaatacacatctctgcggcaatactcgcacgtgatcagaaggtagtagtgccgcgagaaactactggcagatattggtgaggtaaacctattggagctccactgcagagaagcaaggaatgggaagctagcagaagattagcgatagcgcggttcctcatctacgacgcttctcattgcacgcatgtcctctgcctatcgcttcctcatcatggaaaaggcgatcctttctcattgggtgtaccgcctcccatagatagaggatacaatctaaaatagttgaatctttagttgttttatatttggattcttacattgtaatatacaacttgaattatatctggattcttacattgtaatatacaacttgaattttatgggattttgatcgtagagtttaatttttttcattcaaataagctggatacgttgttgaatataaaaacacctttttttcatgtgttgtaatccaaataagtaaataagaccaatcaaaaaaatttcattaatgctttctttgtatgaagtaatcttggggcaattgtttatttgatcctattttaaagtctaacttccaatttaaccctacttttttagtttgcttatatgacctcgttttttccaatcaaaaataaaaggttgacgaccctatttcgtgaagacatgataacggtgttaactaaggggcgaattgtcctggttgcccttgctcatatgacccaaatgtatcaaagttttttttgtttgttttgactttttaacataatttaacgagcataactttgatatattagagataactttgataaatttggattcaatttgacagatttggctcaatttgataaatttgactttaatttaaaaaaatgacataattatggcagatatacaaaatttggacaacttttctcctatttgtccatcccaaatccaagtgatattcatatccaacataaaatttctgtccaaaagcatgtccatcactatgtgacaacacatacaagtcccaacatcacaccaacgaccaccacagccatgctgggcttgggatg

SEQ ID NO: 12915 - DNA, 650 bp, Oryza sativa
atattcctctatcattatatttgccaaagatatgaaaaatagcagtagttggacatggaaaatcagacttagcaaataatttctccttcaaattatcgagctcacaaaaatcatcaaactgaacatagccaaagtatttaaagaagatagcaatttacgttcctcaacttcattagcaatgtgaacagcatgcttaatatcaacacacaaacaaacactagaaatagcatgttcattcactagttgtggcatgaatataagtgaagcattatcacacaactcttctttatcacaaggaacggcgagtaaatcaacttgtgacaaaggaattccagcatttgattccactaacggttgctctactttagtatgaaaagtggacaaatttacttcgttaacaatgcactcaccatgattaattttattaccatttactttacctttgatgtcctcttcagatgatggaggtgcctcgactttgagtgtgaacaatgggattggcggctctttcatgtctctctcctctattttactttcagcattgcaagcaagttgtaacaaatgagaaagagatgtatatctttgacaatcaagcatgtcctgaatttctttgttaagcccacataaaaaccttaattctttagcttctt

SEQ ID NO: 12916 - DNA, 1896 bp, Oryza sativa
ctcctctcctccacttgtgcaaactctttcttcatcccaattcaattccttgattctccacccacaactcacctatggctggcaagtccttgatcccatacattggctcctcctccaattctacctacaatctcaatggagagccaacaccggcgaatcaattgatcccggtggaacactatatgatggaaggggtaaacgcactgtggacacagcctctcgcaacagtgccgggctccctgcaaatttggagcccgccggcgagctccctagttcggccgaaccctcctcggccccattcggcagcgcgatccctctcccctcgtcatgtcatcaagaccaaaatccggggggattcgcctgcgcgacagccgacaccgggagagctcggtcttttgaaggccgctccgcctcccgccgagcgatatgtgggcaccctattcaccaaggcaggggatgaggtgctccacaagtacaccacacccaccgctactccatccactccaaaggaggagcgattcggcatcatgggagtgcgaactaccagcggtgggtatggcaaaggtttactccggcctttgatggcatcggagaaggagggggcagcggaatcccgtagccctccacctatgaaggtgaagcgtcacttgacgccccctccaatcgtgaggactcccagccaattccaagaggatgaagtaaagtcaccggagccctcagtccaaaagctcgccgctcaagtaaagaaactccgcaaggagaatatagagcttagggatcgcaacgcggagctaggggttgaactcgctgaaattagaaataatgttgatacccttagctgtggtttgtgcgctaaaatcaagcgtgcattcatagagatggggaaggaaaataaatattatgctaattagatgtctcctttcccataaataaaatggtagtaggtgcttggtttttatttttccaatcatgtaaagcacttactatgaataatgtggctcattggtgttaaccccaatggttgccaaagttgttttttgttttatgtttaataaagttcaggttttgaataagtgtgggggagatattctagcttctgacgtgcatatactctgaaaaattgctgaatctctgaacacctggaagcactcaactctgcagaaaactgcagagggattgagcaccagagtggttcggccgaaccaccaggttcgaccgaaccaaagctggcctcaatccctctcaactttcataggtaagctggtgagcacgtctattatctgtatatctccaccatggtatagtactagagctggaaattcaaaaaacaattggtccaagcataagtaaaagataaaatttccaattaatgaaaattttcatatgattgatcttgtatattcattattctcagctgaatttgtgcttgtgaacaaccctccatgtttagggaaccttatacatccaagtgattgctatatgtgagatgattaaagatgaaaggaattcttgcaactcttgttatgactcttgggaatttgttttcaaaataacatgtttaaaaaaagctcaatcctccaattgacttcatgttatacctaccaaggccatatgcaagagtatctttgataaaccttattatgcatatgactgcttggcattatattgagctttgtcaaattgatgtgactcgtgttagatatctttcatactctcacgatcaaggggtcaattccactttcatttccacatacatgataaagctaagcttctacactggaagttggcttcccacaaaaattccattcaaataaactcgtactttagactatgctttcttctcctagaaaaaaatccttggcaaaaagaaaatgagaaaaggagggaaaggcatgg

SEQ ID NO: 12917 - DNA, 697 bp, Oryza sativa
attcctgcagccctctcgtgtttcttcctggcacgcgatctttccacacacagcgagagcttgagatctcaccctaagcgcccggccgaaccggcaaagggggcctgcgcggtctcccggtgaggagccacgagctccgtcatctggcgcgccaggtaggggtctcagcgtgtgctttctgagctctcagactcttccgtgtgccccaagtttttcttgttcagcctaatggccgagcaaggaaaaacgcacgacatctcgccgagtgtgagcggcgacgacggggagccgaatccacgccgtcgagctcgtactcctccacctcctccgcgccaaagtcctaagcagggggaggcgcttgagagggtcgacaaatccgcggcgtcaccagccgcaggtgatgcaggagaacggcgagatggggagcgtcgcctcctcgtctacggcgacggcagcacgcctcagggcgcgcttcaggctgctggcgcgctcctacgacacccgcctgtcgtccatgacccggagtctccagcccaacgatggctggaagacgtggccaacttggtcatgacggctcagcagcgcttgggtgctggtggacggtccgccaccaccaagacctccggcgccgctaccaccggctccatgtcgtcaaggcggaaggcgcggcgagcggcggcggctgcacctcattcgg

SEQ ID NO: 12918 - DNA, 649 bp, Oryza sativa
atcagatacgcgaggctgctagtcgactaacgaacgcaggggtagcctcttctcagggcacattccgacccgacagagagaaggatgagctgtcactcgccctacagactcccgagcatccaggacgaacacgagggaaaggcgtgattccctagaatattggatttaaggaggacatccacacgtacaggagtcggatgaggagcaagagagataccgaggcgaagattgcagatcttgagtacaggatatcgagctacgagttcagcatgcaagaggaggtggcaaggaaggtggatgaacgtatggccgcacatcggtcccaagatccccagccgtacattcatcctgcaatggtcagcccatcaggcaatcgtagcagctgcgcctcaacggggcaggtcggatcacagagcatggacgccatgcaaacccaggacgaaaccacctgccccattgatgagatcacgcagcggacaccatgtgagctgcatattcccttcaagaacttatcaatcaaggtatgctcgtagtttgatgatttttgactagtacatcccgcaagttgctccttaggttgattaccaatagataacctctcatcacttgaaggtggcgttgggaatggccatctcaacggaccctttcg

SEQ ID NO: 12919 - DNA, 947 bp, Oryza sativa
attccatgaacggtacatggaaatgagcgccaagggtagagagatgttcggagcgaggatcagaaactccaacttcttgcaaggagaagatgttctctggatccatttcaaggatctcttcgatctgtaccagttggacgccatcgacgtctctcttctgagcgcatggattttgtgagtatctttgagtcgatttgtttcgttcaataattagctcctggcatatatgtaagcaataatactttcttttcattgttgtagaatggagatcaaagggcccgatggcggagggtctgcgatactgggttcatcgaccctcggaaaatcaacaccgaaatgatcgacaagtacgagaaagacacagaggacaatctcgtccatctcctaacgcagcagcatttcaagacgtacatactactgccgtacaacacagagtgagtttttattgtcgctcgaacaaatttcgttcccatacatatagcatgtacattttcaatcatatatatctcatctcacgcatattccagattccactgggtcctgttattcttcgacctggacgcatgcagagtcactgtgtacgactcaatgaataaagagaagaagatttttgccaaggtcttcaaactgatagacaggtaatataatgccatctattccaaagtggcggggaatctatggctattatgttgatctcaggtaataattaattataatagcttgcaattacatattaagggtttgggatgggtccgttcaattggtcgcgggacttgaaaaaaaattggcggaggtttcattttccaggaagtactggaataatccaaaataaaattgaattgattttttaataccggttaaaataaatagaaacctaatcttttcttggtttttcaatgaagtgtgcaaagcaggaccaggaaactaacttatgcggctactacgta

SEQ ID NO: 12920 - DNA, 525 bp, Oryza sativa
taaacacttttccaattgcgacacatggaacacattatggactcctgccaaagattgaggtaactctaactgataagcaacctctcctcttctactgacaatcttataaggtcccacaaaacgcggtgccaattttcctttggtgtgaacacgatgaactcctcgaagaggcgtgacacgaaggtacacataatctccttcttcaaaactcaaatctctgcggcgattgtcggcatactcttatgacgagactgggccacacgcaatctttcttgaatgatctttaccttctcttctgcttcccttaggatatcagtcccgaaaacctgacgttctcccttttgatcccacaaaagcggagtgcggcacttccgaccatacagtgcttcgtaaggagccatctgaagactagcttgataactgttgttatacgaaagttctgcataaggtagattcttatcccaacttccaccaagtctaaagcacaagctctcaacatatcttccaaaatctgattcacccttt

SEQ ID NO: 12921 - DNA, 1052 bp, Oryza sativa
tggtttaattaaaagagaaggggaggagaacagttctactttttccaatatttttaaagggcttttatgggtaaccatttggcataacctagggtcaaggaggctttgataccaacttgtcacgcccggaatttctatccaaaattccaaacgcttacatgtgtgtgaaccctctccagaaatcagccgaggcacacaataacaaattgataatagagtacaattattactctaataataagcgaataaaatgtcattacagaggtagatagttcctctcaatcaataaagatctaagcagcggaaaataaaataaacggcgcaaacggttccactccacaggcagtttgacaagggctacacctaatcctccacaccataagcatcattgtaaaacttttcctttgatgaatgatggcaaggtgagtttatgacatactcagcaagtcacgcagcaaatatgcaagtgcacaggataccaaaggatggcatagtagggttcaatttgcataaacagcatttaataaacatttcaaaatttaataaaacagttaagtaatattaatcaatattaaaccaacgctatacaacataccctgttgcataggcccaaccattctgaacaaccatcccggctgcacagttctatctccaaaccaggaatataccattccaaaccaggagctaaccaaattattaccagttatagcatcttttattatgatgagaggtgtgagactaatcacgaaagacattgttagacccgcccataaccgcgggcacggctattcgaatagttttactctgatcagaggtgtaccactgtacccacaagacacagccccacatcatgtcaccatgtgcctcaataccaccacggtacctcggaaaggagctgtgacaataccctttgcacaacacaatccactacagcgcacctttcctggatcataatcacccccttataaacaaggcatggactcccagcgacccccgtgggcttatctccgccacttctcagtctggtgctccgcaatgaaccatgctataca

SEQ ID NO: 12922 - DNA, 601 bp, Oryza sativa
acggatccagcctcattgtgaaattccatcttattgagccgcaattgaagcaacaaggtgttgcatcacctgtcatggtcctttgggcttgtaacttcgtttgggaccccggcccaagtggggcccatgtggggtgcgccccaatccggtggagcacgaccctaggatcctcatggtcattctcccacccctataagtagctagataccccttcagggttgctggggttttgataaattgtaagtttagccattgctacttcgcttgcagcgcgcgtgtcggctagaccgtccgtctgcttgttcggaaccccactttatcatgtatcaattcatatttgtgcgtcttgtctatctagcaattcagttgctttctatcttgttcttgcttgttctcgattgcgtgcaggaatagggttgatctgcatcgacaagatcaacaacccatggagagctgtattgatcgctaaggcgcaacagaacgtcttgtacggttgtagtcggatcgtcaacgtttctcccaaatcgtagttatcacaactcaccgaaagatcgggccaacaacagccttgagtgtcgagaggaactcagggttcatcacg

SEQ ID NO: 12923 - DNA, 1392 bp, Oryza sativa
tgaaactaagaatttctactcgaaaggcagtaatacgagtaactggaaagaaggcaagacagaatctgtctcacaacttttcctagctaccgtttacacatccaacggtagaggtgtaccattgctttgctctctcttgaagagagaacgggaacaatttccaccgcacagtttcttgtctcatgccacgaatcttaaggcatgatcaaacttgttcaaagtctcgcagatgatggtagggattttctagatcaaagccagaaaaaggattttccctaaccgtactaattagttcaggacgaatttcatagccagttgtataaatgggcttcgatgaaggaggtggctcatagaattcgccccgaggagcagacatctcaaaacgaggttgctccatggtcgagaagagtttgacaggaatacttctctaggatagcaggggtgaaggtagactaaaaaagtaaaaaggatacaaggatgaactgggttcggaaatgatcagcaaccgttccccggcaacggcactaggaatgcttgttggtatttaatacggttacagataaaatctgcaaccgcacggatataccgaggtagcacttcccctacggagtattccaagggtatcgaatccaaatgaacgtgtatggtcagatcttcctccggttcatccaaggacacaaagtaaatgataggccaggataagaggatttactagtgagagacagtatctagggaaagcttaactttaatcctaatgcaatacttcagcactggcaacccgctgttcccagatgtcgctctagtacgtacccggaaagggaggacttaagtgatctcaagggctgtcaccacctctacacctacctcaaacgtaccgtgggatacgcagcaattaccggataacaattacttaaataccacgtctaagcaattaatatctactttagtgtttataactcatcaaagcaatcactatattttagttgattatagtgaacaataatcccgtatgctatttaggaactaaccaagagataattctcacaagataaatctaaattattcaagaagaatattatattgaattcagagtaataaatagaataaaagaaataggagaagattaccgacaactccggaattcttccgacttcttctactctactctcttcctattctagtgtacaatatagtacaatagagcctcttataattcagctcaagcttggaagtgtgtgtgagagtgaatgaagtgaggtccttttatagggcagttatgacggttgtgagaaggggaaatgtccgaactgcaccgcaaccgtcattgggagaacttctggagcatccacgccaaacccaggatgaacggtgatcagggggttcggccgaacc

SEQ ID NO: 12924 - DNA, 1364 bp, Oryza sativa
aagggcgcatccttggctagcaaattagtcagcggcctggctattgtagaaaagtccttgatgaaccttctataaaagccggcatgtcctaagaaactgcagattcctttgatgttcacaggaggaggaagctgatctataacatcgattttagtacgatcaacttcgattcctcgttcggacactcgatgcccaagaactatccctttacagaccatgaagtgtcacttttcccaattaagcaccaggtacttttcttggcatcgttgtaagaatttgtctaaattctgcagacaatgaccgaaagtctttccatagaccgagaagtcatccatgaagacttccatgatgtcttcgatcatgtctgagaaaatagacatcatacatctttggaaagatgtaggagcattacacagtccgaaggacatcctacggtatgcataggtgccatacggacatgtgaacgtagtcttactctggtcctccagatggataggaatttaatgatacccgtaatacccatcaaggaaacagaaaaacgaatgatttgccagctgttccaacatttcatcaatgaagggtagcgggaaatgatccttttttgtagccttgttaagttttctgtaatcgatgcacatcctccatccggttacggttcgttgcggaataagttcgttttgagcatttgcaacgactgtcattcctcccttcttcggcacaactggactaggctaacccactcactatatggtacgggtaaattgatcccggcatgcaggagtttcaagacctctttctttacaacctcttgcatttcattattgagccgtcgttgaggttccctggagggagtactcttggggtcaataggaatacgatgggtgcaaagcgcgagattaatccccctaagatcttgaagtgagtagccaagtacagaacgatgcttttccaatacggtaggaagacgttgacgctcgtctttagagagcttgtcacttattataacaggggcctctctgtcattgtgtaggaaagcatatcgtaggcctagaggtagaggtttaagctcaagcggaggttgaggtggcggttccatgattggcaggtcgagagtctcaccgggatctgcttcttccttgatgaaatcggggacctcatcttccagaagggcctcgggagactcatgaggaggaactgcggtaacctcttccactaactcaatttctgggagaaggtcggtcaaggtgatccttgcccgtgaaaatggaattgagaattcattctctcccagtgttattttgaggctacctaaatgaagtgtgttgataagaagttgctcaatgggtagcctgattaggatgtca

SEQ ID NO: 12925 - DNA, 728 bp, Oryza sativa
ttcgtggcacgttgcacctcttgtcagaaagctaagtctcgtttgaatccacatggtttgtatatgcctcttcctgtaccttctattccttggacagatatttctatggactttgttttgggattgcctagaactaagagggggagggatagcatttttgttgtggtggatcgtttttctaagatggcacatttcataccatgtcataaaagtgatgatgctgttcatattgctgatctgtttttccatgagattgttcgcttgcatggtattgtgacatcccggcctagggcttaataggattaatagaatactcatatcaacaagttgcaacttcttttccggaagccaatctccaatgaactccagggtggcctggagcaatttgggatgggtgaccgaccgggaaattcttcccgggtgcacacgagtgaggacaaagtgtgcagaaaatatatgtattggtctgtgaggacagtctattacctatgaaagctatcagatgtaagcgggcccggcctaggggaaggcgggacgttacaaaatggtatcagagccgactctcgcggtttcacgggcgcgtgtgtcgcagttgcgcaggcatggtgcgcatggctggtgtaggccgggaatggttacacagcatggcacatgcgctggcactggacacatggacgtggccaagagaggacgttcctagcctagggttgatcgacgggggcgtcgat

SEQ ID NO: 12926 - DNA, 771 bp, Oryza sativa
atggtaaggagtggccacgttgtgtttggcttccatttctcgtaggaggtctctgaaggttttgtcaatgaagtgaaaacctcggtcgcttatgaccattctgcgggtaccaaatcttgggaagatggtttctgtgaacatcttcttggcgtgcctcgcatccgcggcgctgcacggcatagcctcaacccacttggagacatagtcgactgccaccagaatgtactcgcagttacgagacttagggaaaggtcccatgaagtctataccccaaacatcgaatatctcaacttgcaaattgtatgtaaggggcattgcatcgcgagcagtgattcctccttgcctctggcagcttgtgcatcttctgatgaattcttttgagtcttcgtacattgtcggccagaagaaaccactttgccagattttggcctgggtgcggaatgcacgtaatggcctccatagggtgaggcgtggcatcgttctataatcttaagtccttcatcagttggcacacatcttcgtagtaagccatcggagcatacccgatataggtagggctcatcccatatatgacggtgactttcatacttcagttttcgttgattttcccctggtggtatgcacttggataccatgtagtttactatgttagcatatcacgtgttggagtcgcgaaccgtcatcagcatgtcatctctcaagagatcatttatcggttgttcctgcatgttagtgatgtgcaatctggacaaatgatctgctacataattt

SEQ ID NO: 12927 - DNA, 6164 bp, Oryza sativa
ggccggacgacgatgatggttgaagcggcggcgctccggtgcgtgctccagggcgttgtcgacgtggcttgcgttcccggcgatgcactgcacgagaggggtttaggtcaaaagaggaaatgctcggcattgtgtggagagatgggaacgcgaaagagatggaggtgaccttgactcaaacggagatggcgaaggtcgtcgtcactacgaccggcggcgaggttgaggatgacggagagccagagaacctctccctcggcttcttcagctccaaagtgatgtgtggagaatggcgacgcgtctgggaggagtagagagcgagaaaagggaaaccgagatcgacgacacgttgcggccacgcgtcggctcgctcaatctctccctctctcggctggaacagtggaggaagtgatggacagagtcaaggcaagcttaagaggctgtcaagtgggtccaggtcgtggcaaactaggctagggtgagagggttgggtaagattctgggtaaacttgatttttagattaatttcggaattattttctcctctaactttgaaactacataattcaatgtgtggaccaaattaattagtgttgattttactggaggtaaatgattacacctagattccattttctttggttgcactcaaaaataatgggtggactgctcacagaaattaaacaaagatgggctattagaaagctagattgaatttttaggaggcttaaacagagaaggaaaattctagaaaaattacatttattcatgataactaatctagtatttgaataaattattttccatgttcacttatgtgcagttaaatgtacttttggatgaaatatggttttagccgattaaaatttaatttgatttcttttagttgtctgtttcgaccgattaatttgagatatcaacttgagtgttaacacgttaccaaattacggaggataagtttgtgctaatcattgtccacataaatttttccatgattttatcttgcacaaaatattttagagaattaagatgacctttgtttgtatatgtgttcccacttcataattgcatctaatattattatagggattacattaaacttcttttagactgagaagatgatatttgagtttaatattaagtccacatgttatcactcaagattactataggtttgtttagtgaaataattcttttagattatgctcatgggagctattatggaatacaagtccaaaactccaaatgcacaaagaactcgagggttaagtttgcttggcctggagcaatttgggatgggtgaccgaccgggaagaatttcccgggtgcacacgagtgaggacaaaatgtgcagaaaagacatgtgttggtctgtgagggcagtcatgacctatgaaagctatcagatgtaagtgggcccggcttgggggaaggcgggacgtgacaaaatggtatcagagccgactctcgcggtttcacgggcgcgtgtgtcgcagttgcgcaggcatggtgcgcatggctggtgtaggccgggaatggttacacagcatggcacatgcgctggcactggacacatggacgtggccaagagaggacgttcctagcctagggttgatcgacgggggcgtcgatctatcttaagggggtgagggtgtaacatcccgacatagggcttaataggattaatagaatactcatatcaacaagttgcaacttctttttcggaagccaatctccaaagaactccagggttaagcgtgcttggcctgtagcaatttgggatgggtgaccgacctagaaattcttcccgggtgcacacgagtgaggacaaagtgtgcagaaaagatatgtgtgtgcttggcctggagcaatttgggatgggtgaccgactgggaaattcttcccgggtgcacacgagtgaggacaaagtgtgcagaaaagatatgtgttggtctgtgatggcagtctatgacctatgaaagctatcagatgtaagcgggcccggcctgggggaaggcgggacgttacaggtatgccttctactattgtttcagatcgtgatgcaaaattcttaagttattttgggcgcacgctatggaacaagttgggtacaatgctattgttttttacaacatgtcacccacaaacagatggacaaacggaagtagtcaaccgcactttgggtaccatgttgagggctattttgaagaaaaatttgaagatgtgggaagaatgtttgcctcatgtggagtttgcatacaatcgggcaacacattctactaccaaggtaagtccttttcaggtagtgtatggtttcaacactcgtgctccaattgatattttgcctttacctactagtgagagggttcataatgatgctaaggcatgcgctgaatttattctgaaaatgcatgagtcaaccaagctcaacattgaaaagatgactgaaaagtatagaattgttggtagtaaaggtaggcaagaggttaagcttgaaccgggtgatttagtttggttgcacttgagaaaggatagatttccagaattgagaaagtctaagttgatgcctcgtgctgatggtccttttaaaattgttgagaagattaatgataatgcatataaacttgagttgactcccgagtttggggttagtcccacgtttaacatatcagatttgaagccatacttgggagaagaggatgagcttgagtcgaggacgacttcaattcaagagggggaggatgatgcggacatcactaactcgcatacatacaacaatcctccaacggtcatttaaggaccgataacaagagctcgtgcgcgacaattaaatttagaggtgagctcgttcctatgttcttctttgtatgaattcgagaatatattgctacctaatgattatattgtgattaggaacaatggaggggacaaggagacacttggagaaggacttagagccatggaggatcattgaggacgtccaagtcaaggtggaggcccaaaccaattcgacctcgggtgcaattcggtgtgcaggaccagtttgcactaaaacgggcgcccaggtcgcatacgtgctcagattgggacgttctttataacatttccaatggttttgctcccacgtccaaattctttccgagtcaatgggaatcgaccgaacaatttgacgcccagaatctgtcccggtgctgcatcaccgtattttggcctttgggccgtgtatcgtgttggaacccattagggttgcgttgagagggggttgcacgaccctaaactctatatatcagtactgtcaccatctttaggtttttgggttttgtttagattattctgtcgagaacagtttcgctgctagatcggtttgtaagaccccaactcgtgagcttaatcattcatctgcaattttggttgttttctatctcgttcttgtttgggttcttcgattggcaaacagggattagccttctcagtgaggtcatccgcgtttcgacacgggtgataaccagaggagacgtggtgctgcgattgcggggctcaagagagtgcgcgttcaagaagccgggtcgatttgtgtcgcgactccgccaaaatcgttttttatcaaaaacctttcagaagatcgggaaacctagtgcacatcatgacgactcctgaacgacaccaacctcgaccttgccagtgatcgggagagacaagcctactacatgctgagcgaccgggagtatgctcacacgcaagaatactcaccggagttgctgaaaaagataggtatggatgttgaattttgttctatttggaaagctattggttggcagagatttactgtggtagatgagcctggttctcgtttgcttactttgtaatttctgtgcacttcgaaagaaatagaagatggtatttctttttgctttttacgtaaggagttcatgctcacatggaaaggcttgagtacacttcttggttttcacgattcctgtaagatcgatctcgagaaaggaatttctgggttcgagaaaaattggttttgggaagatatttttggtgctccaatttgcaagaaacctagaacgaatgatatccataatcctacacttaggctcatgcacaaatggattgctatgactttgtttcctagaggtgatataagaccctttaggggggatgaattaattatcatgtttgccatggttagaaaaatcaaaattgatcctgtaaaatgtatgataaggcaatggtcagaaagtataaagttctctgctcctgttgagtgcacttctctgattactcggatagcaaaagggctaggggtcgttagcgaccaaattgcttttatctcagccgctcgtccgtgtattgatgaggcttatctagtgtaagggcatattctgaaacatggagcagatggatctttgatatactttttccatggttgcacaaatgaaatcccattgcgaaatgcgggatatcatttgtacaactaccatgaactaaccattcccctgcagaccatagaagaatctcgtgcaggtggaacatacagggagacgcgcaacatgacaaggaacgaacgagaaagttcatcatactcgacacccgtgaagatgtatgaggcaggttgggcaccaactggggatgcacccgggtggacccaagctccacgccatagcatcggagtctcaacctggcaagcgccagttaggaccggtggcatgcgcctcatgacatccaatggggggacaatcaacctcccagatcaagtggtgtgcctccatctccaagtgaatggggctcgagttcctctcgttgggacttgggtgaaatcactaggagaatggacacccttgatatgcagacgggggagatccagtacaacctcacggaacacatagctcagacgcaagaatggcaacaatctgctgatgctcagttcgccaacatcaacaacatgatgcagcaacagcacgatgaccttcaagcatacttccgttttcagggattcaatccttatcaaggaccctgagcgaaagccaaacttggggggagacatcgctccccctactaaggtaacttgtatcacattgcatatttctctttctaattgcatatttgctttctaattgcatcttataaaacttgaaaacaacataaaaatttgaaaaatagaaaataccaaaaagataggataggtttgagtcatgctaggtaagacaagctagttctctttattgaaatgatgaatagttgctctgttttatatctctgctatatgggttcttggtaaatactctctcaaaggttaaatataagtagccaacaattatccgggaacctgaggtaaatgggctgcacttgctgatctaagtttaggttgttgcgagatatgagatagtaaataagagttacgatgatcttgatactagtttgacttgaattccggatgttttgtaaaattgaaagttcctcatttgatataaattcctaccaaagccaaaaatgtgctaccttgattaaaccatatacattttggttatttgccattccattgaactttgtcaaactcttgtgacttgtgtagatacttctcatgctcactgatcaagatcatacacccacatatatgcacatgctaaactcctacattgggagctaagcaatattccattccatttccatattaccaccaaaataaattctccatgctttcatgtgctttcttctcctaaaaaaaagaagaaggagggaaagacatggttatgaaaagaaataataaaatataataaagttatgctccatcaagcatgagcatgattgaaaatatatatatatatatagccatgccctctcctaatcaataaaagaaggatttttgggagaagaaagtaagcacaaaggagaagcattttccttttatttttcgtcatataccatttccaccatataccacacacacattatgcacgatcttgatcttgagtatgtttagttatctgctctagtctaagtttttgacttagtaataaatgtgaatacaagtatgatgtgaccatggctactatggatacgaccattgctcacatcatgaatcaacaagaagacatcaagatcaagtcctccatgtgctgcaatctgattcggccacgtgttacattggtgacttcaaa

SEQ ID NO: 12928 - DNA, 815 bp, Oryza sativa
aatagaatttcaaggagtaccatttctggccaatcttatcttgttagaatccaaagacttgaatgtcatcttaggaatggactgtttagccagatataaaggtgtgatagcctgtgttaacaaaaaagtatttctccccagtgatgatggtcgagttgtaactgttcatgcattgtcttctgagtctttagggtcaagactgaaccaaataactttggaagagattcctatagtccaggagtaacctaatgtgttcccagacgatttacctggtatgccgcccaaaagggatatagagttcagaatagatttggtaccaggaacaactccgatccataagagaccttatagaatggcagccaatgagttggcagaagtcaaaaggcaagtagacaatttgcttcagaaaggatacatcagaccgagttcatctccatggggagctccggttatttttgtggaaaagaaagatcatacccagaggatgtgtgtggactatcgtgcactaaatgatgtgactatcaagaataagtatccgctgccccgaattgatgatttgtttgatcagcttaaaggtgccaccgttttctccaagatagatcttcgatcagggtatcaccagttgagaattaaagaggaagatatacctaagacggcttttaccactaggtatggattgttcgaatgtactgttatgtcttttggacttaccaatgcccccgctttcttcatgaacttgatgaataaggtgtttatggaatacctagacaagttcgtggtggtctttattgatgacattcttatctactcccgaa

SEQ ID NO: 12929 - DNA, 1541 bp, Oryza sativa
tctttataaagtaaagttggttgcaacatttttccatctgtaatactaaaaaatctttaaagttgaactttacctgttcccctcttgagttcatcggtacatttgtggtttgttgatttatactagagttgtactaaaatgtactaaccaattgttttcgtgcttttgctgtactactatatgttactctaaatataagtcatcttagtcttgtgcgtgaatttaggaagtgacttatatggccttgttaccgttcagttattacttattacactttggagaggatacctcatttattcgtaacagtgataacattcagtcattcaaaacataagagaaaaaaaaaaggttggacgattatacatgtgcctagatgttgctttaagggatgtataaagttgaagttaatagtttcgatttaatacatcatcaggccctcttttacatcccccagtacaagataactgattggttttaactagtaaactaatatgttttattttgcatggctctgtaatctttcttttgaaccttgaattttctttattcagttagccatataagatggctggtttcactctttctacacacacgatgccatcttatgtgtcaaccaaccttaccctttatttgtactcgatatcatttgtaatatggggtatcatttatatcaagatttgtttgcattaaacaggttgctcttgcatctgggaataaaaagaacattgaaaaagtgaggaaagctcagcttggtatcacctgcccaatgttgtaactgtggacgcatttggactgtcattaaatgaagatcatctgcatcttaccactgaatcacaagtaaagcttggtgaaatgctcgcacaagtctacatgagcaatttttgccagcaacatgctaggaggagtcctgtcaggtgaaataatctgtttaactctggaagtttggcacctaaatatctttctctttaaactgttattataattcttcattttctcgttggttgaaactatctagaggtgaaccaaccaattcatcttgcatttcttgcacagtagcattgatcctttcatttaacaagacatcaacttactggtcaattatgggttggatctaaatttaacaattcgagaaccaaacattacccaaaagaaataattttcttcttttcaacattagttggccatgtaaaaaaaaattcaacttcaatgccttttggggtccttcaatatataaatttcttctttattttgaacaaaccaatttgatgggaaataaaaacttctggttgggttcatggcaattatactattgggggcatgtttccttcacatatatttgctaggcctggtagattttaagctcaagcacttcaaaagaaaagttataaaacttacaccaaccctattcattaaataaatagaaaaaatatattagtatttttctttattgcattcccatgttttcagggtcttctcatctgccgtccacattattgcaagactgtcaagtattggtttttaatcattaaaaaaccgtactt

SEQ ID NO: 12930 - DNA, 585 bp, Oryza sativa
ggccgacactgagtatcgctaccatccccgtcaaccacagggaagtgaccgtggcagctaccttaagactgaaggaattgagaatgatgctaccacaaggcatttggttgagatgctgtgggctatggatgaaagccgtgtggagactgtgttagcagctcaagatcgtgaagatcggaatcgtggtaagatttgcacgctagaagacaaagtggatcgtttggagaaggaactagccgcgttgaagggagaagcaccaccgcagaaggccagggttcgtcttaccgcaaggaagagagctctatttgtccatcgctaccaattggcgccaaaggtccgtgtggtggaaaaaaaagttaccccagccctagcggattctccggtcgtcaacataagtgatgatgaagtagaagaatccaagcgcacccattccaagatcgagtggggagcaattcaagatgatgaagacgagccgaacgagccttcaatcaactccgatgcccggaagaattagaaagccttgtcaaaccgttgtcttagatcgttgtgttagtttgcttgttttaagtttggttgtgtgtgcct

SEQ ID NO: 12931 - DNA, 806 bp, Oryza sativa
tcccaatcacttgatttaagtatatatcaacataagaattatatattgttagtatctacagctgatcgaatagatttagttctttcttacgtattcataactgccgatcgattcaaatatgacatcggctcagagataaatgatatatcatcggcaactagccgaacggctatcatttatggatttaaccacgatttctttgtctttatttcttgttgattgcaggatcaaatcaactggcacgctcagatccaaaagcaatattttttggatctgcactggagttaagtagatctcctaggcctcgtgtttttctcatcaacacgcttttggcacgcccggtgggacccctaattagaagtcagagatggcactagaaaaacaacctccgccattaacagacaagtcgtcagagcctcaaaccaagatcctgaagctaactggggctgaagttgatgacggaaatgatgttccaatcactgtagacaagctgtcaccagagcagaagaaggagtttgaactgatgatgaaacatacacaacaacagttcatgaattcattcacagagactcggcaaggaagagttgttcagaagtacaagttgaaactagttgccgacgtccctggaacaggttcttctaaagatggtgaggtgcaaaaaacttaagttggtacagatgattcaggcaataaaggtactgctggtgaaccaggcgacaagggtgatggttttcaggagggagcagttgaagatcttggtccagatagcaaggactgcagccacaatttaacaattttcaggatcg

SEQ ID NO: 12932 - DNA, 2226 bp, Oryza sativa
cttctgctctagctgcacgagctgcaccatcatcagcacagacaaatgaccaatccacgattgcagatcagagaacagccacagcatagctggcaaaatgtcaatcggatgactcaggagcaggttgctgctatgttcttaccaaatccaccagcggctgatccagcacagtcgttgccaagtcagcagacaccgtaaaggaagctaatggttcagccgattcaacagcagaacttgcaaaatgcatcggctgggttaagaacacctgataatcagctaacacagcacgtggcaactcaggtttttcctgaacaattggttcataatgtacaaccagatcagtcggttttaccacaagttattcctaagcatttggtgcgtaatattgttgatgtaaaaacacgaggcctgggagatctgcttaactccagtgcaggtccaaaagcttgcctttaggttcgtgagcatgccagttgatttgttcttgcaatcaacaagaaataaagacagggaaaccgcggttaaatccataaatgatagccgatcggttaattgcgatgacataccatttatcttttagccgatgtcatatatggatcgatcggcaatcgtgaataagtaataaagaactaaatctactcgatcggctgtagttgttaacaatatacaatccttatatcgatataaatttaaatcaagtgattgggatagatcggtcgccatgccgagacagtataaatcacttagatcgaaatatatattaataaccggattatatatgtttataacatagccgatcagatagatctagcatgtatcggctaatactccgataccactttatattaagatattaaagcaagtaaaatacgtcaaacataagcctaacatatctaattacaacaagatcttgatgtaaagggcggatttaacatgttaatcaatcatgtaacgtaaaattagttaaatcaggtaagattggctgaaactccgatactactctaatgggcaactagaaagctggctagagattaatattctaagcacgacttagtagatcaaacttaactgatgcagcactaagtatgaaaagaagaacaatatctagacaatcaagccgctggatgtttcaaagagtggtggatatcctataaaatccaagccaacgttgctatttaacctaattggcttccttccgatgatagatgttagccgattgtaggttaaataatgatattttcgtggattatatagaatatatgataactcgatgaattacatagacaagattagagtatcataaagatggaagcactaatcccgagaacgcaagccgccataacaagttttacctctagttgaagatcgaaaccgatgtagctcaacccgaaagcaagaactcgtcgaaacaaagtgaaagtaaaagggtggcgatgcgccgagattgtattgaacgtgtgttagtttgattacatggggcttggggtctatttatacccgagattacaaaatatgtccgtgtcggacatgactcttatctctaacaaactctaagataccataagtctttgtggcagacttttgcccaaacatatctctaaggaaattacatgaaatatcctaattaatagatacaattgccttctcaagactcaatccgtgcatggcaatcctcatgaagcgcattaactatcctcgacaacgtgtaccgcatcacattgtcagactcggctcaatcggctaaccttgtccaactcggattccgccgatcctggtcacatccgattcggactttagccgatccttactctgtttccgaaacgatttccatcttggattccgcctcagttttatctccatctccgatactgaaattaccaaatttggttgttaacaaatttacatagtatacatacattctagttaaccgatatactagctaataccctctatccgatgccctccttgtacttcgagaagccacccatgactgccgagttccttatgacagctcgtcatgaccataaaaccagggctaaatacggaggaatactctccagggaattaacttaggattatatacaagcgcggaggaatacccgtactgagctgtcaccattagcagcccacctcatcatcagcatataaccaaaaataatgatatcccgtaatttagacacacgtcaaaactaccagatactaccctaataccatcgtcattacata

SEQ ID NO: 12933 - DNA, 1139 bp, Oryza sativa
aatggaggtggaccatctccccctgtcatcggctatcatgcccccaagacctcaagtctacttcaagggctaatcagagaaccaaccgatgtcagcaagaatagaaagactagagcatcggctatagacccatcggctctggttcccaagaagaaaactaggaagaacaagcctaagccaatcgatgatctacctaccttggatccatctatcgagcaagccctggatgaagaggaaattgaagaggatgttgacaaggctgcaggcgaagtaagcgatactgaaagaacaccattggcttcacccaagaagactcctccaactccttctactccagctcatttctccagggtaaacaactctccttgatcccttttataactacgttatttatagccgattacttataggcttcatagttgcaaaaaaagaaaactaatgtgaagaagaaatcagcagcaacaactctcaaaccggctccaccagtaagatgttcccatataaactctttcactaatcgatcataaccgatcttatctaacacttgtctcttttacagcctcctcctcctccttcttcccctgtacagcaatcatcaagtgatcaaactccatcggctgcagggagtcaccgtgtcgaagaagaggaacaactagccgctcctgccatcccagtaagtttccctttgacacaagaacttagatcggccatatctatttagcgtgtaactctctttcaattattcttgcaggccttagccaatatgttctttttcgacatcaaggactatttttatgagacagaagaggacaccaccaccaaagctttagctcccttatctgatgatgtgaagaaaactcttgaagacatccatcatcggctagaggcatcatctctagaaagtttggtggtagactgcggatcaattaggacttggctacatgaagttcaagctttggtcccagaagaactagccgacgtcctcactccaactgcttattttgaacaacatcaattcaagttggagaaggccaagctgagattagccgaacgtcgggagcgcaaagacatcgaagccacaatccaggccaattggcaacttgttcataaagagaagatccaagcttgatcagctatct

SEQ ID NO: 12934 - DNA, 625 bp, Oryza sativa
catgcttttgagagaggttgaggtgtttgaatacataccgggggaggaggattgaaagcgttgtatggcaccactggcagcaagtgcgaatagctaactacgatagtgtttgagaagatcttgtacattctctccttcatgaccttaaaatcaagagagtctggatcttcatggtttggatcatgcttgccgtaaaattcgaagccgtacgagatctctctttaattggagctagccggctcttgataaaatgccgagtgatctgttctccttgcagaccttgctcctttagcttcagcatatggtccatcaggtcgagcgcctgagcggcttcctctccaatcgacagtgagttccaagtgtcctgataaactggagggagacaggagtactcggggagtgcaggctcagggttttgtacatagaaccaattcgcatgccagcctttgttgaggttttgaagggcatggaaaagtatttttggctcaaagttcccctaagttggaaaccagcccccccaacaacacatggtttactcttgttcagttggagcttgacgaagcagatgcggcagaacaaggcaaaatgtggcctaatgcccaaaaaagcttcgcaggcgtgtatg

SEQ ID NO: 12935 - DNA, 3942 bp, Oryza sativa
cgataccactctatattaagatattaaagcaagtagaatataataaacaaaagcataatatacttaaatgcagcaagatcttaatataaagggcggatttaacatgtcaatcaaacatatagaataaatattgctaaatctggtaagatcggctgaaaccccgatgctaccctaatcggcaaccaaaaagcaggctagagatcgaaattctaagcacgacttagcagatcaaacataactgatgcagcactaaatatgaaaagaataaccatatctagacaatcaagccaccggacgcttcatagagtggtggatatcttatataatctaagccaacatcgctatttaacctaaccggctgccttctactaacagatgttagtcgattgtaggttaaacgacgatattaccaaagattatgtaagatatatgataactcgacgaattacagaaacgagattagagtatcataaagatggaagcactaatcctgagaatacaagccgccataacaagttttacctcttgttgaagatcgaaaccgatgcagctcaacccgaaagcaagaactcatcgaaacaaaatgaaagtaaaaggtggcaatgcgccgagattgtattgaacgtgtgttaattcgattacatggggctcgggtctatttatacccgagaattacaaaatatgtccatctcggacacgactcttatctctaacaaactctaagataccataagtctttacggcagacttttgcccaaacatatctctaaggaaattacataaaatatcctaattaatagatacaattgccttcttaggactcaatccgtgtgtggcaactcacgtgaagcacattaactcaacccgatgatgtacaccgacgtattcttggaatcgactatatcggctagtcctgtctgactcgaactctgccgatcctgaccgtagccgattcggattgcagccgactcttgctcggtttccgcaacgatcttcgtctttgattccgtttcaatctagtctttatcttcgacactgatattaccaaatttggtcgttaacaccgccataacaagttttacctctagttgaagatggaaaccgatgcagctcaacccgaaagcaagaactcgttgaaacaaaatgaaagtaaaagggtggcgatacgccgagattgtattgaacgtgcgttatttaattacatggggctcgggtctatttatacccgagaattacaaaatatgtccatatcggacacgactcttatctctaacaaactctaagataccataagtctttgcggcagacttttgcccaaacatatctctaaggaaattacataaaatatcctaattaatagatacaattgccttctcaggactttatacatgcgtggcaatcatcatgaagcacgtcaacctaacccgacatcatatgccttgtcatattgtcggattcggctcaatcggctaaccttgtccgactcaaacactgccgatcttagtcgttgccgattcggacttcagccgaccctcactctgtttccgggataatctctatctcgaactccgtctcgagtcctccttcacatccgatccttggattaccaaatttggtcgttaacgcatgccccccaagtctggaatattggataatgtttcggatttgccatacgtcgactccaagagaatatcgcacttgccgttttccgaccgttattccagcgctttaaatactaaccgttgtccccgacaaatctcacaccgtttcctccattttcatcgtcgaagcaaactttgtcctctctctctccggcgatccccttggtgcacgaagcgattcccaggcgatttcctctccagccaactttccgttcacagcgatgtcgatctccgccagtccatccgccacatcttcagcagagtacgcggaggtaagttttcatatgatagatcctctcctttcacatcagattggttttccctctccttatcttgttttcttcttctctgttcttttggattcgtagcacctctccaatctgatcgcagttccgagtttgttgcatgaaaatcactactttcttggtccaatcggcaatcccgatcccactgagttcatcattggtgaaaccaataggatccctttcagattagccaacccgaatctaggtcactaaaataataccattacatcttggccatccctcgagaaaacttcacccgagaaaagctggaccacatggtataagcgtgtatcggctagcaagcaaacacattgggatgagattggaatcggccaagcacttgccctcactatagcgaattcggttaaggatgaacccctaatagctgccgccacctatttctggtccaataccatcaacgcctttttgttcaaccaagggccgatgacaccaaccctgatagatatcaccatgatcactggtctggatgtgacctcatcggctaaccctatgagtctgaacaccaagaatcagtatgacttcaggaccaagagcataggtggttggtctagttatgtggcagcatacatgggccaaggatctgtcactcctcgagagcatgtagcctttctactgatgtggctggagaaatttcttttctgtggatcaagttgtggccccataaccaattggcagtttgtagccgaagccttagaatcaaaaaggcaattccccttaggaaaaatcctcctcggctatctgtaccaaatgctgaacaatgcattggctaagatagctgtcggctcagtagttggagcaggtggaccatgggggctgttacagacctggctaaatctgtgatagaagccaaattcccaagactggagctgattgtagaagatgatggagaagaacagcacccatcatagatgcatgtcatatggagaatatgcatccacaccagccgatgctggagcaaagttatcagctgagctgctcaaagattgtttctgcagcttttatgagggctttcaaaaagatgctcgagtttggtttccttatgaagattcagtgcatcttgatctcccatcagacttcagattcgaggatatcaaccatgaaagatatcaaaaatctagagaagtcttcttagctgtgattagcccatgcattcttcctgtcagcattcatcaagggaggaacattcaagtttcttatgaattttatcacctgatgagctctgccagacaacttgggatgggtcaattaccaatcggcctgttctttgccgataaaatccaatgccgaggagaaatctcatcaaccttgatgatggatcggctgctgaatatccaaggacctcctttgggtagtattgaaaatatagaactagcagctttcaggagcaaagcatttgacagatggtggggtgaatggaagctgcatctgttccatcaatcggcttctatgtacatggcagatctctttccagacatcatcactcaggtacaccttagctttaatctcgcttgaataggtgttagccgatttacaatttgactaattttcttttgacttgcagacaacagaattcccccctcctcatcaaagcaatagtggtagagacatcgaatatgccccaggtctaattccaaatggaggtgggccatctcgccctgtcatcggctatcatgcccccaagacttcaaatcttctacaagggctcattagagaaccagccaatgctggtaaaaagagaaaaaccaaagcatcggctatatatccatcggctccggcaccaaagaagaaagctaagtcaaagaagaccaagccaaccgatgatctgcctgccctagatccatccattgaacaagccctggatgaagaagagattggagaagatgttgatcaggctgcagctgggataagcgatactgaaagaacaccatcgacttcacacaaacaaactcccccga

SEQ ID NO: 12936 - DNA, 11042 bp, Oryza sativa
  unsure (1)..(11042): unsure at all n locations
tcggcttgattagctccaaactcacctggtaacgtgaaaaccatgttaaccgacgcaggacaacacttttccctttagccaacctttttgcttcgtcggcttgacctcatcggctgtagcagcttggttcttaacacgccactcctgcctcggcttcgttttcttcagccgatggttaatctcttgctcgacttcttggaagcgttgtctgttcctcaatctttgaaccctcctttcctgattctttgtaaaaataccaaaagggcaccattgattttttccgccctcatcatccccctgatcttaatttactgggcccacatctttcatgaacagggaacccttggttgccctaacccaatggctctatattagaatggccttgaaccttctgcaacattactgcgttccggacaaatcttcaatagatggcagcctcatcccttcaggccagcaaaatctgaaaaactcacaaccccaatgaggatcaaaaccaccatcatcttcttcataatacctctcctgctgctgcttgtcatatttcctctggtacttgttgataattctagccgcattcatctgaaagttctattctttcccccatctgctgtccttctagatgtgtgcaccatgttaacagggaaaggattaccatcaaccttcattggcttctttaagtcatcaaatgtaatcttccctccttcaatagccacctagatttgctgtctgaaaactttgcaatcattagtagaatgagaaccagagttatgccatttgcaatacctccttttgcctagctcctcagctgatggaattatgtgaccagcaggaagttgaatttgtttctcccgaagcaacaaatcaaaaatcttaccagccttggtgatatcaaagtcgaatctttcttcttttccagaacttctcacccatgggcatggcacaacctttttgctcctgacccactcggctgctgccacttcggaatcatcttcatcatcagaaccatacatataagccaaatcggctggctgcgaatatgtcaaagataagctgtaacatctgttcctcatctccctgaatctctggatataatattgaacagattcattgtggagataatgggttcctcatacccacacggtatggttatcccactagttataggagataactaatatcagggaaatatgtaatggatcatgacttgggtattacgtttccttgtgtactatggaacggcctaaagtcctgttttgataatattgtaaagtagatttaggaaaccgataccgtattggttaaggtttctatcttgtaatcctgccccccatcctatataaggtgggcaggaggccctctatggggcatgagacaactagatcgtcagatctataatacacccggcggattcaaatccccaaacaggagtaaggtattacctctcatcgagaggacctgaacctgtctaaatccttgtctctgcatccatctacttttaggtctcgtgcgctacccccttttattattgccgaattcatgtttcgacagttggcgcgccaggtaggggagcgtcgagttttccattgataagtgcgatggaatcaacttcagaacaaatgctgagatcaatctcatcgagttcgatggcttgaatcttcaatcccggtttgtttgttctaatctgatttgttgttattagattgattaatcgcagattaaactctgggtatcttttgtgtttaccttatgcatgattgttgagatcaaccgtcttcgccggctcaccttcatgtcggtgtccgcatgatcttcttttaatgagatccgccggctacctccgatgacgacgtcgtgctgaaggaccatcaagctagccatcggctacagggccagatacacatatttggtgatggttaatttttttgaattaatcacccctagcaagctggccgacgccgacttcttctgcaaatcgatgaaatagcagacaacatgcatcgattaatatccttaatcatctatatcttctatacttccctagtcctaatcactcttgttttgcatggcaatctgtccgactggccggccaatcaggaggagccaataggctacatgcaatcatgcatgtgctttagtgcttattacggtcatacgacctctccatcaagttgcaaatcaagccatgtgtttggatctgttaattatatatcaattattttctttttacaaatatctaaccacaggttgatgtgcaatttcttgtctttgcatgtaccatcgcctgtactccatcactgaccggctgcctcatagccgccgactggtgcttttgcctatacggtttgatggtcacatcaccgttcatgggcatccacgtcttcaccaaccggctggccttcgccgccgcatgcacggctggcctattatgccgccgttgttgggcgtctacgacttcaccgccggcctgcctccgtcgccgccgactggtgtgctcgcctatacagttggttggtcatgccaccgttcgtgggcattcacgtcttcaccgaccggctagccttcgccgccgccgactggtgtttccgcctgcacggctggcctattttgccgccgttgttgggcgtctacgacttcaccgccggcctgcctccgtcgccgccgactggtgtcctcgcctatacggttggttggtcatgccaccgttcatgggcatccacgtcttcaccgaccggctagccttcgccaccgccgactggtgtttccgcctgcacagctgacctattatgccgccgttgttgcgcgtctacgacttcaccgccgacctgcctccatcgccgctgactagtatcctcgcctatatggttggttggtcacgccacagttcatgggcgtccacgtcttcaccgaccggctggccttcaccgccgccggctggtgtttctgcctgcacggctagcctattacgccgccgctgttgggcgcctacaacttcactgccggcctgcctccgtcgccgccgactggtgtttccgcctacacggctggcctattataccaccgttgaggggcatccacatcttcaccactggctcgccttcgttgccgccgactagtgtttctgcctatacggttggcctattattccgccgttgatgggcgtcttcactttcattgtcagtcgtctcaagctgcttctatggctggtgtattcattgccattgatggacgactttgttcccacatcggccgtcaccaagggaaagactagaaagctatgtcatcattaatttttttctttatatgatattttccttttcctctgcctcactacatcaactggttcgccgttgactagtgagttgggggctacatatgttatatcatattttttttaataattttcataatatttatcttgattgcttgcgacataatctgagtacaaaagtgcctattgagttatggagttctatcttcctatgctttccgtttggtttgtcgatggatagttgcctttgggccgattcctagcacccggcggctcgttggatgaaccgagtaatgcaaggtgctaagtattattcggaataaatcaaaagcatagagataagataaatttattgtcacgtcctgataaattcatcccgaaataaaaaatcatcctctaaaaagaataatagaattatataaaattcgaaaagaaattggcaaacactaaaatacgtgccagaaaaattcgaatgtggtccgaagaatttttgttaaattctccttggtctaaaaagagccctcaaattttacttgaattttcagagcaccggaaatatttattaagcaacaacgactatgatcaaagtttactaaaaagaaaagctaaaaataatcctccttcctccctttgggccaagtctggcccaaagtcctctctctctctctcggcccgcggccaaagtcctctcttcctccctctctttctctccctctcctcctttccctccttctcttgggcctcctctccttcccctcggcccagctccctcctccctctcttccccaggcctcctctccctcttctcctcctgggccggccgcccggcccaagccgcgccacccagccaccccatcctcccgagccgcccccccccctcacgcgcgccgcacgcgcgtngcacgcgcgctgaccgtgtggggcccacgcgcctgtcggtttcctcccgcacggcctcctccctctcccgtgaaccctagctcctttcctccctcaaatccgtgcgatttaatcatgggattccaaaattaaatagggagaattaatccccattgattcctctttgatttcccccgttttcccccttgaatggcgcccccaatcgcctggaacggccacgccattcccggccgcttccatggccgccggccgtgtttcccatcgccgttctgccctctctcatgcccagctccctcccctcacctataaaatggaacgccctctgtgtgttctctcgttttagccccttcccgagctccctcgtggccgcaccacctctccccgccttctccttctctctctccggcgccggccggcctccagccgcctctccctcctcgcccgagcaccgtccggtcgcgccgtcgccgccctcggcctcgcagccgcctcctctcccccggtcagccctccgtttcgcagggaaatcaccggagacgcgtcctcgccggcaaaacagtggcgttgccgccactgtactgcctccagcctcccctgccgcgccgctcaggtgcgggccggccgcgccgtctcctccctcggcgtcgccgcgtcgacctccaccccggcctaccctctgattcgtccagagaccgccgtcaccagcgccgggctctccatcctcttcgtcgccggcgtcccttcggccgccccaccctcctccccggctcgtcggctcgctgcgacaccaccacctccggcatcgcagcggcaaggtcgccctcggcctcgcctccccttcgaccgacccccgccggtgttcgtcatcgtcgtcatcgttcctcctcgccggctcgttgtctcgctgcgccgcctccatcgtcggattcgcagcggcgtgttccacgccgtcctcgtctccgtgcagccgctgccggctgccctcgtcgcctcctcgccggccccggtcgtcgtcgtcgtcatcctctcgtcgttcccggttgtcgtggcgttcgtccgtccgtcaagccattctcgttcgtcgtcctcgttccgtcaagtgccgcagccccgtcatcgtcttcgtcctcgcctccgcgtcgccaagcattgcgccggccgcgtctcgccttcgtccaaggatcgacgccgaagtcgtcccctcgcctttcgtctccgtcattcccggccgtctccgccgcgcccgttcgtcgttgtcgttcccacgcctcgttgcatggtggtaaggatccctctccctcgctgccccgtcctcgtcctttcggtgtcgcccgtgcctgttgtgcggttgtcggccccggtacccgtgtatcggtgtcggcagtcgttcgcttgttcgtgtcgtgaccgtgttagtgtgtccgctcggtagccgcgtggtttccacgtgtgcagcccgtgtggtgtctagtggagtccgtttgtcggccactgtcacatcctgatttttgtttcaggatttataaattatttaataaattattaaaagaatttatattaaatgttcattaatttacaagtgaagttaaatgtgggaaataaaatttcttaaatataaagcatgggtggatttaatttttattaaattctccatggttaattatactctctggaattttctcggatttttcggagctcaattcttaattttaatcatacaaagagcatttcagtaattacccacatattaaattaatcattaaatggtctaattataattttgttaagtactttgagtgtccaagtattttcaggatttttcttgaaattatttgagcattggaagtatttttaacaattcaaagatcatttaaatgattattttaattgggaaagtaataaaatcctcctcctcagcttgggccattttcggcccattctttcctttccttcctctctcttccgccggcccaacctgagccgcctcctctcctctcagcccagccggaaaagtctactttacctccctggcactgttcatcttccagctctggacagagccgagccgcccgtgctgtgccctgtgcagtcgccgcttcctccgttaaatctcgcctccccgttgctcctttttccaatttagttgaggggaaatattcctcttatcctcctctatctttacccccaaaaaatcggagctaatcgttgagtatcttatccaaatcaaactcgttttcgagtttatctccaaaaccgagtttttgatttcccggatcgatttcttgcgggaggagtccgatctcttcaatccaaggctataaataggaccccctagtcctcctctttcgtttgccccctctcccgtggtctcccgtgcctcgtagcgctgccgccacgtgctccaccccgccgtcgtcgccggccgagctccatccgcgtcgcgccgccgcctccgtcgtcgccgccggtcgccgtcaccgccgtaaggtgcgccgaggtgtggagaagcccggcctcctgtcccccttcgtcgccggccaccggagctccaccgccggcgaggtccgagccgccgccgccgttcacctcgtcgccggtcaccgtcggtcgtcgtttggctcgagggtaagtaccgttgggttcgtctcgtcgtcctctacgtgtacatatcctccaaattcgcagccaaccatccaatctccggcgaggtcgccatcttggtccggccattgatgaggtcatcatgacgtcatcatcggcttttctttttcccgattttctaatagattaaatcttcggaaaatcataactaaatcatcgtaactcggttttgagtggttcaagttgctaaattcatctaaaatcatgatctacatgtttgtttactttatatgtactgtttatttggttttttagtctttttcttcgttttgcgtgttagcttgtcgtttccgtcgttgcgaaggttcgtgagtgcgtcggaagtgatcaagaagattacttgaagaccgattattgcaaggcaagtcacacagatcctaaacacaatcctttgagcatgttgatcctatatttaaattctctatttatttcaactgtgcatttattttcgaatgtcaccgggtggtgtgaacttattcctttgttatggccaatttgcattgattactttattccttgataccttgggttattataacttgactagttgggctttatatattggttcagctagatattagttatgattgcttagccatgcttagaaacattagcacactattgggataacttatgactcactattatttaaggatggcttaatgatagttcacgatggttaatcgtgattggttaattaattacttgccaactaaaacttgataatggtgggttgtgagcacatggttttgagagtcgtgctcatgacaattaaggaccggttcgcgagctactgttgtgaaacatttatcgtgccaaccacaagccagcgtgggcaacggctttatcttttgtatagcgtgattcattatagtgcgccagactgagaagtggcgagaagtccacgggggtcgctggggagtccatgccttgtttataagggggtgattatgatccaggaaaggtgcgctgtaatgggttatgttgtgcaaggggtattgtcacaactcctttccgaggtaccgtggtggtattgaggcacatggtgacatgatgtggggttgtgtcttgtgggtacagtggtacacctctggccagagtaaaactattcgaatagccgtgcccgcggttatgggcgggttgagcaatgtttttcgtgattagtctcacacctctcacaataattatggatgttataatctggtaataatttgtttagctcctggtttggagttagatctgtacagccgggtatggttgttcagaatggttgggcctgtgcaacatgggtgtgttgtttagtgttgattaaaatttatgattaattactccactgttttacttatcttaaatctttgctaaatgctgcttttgcaaatgagcctatattatgccatcctttggaatccttgtgcacttgcatatttgctgtgtggcttgttgagtatgtcatatgctcattcttgcaataatcatcaaaactcagttgaagataaaggttccagaaggagaagacgtttggcttataccccagttgagctgcctgtgggagtggagctgaagccatcgctagatcgttattccgctgctgttttcttttcttttgtaagtatgtaacgttattattaagatggatttttatattaaattgtcagtttgtgtacctcggctgattcttggacgaggattttatgcacaaattagttcggaaattactagtgaatttccgggcgtgacaagttggtatcagagccatctcgactgtaggataagccaaatagtcaaaccttaaggactaattttccggaaacatgatttgtgaaaatttctcctttcttccttatctagaattcttcacaaatcgttttgtcgttctctcctcttttccctctttcaacttgagtagttgttaaatttgatggagaaactcgaagacgtcgatgttgtcaacttctgcaagtcaagtggatcgaggaataagaagatgatagttgaatcaaagtgttcagctgtcaagatagagtgaagtttggaacctagcttagaacctatgccgccaaagtgtctttgaagaatagttagtagggttgaacgtttgttgtttgctttgtgtgtaggtatggttgcattcccatcattggagtagttcattgatgagtgtgtaactgtactaggttgcttgcttaatcaacttgaacaatataatggtctacacacaccagatcagtggtaacctggttaaggtcttgtctttagtgtaacccctctcctcctatcttttctaatctgcaacagatggtgaacactcgcgccagtggaagtggaaacaataacaatgaagagaacccaacccttgctcaagtgctagctcaacagacccaattgatcaacatgttagtgcaacaaatgcagaaccagcaaaggaacaacaatgtcaatcctccgccgccgcagaacaagttagctgattttcttcgtgtgaggccgcctaccttctctatcactaccaacccagtggaagcaggtgattggctgcacgctgttgagaagaagttggaattgctccagtgcacggatcaggagaaagttgttttcgcttcacatcagttgcaaggacctgcatcagaatggtgggatcatttccggatgaacagagcagaaggacaaccaatcacttgggcggagttcactgaggcattcaagaagacacacatacctgcaggtgttgttgctttgaagaagcgtgagttccgggcacttaagcaaaaggatcgtaccgtgacggaatatcttcatgagttcaatcgtctagctcgctatgctccagaagatgtgcgtactgacgaggaaaggcaagagaagttcttggaaggcttaaaggatgaggtgtcagttatgttgatctctcatgactatgaggattttcaggggttggttgacaaagcaattcgactggaagacaagaagaacaggatggacaatcgtaagagaggaaggattgttttccaggagacacagggtagtagccagaggcagcgtatcaagccactccaacttggtgaatctttttctgcaggtcaagaacagtcgcaacagttgaacatcggtggtgagatcaaatcagagactaatgaaagcaatgaagtaaacatcgagcaagctaatcagccggtgctagttcagcaggatcagtctcaggagaataacagtaatggaagggggcagcaggtatgtttcaactgttacaagccaggccactttgcaagagagtgtccgaagtcaaagcatcagcagccgcagggtcagatcaacaacattgtcgtcacaggagccaatgcggtgccagttgcgtcttcaagagttgcgtcttcaagtgttacagctcagtcaccagtttcaaagcagcagtagttttctttaaagccttagaataattatcggagttatggaataagatagactgcagtttacctatgcccttttctttctagccgttccgaatctcgggacgagattctttgtaaggggggtagatttgtcacatcctgatttttgtttcaggatttataaattatttaataaattattaaaagaatttatattaaatgttcattaatttacaagtgaagttaaatgtgggaaataaaatttcttaaatataaagcatgggtggatttaatttttattaaattctccatggttaattatactctctggaattttctcggatttttcggagctcaattcttaattttaatcatacaaagagcatttcagtaattacccacatattaaattaatcattaaatggtctaattataatttttttaagtactttgagtgtccaagtattttcaggatttttcttgaaattatttgagcattggaagtatttttaacaattcaaagatcatttaagtgattattttaattgggaaagtaataaaatcctcctcctcagcttgggccattttcggcccattctttcctttccttcctctctcttccgccggcccaacctgagccgcctcctctcctctcagcccagccggaaaagtctactttacctccctggcactgttcatcttccagctctggacagagccgagccgcccgtgctgtgccctgtgcagccgccgctttctccgtaaatctcgcctccccgttgctcctttttcatttagttgaggggaaatattcctcttatcctcct

SEQ ID NO: 12937 - DNA, 2115 bp, Oryza sativa
actgaggacaacctgaagataatagtgggaagtaaactgaatgtaaagaaagtgaatccgagctgcttggtcgtgggaactatttccagttatgaaccaagtgatatgttcgaagattgttttccaagggcaaattaaaaatcacatctaacaacgaagctttagatttgccaggataaccatcaaacaataagaagtccagcacaaagccatttgggaagacgtcaaagcatgtcaagtgggataagttggttcggttgagaaacataattcaaaggcaaagttatcgactctcgcatggaatagcagaagtagctagcacccggagagcaggaaagctaatatgaggcagttggtggcaagttagaagtaaatgacaagcatggtattctcatgatgacaagcatggtatcctagtaatgacaagctgatatcgacgcataacgtgaagtgggtaacttgtatgaggttgacgccaaagatatgaattatgagaagttctggaacggaagcatcattaaactaccgcaacctagtctgagtcagctaaaaggtgcaccctggttcaagtcaggtgaaaagaagattccatctgcaacaggagatcaagccaagcagttcagagtggggaagttttgctgggcaagtccattcaagaagatgcaacggaagaagtcagaccagaaaagaagaccgcccaacctatcttcttgctagcctcctcgaatcttggggacgagattcctgtaagaggggtggatttgtcacgtcctaataaattcatcccgaaataaaaatcatcctctaaaaagaataatagaattaaaaaaaattcgaaaagaaaatggcaaacactaaaatacgtgctagaaaaattcgaatgtggtccggagaatttttgttaaattctccttggtctaaaaagagccctcaaattttacttgaattttcagagcaccggaaatatttattaagcaacaacaactatgatcaaagtttactaaaaagaaaagctaaaaataatcctccttcctccctttgggccaagtcccaaagtcctctctctctctctctcggcccgcggccaaagtcctctcttcctccctctctttctctccctctcctcctctaactccttctcttgggcctcctctccttcccctcggcccagctccctcctcctccctctcttccccaagccgcctctccctcttctcctcctgggccggccgcccggcccaagccacgccacccagccgccccatcctcccgagccgcaaccacccccctcacgcgcgccgcacgcgcgttgcacgcgcgctaaccgtgtggggcccacgcgccggtcgtctccctcctcccgtgaaccctagctcctttcctccctcaaatccgtgcgatttaatcatgggattccaaaattaaatagggggaattaatccccattgattcctctttgatttcccccgttttcccccttgaatggcacccccaatcgcccggaacggccgcgccattcccggccgccttccatggccgccggccgtgtttcccgtcgccgttccgccctctcccatgcccggctccctcccctgacctataaaatggaaccccctccatgcgttctcttgttttagcctcctctccccggtcagccctccgtttcacggggaaatcaccggagacgcgtcctcgccggcaaaacagtggcgttgccgccactgtactgcctccagccacccctgccgcgccgctcaggtgcgggccggccacgccgtctcctccctcggcgtcgccacgtcgacctccaccccggcctaccctctgattcgtccggagaccgccgtcgctcgcgccggcctctccatcctcttcgtcgccggcgtcccttcggccgcccctccctcctccccggctcgtcggctcgctgagccaccaccacctccggcatcgcagcggcaaggtcgccctcggcctcgcctcccctttgaccgaaccccgccggtgttcgtcgtcgtcgtcatcgttcctcctcgccggctcgttgtctcgctgcgccgcctccgtcatcggattcgcagcggcgtgttccacgccgtcctcgtctccgtgcag

SEQ ID NO: 12938 - DNA, 1618 bp, Oryza sativa
tttactctgcattccattgcaatgggaacccatcataaaaaacatgacatacccctttactatcctagctgtgaacaaaagtaccgacccaaccctgcctacagccggtatcccggacaggcaggccaggattgagcccctagcaacaggatctagaccgggtgcgccacacacataggggtgagaccacccgcgtactagtccagtgccatggcatctcgactaacggacaccggcccgtgtagcattcatttgcctagacatctcgattactgagccgcagctcgcgtagccttcatttgccttagagatatccatcgtcgcaacgacttcatccatctctatctgtgtccttttgttcaggactagactgagcaccgagataagccttacccattagacatgtggttagtacggtactgctttgcaacagaggcccgagcttaatccttatattggccggggtgctacttcccacaactgggatgcacccaaatcccaccggaaaacaggttttacgggttttgaaagaggaagagaggtgtatgtccaattccaccataagccaaccattccatagtatccaagtgatatgagaattcccaaagtctaaagttataaaaccccctaatgttgcctaattaatcagcgcagcatctacctaaattcatactagtcgaaccattgaaagagcatctatgcccctagtggattttggtttattgatgacaaacgattaaggaactaatgcacttattaagtgtataagaaagtgattagtccgatgaagaagctaggaaattgacttatcgatggatgataattaaacagaagatattgaagatgcgggtatgaagtgactacctatcgcaagacggtgaagcgcaagcgacgctcagctgcgatggaccatgcggtggtgaagggcaagcaaggggcttggcgccggtggtgaagggcgagtgaagactgtgtcgtgatgaaccgtgcgaggccatttgaagccatgtattatccgcattaatcatttgagaaatggaagacgaaatgtcaagaatcaagaagatgagatcttcccgatgatcaaatgaccttgacgttggtaaccctccaagtgaagaaacaatatggtgtgaaggtactcctattggtataactttactttttaaatttgagtttaggatgccgtactattaagagggataccacatgcaaataattggttgaatacaagtgctcaaaaggcttcatctttgtgcgagttgaaaaacatgtgagttgaaaaacctaagccaaaatttcaacatctttgcaagttttctttgcaagtttttcaacatctcttgaaggttttggaccaagttttatgttgggtttgatagcccacgaaactagctttccatagagtccaagatcttcgaaatcggagttcggagtaaaaagttattgcatttttacttgagcaacatcagactatccgatttgaaatcagactatctgatgtatcggactatccaatttttcacagaacttcactctctgtcttgatttgaaaaagtcctatctaagtgagtttttctaagtatcggagtatccgatgtcggatcagatagtccga

SEQ ID NO: 12939 - DNA, 6985 bp, Oryza sativa
cagaagagatttcatcaagcccatcaaggtgccaaattcaaacttggttcaagatatcaattttattgaatgggcatctcaaaaatcgacaaggaaggtaactcgatgatccatagcttgttatttaaattggtatgattggatcacttgccttgtctgtgcatctaggccaagtttcattccttgctaattagcctaatttgcaaaatgttgtgacgacatgcttgtttagtcaataagtgagtattagtcacaaagttgttctaagtgaatcaatgtgctcggagacctcattctatgtgaattttttatcttaacacaaactatgagattcatacatgcgaaactcatttgtgaaatgttttgtgaaaatcttgggtgagatttttttttttaaaaaaaactcttgaatctcactcgaatttgtgaagaagtggtttggcaagttcaaatctcgatgatcctcttcattgtatattatgtcctctccttaccatgcttaaataacaaagtaggagcgaaggactaagggggagggatacattaagttaaaaaagaagaagaatgtctttgacatgcaaagggtagactttcttcttctatgctttaaaccctttgcatgtgagctttctatgcgcaaaatatctcaatgcctattgatttacttgtgatctttatgtgaaattgatcttcatttcctaatcacaagtgatgaaatataaaattgagaggtaagtactcgatgatccctcatcaaggatcccttttcttttctttccttacttatgccctttttggtgttagatgtcaatgggggagaagtatactaaaggggataaagaaaagattgatcaaagggtgagatatttgtgagaacttatcgaaatgcatgctttaaagatgccatcgaagggtgagatatttgtgagaacttatcgaaatgcatgctttaaagatgccaaagagtaaataagaaagggggagagtatttgaaagtgtttatcaattgttgtgaatgcttattatttgatcaccatgcctcatgcaattgagattatcttttaatacttgaaattgttagtgtgttgttttacttttggtatctcgttcacacacaatacaacccacgaatgcaaagagttagggggagctctctcattttcaaaaatatgtgcatatgtgctcacttcataaacttgtatgcacacatttaggggagctcaaactaacctttggattcaaaatcattttttattaatcttttgtaagctttaatcgtgttgtcatcaatcaccaaaaagggggagattgaaagagcatctatgcccctagtgggttttgtgtactgatgacaaacgattaagggattaatgcacttattgagtgtataagcaagtgattagtctgatgaagaagctaggaaatggacttatcgatggattataattaaagagaagatgttgaacatgcgggtatgaagtgactacctatcgcaagacggtgaagcgcaagcgacgctcagctgcgatggaccatgcggtggtgaagggcaagcaaggggcttggcgcagacaaaccgaaactggtggtgaagggcgagtgaagactgtgtcgtgatgaaccgtgtgaggccatttgaagccatggattatccgcattaatcatttgagaaatggaaggcgaaatctaaaaaatcaagaagatgagatcttcccgatgatcaaatgaccttgacattggtaaccctccaagtgaagaaacaatatggtgtgaaggtactcctattggtataactttactttttaaatttgagtttaggatgccgtactattaagagggataccacatgcatataattggttgaatactagtgcataaaatgcttcatctttgtgtcaaaacacttatatcgggtttctttgcaagtttttcaacatctcttgaaggttttggaccatgttttatgttgggtttgatagcccacgaaactagctttccatagagtccaagatcttcgaaatcggagttcagagtaaaaagttattgcatttttacttgagcaacatatgactatccgatgtatcggactatccgatttttcacagaacttcactctctgtcttgatatgaaaaaatcctatcgaatgagtttttctaagtatcagagtatccaatgtcggatcagatagtccgatgacacagagactctgaaatttcatggaacttgagtctctgtttgaggacgaagtttttgcttctaaaatatcggatactccgatttaacatcagatagtccgatgtctcggaaagtccaaaatttcatagaacttcgttctctgtttgttgttgccttggaggtttaaaatatcggactatccgatattgtatcggactatccgacgtgggctgaaagattcccctcgaacggccacattttggggggatctatataaacctcccaccaacccttttctagggttgcccaaactcatttcattcaaatcttgttttgggttgagctttgtgctaagtgctttggatctttgagctctctccctctctatctcaaatcccccttgttctttgtgacctggatctttttgtgtggatttggagtttgggagtctagtgtgtgtttcttttgatcttgagcactaagatttgtccaagagttgtgtggtgtttattactcttggaggttgaggactcctagacggctaggtgtcgttcttgggccaccgatctacgtgtggttggccaagagaagtttgtgaaggccggatctcgcctccgcaaggaaagagatacccttagtggaaggaggagtgcatttgtgcaacctcacgaggatagggttgaaaaagacccggctctttgcgagcccctcaacggaaactagaatcccctcaattgaactccgggaaatacatcgacgcgtaaacctcggtgatattctcactctctttaccttcttgttccattgttttgtgctatgctaatattgttgttggtcgagctcacctctttgcttgtggattgaatctagagctcttaggttgttctcttgtttgtattattgttgtgcaggtcagatagtctgatctcagttcagactatccgatcacataggactatccgacctgatatcagacaatccgaccctattttgttttagcttccgcatttattttaaaaaaccgcctattcacccccctctaggcgacatcaaggtcctttcaaccatgaatagagtacccactagttgggttttatttattctagggtgaacaaggtaataataacaatagcaataataataaattcatgacaaaggtaaataggcatggctaaataaaacagtgataacgcaggaatttaaataaagcgataatgcattaatttaaatcaaaataattttataaactgggattcaatatgctcaatgatgatatgacttgccttgctcagagagaacggccttccgaaccttcggcgacgaccgcgaaccacgcttcggaaacctctagaacaacagaagctacgcgaagcacacaagcaaagctacaagcctataaagaagcaataacaatacataaaaagaaaagcacaaggttctttaggttataaaaaacattaggagacttgaacggttcgattcggagttcgtatgaccaagatatgatcatccgaagtttaatgttgttacatggagatttatagattattgtaattaggttttgcaactataaaacatgtgtaagcgctagcctggaaaagacaggaaggctgcgctattgacatgcggaccccacatgtcaacctaagggaccacggtagaccgagtacacagagacggtccacgggtcgacggaagcgtaccccgtgtgtcaaccgaggcaagtggccgacaaacggactccactagacaccacgtgggctgcacatgtggaaaccatgcggctaccgagcaggcacactaacacggtcaccacacgcacacacaaacgactaccgacaccggtacacgggtaccggggtcgacaaccgcacaattgtcacgggcgacaccgaaaggacgaggacgggggcagcgagaggacagacccttaccaccacgcaacaaggcgtgggaacgacgacggcgaatgggcgcggcggagatggctcggggacgacgtaggcgaacggcgagggaacgactttggcggcgatccttggacgaaggcgagacaaggccggcacaaggcttgacgacgcggagccgaggacgaagacgacgacggggctgcagcggctcccttgacggacgcggacgacgaacgagcacggcttgacgaagggagggccgacaacaagcgcaaccgggaacgatgagaggacgacgacaaagaccggcggggttcggatggaggggaggtgaggccgaggacgaccttgccgctgtgatgccaaaggtggtggaggtgcggccgaccgttgcaagggcgaggaggaaggggcggccgaccgttgcaagggcgaggaggaaggggcggccgaagggactggcgagagggcggatgggttggcggcggcttgcagcggttttccgggcgaaacagaggagcagccagaggaaaggacgacgctgcgacgtcgacggaggagacggcgacgtcggtcggtgctcgggcacggcggaaggggctgctggaggtgatgcagtggcggcaacgccactgtttaccggtgaggacgcgtctccgatggtttccccgtgaaacggaggcgacgccggggaagaggatgcacctgcgaggccgagggtggcgacagcgcaaccggacggtgcacggtcatggcaggaggtgcggctggaggtcggccggcgccggagagagagaaggagaaggcggggagaggcggggcggccacgggagagcgcgggatggggctaaaactggagaacgggccgagggggttccattttttagatgaggggagggagccggccacgggggaggtcggaaggaaggcgggaatggcggccggcggccatggaaagcggctggggttggcgcgttcgttcccggcgattgggggcacgaatcaagagggaaaacagaggaaatcaaagaggaatcaatggggattaaaaccccccaattaatttggaaagagccggcttgaatggggtggatttggaggaggaatcggcgctagggttcacgggtgagagaggaggccgtgcgggaggaaggagacgaccgggtgggtgggacccactggtcaggcgcagtcagcccgcgtgcggcgtgcgtgagggtcgctggagggaggcggccgctcggcttgggccggggcaggcccaggcgggaggaggagaggagggagtgggccagccgggaaggagggaagaaaggaaaagagagggagggaggagagactttgggtcagctttggcccaaaggaggaaggaggattatttttagtttttctttttaataaactttgttaattgttgttgttgcttaataattatttccggcgttctgaaaatttaagtaaaatttgagagctccttttagaccaaggagaatttaacaaaaattctccgggccacattcaaatttttcttgtatgtattttagtgtttgccaatttcttttcgaattttaattaattctattattccttttaaagaataatttttatttcgggatgaatttatcaggacgtgacaactgagctgtcaccatcagcggcccacctctcatccgcagcatataacaccaaataatgatatcccgtaatctagacacaaatgtatatagaaaagtattctaataaaagcacaaagcttacaaaagagaagagaaaagctactagagccatacccgaactcttccgaagactttcgtactcctgatttctactctattcctattccaccagctagatactactaaactaaacttgtgagaaatgagagagatcttgcttgaggtgtgtgagtgaagtgagaaggtgaagtccatatagaggtagttatgatggttgtgaaaggggaattgttcgaagtgccctccaaccgtcattgggatgcaattttggacgtccacgccgaaccctgcatccaacggtgccaggatgggctgggccatcctggcccatcttcgggtggcggcctcctctattgcttcactatgcagacttgtaaattttggcccagatcatcgtgttaactttgagttcttggcctattcatgcataaatctgattctcgacatcgtccgattgattttatcgtttgtgttgtcaaaatgacaactgcatacatcgaaagacatatttactcaaaggtggttggaagaaaacgaagtgtattgaattttgatttttcacttgggatccccctattacatggccctaggggactatttatagccccattacaggttcttactactagggtttaggttatacaggggaatttacatgattacccttacgaaagagacatttacaggggtacataatgttataggggctcatgggcccctgatgggccgtctggcgattgccggccctatagcccctaggcttgatgggccggaaaggcttcttcagccctcgcgggggcgaacttgccaaggcgaagtcgccttccttcggcagatagtcttcgccttgcacccttcgcccgagacgcctctggcctggcaaggcactcgtacgactcttcgcctcacaccgttcttgctccatagccttcgccacgggtttcggcagatgtggttgaagggcctcatgccatccgccaacaagcctctcacgggcaagggtgagattggagcttcggccgagaccgtgcaaaccatgtggtatggtatgcggcgccccctttcgaccgatgctcctgccgaaacctacattattctgcgaatgaagtttgttatttgtgcggcttgtattattttgccgcactttgcctcctgcgttgggc

SEQ ID NO: 12940 - DNA, 4873 bp, Oryza sativa
atgcttttatgcatattttctttaagaataatctatctccacttgtacttggaattttatttggttgcagagaactttacataattggaggagaatcgatggaaattaaccgaacaatcaatcgaaatccgtcgagaggtagacttatgggtgatgggcttacaaatccagtaaaataacatcaaatggcccaaccactacactactggaccgaggagtcatcacacaacgcacctgcaaatttgtgggttgattgggccaggctagggttcggctgaacccccaccagcgccggtgatcgcctcctttcacatggacgtccaggattgctccccaatgacggttgcgggtatttcggaatattccgaccatcacaaccgtcattggcagcctataaatggaggtcccttcgctctactccaacacacactcaagaaaaagatcaagaagctctctctcaagtttagtttactgttctagtgctagtggagtaagaatagagtagttctcttagacctcgagtctttaggagatttcgagtaaggctctagctcttccttcttttgtaagacttatagtattaataaaatattcttctttatatagctttggtcttttacttaattcatactattcaagtaccgactttagttcgtatttgtctcgatataataatgtagctagcttacgagagatatgcattggtgtgggtttaatgttcatttctatgattgctctatgtctgctgcagtgatatggagtagtatttagtaatgtaagcgtgacgcttagattattagtaccattaattggggttatatgctatgggtcagtagaagtgggctgctgatggtgaaaactcagtacgggtattcctccacgttcgtatataatactaagacactttcctagtatgggtactcctctgtattcaataccgatcggatgtccatgacgggttgtcgtaagaaaaatggcaatcagggttagtcttttgaaacaccaggagggcatagttagggggtttggttggatgatcgtatattagtaagtgtaaactaaagatgactatatattagaagtacaggaatgaatcttttgttcttctttctccacttagcctagattatagttcttagttatttcttttgtgtgtcaatcttatcctaccccttgaattgattaacccctgcatatactttggtgaatacaagtaatatataaattattagcatagtactcttttagcatatctccccttgagattaaataaatacgataacttggaatacttccgggtgaaatgctacaatggtatattcgtgcgcttgcggattatatctataaccgtaaaatatatcgggaatatttcaacgccattactaggaattatatttctagtaatatcgttaagaaataccaacaaacatttctagcgccgttgccgaggaagtttaatgattaagagtttactacatgctaataatcttatatttaccttggtataatcactgtcctttacaggctacccttgattgtttttgttttattatgaaaacaggatagtacatgattggtttcaatttgccgaaaaacttccatgacaacacaaaagccttctttaggagcgtcaaaccacgtgttgtccctccttagaagactctatcgacagagaaaccagccatccaagcgtcaccaaccttcaataccatggctcagaacactctccgcgagttcgttgctcactctgttgacaatgagcccattgggccgcaagtcaagttaggagacggtgactttgacttgaaaaccagcgtaattacgatggcacaagctaacccgttttgcggcaagcctaacgaggatgctagtgctcatttgcaacagtttctcgagatcagtagcacctagaccatgaaggagttagcccagatgccattagactccgcctgttcccgttctccctccttgggagagctaaacaatgattctatgccaaccgtgcaacggtgaacacgtggaacaaatgctctacatcattcctctcaaaattcttctcgatgggcaagaccaacgcccttcgcgagagaatatccagctttcagaacacgagagatgagacgattcctgaagctcaggaagggttataggagtacgtcaccgtctatcctcatcataggatggacaagtggcttatcctgcaaagtttctataacagactaactccctcgtcccaggatcacctggatgctgcagctggaggagccttcttctacgagacggttagaggcgccgtagatttaatcgagaagatggtctcgaacatgggttggagcgaggaacaactccaaacccgtcaacgcgacatgcacaatgttaaggagacggaaatgcttgctgccaagttggatctcctgatgaaacgactggacgatcaagagaagaacatgcctcaaggcaccgtcaaggccttggactcacacatcacatgtggagtctgcagcaacgcggatcattccgggactagtgttgtggataacggttggtacggccgtatattcagatgtcaagacggtggcactgacctctccgccacattttagcaaaacggtgcacattagtcgtttcagctagtgttgtggatgacggaatacggatgtcgtcggacttcctccgaacataagttccttgcttccgatgatgatcatgagactgaagtttcagataatgatgttgcacttgatgatgattctttggagtaactcgtatcttattaatttgggaccttgttttagtgtcacttatatagtgttacctgctttcggtattcctttatgcattacgaaccaaacctatcactatttgatgcacaactacgagtgttcagacctatattttactatatgtcgagttaacatcatgttatccttatttttatttaagaataataggtatatacacagttatatgcatttatctgtaaaaaataataagctattatgagttatgtacatatatttgttcaaaacgttaaatttccgtcaaattccgattattcgtccgtactccgattaatcgtttagcggtaccctctccatccgacatccgtattccgattgttacaaactttgcaacatgcatatttaaattgtagttcttattatttggtaaaacattcataaacccatttataacaaaagaaaaatgctaactgccgtattccatgcccaggtgacaccggccgcagggcccaagaaccatcaggttaacgctgtcagggactttcggctcaacgtacttccttgcagcggcgagggctgtctcggcctcccggagagcctctgtactcatcttcctgcaccgatcataggaggagcacttcctgtcgtaaccaggggaggtgtcaagcgtcaggtgttcgagcgataacgctgcgatcacgaggatatggcatgtcagctcgaccaggctattcgccgagcagaaaccggtgatggtcaccttcctcaggttgccgacgatgccaccattgcggagtttgctggcctcccgccccctacatgaagctccatcgtcaggattcccacggttctggtcgttgtaccatctgataccatatgcaatctgtaaacatgaatttgattaacatgtcataagttacaaattaattatagagtaaatttgagaaaaccctatattttactgtcaaagttacagaaaaccctaagtatattacggttctaaagttttacataaccccacccacgtaaatgctgagcatggatttaattaaaattctaaaccataattattaatttcttcactaaggtagatagtttaactcttcactacttcgcaaaaaaaaaaaaactgcttcagatattcttgaattaatcaagatttcaataattgtggggatttataaaacatttagatcataaaacataaaaactatggttttgtgatttttttttattttgcaattttgaccataaaatatggggttttctacataaagagttgagagttgtgactgaggattgactcgtaaaatgaaggtctccaaggcaggacaagcatcaacgaaactagccaaagagagaaagtcatagcctgcgcaaaacatagttgattggccaaggcagatgacgagatgcttgagttgttggaatttgtcatgcatcactggtgccttcaacctctgaacaaaaaaagaaaagagatcaaaacattgaattactgagcacgcaaccatgcatgcttaacatgcatgattgcacaaaatagtctcaaccgctcattgatggcaatggtacctagtaaacagtcgacagcacaagcgtttctagattcagcgcggcggaggggagcttggagccggcatactggataacgtcccccattcgagtggcatgcacctccagatgcgtcctctcgagcgcgccaccgagccagaacctcagcagcggccacccgtcgtaccagaccgtggcgagcatcggcgcgccgctctcgatggtccgcagcatcctgcacgagcgcacccgtagggaccttagccgccggagtgcactaggtatcttgagggcgcctatcgaattgcagaaggacagatccagccgctccagcacaaggcagccggcgaggaagaaacccagctcctcgtccgtgatggcgactctgtgcaagcacaccgtcgacatgctcttccagcagccaagcagtgtggtcatcccttctgtagggtggaagccacaggaggacagtgaaagagactgaagcgacgttatcttgtcctcatcgtctgagagaagcgagcagggaaatgtgtactcaggcagacaatcatgaccgtagtagtagtaacagtcgt

SEQ ID NO: 12941 - DNA, 799 bp, Oryza sativa
agccatgaaagctgtcaatcgggccatccgtgacagaagccgaatttccaaggttaaagccgattacggatgacgatggagaagaatgcacccatcgaagatgcatgtcttatggggaatatgcatccacaccagccaatgccggagcaaagttatcggctgagccgctcaaggactggttctgcatcttttatgaaggctttcagaaagatgcccatgtttggttcttttatgagaattcagccgacttggatctcccatcggatttcagattcgaagatatcaatcatgagagataccagaaatccagagaagtcttttcagcttcgataagcccatgcatccttcctatcggcattcatcaagggagaaacatacaagtctcttatgaattttatcacccaatgagctctgccagacagtttggaatgggacaactaccaatcggcttgttgtttgccgacaaaatccaatgccaaggagaaatttcatcaactctgatgatggatcggctactcaacatcccaggacccccttttggtagcattgagaacatagagctagcaaaattcaggagcagggcatttgacagatggtggggtgaatggaagctgcatctattccatcaatcggcttccatgtacatgacagacctctttcctgatgtcattcctcaggtacatctttactcttgtcaattctgtttgaacaattattattgaaatttgactaacttctcttgttatcttgcatataacagaatcctctcctctcccagagtaacagtggtagggacata

SEQ ID NO: 12942 - DNA, 7063 bp, Oryza sativa
agaagtccatttctccagattaactcccttgcttagcttgctagccttctctcctccccaaaaaaggactcctttgccttcttcaagaaaaagacatccatccttcctccaaaaaccaaccaaatcaaacccaagaaaccaaaaccaaaaccaaaaccaaaatagaagctcgatcgatcgcacaaccaccatgacgaacatctaaatgactcgccgccaccgacggcgacgatgaggaggaggagatcgagtgagtatgagtagtatatacctggtgttggaggtggaagatgtgggcgacgcagccgtagacggggtcgcggaggcgggcctgggcctcgtagcagatggtgacgacggcgtcgaggcggcggtgcgccgggatctgctgcagcagcttggacacgttgctggcgccgaacaccttgtgcaccgccgcgaagtgcgccgccccggcctccgagtcgaagtagggcgcgaagatgcacccctgcacgcacttccgccgcaagaacttgcacgccccgcacggcccacctcctcctccacctccggcgccgccacctcctcctcctcctccgccgccgctgccgctgccgctcgcgctcacaaccaccgacgagctcattcttggaatgagcccccaccacctagtctctagctctcttctcctacctgctagatgttgttaccttggcttgtgtagggttaaaactaactcaagatcgaccgactagtagcaagagagagatagacagcgaaaattgtttgtttctctctctagaactgaatcgattttctttctcacaaatggtagagagagagagagtgtgtgtgtggagtaagaatggaggaatgaggtgggggcggctgtacatataggagggaagaagggcaaaagcgtaaatacagcagcaaagtgataagtaggctgtttgcaatcccattggtggaggctggtgtatatatccatatatttctatactagtccctacttaattactgccaattttgggcctagctagctttatttactttatttttatttctttctatgttttcttaaatgcatttttatttctttatgttgttgctggaattatacatattaatggaatttttttatttaggtcatatataaatgtatatcagctactaggtggttttctatctctgtgttttctttttggtgccgttgtattgatgagactttaaagccaaggcaaatgcttgcaattggccttggcaacaagtacacttctctttctcaaagggttagaatattgcgtgaagcaaactggcctggctgggggagaacagcaaagaccgaaaattaatgccaattgcatccatccattcgctctcatctctctttttttgtttttttgggttagtttctctctctgtcaccaccatatatattgatcacatttcacaccacctgcacagaccaacaaggatgatctcgtcgcatgcactctctcccatgtgatcctaacatgacattcttccactcaatacgccacacacaaaattgttagtttttttaatcataccagaacttttatttagataaattatagtgtatgtatatattatagttaagcacaaaaataaattataatgcagacagggtaaccccaaatattgactaggatgatgtaaaaatcttattttagcacaaattgagggtggataatcgggataatataccaaatagaaccgctaatgctatcaatggtagcttatcttgtccattcagtataaaagtatacttcaccgatttattaccccatacaatttgagcgagtaaccgacaaaagtttctaaacatagattatcaattgtaatatatcattatttatattttttaattcattccccaaataatactaatgctacgattatcggaggcatcttctaagtttagcgtattggcacactgacatgatggtgattgtccagataaacttctaaacatagatagaactaatgttacgaatcgtaacgtaactatttaatctatttcaattcattcctcacagaaaaatatattcatcgtttaataatcccacataattagagcgattgtggatgtaaacttctaaatatagatagcactagtgttacgaatcgtaacgtaactaattatttaatctattccatacctcttaacaactatatatatcatcatttaatcgttccacataattagagccgtggatataaacttctaaacatagatggataatgacatatatgatacaccagatcataatgctagtgctatatgaattgtaagataacaatttaatcttttgcaaaacatgtagttaaaaagaataaaacggtaggtttatcggtcacatattctaaacttagagctctaacacaaatacattctattaatcatgccatatctagataaacttctaaacatagatatagttctagtgtcatgagtcgtaatgtaactgtgtacgtaatctatttcattcctgatgaaaaaaatattatatatcatcgatggtcctataaaattagagcgattgtgggtgtaaacttctaaattaacatagatagatcaagatataatgacatatcatgagagcgactgcatagatatagactctttaacatggatttcatctaatatggagtggtttaattagtagatttgatataagatggtaatgttgttttacttttatcttagcaaggactagtagtgtcaaggtagaaagccaacttctccaatttactgtttgaatgcagtggtgtaagtaaatggttttattgttcttttagtagacagcataaaataatatatgtaaaactatagcttgtaggtggcatcctctaatcgacaatatcagttttttgttctatattttcgcacattataaccaatatgtggtgatatgatttttcagacatagatataatctataatgccacatatatacattcaatcaaaatttccgcaatataaccgaagtggttgatatgaacatctaaagttagatggagagcaaaatgggctggattatgtatcagtaatatattaccatcataaatagcgtatataatttattattttttgctggctttggattgtatcactaaaaaagtgcagttatttttttcgacgtatctatctagctaacgcaaggatagaaattcaagagctccaaaaagttattctttgagtatgaaggcttaattaaatatatagctagctgccagctgcgtccgtacgttgtcaacgtatgcatgttatgaactgctgcctagctttggactctcttcattcagtgatcgatcgatcaggtgagaagtaaagtaaatgtgtggctctgatctgcattctgcaacgcgctagctaccttaagcttactgcattgctcatctcacatccgttacaaagtgtacgtaccacacatgttaagccaaacagagagaagaaaattaaagcaaatgaaagagaaaaataaaaaggacacgacaatgaccatctgtatccggaaaccgttgcagagcttgcgtgaatttcgaggcatcgatggatcgatccatgcatgcccagacatgcatgggaatcaccgccagccatcagctctagacacttcaccgcctgcagttacgacttacaaaactttatgtttccttgaggttacatttgaccaagatcatatacgcgtaacacgtatatataatcatgcagtagtttaatttttatatgaaagattttctcatatacatataatacatgtataatatgtatgagatatcaagataatgggttacaaaggatgtgattgtgaaataaaaatagatgcagggtcgggataatatggggtgcggtggaggttaaaacttatcctttaaagagtgagataatacttctcaaacccaattttcaaacatgtcatacataaatatatgtatggacaatgattttatcagtttttccataatcacatgtgttattacagcaaagagtacctcttccttgggtaagatatagtaacatgtaaatatgtgtgaatgatgtgtgcacagtttgaaccaaagcatatgctagcttctaggtagatgcagcactagagctggcatgcatggactgtgtgatcactgtacagtatggcctgattgatcaggagagtgtgtaccaagcaaacccttctttctctctctctctctctcccatacacacagagaatataatgtgcatctgagatctatagatggatgcgtggaagccaaaagacggcaccctggctaggtaagaaacttgcatgcttgaccacacctctcaaattcaccacttaaagttttttgtgactcaaacacacaatcttatcacaatttaattaattaattatgggccaggtgtccattgatccatcgttaatttctagttatactaatcatcaaattaattgtcacatcaaactggaattcatgatcaataattgacaacgtacaactgtatcactgataaaaaaaaacatggagtcctagctacaaaattcttcaatgtcagtactaaccatccatatggagaatgctgctaaatagtactgcactctttcatatggagaatatgcgtacatatttagcttataccctaaatatatacatatatcaaaaatacccctggagttgaagaaataccatgcatcaaatagatccaaaagtggttatttcctttttgtcctttcttaagttctccatttccacagaactactatagacaaattaaaccactttttttggttgaaagtatccattgctttattagttgtgcttatatatattacacattaattccttagcaagcatctgctgaattatttattcttttatgcaaggaattaagataattaaaatgaattggtcagcaacagaatttggtactactactttacaggtcaagtgaactccaggcatatatatggatgtacatacagttgagatcacatttttttgtcttgcattgctcctgaaccttttgtcctttgcaatatatcttggacggcagcaaagcagttacttcaactttattctgatatttaggagaaactgttggatggatccatgcaggatccagaaaacatggtagtgatttacaaaagctgtactaacgtagctttctccttggagcagctccaatgtgatccatcgatatgagaggctccagtttttgtcaaaagtattataaaaatatatatgtggctacgtaccagaagtattgtacttgccactgacgccaaattaaaccattcaaactaatataattaaattaattaactgtgtaacgtacgtttaattaatttattcatacatttttaattaactttagtcacgatagtagcaagcttgatgcgttgatcaggtgacctgtttcttgcagcgtttgttctatctggaagctagctggttaattttgactagtttcttgcagccgtacacagccaatgtttccattcatgtttgtatatgtagtctacgatcgacttgatgtatttattcgcatacaaggaatgtaggcagagcactagctacaggacaaaggcaccatatttttccatcgattttaacaatttagcaacttcttaacttaatatgatgcaagagaggaagagactgcatcgatttctgtgtattatatatgaaaaaaaatgttttagtaataacttcttaccgctgagttttctgaactttttcctcacggtcacaattaagcaattttaggggctcctttcaaacgtggaattgaaaaacggagaaatagaaaaagcagaggatttcgacatgtatactaaaggattgtaaaatacagaaaaaatataaaaatagtcgtttgattagacctgagaaaaaacatataaatcagatataagaaagatagtcttgaaggataattaatttttaagatgttggagctcttgctaacttattttgtttttaaaacctctacgggattgactattccatagaaattttaaaggacgattaaatccttcgttttaaaaccattcctaattatttctccaatagaattaaaatccattaaaatttctatgtgtttttccagtaaaaaaaatcaaatggaccctaataacatgaaggcccgtagaaacacagagttagatcatctaggtgcatgcatgcaagaattttatgatagtattgtcggaataaacagtttttgtgattttttttagcataccttggcctagtaacataaaagcccgtgtggcccattgtttagtgttggtgggattaatctccacaaagtgagtttaattaattaagcaggttgggccagtatacgatcgacatgttccaaacataacacatgttaagccttttacatgaagaaatgatctaagtataagtacgtcccaatagctaattagacctagttttatttcaaattttgagatataagacgaatttctttgatagatttgacttaggtacgtttagcgagttttgaggaatttgacttagatttgacatatttttatatcatttaagttggatttgatatacattttttaacagatttgacagacttagatttgtaaaaactactaaacatactcataatttgacagcatccatccttatctgtatatagtttctttctttttctttcttttagaggtattttggtctttttatcctgtatattccatacactcctaacacttggttagaaaagggtcggacagcgagttccactactacatgatagattttcctagacgtcgcccccttttgtttccatgcggtccgtaagtggaaccgcatagaaaaatagggggacaagcgctgggctgtcacccgcacgggaaaatgcattatcccatgcgggctactaagccaaccgcacacaaattgtcacccgtacgggcccacctcttttaaccacgcccgcgcgcaccatctcccactccacccgctcctccacctccctctctcccactccactcctctcctcctctcatcccactctcctctcctctcctctcatccactctgtctcggccgg

SEQ ID NO: 12943 - DNA, 4070 bp, Oryza sativa
ttcgccgtctttttggaggcagggctacggtttccctgcaacgtgctattgccggagatccttcgcctcttccaggtggagcttccacagctgagcccgttggcgcttgttcggatcgctatcttcgattgggcgtgccggacttctgggtttgagcctaacgccgagctcttcggcgccatattcttcgccaccgtgaactcaaagacagcgattaccccggctgggacgaagaaaacagtgttcgggagcgtgaactttaacgttcgtcccgagcggtccgatctctcaccggtgaacgctgccatgtcgaagtcggaccgccattggatagctcggtggttctatcacaccatccccttcgaggctggctctgacttggcgaaagcccttcagtgccggcgcaaggtgatcgcgccgaaccggaaacccaagatcgccgtggatggtgctatggagacgcggttcgtcctgctgcgcagggtctgctcccgccttagctgccgtgacttggtagaggaattctgcatacttcgtatctttcccctttcccaggcatggcaagtcacggttgatcaaggcgaagaggttgacggtttgccgaacctgatccttcctgaggggacgaacagtaagactgttctcttgctatatactgttgtgctttgttattttgccttgtctgacttttaacatagctacacacttttacttttgcagtgttgaccctcgaccaggctgaaaacgaggcccgcaggatgatcggcgacgtgtcggtcgtcgagtatagccagctgctaacacgacaagcggctgggcgggcgaaccaggtttacaacggcgaattgcctcctcgggcaaacccccacaaagcagacgacaatgcagggccttcgtgaaagcgaatgcgcggacaagtgaagcttgcccctaggaagcgaagggtccctgcttcgtcggactccgacgccgacgacgaggacgataccgaagaacgcgacggcgaggagaaaggagaggaggaagaggaggaggccgtggctgataaggccgcgaaagagacggttgaagaccgcgtcgatacccccggctacactcctaccccaagtccaggtcacaacgagaccggggtggagtcgaacagctccccccttcgtcggaaggatttggaaggggcgaaggctctagttgcgttctcctcgggcaaggtggcgaagggaggtccggtgaagaagatctctgaaaagaaaggactcgtcgacatcgcccgcgttttcagcgacgacgagtcttctgacgggactccaacttcgcccgctggccgcagcttggacctttcgactgctcccctcgctccgctaggcgctgctggggcaggcagtaacgccgccgccggggcttcagcctccgccgaacggatcgcgtcgactgcggcgagggttttcgggagccctctgcgtgagccagctatttcgccgctagtcaaggcgaagtgtgcggccgccaaaacatctgcctcggagtattcccttgcagcgccccacttcgcccctggtgatttcgagactcgagcggacctttttccctttgtggagggggttagcaaccttgtcttgctcgccggcaccccgagcctgttcaccgaacttaacgagttcgggtatgccttttcttccttcttcgttttcctcttcgtccctctttttttacgtctcacaattaaccttttgttcctttcgcccaatcctatctttcatctagattcttgtggctcactgttcgacggagcgaaccatgcgggcccgttttgacggttttaagagccgtcttcaggccaaggacgatgaaataagccgcaagaatttggaggtggaggccctggccaacactcttaaggaggcgaaaactgaagtcaaacgccttcagtccgagctagataaggggaaagaggccagggccgaggttgatcgactcaaggccgaactggagaaggagaaggcccattcggcggtgctcactaattactacaatcttactgagccgaagatggagctcttcgccagaaggctagcagggccgaagcgagcacccacggaggagtcgcagcggttttcgtgggagatggcaaagaccgccgaatccgcgagaacggcttgccaaacgctccgcctcgcccttaccgacatgggcgcgaaggtgcggggggtccctgccgaggatgcctcagccttcgacttctccgagtggacccagcaggctggcggatcggtttcggactgcgccaccgcgtacggcgattgctgtgcgcgtgtatcggcggccttcaccttaggccttttgcagcagttcggctgcgagcacgtcgcggagttccctacctatgcgaagggggaatgggagattagtgcgcagaacatttcgcccgctcttcgtgcgtggcgaaaacagttctggcagaaagacggccggtccgctgccaaggcgcgccttctggagcaactggcgaaggcgaaggcggcaggtcggggcgaaaaaaagggcgcggcgggcgaagaggttggaggcgatgcccaggatcacccagaggtgtgaggccctccgccctttctttagagttttgtagttttcctccctcttttgcgttcacctagagaggcaaatgatgtacattcggcaagttgccaccaaaccttaaaaaaggcttttttctatatttggaatgtatgacacaatgttaaatacttttttaatgatcaaagtctttggcttattatttcgctcatttcgcatcatgccataccgcccccttctttcgcctaatcctactatataagccgtgttttgctttttctgcgctgtctatcagggggttcgccgaaagttgtgcattcggcccccttccgggagctggcgaagccaaaacgagaaatttgtggcattgaaggacctgccgaaggtgcgatgtccatttcaccctgtttatcacgaaatggagataaacggtcggagctataaggttttcaaggttgccgactggctgcggtcgcaccccgggcgaaccttagaagattacgatcttgttcattcaagacgtttggaggatatggctcgcttttggcgaaaccatcagaggactaaacgtcaggaaacgatctttcagcgtcgttacagtttagtctgtgtttcgccccctactcctcttaagattgtgtatgatattagtagtgatgacgaacctagttcgcctgatcattccttagggagggatagtgattatgggggcgaagatgtaatttacttgtaaggtgaattgtatcgtgttgtgaaacttctattcttccatttttttcgaagttaataaagacgtgttttatttccttttcgctattgtttgaatcgtcgcattttgtgcttttgttaggtcggaacatgccggcccctttgcgtatattagcgaaataggtgtactgacttttaaccttttcgttgttcgttttcgatctgtagcgttctgtgtcgaaagaaacgcttttgcttttatgttgatcgaacgtaacgtcgttcggctagttattttcctagacaagctgttgcggtttcaacgttcggcaagcgatgcttcggccgattcgtttcgcccccctagcgtttttcgctgatcaggcgtttgccttggggtttttccacaaattatcaatcacacgaaaaataaaaagaaggcggaggacacagagattttatactggttcaggcctccatggtggataatagccctacatccagtttttttttctcttttttctctctttcttctttttttgtgttgccgaaaggcttacatagtgccgaagggcttacatagtgccaaagggcttacatagtgccaaagggcttacatgatggtatgtacatttttacaagttggcgatttgggtgccacccattctagacatagaagcgcttgagagagttggcgttccaggaatggtcgaactcctcgccttcgagtgtcgctaggcgaaaagatcccgtcctggacttgtgtttgatgaggtacggtccttcccact

SEQ ID NO: 12944 - DNA, 2712 bp, Oryza sativa
agtatttcttcaagtacttgccattgagcgctcgtccataaacttctccatcaagtccttgtagcatgtacactcctttagacacaaccttatggatttgaaaccgtccttcccaattcgatgaccacttgctgaatttattatcacgagttcctatggcaaaatcaactccaaacaagttctccctgagaaaaagatttgggcaccacttttttgttgtaatgttgagcaacgcgttccttatccttggtaacttttgcaagagctctcaacctagactgaactaagtcttccctttcatcagccatgagatcataatattcatcggctgttaactcattttgtaattctgttctccttgagccgattcgagcttcccatggtaaaaccgcctcatgtccataaacaattttataaggaggaacttggatcgaaccgtgacaagccatccgataagaccacaatgctttggctaacctagtatgccattgccgaggataatcggaaatctttctcttaatcaacttgatcaaacttttgttagatgcctcggcttgccctttagcttgtgcataatacggtgaagaattcaacaactagatacccatgctatcggcaaactgcacaaactcatcggacacgaagattgagccttgatcggttgtaatggtctgaggaatgccaaatcgataaataatatgctcttgaacaaattggacagcatcccccaaatcactttcttcaaaggaatcgcctctacccacttggtaaagtaatcggttccaccaatataaatttgcgtcccttgctcgaaggtggattaatcataccgatcatatcaattccccaacctctgaatggccatggcttgatgataggattcatagccaatgccggtgctcgttgaattgctctaaatttttgacaatcttgacatcctttgtaatacttgaagcaatcttccaacattgtcggctaaaaataccctgcacgtcaaagcaaccacttcatcttatgagccgattgatgagttctacaaattccttcatgtacctcgcctatcgcaaccttggcttgatcggcactcagacatttaagcaacaacccatcaatcgtccgataatataactcatcatccaacaaggtgtacttcaaagccttatagcgcaatttttgagaagccgattgagatggattctgcatatattgaaaaacatcatgtctccaatcaccggctattattgtggcaacttctacatcaatatcttttgttatcggcttgtatcctgatgctccctgagccaaatcattagcttcaacattttgctctcgagacacatgttttaaagtcactagcggaaacccatccatcaactcttggcacttctcattgtagaccatcagtgtatcattcttacattcatattctcctgccaattgactgatcaccaacaaggaatcacccacaatttcgatagcatcggcttcaacttccttaagcaactgcaaccctttgaggaccgcttcatactcagcctgattattagttgcataaggcttaatagtgtaggcaaactcgaaacctgccccccgaggagaaattataaccaaaccgataccacaaccatgagtgcacactgattcatcaaaaaataaagtccaaggcacaatttcaaccgagccgattgagacatcacgatgatccacaataaaatcggctatagcttgtcctttaatcgccttcagtgactcataccgaagatcaaatttcgtcaaagcaaatatctactttccaacccttccttttagaatcagagccgataacataaacttgactacatcggctttgcatatcacagtgcattcattggacaataggtaacgccttaactttgtgcaagagaaatataaacacaaacacaacttttccataggagaataccttgtctctgcatccaaaagcctacggctcaaataaaacacatccctctcctttccctcaagctcctggatcaaaactgagccgattgacttgtcacgtcccaaaacgactctaaaatacatcctctaaattatgcctagaataattaaaatccgtgtgaaagcctccaacaattaaaatgtgcaaagttaaaagtcaaataaggcttggaggatttttgtatatttcctaaaagtctaaaatgcgtaaataaattttagtggaattttcagagcacaaataataattattaagaaataaacaaagttaaaatggttttataaaaagaaaagctctaaaaagtcccttttccctccctctccctcttgggccggctcggcccatctccctcccctccctctcctctccccgcggcccatccggcctctccccgcgcgcgcgccgctaacgggcgggcccgcccgccaccctcgctgacgggtggggcccacccgtcatccccttcctcccgccgctcccgccgcctcgcccgcgccctagcgccgacgccgccgcgaatcccgccgcctcccgccgtccccgcgtgcaatcaataggggggaattattccccgggatcccctccccctttccccccttttttccctccctctctccctcggattcatttggaaacctctcccctaacctcgaccgcgctattaatggcggccgggtctcccgcgcccatttccccgcccttccgaccggcctctcttactcccaaaccta

SEQ ID NO: 12945 - DNA, 2806 bp, Oryza sativa
aacgtttggtatagatagccgagaaggattttgcccaggggaaactgcctcttggtttcaagggctttggctaagaattgccagttggtggtaggaccgtagcttgatctgcaaaataggaacttctcaagccacatcaaaaggaaggcagtatgctctcgaggggtgacagatcccttgcccatatatgcggccacatagccagaccaaccacctatgctcttggtcctaaaatcaaactagttcttggtgttcaagctcatagggttagccgatgaagttacatctaatccagtaatcatagtgatgtcaataaggatagagaagaagaaaaaaaagatgacaacaagaagagatcaatctatagggtaaaaaagagtatctagccgatgggtacttacctctgcatactcggccgatggcgtggcagacgggctggcggaactcgacatcgccgcgggcggaaatttggccggagaggaaatctccgtgggatcgcctagtgcgccgaggggatcgccgtggagagagaagacaaagttggcttaagcggtgaaaaaggaggtaacagtgtgaaatttctcggggacgatggttagtatttaaagcgaggcggtaacggtcggaaaaacggcaatgagcgatattcttggaggaacggatatggcaattccaaaacattaccaaatattccggacttggggggcatgtgttaacaaccaaatttggtaatttcagtatcggagatggagataaaactgacgcagaatccaagatggaaatcatttcggaaacagagaaaggatcggctaaagtccgaatcggctgtgaccaggatcggcggaatccgaggtggacaaggtttgccgattgagccgagtccgacaatgtgatgcggtacacgttgtcgggttgagttaatgcacttgatgaggattgccatgcatagattgagtcctgagaaggcaattgtatctattaattaggatatttcatgtaattttcttagagatatgtttgggcaaaagtctgccgcaaagacttatagtatcttagagtttgttagagataagagtcgtgtccgacacggacatattttgtaatctcgggtataaatagaccccaagcctcatgtaatacaacaacacacgttcaaaaacaatctcggcacatcgccacccttttactttcgctttgtttcgacgagttcttgctttcgggttgagctgcatcgatttcgatcttcaactagagctaaaacttgttatggcggcttccgttctcgggattagtgctttcatcttcatgatactctaatcttgcttatgtaattcgtcgagttatcatatatcttatataatctttgacaatattgctatttaaccttcaatcggctaacgtctatcattggaaggcagccgattaggttaaatatcaacgttggtttagattatataaggtatctaccactttatgaaacttcaaatggcttgattgtctagattttgttcttcttttcatacttatagctgcatcagttgagtttgaccttataagtcgtgattagaaccatgatctccagcctgctttttagttgccgattagggtagagtcggggtttcagccgatcttacctgatttagctttatattttatgtgcttgattgatatactagatctgccctttacattaagatcttgttgcatttaagtatattaagctttttgtttgatatattttccctgctttaatatcttagtataaattggtatcggagtattagccgatacatgctagatctatttaatcggctaggctatgaacatatataatttcattgttaatatatatttcgatctaagtgatttatactgtctcggcatggcgaccgatctatcccaatcacttgatttaagtatatatcgacataagaattatatattgttagtatctacagccgatcgaacagatttagttctttcttacttattgaaaactgtcaatcgatccaaatatgacatcggctcagagataaatgatatgtcatcggcaactagccgattggctatcatttatggatttaaccgcgatttctttatctttatttcttattgattgtaggatcaaatcaactggtacactcatagatccaaaagcaagatttcttggacctgcactggagttaagcagatctcccaggcctcgtgtttttctcatcaacaatattagaagtataggaatagattttctttctattttctttccacttagcttagataatatatcatgagaatgagtagttaatgcttgtgtgtcactctacccttggattatcttaacccctacttagaatatgattatcacaactaatatataaattattagtcaagttctctctacataatctttccacgggataaaataaatacaatacccttggaatactctcaggtgaaatgctacaatggtatatccgtgcgcttgtggataaactctgtaaccataatttatcaggagtatttctgcgccattgctaggaattatatttctagtaatgtcattaagaaataccaacacaccattggcaaaggtgggcgtgatggagtatggatggacctatatttttgtctatgctacttccggatttacctaggcccatcggggattgctcatcgcctgtatagggatggggatgaaaccgggggtgggtgtgttggttaggggtggttatatggagggttttgtcgcgatttcccccttcgcagtatcgtgggggtacttcagggtatggtaacatgtgtggaa

SEQ ID NO: 12946 - DNA, 9932 bp, Oryza sativa
ggtttgggttgggcctatcgcaacgtggtttagggttggacaatgatgatgttaatattgcttaattacctactgttttactgctttcaacttatgatttaacaatgatgatgttaatattgctttcaacttaattaccttccccttgttatgacttgttgagtacggtagttgtactcagttttgctttatttttcccaatcccgagaaacagagaatctatcgaatggtgagttctatgaggcttgtgctagacgttgaggttttgcctgtggattatggagaaagcttcgctttgctgtgaagattatgttttgatggtctttagtttttccgctggttttctgagtttattttatatttttgtaagacgtggaactgtatcaaattgtcatctatgtactctagttgatgcttggatagacgttaaatgcacagatagccggtgattcgggttgtcgaatctcggggtgcgacagtcaggttcattgacggtgttcgttcaactcttggactcggatttggagagctccgacagttctcccgagggtatctctcctccttcccttgacatcttcgtcgtgctaatgatggaggaggctaaagctaaggcacgcgaatgtgaggctgaggggcgctgactgaagaagcagcaggacgacctcgataggcaccaagaactgcgtcgtcatgatcgggccgccagtgatgccatactccaaaccaagatgggggcgcacgatgttttcatgacgccccaacacaacatagttgtgcccaaagctctagtcaacaccatcgacttacccgagaaccccgtcctcaactcgtcatggcctaggtgaaggctatggtcgaggctactgccatccaacatcaagagatggcgcctaccgtcgtctctaacatggccagcgagtcatccaagcggctgttggtatttcttaacaacgttgttggtatttcttaacaacgttactaagcaacttaacccctagcaatgatgctagaaatatgggcggtaattatttacatttacaaaaatgaatctgcaagcgcacggatttaccaatgtagcatttcatcccggagtataccccaaggtattgtatttttaattcatgcctatgacagatcaaaactgttggtatttcttacgatcatagatagaatccacaaacgcacggatataccgatgtagcacttcccctatggagtattctaagggtatcaaatccaagggaacgtgtgtgattaattcatcctccggttaatccaaggacaccaagcgaatgtaggtagatgatagagaggatttcctagtgtgaaacattgtctagggaaatattaattttaattctaatggaatacttcaggcactagcaacccgctgtttccagatgtcgctctactccgtacccggacagggaggacttaagggctcttgagggctgtcaccacctctacacccacctcaaacgtactgtgggatacgcaacaattactggataataattacctaaacaccacgtctaagcaattaatatctactttagtgtttataactcaccaaagcaatcactatattttagttggttgtagtgaacaataatcccgtatgctaattaggaactaagagataattctcacaagataaatccaaattactcaggaagataattctattaatagcagagtaataaacagaatagacgaaccaggagaagattaccgacagctccggaattcctccgacttgttctactctactctcttactaattctagtatacaaatagtacaatagagtctcttgtaattcagctcaagcttgaaagtgtgtgtgtgagtgaatgagtaaagctccttaaataggacagttaatgacggttggcgaatgggaaatgtccgaagtgccctccaaccgtcatcaggggtgcatctgggacgtccatgccaaaccctagcctaaacggctgagatgctggttcggccgaaccttgcctggctaggcccatccggcctggcttttggcctatctcccccactaatcctgctctatccaattctcggagttttggaccgattctctagtgttttgataaagttcaaaacccatccttgtatggatatgtttccttctccactccagtctgattttcctcccaacttctgggttcatcacctgcattgaataaataccaacacttgtggaatatgttagaaataatccctaacactatgttggatgtttcattatctggactttatgcagatgttgccggtataaatttggcactaaacaaccgccaacaaaaacctatgcaggggttaatgatatccagtcaaaaagggcaggttgacacatgaaacaccaagaagggctactctcatactaaatgaataagcttagtatagtagaaagaaactagcaaagaatcctatctatacttcagtataaagttgtctagtatacatttactatgcactaatcatacagccaataccccctaactacgccctcctggtatattgagagaccacccctgattgccgagttccttacgacaacccgtcatggccatccgaccggtaatgaatacggaggagtacccacaccaggaaaatgtcttacgattatatacgaacgtggaggaatacccgtactgagctatcaccattagcggcccacctctattgacccgtgacatataaccccaattaatggtatctaataatctaagcaccgcgcttacattacaaaatactactctacatccatgcatccgacatagagcaaccaagtactcggacattaaaccaataccaatgcgtatctctagtaagctacccatacgattgacacatatcaaatttataccaaagcaagtaattaaactatataaatatagcataatactacaactatataaagaagagtatttcattatataatcaagtcttacaaaggaagagtaaactactaaagacatacccgattccttcggaaagacatggagaactttggaactctactatttctactccattataactaaagacgaaatataagctaagagagagcttcttggacttgatgcatcaaggtgtgagttaatggagtgaggtgaggtccttatatagcctcccaatgatgattacaatagctggaaaggtcgaaaataccccgcaaccgtcattggggaggcatctggattgtccacgccaaaggagagagccaacggttgagatcagggtttggtcgaaccctagactggcccatttggcccacaaatcggcaggtgcactcctcattgattcctcagcccagcagtgtagtggttggacccaattgatattattttaatgggtttacaggcccatccacccataagtctgcctctttacggatttcgattaattgttcggttatgttccgtcgattatgctccatttatgaatgcttctcatgcatatatgttagtagcatagcatatagtggaagtagatattttatttggaaattatgcattgcaagcatagctaatctattaattgggtaatattgacggtcaaaattggtggataacgattgtcaacagtgggcatcccgttagccggacagccagcctccccatcaacaacactctcacactgctagctcgttgtcaattgttgtcacgaccggaattaacccaacaggcatttcatacatgcgtgtattattccttgtcccaggaggcaaggtacaccaaaagttgatagaattcagagtttaacaagcggaagcgtaaatagttaatttattacatgggcgacgaaggcccagcacactcgaagataaacgagaaaacaacggaagactagggcgacgaccacaggcgcttgacggcaggcatgagctagacaccaaagccttcatcctccaggaactcctcttctgggttgggggaaaatttagcaagattgagtacaaccaccgtactcagcaagacacacccacaaatgtagaataaatgcaaaggattacaggggattataatataggggttaggatttgcagtaaatagcatttagaagacatttagttgcttagggccattttgtaaagacgatcctagagctacacagtgttattaatcaaggccgtgaacccacacgaacttgccttaacccaaggcatatgatgattcagaccgaactagcaaccagacccaggtcccagctcatcccaagccaacccaggccaaacatttcacattttagttgttaagcaagttttaagaaatataccactaacttgggtacattgctagacttacccataaccgagggcgcggctattcgaatagattatactctcataagaggtgtacatccacaagacacgtcttcctcacgtataaccacatgccacataccaccacgtcatacggacagaaggcgtgacatagttcccgacccatcctagccataaacaagagtaccgacccaaccctggctacggccagaatcccgggacaggtaaccaaggttgagccccttgcagcaggacaccggccctgtaccatgacatctcgactaccggggcacagctcgtgtagccttcatttgtcctagagatgtccatcgagccccgacttcgtccatccctatccgcgtacttttgcccatgactagactgagccacaaactacgccatacccactagacatgtgaaagtacggtagtgctttccaacagaggcccgaagaccgatccttatagtggccccatgtggaagtacgatagtgctttgcaacaaaggcccgaagaccgatccttatagtggccgatgtgctactatcaaaaccatgcacctcgagcccagcctaaaaccattttgggggttttgaatagaggggaaggtttgtgtccaattccacataagccaaccattccataatgtccaaatgatatgaggactcccaaagtctagagttataaaaccacctaaagtttgtttaatttaaatggcgaagcatctacctaaacttggtactagtgagaccgtaaaacagtacccaccagcagggttttggttactctaggcaataaaaacaataacaataatgtgaggacgtcccaaagcctaggtggtgcaacgctccaaggcatgtcagcgcgaaatatctggatggatggggtctcaaataaaacccaaataaatacggtaaccatccaacctcatcgcagaccccgacatgtcttgaagagtgcactacataggctctaagccatcggatatgaaatagaagacacaaccattggaatagccacagcagtcatctatgtcatacgcccgtcaaccactcgatggtggcgaccaaaagcgtaccctagagactcgatctcaacaaaggcatattccccagttatctcaaccatttcaaacccatcctcatgtgggactagttgcccaggaatgcaacatagtctcacataaatcatctcaagcatgatatccaaataatgagtggttctaagcaataagcataaataatcttaataaggttctaagtagtacttggcgacaagccataaatattggttcatgcggtaagcgtgctacccaaaagcccataggcaaaccgactagggtaaatccctagttagaaccatcctggaaatctacaacatcacaagctgcatcaaactcctcatccaaacagtcattatctgcagcagggtctgagcataaacaagtaaaagaaagcaagaaatcagtacattaatcaaattaatgtactggcaagttggaaacaatcctagcatactacatgttggccatattcaaggataagctgtgtataggttaatttgcataaatgccaactttagttcacaacatgtttcgcaatggaattttataacaatagtatagagtaagtaaaacttgtaatgtgaatgaataaataacacacatctacccctcgaggtagatcatcaccactctccatcatctcatcaccattcacggaactttacccaagttcaaaaacaaaacattccaaccattttccaggttcacaagagtttatcaaaatcacaaattatactcatgacacttcaccatgccgctcatgaccgtgagcacggctaatcgattagttttagactctgcagagtttgtacaacttttaagcccacatgatatggatcactctagtttttccgatacccgtcggtatcaccacactctacacattgagtgtgatctagaggtcataacggaaccattacaatgtttattgtctagccttgcaccagcacgatgtgtattttacccatgctactagcaaggtagcgccactaggtagcgggcccacgctttaacctagcgccgtaaggaacctagcctggaatccctcacgaggcacgacaccgttgtattggagagactacccgctaaaatcatcacataccacatatcattaatcaatttcatcatatcacaaaccataggaagttccgataagttaccaaaacccggtaacccatacccttcggcctaccaagatgcaaggctaaactctaaacaacttaataggttgaggccagcccatacttagcacatgtggtttgtactgttttcattagttggtgacatagagtggggtccttaatcgacccgggcgaacgctccccctatcggtgtacaactaccaccatacgtacaccactcgccacccaagtctaaaaacaagttatctccattttcagttcacaatactcactcatttaaatttctgtccagcaacatcaaaataaccattttcacatataacatttatcaaaacgagtaatttgcaaggcggtaaccgaatataagcatatagcggcaatataagcatagtataatcccaaagaacacaataattgtattcaaaagcactctatggttacaaccagcaaggattcaatatttcaaggtggattatgcagcaattaggtcatatctaccattcccacatttatatatttttttaccaaaagtaatactagctaacgtatgcatgtttgcaatagaatcatttagcccaataaaacataggatcaatgtgatcaaaggaggtgcaaacttgccttcgtttgcaaactcctgaacctgctcgtcaacaaactcaccctcttcttcttcgatgtattcttcctctatagaaaatacgcgtatacgataaatacaaaaatgcataaaaaccaaaatgcatgaaaatgcatgaaacttatgcagtgagtgtgtgctggtcttaggtggtctctggtgaaggaattttaattttgtcactttttattaacagagatatgccatttacaattaaaaaggtttaaaaagggctaatttttattaagcaacatttttgtacagaagtgaaaaaattacttttacaagtacaacgcctttattttagaaaagtttaaccaaaatcggtttcccattttttatacctatattcaattggttatggattaaacaagtcttaggcaacattatggcaaaccaaaaataaaggaaaagtttgtacagaaagtacccagttttatatttttgtaaaatagctcacagctctatggatctaataaaactggtttcacaatatttgaagttaaaatgaagtttctacaaattttagaatttctgctcattctctgttttaaaccaaaatagaaatcaattttcgaaattgaatccagccgggtccacagtcagtgaaaagagatttgcacagaggccctcggaagttgggggaatcaacccgtacttcttctgccacctggacaataaactttattaagagtccttattcttttgtttatttccatcaaggttctgctatagtaatatgagtcatggcagttttcagattggatcatagtgtcgatcaaattcaagaaatgaagtccccagctagctcacatcgggagcagccatggctgagctcggtctacggctcaccggcggcgatcggtggatcgaatcgttcgaacacaaaagagaaaatgtagaggacgttcttgcgcatccgtgagtggtggtggtgagggaaatggtagtctgtagcccatggaacatgagctacattggcggtgtgtctcggtatgcccatgcatgtgcatgcagaggcttggttagtgcaaagggttagtgcatgtgctctcatatggtaccagggtgctcaccaagcagagaaacggaggcagcgaggtccagggagcggcggaggtggtggttgttggccaacggcggcaaaactccagcgtcgacgtcgccgggtcgactcaaggcacgaactgcaacttcgagagtacggtggtgttagagatgagccacagagggtgcatgcacgaggaatccgacggaaactcaccggagcttggtgttgcttcggtggtgaggaacggcggccggagcggcgtcggcggttcgggtggccggcggcgaggacggtgacacccaccacgtgctcgacagattggtcctagggaaaaaggggtacgggtgtgctcggcgtgatgcgtaggtcacgttccataggagggaagagagagggactcaccggggatgcacggcgacgacggccaagtcgccggagccgggtaagacggccgagctctgggcattctgtgcgtggggtgtgttttcttggacttggaacacgatgtggggagtgtgctgttgcttctggtgctttggcttacgatataaggaagagtggagtgggggagtgagagagaggtggctggtgctttcattgtgttccttgggcatccattgggcatggggcacagtggatgctgtgaggggagagtgggaggctgtcatgtgggtcccagagggtgtggggcccactgcagtgaaagaaattcaaatatagccttggaggctaagtcaaagagggttgctgccaaggatctttggagggatcaaggtggattttgtgcagcaagaaatctgggctagatatcctcttggtcaggggtgatgtgcagagtaaatgtgctgaagtggattgggttagaagtctctggtttaggtttgatggagtgatgaatatgtattgacagtgttggttagcagcagttgacagtgcagttagcagctgattggatttttggagggagagaagaaagggttagagagtgatccagggtgtgccactcctcagggtgttagaagaaagttagtaggagactttggctgaaaccaaacttcaaaaagaggttttgaaataaattttacagagagagcaagtttgaatctgctaagcagttcttttcaggattctagacagattaaaggagatcaacaagttagcaaaccttactgaaaaactctgaaaaattgtgggttgatttctgacatatcaaggtttttttttttgagaacttttgtggaagttttggatgcatataattaccagattaattgtttttgtgactctaggcctatcaagatgcatatgatgagatgattaagatccaaaaacaattaaaatcactccacaaccacatgatgcatttaaattaaatttagttctcaggtttacaggcttgggtatgttacaaataataataaggtcataacaatggtaaataggcatggctaaataaaacagtgataacgcgggaatttaaataaagcgataatgcattaatttaaaacaaaataattttaaagcatgggacacaatatgttcaaaggagatgtgacttgccttgctcgctttcccaaacgtcggcttcaatctccacgtagagcagatcttccgaagctgcagcgtctacacgaccaacagaaagaaaaaggcttttactctaataaactccatataaccagcagaaacaaagcacaaaaacgggttcttgacttcttaaggaaaaattagagacttg

SEQ ID NO: 12947 - DNA, 1027 bp, Oryza sativa
attcatgtttgaactctgtaatctgaagttctgtaagtttacaatcgactgcagtttttccctttttggccaaaattgaatagtaatgaactgcgttgatcggtcttgtgtgaaatgagatgcattcattttcgcatcaaaccaggcagacagaaaaacatttacagaacctcatttgtactaggggaacacatccttgcacacaaatttcccctgtacactccgtgcagatcaactagcaagtatgtttccttgtactagatgcaaaatctgaaacgttaaattaccacatctcatgccaacagaataagtggtttgatagtgtcgatctagcttaagcgacacagaacctgtcatgctcatattcacattccactaacaagctggaaatcccatgaaaaatacaaagctggaaacccctaaataaataagctggaaagataatctaaataaacattactgtagcacatcgacacaaatgtatttgctgtgcccttgccaaacacacttaagaaactgatgaagtcaagctcatgtttcatttctgggggtgccagcctcttccgttgtggtgaatttggcccttcgatcgctgctctgaccgcttctgattgttcaagaccgtttattatataatttgctggtccaaacataagtagcacagtttagtttgcattgaaggtgaaggttttagtgcaaaataagatgcatatcatactaatgtatatggagtgctgacataacacaggacaaaagcaaataggatgttgcacgggctactaaagcttgcaatattaaggtgatgaacttaatgtctatagtttaaaatggtaaaggactgagtgcagatgattgagaccttgaatgagacaaacacaagcataagagataagctatgaaatcgtgacgctgatgacaagtccacagaaatgctcaaaactaagctaaataaattgaggtcccaattcatctcgctattttatcatctgctcccagttgttaccacagttcctagttttttgttgaa

SEQ ID NO: 12948 - DNA, 988 bp, Oryza sativa
  unsure (1)..(988): unsure at all n locations
cggtgaatccgggcttgattggattgggtcggattcgatttttggatcacccccggagggcgggaggtaaaacccctcctcctcatttatggctttcctttcctttctccggtcgatccggccgaaatcggcgattgctcgccgcggaatcccgattgggtgtggggggatggcctgatctccttccgagaaccgggagctcggatgcgtcgagttggttttgtgctccttttgctttccctttttctggattcgggtttccatattggaaggtttcttgatctcgatttcgtggcgagagctggttgctgaatcttatatagctttccttcttcttcttctagcggttgctacagatgcgttgagctttggttaatctatccggcgagagataatgggcgagcttgctgatctcgttgtcgtgccgtcgcagccgccgctcgccggcggccggcgggacaggctggcggcgctgctggagctcgcggcggcggatgatgttgatgggctcaggggggcgctcgcggagggaggcgaggaggcggcggagttggctgatggggtcgggctgtggtatggtcggagcaaggcgtccgaggcgcgcacgccgctgatggtggcggcgacgtacggcatcgccggagtggtctcgctgctggtgggcctcggcggttgcgtcgacgtcaaccgtcgccctggagccgacngcgccccgcgctccactgcgccgcctccggtggctcgcgcaacgccgtcgctgttgtcaagctgcttttggccgctggcgccgatccggccacccccgattccgccggccgcttccgcgccggcgtcatcctagctcctccggcttcgccagatgcccttggcgatctcgaggtgctcctcgggcgccgccgagcactcgccgtggcgacctcggtggcttcaggttcgtcatcccctccgctctctccttaccagatgagggcaacaggtcgccctcgtc

SEQ ID NO: 12949 - DNA, 749 bp, Oryza sativa
attcagaggttggggaattgatatgattggtataatcaatccaccatcgagcaaaggacacaagtttattttggtggaaatcgattactttaccaaatgggtagagccgattcctttgaagaaagttgattctggggatgctatacaatttgttcaagagcatataatttgtcgttttggtattcctcagaccattacaaccgatcaaggctcgatctttgtgtccgatgagtttgttcagtttgcagatagcatgggtatcaaattgttgaattcttcgccgtattatgcacaagctaatgggctagccgaggcgtctaacaaaagtttgatcaaattaattaagaggaagatttctgattatcctcggcaatggcatactagattggccgaagcattgtggtcctatcggatggcttgtcatgtttatggacatgaggctgttttaccatgggaagttagaatcagctcgagaaggatggagttgcaagttgagttgacagccgatgagtattataatctcatggctgatgaaagggaggatttggttcaatcaggttgagagcccttgcaaaagtcaagggtgcccaagtctttttcgaaaggtgaacttgtgtggaaattgattttgccgatagggacttgagataacaaatttggcaagtggtcaccaaattgggaaggccgtttaaaatttataaggttgtatccaaaggggcttacatgttgcaaggacttgacggtgaagt

SEQ ID NO: 12950 - DNA, 1234 bp, Oryza sativa
gcccctcccaatttccaataataacccctccatccgatatggcatttatttagcctagtgtttttcaaaaaaggtaaaagggttaagatattgagcactggacctttcaaacgactaatggtgagattaattagagccaatgactatatcctactcaaacagttatcatcgaagaaatatcgatagtataaacagagatttaaaaccttggtctaacccctctaataaccagcatcaaaaagtcacaaaaaagtcatacgaagaggagcggcaaagcataatccctctatttttaatagatgacgcattgacatttagatacatatttgaccatttgttttatttaaaattttatgcaaatgtatgacataaaaagtgcttaaatacttttagtgataaaataactcatagcaaaataaataataattacatatttttttcaaataaaacgaatagtcaaacatacctaaaagttaacgatatcatcaaatgaaaaacggaggtactgtatacgtacacacctcggtttcacgaaccatggtcaccgtgctgctcctgagcttggtcggcctaagcgcctcgaagcagacggcgatctgctccgacctcgtggccacgtcgacgtcgtacatgacccctctcccaaacatgggcaccgtcatcctgtacgtgccgccctggtggacctccgactccggccgcgagtagaagccgccctgcacctccggcccgacgaggaaggtcgccttcaccaccccgaggaagctcaccgtgaagacgctccccagcttcacgtacagctcgtcggccacagccatggggcccctggtgatcaccggaattatcagggaaacgccgctcaccaccggcgggagtggcagctccgcctccgccgccgccgccgccgctgcagccgcaccgccgtttctcttccccgtcatcttcgccaccacggcgatggtgctggccgccagaaggacggcggctatggcggagaaccagacggcagcggctgcggccatgtccataccaacacgtacgtatgtacaggcagagcctgtaataacaaggcgcggaggacgtaccggaaggaacgccaaaaattgtaagatttaaatcgtatatatatatatatcttttaaaaaacgaggcgacggacatgtacacggtacaatacaccacacgccaaggctcatcacgcatttcattacgtacgtgaccgttctaccacgga

SEQ ID NO: 12951 - DNA, 724 bp, Oryza sativa
cggccgggttgccaggaagtttcgggccaatggccgtgcagaagacatgaccggaagttccgggcataatgccaggaggttccagccagatggtctttactatgattcatatgtaatttccaaaaattcagagggcaaagtggttgcttattttaatgtgaatacaatgatgagtaccgcacttgtgtgtgggtgccaaaggctttggtaactaacatcaagggacccaaacttagacaggtttgggttcctaaatcccaagcttgatttcttttgtaggcatactcctccggtggttcaagttgggttgtggacagtggttgcaccaatcatatgactggagagaggagtatgtttacaagtcttgataaggagaacggaactcgtgagaatattgtgtttggagatgatggtaaaggaaaggtaattggtctaggtaaaattgccatctccaataatcaatctctctctaatattcttcttgtcaattcattaagctacaatttattatctgtttctcaattatgtaagttgggttacaattgcttgtttaccgatgaggatgtgaccgtctttaaaagggatgactcctccgtaccattcaaaggcaagttaaagggtgatctctatcttgtcgattccaatgtgaatagagtgaatccggaaacttgtttgatggctaaatcctccatgggtggcctatggcatcgaaaactaccccatg

SEQ ID NO: 12952 - DNA, 864 bp, Oryza sativa
atataagggagaaaagaaggacattctagaaagaattgatgccattgacattagagtagaaagcatgggtatgagtggttctgatagagaggagagaaaggaacttgaaaatagactcaaatttgttattagggaagagaaactgaagtggattcaaagaagtaaaggaagtattacaaggggattgtaatactatgttcttctatgctaaggcaaatgggaggaagaggaagagtcagattcatagtttgtgcatgaaggagaggtgattgaaggataagataagtttgttgcttcatattagaaatttttacaaagatctctttggacattcaaaggaaaacatgttttcaattgatatggcaaatgtatctaaggtggcaaaggaagatatgaagatgttaaccattcctatcactttagaggaactcaaaacaatgatttttgaactaaaaaagaacaaagccccaggtcccgatggaataacaggagaattttacatgcatttttgggacttggtcaaacatgacatgattgacttgataaatgattttatcaagggtttaataaatattgatagattgaactttggagtgattacattgattcccaaaacaaaagatgcctctcaaatacaaaaatttcgtcccatatgtctgctgaatgtaagctttaagataataactaaagtcctcatgaatagactcaacacaatcatggcatacattatctctaaacaacaaacaacttttctgaaaaatcgtttcatcatggaaggaatggtgatattacatgaagtattgaattcagtacatcaaaaaaatgcagagtgggatcttgtttaaagttttattcgaagaaaca

SEQ ID NO: 12953 - DNA, 507 bp, Oryza sativa
gaatgcaactctggtaaaaatttgcatgcactcatgaaaagggagtgcacccaccttgtacgggtctgaggtaccaaccatagatgcaacaacattttcgcgtgtagtaacaattatcacactaccccttgcaccacttgacaacaaattcctcagctctctccattcatttacatcacgagtccacagatcatccaataccaggaaataatttccattctgcagaattcccctgagcttattttggaaatgttccaagtttagatgcttgcaactctcaccactggcagactcgattatatcttgtagtatatttttcagattaaatttattagagacacaggcccacatcatcttgctgaacctctccctgatttgttgatcatgatacaccatatttgctagttcagttttcccaatgcctccaagcccaagcagagcaagcacaaaaatatcatgatgttctgctgctcttagtatcttactaacaatctcatctctagcatc

SEQ ID NO: 12954 - DNA, 867 bp, Oryza sativa
tgatcggagctaatcgacttttgatgaagtgccgagtgatctgttctccctgcaagaatcttgagggtcgggaatcccccggaagaatcttgaggttggaagagaaaatccgccatagaagaaatgagcaaataccacgatttcgtgtgtgtcgagggtcgggaatgcttcgctgaacgccggtcgccacccgataatctccttcgctgggagaacaccgtgcgcctccatctccttcagattatcttctatcacatcggagggcgcccactaactctcgaagctttctctttcttccgccatgaatgtgaacaggatggtttaatttggtccgagatatggctggagaggaatggggaatcggagcggtggacgcggggagaaattttgtgaagtttttgagggtgggttggagcagattgatgaaccctagcttcgtcggcgcggttctgtactgtagcacggagtggggaatggcgagagtctcggcggggaagacgaaatgacgtttggacttcggtgtttttagggtatcgggagtactaatgggcctgggcctgtatagtacttcagcccaattatgttttcagcgtggcccgttgtgatccctagggacttaggcgctttttgctttggcaatatgtgctcacaaagatgcggctcgatgctgttaaaatcctttttaacgcgattcaataattctttggaattattatgatgcacatgaaaaggtgcccgacagaaaggtgttataccatttttgtaagcttttttaggctacaaaagctgttaggttaatttgagatgactggtttattagtagtcattctcctagtgcttattttgattatggtaagggttataggg

SEQ ID NO: 12955 - DNA, 3645 bp, Oryza sativa
aatcacatagtcgggggctacacctaattaggtgcatctactcgatgcaccatgttttattttcgcccttcacagtcttttagcactcggcaagcctgagcaagttgaattgaagcactcggattattttttttttgtttcgagaagactatttttgtcaactgcgaaggtctcgggggctactgtggagattatggttgccccatatctgcatgacagttatactttagtcagatatacggtaccaaatatacatagaatatctttatgaggactcgagttagtttttaacttgtatgtcaaggaaatacccggggtcctagtcggttacgattgtattttatctataatcccatattccgttaggatatggactgtattttgtaaagcggattccttcccctatataaggagggtccgtgtgcctcttggggtgcgtttttcttttttccagtatatacaatcaataacacactcggcggaatcatccccggacaggagtagggtattacttcttgaataagaaggcctaaacctgtataaaattccttgtctccaaacccatccactttcctagcttgatagccacccccttttattattgccgaaatcttgtttcgacacaatccttcatctcgacataacttggtgagttcttccgtttcaacaatctacatactacctagattccattttagcaatccctttgcactatcatgccaccctctgagctgccgacgtgagcacggccgccgcctatggagacgctcgtcggcaactattctcagcaccttgccaaaggtcggcaagctgccggaatccctctagacacctcgtaaatgctctagaacccctcccctagccatgtctaactcatattacttcgatcaccaacacggcctaaccgtgccaccgctgccctagccgccaacccatccacatatcaaattaatccctccgccgccgctcgccgtcgccggagatccctagctccctccccttctcggccgcaaccaatttctccctctagcaccgccgtaatcccaaaccctagtgccgccggcccgatttggggaatggccgaaggtagaagaagagaagagagagagactgacaggtgggacccgcacacagtaacatttcacttttattttattttcaaactttagaagcccatatcttttaaaatatagatccaaatccagtgaaacttggaccaatattcttctaaaatcattctctatcttttgagcccctttttgctctttttgcattttattttattttctctatttttcatatttttggattttatttaaattccttttaaatttgaattttatatatgtctaaccctaggtcttgaggattcttctgactccatagataatatcaatcaatctcaggacatcgagcaaggcaagttaccatatacctattgatcatttaagcctatattttacaaattatttatttatagccttctattcaatactctattttatatgcacaattcaaccatagaaacccacataatttagtattgcttactttgcttacaatctggttaaaataccttatacttagattgggacagtacgtaagatttggttgatttccgggtggctagtactgtctcgatcgatataagttttaccaggtacttatgtcgaacaaacgggtacgaccgcagattctagaatggggacagacctagttattatgttaattagcaatatggcacctctatatagtggttcttatttttaagtcctcgcgcaggaggcaactatagccgcgaagggcaactttagccattaccatgtataggtaaatggtttgtgatactcgagtataaactatatggtatatttctaaaccctgatcgagatgacgtggtgtcatacgatcagttccccttaaatatctcgggaacgccagaactcctcttgctgctgttaacaatacgttcagagcataagaggatataagttcatggaacaggtgccataattgttaatgacttaatactaggccatgactaaagctgatgattatcagcaagtcgtggactgcgggtaaagcgtacatctgctgcagtagaatatctttgaaattattcgaatagccgtactcatggagttgagtaccgggactcatatggtaccctggttagaaatctaaagtctatacattttacaaattcttgctataactcttctagattgtttattactgctttttgcaaagaaccctactatatgtcaatgcataacatatttccatgataacttgctgagtgttgtaaatactcacccttgctcttataacccctttttcagatctaggtcaagaggaggacccttatgactattactacgatgaccccgataacttagagaatccctaaaggttatacctcactagtcagaatgtatagaaacttccgctgtgtattaaatagttaggtgagtacctattattgtaaaacccttagtattgtaaaactttaacgtatgcaatgaagaaccagttatattgtatgtatcaatatctactgatccagggattgatacattaattctagtcggatccaagttgttagttttgggacccgacaatagcccatgtcaaaggctaactctcggaccttatacaaccgaagcatctcaaaagggagtgggattttggctatatgtacatggtagaccataatcagagaatttcttggtgcctttttaagcatgtgcgcttgaatcaaatgctattcagttatcatgcttcgatgtgtaggaatgtattgtacaacatgagcactatgaagcaggcaaagagtatcagtaagtccagtgataatagaggtacaatcaataggccctactctactaaaaacaccttaccattgagctaacatgggcacaactggagaaacatgaattttatggaccatagcataaagcaacgtagctcatcatttcttataggcctaatattagatctaggaaacaagaacatgcctattcaatggtgcagaaaacacaaggtaggattatggatctcattcagtctagggtagccatagtcatcatggccagttatagcttcccaaaactcaactttaaccatgtgtagcttgttctaagttaagatagcatctcacatcaaaacaaagaactacactcacttgaccccaagtaagagtatactcttgcttaaacatccggaatgtaacttccttttgatatgtttacacagagcataaaaactctatggtaagaagtctacactcaaattcttgaacacggcaaaaacctagccaccccacaacattaaaaacagtatcgaacttagaatccatacctgccttggagaggagattcagatcatatacctctgtgtgctcgaagactcgctcttagatggatatgtacttattgtactccttgttgtggaacttgagttgcatctctggatccaccatacatgtggagttggctcacgtatgacgtagcatagtccatcatttgaaacctcatcatgagaggaggttcctccttgagagcaaccatgacaataacaggagtgccttgatgagctcttgattgtggcctctcgcaccttcttggatatcttgttgaatgggtt

SEQ ID NO: 12956 - DNA, 811 bp, Oryza sativa
ccaactaatccgaagaagaaaacctccagtcgtcctttgccaaaaatcagaaagtcttccaggtacaaatcatttggccatcttccttgtcttgcagcttaccctctgttgaaataatactaacagcataactcaaactcgtaggaagccgtctgacatagaaccttctgaaaaagaccccgagccggctgacatagaggcaaacccttcaaaagaaaccgggccaactgcagaggatcgtccgagtgacaaacaaccggcaaccgacaatgtagaacccagcaacgagcccccgactgggaaccagtcggccgaagctgaagtcggtgctaaccaggagtccccgactggaaaccagtcggatgcagggccaaaccaaaagattcccgaggttgaagctcaaacgaacagtcctctcgggaaggatgctgacagtgaatcagaaaccagatctcctgtgaagacaccaaagtccactcgtccccgaccgggaatcatcacaggtagacacgctatctgaaatcattttgatccaacagactttatttggctgcttcatcttcattcatggatacactagggccaataattggtgatgaagaagaaatcctccggatacaagtagctgaggattcatgccctccgattctggtcaagtggtgggatgacaacatgcagcctcaagggatcgtgataaataagcaaaaagaggatgaagagttatgcctactgaagaaggcacttggtcaggcaacccgcattgtaaatgtaagccctctggtacctgatctcaaccatcttgtttgccatt

SEQ ID NO: 12957 - DNA, 11565 bp, Oryza sativa
accaacgggacatcgctctgcaagattagtgccacaaaaaaatacgagatttctagtatttatgataaatgtaagcatccacaaccatccttctaaacatgctagaaatgaggactgaaaggtggttgtggtcctcgcacagagacgcgacactaatcgaacaggactctgggattccttaagcgagcatgaattcaggggaatttcgaaataaaaactttcatgctcatatgtgaaatgttttctctcgccctctagagtcgatgtctcaagcttgtccgaggcctgaaggttctccatctcaagagatgcatcgtgcaagaacatggttctttcttgatgataaacaagaacaacgttctgaagaccaggcggacaaggcttaggcttgatcgagggtgatgagggtcgttcggtttcatgaagatgggcaataggttcataaggaacgaacgaagatacaaacatcacctcctcgaacggctcatgcttgggatgagccttcgttttgctggaataattcagggtgtttccataatcttcataaagatcatccttgaattggaatggaatttctggaggatgaatttcctcttcctctggctccagcaaccggaatgaggattcggcagttgagttgggttccaactcctcgtgcagaggatcttcataaataatcttgacctccgggacggcttcgcttcggccgaaagaatcgttctctaagatcaaatctaagagctctcttccttcggcggttgtcttgtgtgcgaatgatccttcggcggagatatcgagatttgcggcagactccttgtctaacccgtatcgaaattgttgtaacaacacatggtcgggtaaagacaagtctgggccagactgagttaacaatgagaacctggcccaagctacaccgagatattccttctcattctgtcggaaagagatgatgtctaatcgaagattaattacacgggttaatggaaagaaagcaaggcagaatttgcacttaagctcctcccattcaccgtgaatttcatgacagacagcgtgtaccattgcttcgcttcatctttaagggaaaaaggaaacaacttccactttagagtttcatgtgtcaagcctacgatggataggcatgaacacactagctcaaagtcccgaagatggaggtatggattttcaccaataccaccagagaaggtttgctctcgaatcatggctataaagccaggaccaatttcgtagccatcggataggattgattttgaagaataggatggctcacaaagattagcccgaggagcataaaggttttgaattgtgggttgctccatcaaggaaaagaatgaaagaagaagaaataaaaataaaaatacgaggatgacctagactcggataaattagcaaccgttccccggcaacggcaccagaaatgcttgttggtatttcttacgaccacagataaatccgcaagcgcacagaataccgctgtagcacttcaccttcgggaaccccaaaaggatatcgaactcagggaacgtgtttaatctacctaaggctaagacgatccaaggacaacaattgatgataggtaggctaggctagagaggtctttctatgggttttaattagcttagataagttgaaggtaattccatatctgttgcttcgtgcaccaacccctgctggtctgccagcgtggttctgtctatagctctattatgtatctgaacgtggaggattacctggatgggattcagggctgtcaccacctgccgcctacctctgacaaatccgtgggatacacaacaaacaaaggtaatctctaacctagacaccacgtctaagatatttattactactctaatacttgcgcaggaacttccttctctatccaaattcctagtactagagcacttagtataaatactaaacaatgaacccgcaaagatggaaatctatcttacttaaacaaagtgattaaataacataagaaaggaacacgaatgcttactttatagaagaagtttctccgaatccggagcagagtataccgacagctccggtactcctccaaaattcctcctacgaagctacacttgtcgaggtagaagtcggttgagcgccaaacttccgggcactcctccagagcttcccctcactctctacattattctaatgtacaaaagatacaatagagcctcttgtaattcagctcaaagttgtgtgtgttggaatgagagtgaagacctccttatataggctccaaatgacggttaggggtatgagaaatgatcaaaacaccctgcaaccgccataggggaggaatccaagccgtccacgtgaagccagatggcgggaggcgccaggattggttcggccaaaccaaaaatccgtcctcccggcctctcctttggccgataggttgcttattgggccccccaacatcttgcacaatgttttggcccaattctaagtggttttggttgacatatgggccctccaatccgtgtaaacgcgtcctgaatgcgcggaggtgcattttttcgcatgacggatgtgttttctcctcaaaatacctgcatacacatatttcaccaacactagtggaaatgattagtaataaaccctaccactaagttggataccatattttatttcattatatgtaagtattgacggtcaaatattatgatttaaggaccgtcaacaatgggcctgcttgctcatattgtgtttgtgtcgaacttcaggtcactcatcgtgtacctacacttgaaacactcctatgcctagctacatatttgtaacatcctcaaattttaaactaaaatttgactgcatcatgctggcttttgattaaattagtgtgctttaaaaatctatttgactctttaattggttcaagtattactttcttagagccctactaatttaccctaattattccctttattccaaaccctagtgaatttgtgcaaattctcttaaatttgcaaccatagattatttccttagtttatcctaatattagtgaggatttgctatacttcaaaccctagtgaaactctttcaaatccatagattaaattcattcttttctagggaaatatttaaaaattcctgaaaacactgttcattgcactcaaggtgctcgacaaaatgcccagcccagctagagcagcccaatcaccacccaatcttgtgcaaagtctagaattgatcctaggggaccacatcccactcaaaaaccgtggtttagttggccttctcctcccccttgcgcgcgccgtcctggcggccgactttgccgcacgccgagccgccacgcgtcggtctccggatcgattgcgcgtgcccgaccgccttggcgtgccgctagccgttcgacgcccttagaccaccaccgccgcaccaatcacgacgacgacgaagtcaagatgaccaccgccgcaagaaatcaccgctcgacgccgtgcgcgcccgtccaaagccgccgccgagtacgatttcgcttctaccctaggtgaatcgcgccaattcttgccgcatggttggattaaagttagacgttggtttcccctctcacaattcaaaccattcacccccaaatcggttgttttcaccctcgccgccgccgtgcgtcgcgcccggattggcgccaacacgtcgcaatccgaattcgcacgcggtcaagtcaatccttcgccggtaagtattcaaacgtggcctcccgccactcaaattgatcttgcccgccctctcatagcctctaccgccctagccatatccaaagctcgagctcatccatggtgatgacggtgctcgagctcatccattcctcccagccctataaataggaccccaatcccttccctgtccatcatcgatcatcaacaaccataaccccacaaccctgaagctctgcttcaccaatccatcccatcaaccaccatcacccatcggtcgaacaccttgtgcgcgatcgactccacacctctctctccatcctccgccctaaatatcccttagaacactttatatcaaccatgttctagtataatagaccctaaccaaagtcctgcgtcgagttctacctcgccgtgccaagccgagcactgccgctcccgcgctgctctgttcttcgccgccgcgaagtttttccggccgcaatctgtggagattatggttaccccatatctgcatgacagttatactttagtcggatatacggtaccaaatatagatagaatatctttatgaggactcgggttagtttttaacttgtatgtcaaggaaatacccggggtcctagtcggttacgattgtattttatctataatcccatattccgttaggatatggactgtattttgtaaagcggattccttcccctatataaggagggtccgtgtgcctcttggggcacgtttttcttttttccagtatatacaatcaataacacactcggcagaaacatccccgaacaggagtagggtattactttttgaataagaaggcctgaacctgtataaaattccttgtctccaaacccatccactttcctagcttgatagccaccccgttttattattgccgaaatcttgtttcgacagttggcgcgccaggtaggggcagcgtcaagttctcgctgactaagtgcgatgggtttcgtttctggcatcgatgacttcgccttccctcccgggcaggcgttccggttcggcagcctcaacttcatcaccgacgacttcggcaagatctctctccttgactcggattcaaaccagtcggggagagaccaggtccccgtgccattcggtattccgaactcggccgaggcctactccaagatcatctctcccgagtcggcttcaaaccactcggacgagatccaatctactctttcgcgactagatcaagacgacgggtcctatccctcaatcctgatgaaacttccttatgatttggccgctatcttcactgccaagacatctcccactcgaagatctaggcgagctccggcttcggccccgatccaatctagatccagagaggttggcgttatactccaacctcttgggacagtatcgacggaagagttggatggttaccttagctcccccggcgtcagttctcgaccaaccgagatcctcgactacgacgatttcggctaccactacgaccatggcgacctcgacaacttcgacgacagttatgaggataactacacgcccctcttcttcggcgtattcatggctgacaacgaaacggaggaacagcgccaagcccgagaagcggaccaagatcgcgcacggcaagaagctgaacgtcgccgactggaggaagagcgacagcgacaggagcgagaacgattacagcgtgagcaacaagatcgcgaacggattgcaaaggaggctgaagatcgacggcaacgcgccttggaatctgggcgccgagcgagagagctcattgggctacaagacgtcgatggaacagcggtctttcgcacccccagcagaacgcggttgcagcaattactctcctcgacaccctcctctaagaaaacgcactcaaccaagctgatcatgttgtcaacatcttgaaccagacgaagaccatgatcgctgcctcggttccagccaactccgcaagcacccgcaccccgactggtagccgagttcctcacctccgatctcatgattatcatcagccaagcctcagcatcatcggcacaggatctagtcgcaggagcaggggtcacgacgaacgatctgttcacttgcctcccgaacgtcacagggagcgccgagtcgaacggcctcgctctccacctcaccagcgtcccgtcgaccttcgcgacacgatcaaccagcgccgtgcagcacgaggtcaccgccattcaccaaatcgctacgacgacgacgtggatggagtagctgccttcactaatgacctgcgtggagtggattggccagccagctttaagccgactggaatcgagaagtatgacggcaccactaatccagagtcttggctcaccatctacggactcgcaatccgcgcagcaggaggagacaacaaggccatggcaaactatctacctgtggccctagcggactctgcccgatcctggctccacggactaccccgtggcacgatcggatcatgggcggaacttcgtgatcacttcatcgccaacttccagggcacctttgaacgccccagcacacagtttgatctctacaacgtcgttcagaagtctggagaatcccttcgagattacatccgacgcttctccgaataacgcaacaagatctccgacatcaccgacgacgtcatcatcgccgccttcactaaaggcattcgccacgaggacctagtcggcaagttcggacgtaaacctcccaggacggttaagcaaatgttcgaaaaagccaacgagtatgccaaagccgaagatgctattaccgcgtccaaacagtcgggcactacttggaagccaaagaaggacacgccgaccgcaggagggagtggaagcaacaaccacaaggatcgcaagcgtaagcccgaagaacttgtggcgaccacctctccatcttcccgacaacgttcccgcgtcaacaccttcgacaagataatgaactcccaatgtccgcatcatcccaactccaaccacgtggccaaagattgcttcgtctacaaacagttagcggagcaatacgtcaaaaacgcacgtaaaccttcagacggagatcaaggcacatcaaagaagaaagatgatgaagacgatgccccgactggttttcaagatcatcgcaaagaacttaatcacatcctcggcggacccctggcttatgagtctaagagaaaacagaagctaacagaacgggagatcaatgcggttcagcctaacacgccccaatatcttcggtggtcagagatagcaattaagttcgaccgctcggatcatcccgaccgagtggtccacccggggcggtaccccctggtactagacccagtggttcgcaatgtcaagctccgacggactctcatcgatggtggcagcgcactcaacatccttttcgttaagaccctggacgatatgcagattcctcgcacggaattaaagccgagtaatgcacccttccacggtgttatcccaggattgtcagctacaccactcggccagatcactcttccagttacctttggcactcgggagaattttcgcacagaaaatgtttgtttcgaagttgctgatttcgagacagcatatcatgctatacttggaggaccggctttagctaaatttatggccgtcccacactacacctacatgatgattaagatgcctggtcctcgaggagtcatatcactacggagtgacatcaagcaggccgtcacatgcgacaaagaaagttgcgagatggcccaaacccacgagactactctcgcccgcgaagagatccgactggctgcgaccatgggaagcgaggaagaagtgcctgcaaccaagctgacgaagaccgaagaaagtgatgccaagatgaaaaagattcccttagatccctccgatcctgataagactgctgtaataggcgttgagttagattgtaaataggaaagcacgctcatcacctttcttcagaataataaagatatttttgcatggaaaccatccgatatgactggtatccccagagaggtgattgagcactctttacatattaaggaagacgccaaacctatcaagcaacgactccgccgttttgcacaggacaggaaggatgcgatcaaggaggaattaaccaagctgttagcagcaggcttcattaaggaagtccttcatcccgactggctggctaacccagtcctggttcggaaaaagacgaggcaatggcgcatgtgtgtcgattacaccgacctcaataagtcttgtcctaaagacccttttgggtaacctcgcattgaccaggtggttgactcaacagccggctgcgagttactcagtttcttggactgctactcgggatatcatcagatccgactaaaagaatccgactgcttgaatacctagtttattacgccctttggggcctactgctacatcaccatgccctttggattgaagaatgccggggcaacctatcagcgtatgattcaaagatgtttttcaactcagatcggtcgcaatgtcgaagcttatgttgatgatgtagtcgtcaagaccaagcagaacgatgacctgattgcagatttggaagaaacttttgcaagcattcgagcttccaggatgaaactaaaccctgaaaagtgcatcttcggagtaccgtcagggaagttgctcggatttatggtatctcagagaggcatacaggccaacccggagaaaatcaacgccatcctcaacatgaaaccgccaagctcccaaaaagacgtccaaaagctgactggttgcatggcggtgctcagccaattcgtctcacaactcggcgagcgggggatgcccttcttcaagttgctgaagaagactgacaatttccagtggggacccgaagcacaaaaagccttcgaagacttcaagaaacttctcaccactccaccagttttggcctcgccacatccacaagagcctctactgttatatgtgtcggcgacctcccagtttgtgagcacggtcctggttgtcgagcgtgaagaggaaggccatattcaaaaagtccaacgaccaatttacttcgttagcgaggttttagccgactccaagacaagatatcctcaggttcaaaagttattatatggtgtcttaattaccgtcaggaaattatctcactactttcaaagtcactcggtcacggtggtcacatcgtttccactcggggatatacttcataaccgcgaagtgaacggacggattgcgaagtgggccttagaattgatgtctttggacatatcgttcaagccacgaacttcgatcaagtcacaagctttagctgatttccttgccgagtggaccgagtgccaagaagacatgccagaggaaaagatgaaatattggactatgcattttgatgggtcgaagaggcttacaggcactggagctggggtcgtcttaatttccccgactggagaaagattgagctacgtattgtggatacgtttttctacgtcccataacatggcggaatatgaggcgctactccatggattaaggattgcaatctctctaggcattcgctgactaattgtccgtggagactctcagttggttgttaatcaggtcatgaaagagtggtcctgtctagatgataatatgactgcttatcgacaagaggtacgcaagttagaagacaaattcgatggactcgagctcacccatgtcctccgacataacaatgaggcagccgacagactgccaattttggttcaaaacgggaagcagctccttcagatgtgttcgtcgaacatctttacgaaccgatcgtgcccagaaaagagacaattgaagctacggatactcaaggcgtaagcatgatcgaagctgactggagagaaccgtttataaaatttttgagcaaacaagaactccctcaagacaaaaatgaagccgagcggatttccaggcgcagcagactttacattattcatgagggtgagttgtacaagaaaagtccatcaggaatactgcagcgctgtgtgtctttggaagaagggagacagttgttgaaggatatacattctggtatttgtggtaatcatgctgctgcacggaccattgtcggcaaagcttaccggcaaggttttttctggcctacagctgtgtccgatgcggacaagattgtgcggacatgcgaaggttgtcaattctttgccggacaaactcatttgccagctcaagagttgcaaaccatcccgttgtcctggccgtttgcggtctggggacttgacatggtcggcccgtttaaaagggcagtcggcggttacacgcatctctttgtggctattgacaaattctccaagtggattgaggctaaaccggtcatcacgatcacagtagataaagctagagattttttcatcaacattgtgcatcggtttggggtacctaatcggatcatcactgataatggcactcaattcactggcagagcatttaaagacttttgtgaagacttcggcattaaaatttgttacgcctccgtggcacaccctatgagtaacggacaagtcgagcgcgctaacggcatgatacttcaagggatcaaagcacgagtttgcgaccgactacgtccctatgctggcaagtgggtagatcagctgccgtccgtactttggtctttacgcactactcctagtcgggctaccggccagtcaccgttctttttggtttacggtgcagaagcaatgttgccaagtgaagtggaatttgaatcactacaatttcggaacttcaacgaggagggctatgaagagggccgagtagacgacatcaatcgactagaagaagcccgagaagcagctttaattcagtcgactcgatatttgcaagggttgcgccattatcataatcggaatgttcgatcgcgagcctttttagtcggtgacctggctctgaggaaaattcaaacaacacaggaccagcataaattatctcccttatgggaaggaccgttcataattgctgaagtcactcggccgggttcttatcgactcaagcgcgaagacggtactctcatcaacaattcttggaatattgaacaccttcgtcgattttacgcttaggcatttcatttgtatctttcctctttgactgctaacttcaagtttttccttgaagttttcagtcagggggctactataataataatggagtgtgatttttatcaattcaatttgcttacttgatgtatcattgccctgtttgatttcttggcttagtcaatgaggactgaaagttttttaacaacttttgtgggttttaggctcaacaaggtttgacaaaaacttttaagaaatcaggaactaagttaagatatcaagcacaacataaattcatcagtattgtacaaattgtgtctccatcatcattaatcatcaaaatcattggtacattaatcagtattagtcttttcatcatcagaattatcaggaccagtcggtcgaagatcggtgtcctgaaatctctcaactacatcaactgctatcttatcagcagatttttgtgcatcgctgatgaggtcaagagcagctccttcgctcgtcccgtctgcaaagtcatcaacggcatcaacgtcaaccctcggataaagagttttggtcaccgcgaacaccagacttgctcccatacttccagcttctttgatgctcttgaaatatgtatccggagcaactctcagcttgtcgaaaatttcagaagcatcaagtgcactcgggccgttgttattgaagaacatcgcttgaacaattggggcagcagcgttagcaaccttatcccgagctccttcaacttttttgatcttgccaaccaggacgtcgaattgagcttgagatttcatcttg

SEQ ID NO: 12958 - DNA, 3628 bp, Oryza sativa
tcctcacatcctaccccccaccccacgcacccccccccctcccgccggtgcaccccagctctcccctcccatatttacggagtaaattgtttactatcaaatctatctgctgcctatattactcactccctgtcttgtagtagaaaccgtccacccactttctcctttctctccactttttacggatctggtgctcctcccctgccccaccgccgcctacggccaaggagtggcggtgtgcaggcgacgggcggccgacctaatcaccgcccactcccaccgggggtcgtcgtcgggtcgtggccgtatcggcgtgcggctccggcagcggcagttcagggatgaggaggagcggcggcgaggcgcatccagccacggctcggagacgaggaggttcgggcggtgaatccggtgatggcgaggcgtgtgggcggcgtgcggctattggctcgggcttcctccggtagccagcgatggcgacgctttgcggaagcggcgggcgcggccggcgacgacgacggcctgcgacggcgacggcttgcggcagcggcaggcgaccgtcctccacccggatccggcggtggcggcccggtggcggcgggaggagagcccagcggcgtagtcggcaatggcgtggccggcgacggcgacggcttgcgacggtggaggatgggggaggcgagggggaagaggcttcgtgctcctccaatcgggcgcattcgccgccattccgcccgcgctcgccgaggccatcggcgccgctgggtagggcgcgagcgtcttggaggtgatgggcggggcgcgcagactgctcgtgccggacccgaccgggacctgctcccaactcccgtggcatgcgagttgagtggtgccagatccgttggctacgactgggcaacggctgatccggggtaggcttcgtgctcactggtgctgccttctcccatgactccgacctccctctctagccgtcgccggcgtcccctgctggatgcagtcaatgtaggctcgggactcgcctgatctggggtggatcgacgaccattgggctgtcgaagcatagcagagacccaggcagagatgtactccctccgtaccaaaaaaagacaaaccctggtttccgtgcccaatgttttaccgtccgtcttatttgaaaaaattatgaaaaaaattaaaaagacaagtcacgcacaaagtattaatcatgttttatcatctaacaacaataaaaatacgaattataaaaaaattttatataagacggacagtcaaagttggatacgcaaacccaggatttgcctttttttgggacggagggagtaggttgctgcttgcaggtccgccactgcccgtggacagacagtgctcgtcgatcgcatttgctgtaggcgccagcgactagtcctgccaggcctgactggagaacggtgggatttggtgctgctgcaccctcagcggcgctggttagttcctttttttttttattggatcgatggaagttctgagctgagcttgttactattgtgcttttggctttttgtggtctcgatctagttgaacagagctgttctaagagcatcttaatattattcccttgcttagcagtaaccaagtattacaaatcaatagcgataagtgtatgaaataaaaaatttgcccctttatatctttgtagtttgtaataagcctgctaaattctcaatgttcatgtgttctgttcaaaatttatatgattcagaaattatccaaaccacttgtgctagcgttattcataaattaagatgtcatggctgatatgatctgtgtatgtttgaatttcgacagtaatctcaaatttatacaactcaaaacttgtataaaccaccggtgctatctgttagagcttgcattttcagaaatagctgtaattggacatattttcataaatgatcatgtattcttagtgaatttggttctatgtattgttgtgatgattgctgcttttgctggatcaagcatcatgagtgaatagccctgataccagaggttttttttttttgcaacgcatgaagaaccatgctctcatcttaattttcatttgttcagtcatgaattgtttgtgcaatatattcagaaaagtgttcccatgtgaatttcatttgtttagtgatatatttgtgcgtgcaatatttggataactgccaatagcatcatcatcaggttctctgatatgtttgataaatgaaaactctagaagctcaattaggtagcagttctatgaagttttgtggttcaacagagcatatcaattgattttctctgaactactctctgaaattttgtggttcaacagagcaaaggtgtttgaataaaataatctacaacctattaacgtgatgatggtaacgttttttatcagtgaaggattaaaactccttgattcccatttatttatgcgaaggaaaaaatgagccattttttatcccagttttgcatcgcggaggaaaaaaaaatctatttttcaaatgttatttactgatgtgtcatgattcatgatctgagaatttatcattgttttagacggatctatttggttttacttaaatgctcaccctctagttttaacccttctagaactgtgccatctgcccatctgtaatatagtgtagtggaatgattcattcggctcagttgaactagaaaatctagaaaatgaaccttgcagctgaatgatttattccgatcatcttgaccaaatagatttatttctggatttggtatttgctttctcattctgctgagttgcacaatgttcaattgtaggctgggagtaaggcgagcccaagaacattatagtccggatttaatttttgctttctcattttcaggtatagcagagtacattatgctcatgtgaatacaaccaagtacattttcagatccggttgctagctagtgccatggaggagcagcaacggccacctccatgacgcgactccgtcaatgtccagccagcgccagccatctccgccaccaaccaccggccggtgtctagatctatgttatattgtcatggagtaaaatgtttactcacaccatatgattgtttcatgccgtgtaggcttattgtaaaaaagttactattctcatatttctcattgtattcatatcgtgtaggtttattgtaaaacatttaccatgtgctaataagtgtccgtgaaaaatacttgagtctatttaactatatttaactagatagtaaaattattactcaacaataacgaattaatctaacattatgttcacgagtaattgatttacttagtgaggctctagtgtgaaaaaaaccaataacttattgacgaaaacaatattgggcgcggacgtaatctcctagtaattcttttacttatggttccacgttagaaggaaaacaacataaattaattgggtgtgcgggagtgttagtaactcgtttactcataggttgataggctcttttactactataagtaatttacttactaaaagatggtcgcgaaaaaaaaagaacgtggcatcaaaaaggtgcgggtgtggggcggttgggggtgggggaggagagagaaaggtggtttttctgggtgggagtgggggtggggtgggggtg

SEQ ID NO: 12959 - DNA, 652 bp, Oryza sativa
cctttgctttcagaatcggatagataaagacccagtccccttatcgtatgtttcttcgaataaaactttaaacaagatcccactctgcatttttttgatgtactgaattcaatacttcatgtaatatcaccattccttccatgatgaaacgatttttcagaaaagttgtttgttgtttagagataatgtatgccatgattgtgttgagtctattcatgaggactttagttattatcttaaagcttacattcagcagacatatgggacgaaatttttgtatttgagaggcatcttttgttttgggaatcaatgtaatcactccaaagttcaatctatcaatatttattaaacccttgataaaatcatttatcaagtcaatcatgtcatgtttgaccaagtcccaaaaatgcatgtaaaattctcctgttattccatcgggacctggggctttgttcttttttagttcaaaaatcattgttttgagttcctctaaagtgataggaatggttaacatcttcatatcttcctttgccaccttagatacatttgccatatcaattgaaaacatgttttcctttgaatgtccaaagagatctttgtaaaaatttctaatatgaagcaacaaacttatcttatccttcaatcacctctc

SEQ ID NO: 12960 - DNA, 6142 bp, Oryza sativa
aagggtcttgtcacactcgcatggtgacgtgtcaggtatagcacggtgaaaaatggtggattgtgtcttgtctcttatgggtacagttgtgcacctttggtaagagtaaaactattcgaatagtcatgctcgcgattataggcgatcgactagatgcaccgtgattagtttcacaccattaattaatttgacttaatgaactagtgtagttcatgtggtatggttagatctgttcaacatggtgtagcgttgttcagtggaggtttaatcttgccttaattaatcaacaattttattgttttcaactataaatgtttacacccgcctttatgcaaatagccacaaacttcacttgtttccccttgcacgattgtgtcattggtgtggcttgcgtcatacggtggttatacttagccttgctataattaccatttttcagaagtgtagtgctactgagttgaaaacgaagttaaagtaccaaggcttatactccagttgtgtttactaggatcacctcttttccgttgctgccttcttttggtgtgatgactaaatgcctattctgtaagtatttacactttatttacatttggatctatatattaatttgttattttgtgtaccctagcttgattcttggacaaggatttatacacagaatagtttgaaaatttggctaaatttctggtcgtgacagcagagttcttcacaaatgcactataggtagagatccaaaaaccgcgcactatacacattttgtgaaccttaagccttactcgttctcttggttgtggactctatgccagcgatttaggaaaatggcggcatggctaggatgtgccgatgatgccgtcgaaccagctcgacgagacaatgagggggtgggggtggggggggagaggggtggaggaaggaaagtcggaaggagggagagggagagggagaggaaaaggacgaggagcaagtggaagtcggaccctcccctcctccccacaattatcaagggggtccatctcgatcacagtataagagggctcagttcagggatcggaagaataccctggaccatcctagtgctcctatgggtaggaagaggtaagttagttggcatatctatgttcgaacttgtgcgaacctttattttggcttcttgtatgctgtaaagggtatggatggatgtggcaagggatgtggatgtagtgctgtgtatggattttggatggatggatgtgaattgatttcggatggatggatgtgtgctaagggtgtatttgcaggtggtgatgactggatatagagctggttgttagttcctgcttggggccatacttcatagctaatgaagatggcgctgaaatgtccaaacttagctccatatagcttatcgctaaggtatggcctctaagcagccaactgcaagcctagctcagagcaggtgcatcggcactgagcttgaaaaccttggcgccacgtgcattggcgctgagtttgaacacctcagcgctctacaggctcgcatgactatgttccaaaccgcaaaggtagatggtgctgaggccttttagtccgacgccgaggttggcggcttagcgcctcatggctgcacaacacaggagctgtgttggacgagatgacctcgcgcggcaatgtcccgaaggaggtctttccttctggccccatctacattggtgcttaagtctttcctttcagcggcaatatggttggtgaagagcccctgccatgtaagtgaggtgattggctcgggttccatgtgaacacgggagtcagcgccaacggacccggtgttgacgcgtacaacctccacaacaaggtggtggggctgaggtcgtggatcatttttggttgatttttttttgcatggtgtaatttcaaaataagtttttagaaaggatcaatttgtcaaaaaaaagatatattcattctccgattttgctaaacatcacacgggtgatttttcgttgatatttgacagatttttgcccctacaattatgcgccgagatcagtacacgattctgcgtcaatgttgtcgtgaggtggagaggagacctcgtgggtcccacgtttgccgctgatcacgattcacaagaaatttacatcctagctacgtgtaaatatcctatataactaaaataaaatataaaattacagtcctatttaactaaaattacatatgtaaattcagttgatattaattataatcctatttaactaaatctacatttgtaaattcagttgatttgacatgtaagtgcactgtaattttgataaaaataatgtgtaagtaaatatgtacttattattttctttaaaatataaaattacaatcctatataactaaaattacatttgtaaatttagttgatttgacatgtaagtgcactttaattttgataaaaataatgtgtaagtaaatatgtacttattattttctttaaaatataaaattacagtcttatataactaaaattacatatgtaaatttagttgatatgacatgtaagtgcactgtaattttgatgacatgtaagtgcactgtaattttgatgaaaatattgtgtaagtaaatttgcattagttattttatttcaaatataaaattacagtcctatataactaaaattacattgtaaatttagttgatatgacatgtaagtgcactgtaattttgataaaaatgttgtgtaagtaaatttgtattagttattttattttgtagtccgttggatgcaaatccaagggaggaaaaaatctgggtgattaatcacccgagtgatgcataagctgtcccttcattctctcaatccaaatttcatcggagttatagttgataatagctcgctgcggttaacggctttgggtggggaacaggggaaggcaaaacctctgcttgcaaactccaaaaccttctggaacgtttcgtcgttcgaatcgcccgcaccaaaatcccacccctcctcttcctccttcctctgcaagcaaagcaacccggtggaacaccacgcgccgcacccctcctccacctcgctcctccgctcccgctccccgccgccggccatggtgctcgagctccaggtccaccccaccccctcctctcccccatttcctccctcctctcgcttcccccattcggcgctcgctccgcggctacccgcgagttcgctacggtgattaatttctgaaggtttttattgttggctggaacccaatgcattcgcagaggagcatgcaggcaactatgatatgcgtcgacgactcggtgtggatgctgaaggaggactacccgccgacgcggctccaggcgcaggccgacgccgccaacctcgtgttcgccacgaaaatggcggttcgactgcaacctcgtgttcacacaatttttggggtttttttttttgactccgggagtttttgggggcgtcgtgttcgttgcagtcgaatcaggcgaacacggccgggtgccggccatggctggggacagagtgcgcgtgctcctcgcgctcaccagcgaccccgtcaagttcctcgcctgcatgcgcggtgcgtgactggcccccaatctccatatagggtgtgtttggttcccggtcaaggttggatgggatatggcggtccatattttcctggatatggcgatccagttttttgtttggtggagtgaatatggtgatccagttttttgtttggttgtagggatgaaagtggatatggtgatccatttttttgtttggttggaggagtgggatggatgagtgggtacaatcactcttccattagaagtggtgagtttacccctatttcaacctactaaaaaaataaatagaaataaaaaacagaacgaaataaaaggggaaggagaaaaaaagaaaaaagaaaaaaaaatcttcctctctcgaaatcgccggccgcccctcgcctcctctctcgtcctcgtcggccgcccttcgctcatctctcgccctcgccggccgccgccgcgcctcctccggccgccgccgctccagatccggccgcgtcagcgcctcctctctcaccggccaccgctgcgcctcctctctcaccggccaccgctgcgcctcttctctcacccaccgccaccccgtctcctctctccccgaccgccgccgtgcgtcctctctcgccggcgcggcacgccgcccccagatccagttgccgtcggcgcatcctcttcccgtctcctctctcaccggccgccgagctcgcgtcccactgccgccgcgctcgtcgcccacgccggccgccgagctcgctgcccaccgtcgtcgcctcctctctcgtcgcctggcctggctgccgccgagctcacgtcgtcactcaccctagccgccgccaagctcgcactgtggtgagaggggtgacgcgacccactatcgctcgcccccgctcgcccgggcgctcgggcggctgcatccggccgaatcggccggatccccccatccagcatctggggggaatattcccctccgggccgccctatcccacctccgaccaggaaccaaacacccacaaaaaatgggccgccatgtcctatccacccatatccctccatccaaacacatccataattgtgtgatttcgcctgttcctcccactattccagaatgtgggatagttccttgatcaatccatgatcactttggtttggtttggtaactttgataaatgatggttggttggttagcgtgcagtcgtgcatatggtttattgatcaatccatgatgttgtttgcaaaaaaatgtagtgttaaatgaacgctaagttgccaaggaaccatcaactttgcttatcctcctggaattcaattctgaatatatggttctgtcttgtccaggattatcagttcagttagaaatgatgttagttactgcacaatagtagttcactgatcaatccatcacgttatttgccaaatggtgacaagcacactgatctctttattttgtagggtagtgctaagcgcaaggaaccattaaattagcttatactactggaatgcaattctaaacatatatgggtctgatcacttagtcaaatatgatcaaggattaagtaggaagatttgtggtttctgtgttgcttatggaatatgtaaccacattctgttgttgtacgacttagcaaaatccatacgaagaaatgatgctgatatatgtctcccatgtatggttcacttgtttttaaaggcagtgtggtagtaattgtacattcgtactgtcataaactcgtcatctatatttgctttcattttttttgtaccattctaaaatattactacctccgtttcaggttataagactttctaggcacacatatatgtatagactcattaacatatatatataaatatgggcaataataaaaagtcttataatatgaaacggaggaaatatctatattacaaggaagagaggatatgtatggaatgagaaccgcaaaatgttaagtcttcttgtgatcgatcagatacttgatagttgataatactgctgctttaaagaaatcatgtgccacatatattcctataactgaaatacttatctttgcagggctgaaagttagtggtgaagcaaatttgactgctgctttagaggttgccgaactggcactgagaaatcatgccgacaaaacactgagccagaggatagttgtttttgttggcaggtatctatctatctatctatctattatctatcttctattatatactgtccataagacttcctacaaacgctctcaagccgccaagtggcgctctaataaaatagagaaaatcctagaaattctaagaaaaaagcaaaaaatctaccccttgattttcacttaaattggtggatccaatattatacaccattagataaaattgatcttaaaacaaactaaatactatgggtcccacctatcctcctcctgcgcgttggcaggtggcaggttcgtacgtacatgtacgtatgcttccttcctttcttttccttttttttcttttttccatatatatatatatatatatatatatatatatatatatatatatatatatatacacacatactatactaaacccagggtgcgtaataactaaaatgctcctcctcacatcctacccc

SEQ ID NO: 12961 - DNA, 10651 bp, Oryza sativa
cccgtccgtagtgtcttgatccaacctgggggttttttcaacatgccggaaagctcaagggcaacaagatatcttgggggtgcggacatgttacccaaggagttgataaaattagattgaccttcctcattgatcgccaaagtctggagaccacagctgcaaagatactcaatagaagagcgtagttctgtcaagattttccttgtgcccggttcctctgggttgagcttgagcttgtaaatagtaagcttctttagacccgtcaattgatgaaggcctgctacagctgttgtctcatcgatcttgatcccagacagtatccggagtgctttcattccttccttctctttatcttgggtcaacatacttttgtgttgctgcttcttacttttttcttgaggcagcctcaaccctttccgtgggtttttgtttttactcccaccaagtattctgctgattagttttagctgctctacttctttcggcagctctttaacacgtgtttctcttatgtcaagagtttccaaatactcgagcttcacaatcgtcggcggaacatgggtaatatccgtccctcggaggctcaaatacttcagcacaaacatcttacaaatgtgtttcatatgcctgttcttgaatcccttcagtccttgaaaatccaggacttgtattattctgtcattgaaagcatggaatggaagctgggtgaggctcccgaaaacggtcagtgaccgaacttgtgacagattcatgccttttgttgaatctccatgcttggaactgctgctctgcatggaaagccgacggactttgttattactgggtgctatcatcatcagatgaccaccaaccacagtaataaaattctcttctcttgccttggtcacaatatagtcaagaaccatgtcatgaacttgaaaggtttttagtttcccgttgctgctgtgctccacaggacgtatcaactttcttcttaaaatatgattgaagtatgattccgcaacttcctccgccgtcagcccttgctttgcattgacaaaaccttcagcaatccatcgcctggacagacacttcctactaattttccaaccctttggaaatattgccaagtacagtaagcaggttctgagatatccaggcaaattattgtagcaacaatcaagtatccttgtaaccccatccaaattgagagaagtttcttgttcctgagccccagcagtaatagaaacctcttctggcaataatttgtgaagtccagcccagtaactctttggctggtcttggttgcacgccactagaccagccatggtaactatggccaaaggctgacccccacaccttttccataaatcaccagggacattgttctgtaccttgtgtctatctttggtgcttttggattcagaaacacttcggttgaatagctccttggaatcacgaggactgaggaaactaatcggatacaatagatccttgttttctggccggcagcaggtcgaaccaaccgcttgaaatcttgaagtaactattattctactgcgctctttattatcagttagcaacaaataatctgatattgttttccatgtttttgcagaccatatgtcgtcaaccaggattatatacctggcaacaaaaagaagacgacaatgtgaggtagacgaagagtccatcatccagtaacaagcttataaattgaaaactacaaacatacataatgtgccaccacgtacacaaaataataaggaataaagcaaatgatttaaactaggaaggtagcccgcgtgaatgcgcagacatgcatcacatggtaagtttgagatacttataagagcgaaatattaaccggagaacatctaccatgatttctctgtaaattgttttcatcagcattaattgcttttataattttctaacctctgaactttatattatatcatatttaagtaatatctatgagcaattatttataatcgtcttcatcatttgaaaagaaggtagatttattttctttagaaaacatgccaatgaaaagtaagtgtaaagtaaaactaaggtatttttctttattttaattgcatatatattatcatggtttattcgaggatgaattgggtgggacaggaagctccactaaaagtatggatcaatttatatagcctaatatgattgatgtagtttgagaaactactacaaaacttcaaatagatgttgacactataggtgctagaaatattacaaccggcacctataaaacttttcccaactctgcggagtgacaaaatagaaaacccacaccttttagtaactacatgtgccggttctaaagaaaaccggcacctatatcataagtgctggttttttaaactaaaacggtacctacatagaggttaaaagtgccggtttataaaataaccggaactttaatagagacgagcgaggattttttttttctagtccttatcttctcccgcacctcccaccaccgctcattctctgtctcgcctttcccctcacctttcccctcctcctcctcccatttcccctcacctccttctctacctcctccaccggcagcgacagtgtgggaaggccactggccacctcctcctctcgttccttcccaccagccaccggcgctcgcgggtggccagatccggcgccgctgctcctcccctccgtcccaccccttcccattagcgctcagagcggctagatccggcacgcccgcccccccccccaccccactggtgctagggggtggctagatccggcacccccaccacaccggcgctcatcggcggccagatccggcaccgctgctcctcctctccgtcccacccccttcccatcggcactcggagcgggcagatctggcacccccccaccacaccggtgctcaagggcggccagatccggcgcagccgctccaactctccatcccaccctcatcccatcagcgctccaggcagccaaatccggcgccgccctgaccaccggagcttgggggcggccagatccgacggtggtggtggaggaggccgggtgtagtggacgttggcggaggtggaggctgggcgtggcaggaggcccccacgaaggtgcagtgggctgcctccttgattgatttttgattttgtggtgtttttgaatgtgttgttggatggcgagcaacagaaatgtgttgttgttgttgttgattcactactgtctctttttgttgttgttgggtggatggtgagattgtgagaaatgttgttgttgatgttgatggatgtgttcttggatttgggtgatggggagttgcacgatgcacaatatttttatatttacacaaaaaaattgaataagacaaatggtcaaacgttggttaaaaagccaacgacgttatacattaaaatacggagggaagtacgtatgtatacatacaactattcacgggattttttttattcggggaggttacatgggatgtattttaaataaatctaatctaatggtttaaaaatagcgggatccgccaccgccgtcgtctcctgttcgggatccgcgccagccgtcctccgccgccttgtcgctcgccttcgccaggcgcgcgacggcgcagacgctccgggcgcagctcctgccgtcggcggcttggcgagttcctgacttcatcgcggccccactgctgcggcggcggcgggtaggaaccaccgaggctgacgaggccgtgcagactgcgactgaggtgagaggggcttgcttccccatccccctcggagggtgatttgtgcattttgttgcacaccacatgtttttttgttgcacatagtgtgtccatgatgttgcaatccgtatttttctggatgtttcttaaatcaatactggatgttgcatttggtctcttcgggatgttgcatatattggttttttgttgttgcagacaatgttttttagtgttgcattcgattgaaacatgttcgataatgcagtgaaacatcttcgataaagcagtgaaacattcctcaaagataaaacatcaagaaacaattcgtgttgaaacattttttttgagcaatgaaacattgcaacattcattcaacatactgtgaacatcgtctgggagatttcacgttgaaacattttttttcgagcgatgaaacattgcaacattatttaatatacagtgaaacattgtccagagatttgcaaatctccggacgtccgatccgtagctttccccctatttttttcttccggctaacagtaggaagctttatttgattttttttcgattgtattaacgtacatatatttatgttctctttccttttcccagccaccagttaaatatgttatttggagaaaaaactatcacctttttaataatagatctaatctaactgtctaaagtatcatgtccatcaatttaaataaaaatcgacggtgagattagatagtgccatgtggcggtctagaagtctttgtaggagcaccacgtggcggtttgagagctagcgtttgtagaaagtttaatgaacttttagtatatagatatagatatagatatagatagatggatggatggatgtacacacctctttttatccaggagcttctttatttggctttcgagtttgttgtcggtggtttctgtgcgctttagattggaggtctcctcaatactgcgagggctgctttgacggagacttcctgtgcgctgcacgtctcgcttcaatttgcttccaaagcgtgccagtgtcttgatattctcagaggttccagtcttgctgctgcattgctgcctgtaatctgggtctatttgcttgagaatatcattgagtacggcatcaaggtcatagttctgggacacagtaacccacgcccggcaatcaaattgatacatgactttcttgtacaatgccatggcaatggtggtcttccccacacccccaaatccaacaatggacacaacagcaggctcctgacaagcagtgccgtccacccactcctcaagatccttcatggccttctccatccctacaggctcattcataccaagctcatggcttgcgagctgatcctcagcaatgtcataagacgtcgcatcgggcgggcccttgcctttttgggtatttggattttccactccgtatcttatgcgtcggtcagcaatcagctgcgcccggaccttaagctcagcaatactggatgcaatctcacggcgaggcccgaacgtccagaggtcatacactagtgtgactatccaggggcagcattttgcatccaaggaatcgttggggaggcggtgagcaaagtcatctatgcagtcctcacagtcatatgccatgtcgcggatctgcttcatccagtgcttcttcctgttgtcagggtcttcccgggcgaggtcaagaaggaaggccttcatgctggcgagctcgtcactgatgtactggatgtcaccacggacgcccctgatcagatcatactcctgggcgagaaggttgcccagcttgcccaggagagagtccatggtggcagtcgaagcaccaaccaccaactccatcttcgtgttctttatgttcttcaatgcagtgtataaacagcaagcaaacacaaggtcagagtgaattgccaatgtacaggaccagctgaacatataaaaaagatcttaatcaaaatgtatgatgaatcacatcgggacgattgcgcgagctataaattatcggttttttttttttttggatccactggtaccaatagttagctagctaattattagcaaaggttgttctgatccatctcctaataggatgctaatagatggttgttgtcacctattagcagccatgaacctgctagtgaaactaatagttagcaatcgcctagcttgtagttactcagtcttacggctgaagtttgcaaactggtagatttagctgataccgttcttagcttgtcaagtaccaattcaagaacctatgcaaattatagcaatagctgtgctgaagtttttacacactaaaatgctaatacaatcttctttgaaatatcttctttcaggctcccttggtagtgcttgtgttctgggtgcagtttcttttctcgtcagtaacccaagaaactctgaagctggaactttggtttctgattcacttgataagataggagaaatattcctaattatcatacaagctgtgcagcagcttgacccaatatgatttgtgagatgaatcacctcctcttactcacatagacacactgaggaatgaaaaggccaacaaataaactagagaaacaggatgcaaaaaaagtatttctagttcaccgaagaaacactttcatgtatggagaaatattaatttcttgagaatctggaactatgccaagctcaagctcttcctgagtccaatctggcgaggaatagattgttcgacatcgagtaagcaaacctagcaatcaccgcggcttctagcgccaacaatttaggcaccagtagatgcggagaatatttcgaactagactagaatatccataactggattatcattgatacacagagtactcaataaataaaacaaactacccgacaacaactttagttcttgcttgcaaatacggaaagtaaaattaattccaatcacatagtacgtagtaccttgtaagttagctcaaggaaaatagttgttcaccggccggcaagagcatgagcgatcttgttagctggctcaacggggggggaagaacaaaggaaggcgctctcagtctcagatctcagtctcagatcgctcaagtgatagagaagcggaggggctccagttttgggtgcagaggagggacgcacctgcggcatgggctaattaatatacccaaatgtccattaacaaaaaataagcgttctcgaaatttgagtagctgttgtctcgctcctgttttgtttttattttatgaaacgttttggtcttcttctaagggcgtcaagtcaatggctagctcacacagtggccgtgtttagttgttttggtaaaaaaaattttaactatacggatacacatttaaagtattaaacttagactaataataaaataaattacagattccgtctgtaaaatgcgagacgaatctattaaatccaattaatccgtcattagcaaatatttactatagcaccatattgttaaatcatggtgtaattaggctcaaaagattcgtctcgcaatttacatgcaaactgtataattggtttttttgtctacatttaatactctacacatgtatccaaaatttaatgtaacggaaaagttgaaagtttaaagggaactgaacacagccaatatctatgagtacaactttggctgtgtttagttcatgctaaaaatgaaagtttggttgaaattggaacgatgcgacggaaaagttggaagtttgtatgtgtaggaaagttttgatgtgatggaaaaattagaagtttaatgaaaaacttcggatctaaacaccgcctttattacgggagtatctttcttccttccctctgccctcctttatgaacaaacccaccattggcctgtattttgagtgaggtaggtgtggagagaacagatactagacttttatctttctgtcttctctctcttccacgtaaacaacgtgttaaactcctgtaaaaaaaacatgttacactactcccttcgtacctatatttttgacgccgttgatcttttaaatatgtttgaccgttcatcttatttaaacacttttgtgaaatatataaaactatatgtatatataaaagtatatttaacaatgaatcaaatgataggaaaataattaataattacttaaatttttttaataagacgaacagtcaaatatgtttaaaaagtcaatggtatcaaatatttagggacggagagaatacattcctatgagttagctgaagtggcacagttgggatgcactaagctggtattcctagcatgctgtctgtgttgtcgcattgcttttaatataagcagagtaaactccttttttgaaaaaaaattaaacaaatatccattaataaccaacgaagccagtgccaaactggaagtccacaacactatacaaatcacatatgtattactatttctcacctctcttctaagttccaagctactttaattttatcactaagaaaaacttatctaagtttgatttagtttacggaaatatgcaccaacatctaggacaaaaaagataaatcctaaaaactttcacaaaatatacaaattttcaccataaattcagcgagctttaatcaatttttatactaacaagcattagatctaatagattttataaaaaaattacccatatctgtggttatgaaaaacagcacagagtaacactaaattttcatataaattactagtcatcttttctatttcgtaacacaaactaattaacctcttaaatttggatcaaaattacccattgataccattatcataaacaaactgaaatttactcccaaatgtacacctagtttgccaacctatgcacctaggactcccagttgtttttagataatgaaaaaatccggcttcagcttgtcgtcaatgccatagtgacagggggaaggggttgcttaactgatgccccataggacgctagctcatggtggcccttgcgacctcctcctcgagacacagtgttgggtgcagtgcctttacttgagctggtagtagtgtagtagtaggagccaaatctaaccattgatcctgatgggtacttaagaattttacttctacaccgtggaagggtattttcgttatttcagatgctcccaagaaggctagtgattcgctggttcccgttctttttgcgcgaacccacggccacggcggcaccgcccctcacctcaatgcgcggccgccgcccgctgcccctccttgcgtagtcgcgtgaacccacggccacgtacgacggcgccatccctccaccccctgtggccctgtgcaccgcagcaccgctttatttttgggatatgatggtgtatctgctctagggaaggtcgctttgtcgaaatgtgttcttgaatcactcaattgctatactgcaaaactaattactgaatcactgatgtttagctgatgatgtataatttaatcattttcgcattagcatcaggcaaatgagctaatgccgaagctcgtttatctgcagcagaactgagttgatggaccaagtactgagttctagactcaactgaaataaggttaaaaaagaaagctcaacgacttgcggttgcaagcacactctcactctattagcgtcattctaatcagctatccgaatctacaatttgactgacaaaaataactacaatcagatatgtgctaaaactgtgttagtgtcttcttataatcagctatttcaatctgcaatttgaccgacaaaaacaacaattgacaagaaattgaccaacaccagcatggctacgacggtcttgaacccttcatcggtttgatcaccttccggccttgtcttagattctgatatggatcatcccacttcaattaggtgttgctaaaccttgatgctacggttgaaacaggtgtactagcagagtccttttttttttttttgcgagagtactagcagagtcctttgacaggatctcatcatcagtaccaaattgacggcactgccaaacgcgtgaagtgcggcggcctccgtcgcgcacagcagcactgcaggtctgcagcatctcgcctcgcctccgttctccctctcgcatctcatttatcgacagaacgactctcctcgccatccccgcgtgctgcagttgtgaactgattgggcatattgacccgtggactagattacgaacttactcctaagccaattgcaaattcatcacaatgccatctattacatttctaacattacccctccacgaattatactacatctactaccaggtgtagtacgattgaatctaatccattagatcgaatcaaatggacgtctcacattcattttgaggtactttaaaaaaaatccttgggacaccttctcgcgtcgcggcatccttagccagtgctgccgaatgcattgaagatactgtttttacatggaaccggaggctgcgtgggatggagatttcgggaagaccttgctcagggcggcagggacttatcatgatgtgacatattttagtagagctttgaaaaattatacaagtcacatattttgtctatttgagtttaatttttctatgatgggttcctgtattctcctaagtgtgaaaaaaatatcaaaaaaaaaataaaaataaaaaaaactgcatctctctgtattgttcaacttatgacaattatttcatgtggttatattttgaattagagattaagtaatttcatatagtggtagagtgcattatgtttaacatgctgatcaaagggttttactaaaggaggtctaattttgatgaaggtgcaaagtaggctaagtggtatgctattttcgaatatctagctaagtggtatattccgtttgagtttaattttttttttgtggttggttgtatcgtgatcctaagtgcgaaaaaacatcaaaaaaataaaacatgaatagagaaacaggaatacaggaatggaggcgaggggtgggggggaggggggtt

SEQ ID NO: 12962 - DNA, 12418 bp, Oryza sativa
ttcttcataaaccggctgtatgagaacctttttaagtgaactaccaatatctcaggcaacctccataagtcaagctttttgctggcttgcttgtgctccgtgcatctcggacagtacctgctcagataagcaagaaaagtgatgcaagctcagacattgaccaaggtgctttctttatggaaaaaacagagcaatttgcaagtatcagtcaataagacagaaataatactaaccacatgtcatcagggcccagaggttcatccttcagaaaagcatctaagcatgaaaataaattgactgcttcttgccgatttttctttgacataaatccaggcttgaagaccacagaaagttcatccatgtacttaatgtcatatacttcatgttctctatcagaccagtccattaataacctcatggtcgacccaggaacaccgttagaatctgcatcaatatgctctctcttattagctttatcatcagtcaaccaaagctgaaatggcaaaacctcttcatcagctgcttcctcatccacatttgatgtagatacatcttcctcacaggtgacaccattgtctgtcacacaataccatccaggctaggtccattgctatttaacttggttgcagattcatccagagtatgtacttttgcccgcacaaatggagccagaagtgaagagacagttgcataaatatcagcttttcttgtagagtcacttggaatacaagtcacaagagggcttccaattagcttccgactaagattaaacatggactctgaagtatatctgcataaattaacaaaacaaatcaatgtgtaagcacaaaaatggaaaccagttccaaggaatagaatagtagaaaaaagaaaatcactaccatcaaatacatggcatgtatctgaggtaagaaatctcaatgtctgtagcattttttttgtcagctacactaaactattctcacgaatcataagcacaaaattctcactagaaccaaaattcaaataagggcagggttcacctattctaaggagcaacaatagatgaacggacatcatggaaacacatatgtggtccttgctaacataattacagactcacctatcaaccacccgatgcaggatctctaccctcaagagattttcagagccaaccggtagcctgtaagcaacaagtttgtcttcatcttttacatgacaaagtggttctgatgggttccaatagcggtaaatccgatgatcatatacctaaagaatatgatgtttattagctatttactgaaaaagagttatgcttcaaataacaccattgctacataagaacaaactggattttttacctctgcaagtaacagtgtttcgcaactttgtaagcaacacataacactcagagattttataagatctccacaaactccattcttttgtaccttcacagtgtaaggcatgggaagggcatctccagtaccactaaatacagttacattaatcatgcgagtaactgttgagggcaatggcagtgacaagtacatgaatgggtcaaatgtaactgaattttcttacaatctgggcaaaccaaagtggacttgtactgaccctgaaacatcaaccaaatgaattgatgttactgcagagatgtgacaattaacaattatcgtacaccacaaaatacgccaaaggggaaaatgctactgaaatttgaacatgtatatactccctccttataaaaatataaggtgtattcactgttattaacgtcaagactttgaccaacaatttctttattactaacatacatatcatttatgtgactcaaaagcatatcataagaaagttcctttgaatgtgaatctattaacattgattttgcatcacaaaaattatattctaacataataattgttggttaaagcctaatccaaaaataacatatgccttctatttttgtatggaggaaatattacagaatgaaagcaaaataactatactatctctcccacttcctaaaatagcttcaagaaacatcaatcatgtttcaccatcagagagcaatcattaatcaacgctataacattgttctttagtattttcttctattgaaaatacccatcactgcttcataaatcgaccaagtaataaccaacaattggttcaagccagattcaactcaagacatagcttgatacaacggtgccaaccacataagtgggttcacaggtcgacccacttgtcccaacatatatactaaccgatcagaaatatccaacaaattctacagtgctaactaataataccaagcaccagaactagctagtatcttgcactcagcagcaagtaaaaggctgagcagtttgtgaggtaaatcttggtacgctacatctgcttgcagacagacctggcctaatctttcaagcctagtctcaagaagataatcattgcaaaagcagcaagcaatggaaaaggtatactgatgcagtggtgaatagttgtgagcatacataaacctaataccaaaatgagccatgccacattcaagatttttgtattttcatttccagtttgattttaattctctttgttcggtaaatggctttagatcattatgccatgttaaagtacaaaatatgccaaccagcaaccaatcatcatgccaacggctcaagcacatctcacgcccctaccaaaccacaaccctacattcccgactagattttctattacatctctttcctccctcggttccacagtttcaccaaatcaattcaacgacagagcagcgcaaggcatggcaggcagtcacagagcggcagtggcacagcaggccagcaaaggagcaacgtcaagcggcacaggtcagcattggcatgttccgaggagaaacagatactgttttctaactgaaccaaactgaattattcggttcaggagctcttttttgtgcagcaatcattctggttaccactatttcaaaaccggttgtcaaaaaatagaaaacatccaacaaaattaaccaaaaactgaatatccccactacttatgagggctctacagaaaatagtacccgttctcatcccaaaaacggttaaatttttgtgatataaccactgttgaaatttcacctgatccctgcctcaaaaaataacctgtttctttaaaaaagaaaataaaaacctgttgtctgattacaaatagtttcagcattaccaagttcatttccataatacgaaaatccttaaagaccacccagagatagggaacctttattcaaaaaaatgcagaaatatctttaaaataattccagatccaaacaatatttgctccacatggtaaacatatacacgtagcaaagatttcattacctggaatttatcaccaatatatagaatcatttcgagctttatggtaattccagcattcctcagcaagttcttcatcaggacggccatcggcatcctttgcttcaatatatggtttctttttcacacggttgagatcttcatgcagaccatccaatagaaatgcaagtaactcctgcataaaagaggggcaataagtaacagatcaatcttctttaacaaaatgtgaacaatctaaattgccaaattttgtcaaataaatatagcttatccaaacaagaactaaacgacaagatgagggaggcactaatatatcaaaaagcataataaacaatcccttattccgaaagacacatttattaaaggttgcaacaggtaatattacacaatgaaaaaaaaatgtatggagaaatacatcaagttctgaaaacaagcaaagcagggatgcataagtagtgataaataggatgcatcagttcacaaaatgacaacaaactgtgtacaagacgatgacggttataaaagagaagattacagcaaggaagataacagggacgcaattaaaacagattctaaagatggaaaacatattcaggaaaagagctgaaaacttgtgtcaatgtgtggccaaaaaggatgcaccatttatcagaacagcgaacaagccaaaaagcagagacaatttatctctttgacaggacatgttgatttatgctacaagtcgttgactttttttctagtcaaacttctttaagtttgaccaagtttatataaaaatttagtaacatctacaacaccaaattagtttcattaaaactaacatttaatatattttgataatatgtttgttttatgttgaaaatgtgtctacatttttctataaacttggtctaacttaaaaaagtttgactaggaaaaaagtcaaaacgacttataacaaaagtttgagaaacatagatataatcatagtttgacacaatttaaataaacaaccaacactatggttaaaaaacaaatttcacaaaacctcaggtttggaacgattgtaacgcaaaatcccagcttttatatttgtttcgaagaaccccaaatttttggcccacactcttataccactatttatgcataacacttgtacaataaaatagtatgcggtattgtttttagtacatgtaagaattagacctgggagttttattacccaaaacctagggttttgtaataaaatctcacaagaaattaatgcatatgtacttcggaactgaaatgtgccttaacactaacagtgcaccggtgtgttgaaatgaaaattaacttcatagttctgggacacaacagcatgttatcttaaagtaagaaatacgtttataatgtacgactaattaatggaagttacaaaacagaacaaaggtgcaaaactcagtgtcagcaccatttaacagacatttataagaagtgtttaggagaaacattcggagcaacctgagaatcatgttgattgtatccactgaactgtggagcaaaacgagaaagttttgtcttgaatggacgtggagctatagaagttcgaccagctgaccaaagttttctcagtaattctccaaatgctgttgcaagttcaccctgctcaatggagatgttctcagaaatcaccaataagatcataagttcgcaatctacataataggacaacatgcattacctgtagcccaagtggattttctgtatttatctcccgactgtaatcctgtaaaaagtactccaccaatggaggtgtatgcaccaaggattgtatagcactgttcatgaaacatgtatttcccaagttatgtaaaccactcagtccatggatatcatcctttgtgccattggagaaactataaccatcttctgcgtcccttaataaaggactaaagctattatcttgggaaaaactggaaccaaatccagatgaaaaaccatttgaaaatgcaggacctccagcaattgaaaacgatgatgttgagggttccaacggaattaatgctagttcattatttgatcttgtaccaagatccgaacaccaagcatcatctgcctttgcctctatgataatctgcaagcataaagaaagaagttgcatcttcagttaatgtacagacagaaaatagaaaattgttggcttgccaacaaaataggggtaaatcgttaagaataataagattcaggacacccacaatacagatagtgaacatcttagaagcaatagtacatattcataccagtacatattcatacccgaacattgcaatggtgcaaatgtaaaccatattcatatgataaaacacactgatcagaagcatattcatatgataaagacaaatgagccaactttattaactcaaaaacaattctcatgtcaaccataatagaacttgaaaagtgcaaatgtaaattaagataataaattaagcaatatttaggagttagacaatttatgacaaagtcattatccatgtgcaaggtgacatcctaaggcagacagcagaccatagatgaaaagggcgcatagcaacaataacaacaaaaagccagcgaccatctcgctgccagaataaaggaaacaatcataggtttcagcagataaaacaatagatatgtgaatgggaattgcatagtgcataatacctcctggtccatcatcagttgagcttcctcaaccgtctcattaagatttatcagtttttttccctttgtcttttggtaaaaatcccagatgtcgatctgaagcattaaagtagatggagcaaagaatcatatacataaccataactgacactacagatagagatattagatgaataaatgatgatgcttgtaccttagactgttcgacggacaaaagtgagcaaaccaagctatagagctcactaactttggcctgaaagcaccaaatacaaacgtcaaaaaataagtcaagtcaattgcacaagaaactagagtatccaagaaagaagataatagaaagttaacaaatttactgttcaacaaaagagtatctaagaaagaagatagtagaaagttcatctttctacttttttagtaaaagtgctattagttcaagcagttagtaaaaccagcattcaaagtatttgccattgcgcatcaaatttgtaacatttttttccttctggtaatagtcaaccaaaaatatcagatcaaattctgaaattcaagggctcagcataccaaagtagaagatcgcaacaagcaggtgatgaacagatgcgatttctttgacacttcatcacaaagagggaatcctcattgctttatttcatataatgcaaatgtgtaagcactggtttttatttgacaaatgtgactctccaacaatgtgatcaaggtataaagaatgcctaaactgatcatctaacctatcaaatataagaaatgctccgatttgtcccacacaataagcacagatcaaggaggcatgatggctaagataagctaatgtgaaatacaaccaaatgttaaccacacaacctctttgaagcaataaattagggctggatagtggaatcatcattgtaataactacactattgatttcatcatcaatggataactatggagggactacatcccaaaagaaatgccaaacattatgaaaccagggaagtttcaaggagcatcagtcgcattattgacggttaattacatatgaagcacaatgtcacaatataaatcaaatataccatacctttctactaattctgataattctctccaagctgtctcttccatcaaataatttcagacggaggggatagacatccacaatgtaacttctggaagttggactactacaaattactcttcttgagagttctggtccacctttgtacctgaaaagtattcatgtgtccatgagttgatgatcccaattgaagaagaatgtattcaagtacattaggccatggacattagggataagttatggttacactagtattctggcataatccattgaagagcaacctgacctcatgagtgaaaacgcgtacagtatgcatttaccagttagcacatcattgttttaaacaaatatcaacaggaaacagaaaaattgaatagggcaacaactaattgccaacagactgagcaaacaggactacaaaccaggcttttttggtttgcacctaagtggagcacatgcaatctacaatgtggcatatcaaagccctggcagcccaagcttggccaaatgaacaagagcgcctaaagaaaataagaactaaaaaaatgtcgcaaaatggaactgtagttatatgatcaaattttaatcaggcaaccattttctctcatgacaaaaagtaaagagacaaacccgtggttttatgggtacaacaaactttctgacatgaaggcagttaaacagacatataacattgcataccattcatgtagcttcctccatacttcctggggcaccaaagcgtagtcatctccttccctcagggttctttgaagctctggctcatcaccaatactgctgctttcctctgaaactagctttgagttatctatctctcctggtctacttggagcttgaggaagcatgtcagcatcattctcatcaggtttgattaagcccacatagctttgccagttaagccaccagctgcaacatttgcaaagtccacacgatgtaatttatcagtcacaaaattcagataacatgtgcacagcaaccaattgaaatgaaatgcgaacggattaaacggatcaacatcaaacaggaaaccaagtcccacaagcaatgctggatgacatttacttgcagccaacgagaagatcctgcgcattgaactacttggacagctcagatatatatatatcatgccttactctataaactagtttgtaatatttaatacaggagtttgcaaaaaaaaacatttttattaaagatatactacaaaacaactcagcatggtgcctgacgattatatcattttactgtagcgccccaaccaacacatccccggagcacaacaagattggatcgcgactccgcatcacgcgccaaacggcacgcgtcggatccccagccccaattcgaacccctggattttcccgcagcatagataagatccccacggccgccacaccgcgggaagacgggtacctagatgctcgccggaaaaaaaaataaaacaaaatagaacgacactaaatcaggagaggccgcggcggcggaggcgacctgtgggagacgaggtagcggagatcgccgtccttgacattctcctcggcctccctggtgagcgcgacgacgaggtcccgctcctcctccgccgtgcacgggaggcagctcgcggcgtggaggaacccctcggcgctcggtatcgtcatcccctccccgccgccgccgccgcccgcgcgatcccgccgatccagccccctccccaccgccaccgaatcgagccctagggtttggtagctcgcgagacctcctcgcctttatttttattttctttttttctcgcgaaacaagaggaggaagacgatgaggcgaagagagagggaaggacagagaaaaagaagggaaaaaaaaaagaaacactctccaatttggaattacggcctgtctgtaataataataataataataagtaagcggacgaggcgggtcgtagaatcaccccacgtgaatgacaggtggggccggggaagggtgggcccacgtgtcggtgtcgttgggggcggtggtgtggcgggcgagtgttctggagaggaggcgtgcggcgatctggatccgtaccgtgaggggattccgcgttcttggtgtcgatgacaggtggggcccgctggaggtgggtttcggtttggcgtgtattggcggctacgaataccgcgtgttggagactgactgctacggtggtggtggtgggcccacgggtcagcgtgagtttgtgtttttgaggcccactgaaactgggccgaccatgggctggcccatcctgctccaacatcaagcattcaaaacccagcctttcttgcaggttgggccttcttgtcaggacttaaaagcattcatcaccttaggacatgttgaaagcatgttcacaggtggaatctggtagaggctttcagagactatcttacaacattcattcaagacgataaaagactaacaatcaatatactgaaatattttattattatttttccttccttttctccatcctcacgtagtaaagtttccttttataaacagacattatgggtcatgcatatctttatctattttatttgtgttagaaaacttatcttcttaacaactctaagagcccactattaattaccgttatacatgcccttagggcatgatcaatgatagagacgggtatggtctcttaaacaatacaagattatttagagaccatgtctttacgataattgagacgacaaaggctctaatcattaactcaaaaaatattccttttgttaatattcttttcatatttttatcctcatgcaaccatatttccatattatagtgactaagagtcgttgttaagccgttgtcatacataacaacgatgttttgtctctcctctttctctttcctccatgtcaacaagtatttctaattagcaatgctaagagaccactattgacaatcattgtacatgcccttaggccctacaagaatacttaccatatcgaaatttttgtttggttgtgataatttttgtttggttgtgatacacgtttaccgatctcacgatgacaattccctagcccactattacatatgtgtaatatttgtggacaacttggatagagttacacacccacaactccaccaccacactggtgctttcttgtacaatttgacatacaactaaacacataatatatatacagcatctaactacagtacatcttaagttgaaagataggtttagccctaattgtttgtaacactttggcaaaaaagtgactcagagtaaaatttgctctattaaaaataacccaaaaaaatccaatatgggaaaattggaaccataccattataattttgcaaaatttgagatatgccatcctgacccacatgtcattaactcatgtgggtcctacatgtcattgagatacatatggcatatctcaaactttgcaaaattataatggcatggttccaaattacccataaaaataatgcaatgttgtcttagaggaaatcattatacaaaaatgacaagaaaaatgttttatctgtaccagtaccactatgcattacttagaaaatggcagaccagatcagggttttgtcattatttttataaaggggcatttgcaaatttgccactggttttttcaatattgcaaggataccactcgaatgacagttctagtggcatttttataattttttagtggcagttttgcaataacgattcaaagtagtggtaaatttgcaattgccccttttatgaaaggtaatggaataacatcatctttttgcttcaaagaagctatagccacttattacatagtccgctcaacaaagagcaaataaaatttaggaattgaaagtgcaaagactaataactccaacacttgaggagacatacatttattcaattatatttgtaaatctccatccatagtatatctacatgaccgttgactccaagtttcaatatgtagtatgtattagttccttgttttcatcatacctttgtagttatgcccagaatcgaaaccaataccttgccaaggaaaatacttgcacataagattgatagagatttgtcaaaaaccataacattcctaataagccatagatcgcaacatatagcaaatgctcttactaaaataagttttttttttgtttttgagtcaatacccccttagccaattctcagatatatgtgagatactatttggaggtattaggccaaaagaaatatgaactgatatccagagaaatttagcaaaatggtgtaccatatatagtgtgacacgctcagttcaatttcacaactgaccatggtactcgtcctagctagctagctagcctcctgggttggatgctcttcaagatgcccaatgtataaaacccacttatcttatactttctccgtttctaaatatttgatgccgttgattttttttaaatatgttcgaccgttcgtcttattaaaaaaatttaagtaattattaattcttttcctattatttgattcattattaaatatacttatatgtatacatgtagttttacatattccacaaaagtttctgaataagacaaacggttaaatatgtgctaaaaagttaacggtgtcaaatatttagaaacggagggagcagcaacaaggtaaaaagctcaacaatgtatgaaacccaccgttggactcgatggacctacttacattaaatagcaaatctgagatgacaagctgcaattcacatactgtgtatgacgagtgggtttaagatattctctctcctttaaaactcgttactatgcctgatgccgactccttccagcaaaaatcttacatgtatgggaccggttttattgtcttttcactcctctttacaccttctaaaatcatacattgcacatgctcttaatgttcttgcaattgcaaatataacatgggacatacggcagactcatatatatcctaccttcggtttttaatataggaaaaagtacgaattacccccccgaacaatcgccgtcgtccgaattatccccctgaaccataaaaccggacattcttcacccccaactatgcaaaccggataaattacccccctggacccaatccgcagtggttttggtctacgtggcgtacacgtggcaatccagtcagcactctagtcattaaaaaaatgtgggacccacctatcatactcctcatcctctcatcccctctcttttctctctcactctacccctctctctctctcaaacgggtcaacagcggcggcaggggaggacgcggcggcggcgtgcgggttgtggcggagcgcggggaggacgcggcggtggcggg

SEQ ID NO: 12963 - DNA, 15955 bp, Oryza sativa
cattttttaataactagaatgctaactggattgccacgtgtacgccacgtagaccaaaaccactgcggattgggtcgagggggataatttgtccggtttatatagttggaggtgaagaatgcctggttttgtggttcagggaggtaattcagacgaccgcgatagttcaggggtaattcgtactttttcctttaatatataacaccgttaactttttttatatgtttatcattcgttttattaaaaaatttggtgtaaacgtataaaaatataaggaaatatttagtgacaaattaagtcataaaaataaaatgataattacatatttgttttgaaaaagagtaaattgcattactggtaaataaccttgtcaggtgcgtgcaatttagtgtatgaacttataaaatgcttattttggtgtatgaacttgtctattacgtgcaaactaaggctaaaatggctcgataaagaccaatttttctacgttgaacattataaattacaaattagtagatgacttgcatgtacatagtagaaatgttatatttgtaaacttagattccactttatctttctttgtttctgtcccttgcatcagtactcatatttttattttttttatgcaattattatgccttattatatgtttatccttcttatactaatgtttacatagagtttaaatcaacaacagaatcagcaagattaaccttgcagtgcgattttaaccttgttcgcacgcacctaacaagttcgtgcaccaaaacgagcgctttacaagttcatgtactagattgcacccacttgacaaatttgtgtaccgccgatgcaatttactctttaaaaaatggagagagtatgaagctcgtgtgagcaccttttgcaaagctgacctgcacattcggcaaaaggtcacagattgttttgtgtatttttttttacagaaaatctcattttgaagttcttataaaaatcacggtcttccccaatatccgaccttcgctcgtcgttaggatagagatcatgatggctcgatgcctatggtttgatccatataggtctagtgttcaccgattggatctatcgatctggtcttagttgattctattcaacaattaggtttgtgttcgtcgagggatgaaaccttacttgaatgtgttaccatgatgaatggaacttgagatttatggaagaaatctgttaatctaatcttccttgatccaatctggcatcgacgatgaagcgtacccttgttggggccatcttttagatactaatagataaactagcagttgcatctaagctgcacaaagccatgacactcttggtggatgcattggcatgaagacgtactaaaacttcacaccttctttctgtatattatagtcgagttcatatgtgtcctcgtagtagttccagttgcgagttttatgcttttatcattagcccagcattgatctgtttgttcatctttgtttggatttttatcattagtgatgttgtcaataccttctcttttttaaaatatgtagcttaagttcatgtcggcataatttacttactttttttaacaagtaaaacatccctaccattcatcaatctatccaaacaaatcaaccccctgcgctgcttctgtcttctgatccgatgctgtctgtccacgaccagatcaactcttttttttaccggtttccatcagagaactgtacttaaatactccagcacgagacctattactgccaaaatgtaacctatcacttggatccaaccaattttttttcttcagcttcccaaactttgcagttctgcagttgcagttccggattcagagaaagacaataaatagtactctctccattctaaaatactactataagagaaagacaataaatagtttacgccaaaattggaagcatgattgaaattggaacgatgtgacgtgaaagttaaaagtttatttacgtagaaaagttttgatgtgatggaaaagttgaagtttgaagaaaaagttggaaactaaaccaggcctatttaggttgtgttcgggaggaggggcacgcaaaacgatgttcgcattaacgcgtgattaattaagtatattaatattttttaaaaaaatagatcaatatgattttttaagcaacttttgtatagaaactttttgaaaaaaaaaacgcagcgtttagtagtttgaaaaacgtgcacagggaaaacgagggtggggagctaggaactccaaacaaagaacgcagccttatagaggtttttataggaattatttaacattcgagattaaatagcagaatattataattgattaagaatataaagtaattaaaatataaatggagatgtctatgattgatgggatgaagagataggtgaaaaaatagttatattttaaaataaacttaaactttaaaaataactacttcctacaatgtaactcattttattattttccacatttatattaatattaatgaatctagatatctatatatatatatatagatagatgtatatgagaaatgttagaatgaaacggagggagtacattataagatgatgtaagtgcacatgtactcctataataaaaaataactcaacctaaaagaagatgtgacatcttctagtgtaaagaatctgaacgaatagttgtccagattcatcatcctagaagtctgaggttttttttcttctgatggaaggagtagatttgtgccagtgtaggtgcaggtagtacagttctacatgtacacccattctgccactcagtcccacaaggagttaaaaaaggtgtccaacagacagcacacgtgagaggacatctcatcccaaaaagaaaagattcattcattcagtagtactactgcctttgcaaaacaggtgctcttttgtcagtaatttacacatgattaaattaggctatgatgcaccaagatgaccgtttgtttggacctaaacaagagggtttcccagttattataatcaacacagccattgcatgactgcatctgcaaagctaaaagctagtggtacaaagtgaagctcactagctagctcacaagtcagagaaatgtgttacttttggttgtagtaactgataagatgaaaagcaacagtatctgatcctccagttcagtgcaggtgcagcctacttctaaggccccgtttagttcacaaaataaaaatttttgggtgtcacatcggacgtttgaccggatgtcggaagggattttcggacacgaatgaaaaaactaatttcataactcgcatggaaaccgcgagacaaatcttttgagcctaattattccatcattagcatatgtgggttactgtagcacttatggctaatcatggactaattaggctcaaaagattcgtcacgcaatttccctcctaattgtgcaattagtttttgtttttatctatatttaatgctccatgcatgtgttcaaagattcgatgtgatgtttttggaaaaactttctggaaactaaatagggcctaagctttgcagggagttgcccaaacttcaatcaaaaggtcatgtcttgttcagattcatagtattaggttatgtcaaatttggtaatatgttgtaatattttggaaaatatagagtagtgactttgtatcgtatctaagccattatctgttaatcactagtgttatctccccaaaatgaacaatttaatatcaaaattcaagagaggaagagcttcaaaacagagaaaaaaaagtctagtttaatgacactgaccaacccattagattaccccctcaattacaaggccatatcaattacaacaacatggcaaggacagagattaaattaagggacattcaccaccatcaatgcctttgtccactgcagcaccagcaagaagcaatgcatcccaatgtgcgcctcctctgactccattagaaaccagaggcttccttcctactaccatcacttgatctgctcacaatcacaatgccatcatcctcatcaggacagccacacatgctgctacagctgcttgtgtccaccatgtccaccaaccctagcaagcacaagcacaagcaaaacaaaagggaacacctcagcaagtgaccaaaagggagcaaagctccagtgaggaaacaacaacagacagatcatatgccactgaaaattcttcttcccttgcatgattgcaggttatgcatagatagatcgtaataggggacgacaatcgtgcccgattgcccgtttaccgcctagtaacaatcttattactctattagggtcgggcatgttcctattcttttttataattgctacttcattgcctgattggtttatgcttatgctagcaagaatagggagaatcatgttgatggtgatgcaacatgtcacatctaatctatttcagcttgagcccaaactttatacattgatcattgtgtatgtactaatgttgattagccattcttgctttgaatgctttaattgcataaaaatttgtgattgtgacatcaagttgttgttggatcagacagtagtcttaacctgcatcatgctcctttatgccttgacattccttgtgtttgcaaaagcaccaagcatgataaatacaacacttttcagattatcctaaacatttttttcagcatttgattacactgaacaagctagtcgttatcatctaatccaagaattaactttgctaattaatctacttctaatgaaaagaagaatcaaagcacataaaaattatgcagcataattaacaggagagcaggggagagcttactgccggctttgctgaggccgagatgctgtagtagccgccatcctcgccatggccattgtactcgccgccgccgccaatggtgccgctgccgccgccgatgccgccgccgccgccgccggagttggtgttgtccttgggcaggcggtaggagagctcgtagaccggcgtgccgtcgggcttgaagaggccgtagtttcgctccgacgtcgggccgggtttcatgttctcgttgaagagcgcgaacatgtaggcgcgcagcgccaccgacggccggagcggcgtgcccttcccgtcggcgacgaggcgcatcacgttgccgttgtacctcgcggcgttctgcggcgtcgcgccggtctcgttggcgtcgccggcggacggccacccggtctccgacacccgcacctccaccgcccgcgccgccgcggtgttggccgccgcgatggcgtggtacacggcgtccacctgcgccacgagcaggttggggtagtgcaggccggaggaggggtcggcgacgccggcgtaggtcggctcgagcagcgcgtactcgagctcgacgccggtggggtcctcggcgtaggcgaagtaggggtaggcgttgacgaggaacggcgagccggtgcgggcgtggaagtcgaggatggggcagagcagcgggaggaggtccttgcggaagtacgccgacgacggcgggtacgacgtggcgagcacgccgaggttgtgcgccgtggtgacggccacctgcttgtcgagtccgagctgcgcgagcgcgtcgtggaggcactgcatcgccgggagcagcgaccgcgacagcgacgagctgttggcgccggtgagcacctcgttgccgacggtgagcaccgcgatcttggtcgccgggagcgccggctggacgacggagcggacccacgacgcggcgccggagggggttgacacggcagccaggcactcgtccgggacgccgacgacgagctccaccccggtgttggcgaacgcgcggagggtggccgggtcggcgtcgtagagccggactcggccgaccccgagcgacgacagcatcggcggcacggcgttcgccgggggcaggttgttgccgacgcggccgtagttgatgcccagcagcaccgacgacgtcgcgtcggccgccgccgggagcagcagcgccgccattaccaggatgaggggcggcattgcggcggcggcgagacggcgacgaggagctgagtagctggagctcgggtgagcttggagtggacagtggagtgtgggagtgaggggaatttgggctggagcgttgtgggggcgtggggggtggggggttggtggtggtggatgctgcacttcaccagttttcacagttgcaagttgcaaaccgtaccgttagtggagtgtgagtggccgtcggatatactccttccgtcaaaaaaaaaaaacctggaaaaaattaaaaaagacaaatcacgcataaagtattaataatgttttatcatctaacaataataaaaatactaattataacaaaatttcatataagacggaccgtcagacattgaacacggaaacccagggttcgtcttttttttggacggagcaggaaagttgagaaaaaaatgaggatgttgagggaatcaatcaatctattgataaaaaatgggtaaaatataccccctccatctatttttataatcatattttatcttggcacacagattctacttatcatccaattaaacatgctactagtcattcctcgtaaacaagcaattcattaatatttacatttctcgatacctatgtagccaatcttgtgtggaagaatggagagtcacgcattaaatccaagaaagtcattaagaggatatgttgttggattgaaatatgcctatcaaaaataaatttttcaaatttggaaatatgactatcaaaaatagatggaggaagtatttggttgggtctgattagtgtatatattactctctccattccaaattgatctacaaatttcataggcacaccaataccaagaaaagctaatactataactctctaatactatatttactctagcaacaaactcgatacatgcaccatccccactatttcctagccaatagcaaatcaagatattgcacgttggttataaatacttgtgtgcatggatgcatgcatcaatgtccatttactccaatgcacaaataacgaatagacttaatgaatgaacacaaatatgatgatcatttataaataacctaaaaaaaactatatgtagatcaatttggaatggagggagtagtaagcactatattttttttatttttaattactatatgcaggtttatgtgtcgtagtgtttctttgagatggactcaagaatagggtctgtcacgaccgaaaataacccaacaggttttccattcgtgcatgtattattcctcttctcacgaggcgaggtacacaacagttgatacaatatcagagtttaacaagcggaagcgtaaataatacttttattacatgggcgaccaaaggccaaacacacatagataaacgaaaaagcacaaatgactaggacaaagaccatagacacttgacggcaggcacgagctagacactgaagccatcctcttccaagaactccttttctaggttgggggaaaaattgagcaagattgagtataatcaccgtgctcaacaagtcacaccgataaatgcacaataaatgcaagggatacaaagctataataataaagggttagattttgcagtaaaacaacattttaaaccacttagttgctcaaagccatttggtaaattcgaacacaggtctacaaagtattataattattcacggtcgtgaacccacacgaacctgccttaacccaaggcctacgaagagtcggaccaaactggtagccttaaagccgagctccagctcataccaagccaacccaggccaaccattccaggttttagttgattaatatgttttaagagtgaaatcactaacttgggtatattactaggcttgctcataatcgagggcacggctacgtactcgaataggttatactcttatcagaggtgtacatatttacccacaagacacagcttcctcacgagtcatcacgcgccacataccaccacaatatatggatggagggcgtgacatagttcttcactcaccctagccctgaacaaaagtaccgactcaacgcccacctacggccggggttcccgggacaggtaggttatggtcgagccctacggcatcaggatacccttggggagtggccacccggatgcccgtcctgtgccacaacatctcgactaccgaacactcgcccatgtagccttcatttgcctcagagatatccatcacccgacttcatccatctttatcagtgtccttttgttcacgaccagactaggctacaaactaagccttacccattagacatgtggacttatgatagtgctttgtaacagaggtccgaagactggtccttatagtggccgaggtgctactgtcaaaaccatgcactccgagcccagcctaaaaccattttgggggttttgaatagagagaaaggtgtatgtccaattccagcatatgccaaccaatcacgaacataaatatttttttcatcatatcataatcatgtaagatcttgttgtacagttttaattgcaatgaacacaacagtgtaatcggatcgtagatcagataagtaatttaagagaaaattttatttgaaatttagatgggtaatgaggatgcaagtggcaggtgctactactttcagtaagaagggtaatgagttgatacaaactgtgactatttttggtaaaaaggatggtcgctggttagcactaatgagtgcatgcgctccctgtagtcgcgtcctaatatttagaggccaaaaatctagattttacccaaaagttgtgatgggcaaatatatttttattgcattatttaaatgaggtttaatccttagcctagataatttggaggcgttgatatatcttaaaagttttttttaaaaaaatattctaagtagacataatgatactttgttgctccatttctttacatgaccatttattttacatgagtggattttatgccatgaaatgcttgatgaaatgttctaaatattagtttgaatattccaatgaaacactcttttggtcattgtagtggtgaccattatttcatgacactcatcaacatggttaaagcatttaatatttgatttgtaatttgtattaaagaattaataataagtaaatttcacttcgggccaccttttgttacctatgtttcattttggaccaccctttaagcaatattttcactttggactgggtaaacttacctttgtttcactttggaccatccaactctcttctcaagcatatgaacgatcttgattacgccgtctcctactcgtcgatgaactgccacagttatatgtaagactatttcttcgacatattacaagtttgatgtagatggataaaagagtaagggtggtccaatgtgaaacaaaggtaaaaatacccggtccaaagtgaaaacattggtcctaaggtggtccaaagcgaaacatcggtaataaaaggtggcccaaagtaaaattaactaatataataattaacttgtactttatttggctttgctttttgtgcataaatatttacagggttaataataaataatgtattctcgtatattatatttattactcaagcgtaggtctctactttactttgtgatcatttatggtttggcaagcaatagcaatcataacaactagcatgatgcaaaagttttaaaatgttcgaaattttagtgatttttattattaggaattttcaggatgttacgcattcttttagaggtgaatctcctatgtgtccactacctcatcaattattatcctaacatctgtctgggctatggtgaattaattttaattgattaaagagatataagcatgtcatcataccaccgcattccttgtgaaaatataaatacgatacccttgggaatactcatgggtgaaatgctacagcggtatccgtgcgcttgcggatttatatgtgatagtaagaaataccaatagcagcattgttggaggcagggaagtgtagctggaggacagggaagtgtagctagaggacgtaacatagcttttctcccttgggagagattaggaggcctgctggtgtacccggttgttgttcttccgtccattcagtgatgaagtcagagagcacttgagacttgatggctacccgaagttggaaggagatgtcaaacgccatcagctgtgcccacttggcgatgcgtccggtggcctctttgttaaacatgacatagcggagggggtgagaggtgacgactgacaccggatgagcttgaaaacagtggctgagtttgcggaccgtgatgaatattgcgtggcgtagtttctgaatctgcgtgtatcgcgtcttcgactcactaaggacttcactaatgaagtagactgatcgttgtatcttcttgatcgatccatcttcttctcttcgacacctaggactgtgctgacaacgcttgaggtggcggtaatctataacagaatcggctcttttgggagtgttgtgaggatgggtggacttgttaggtaccgcttaaagtcgttgaaggctgcttgggcttctggagtccaggtgaagtcatcagactttttgaggagcatgaagaatggcatgccacgttcgcctagttgggacgtgaagcggttaagtgacaccatgcacccagtcagcttgtgcagcttcttcaagtcggcaagcggctccattgagtggatgacggctattttgccaggatttgcctcaaagccgtggttggacaccatgaagccaatgttggaattttctacgcacatagataaatccgcaagcgcacggataccgttatagcacttccccttagagtgacccaagggtatcgaacataaggacatgtgtgtactatatacgaacgggattctatccaagggcaacaataaatgctaggcttaagctagagaggattcctatggacttaattaactaacttaagttaaaggtaaaactctatcgaatgcttcgggcaccgggcctcccctggtctgccaagctgagtccgaccttgagctctatgatgtacccgaacatggaggaatacaagggacggacaagctatcaccacttgccgtctacctcactttccctggagcacacaacaaacgaagctaatgttgatgtgaaaacacggtggcctgggagatctgcttaactccagtgcaggtccaatgctagcctcgagtgtgtcaagcgcgtgccaactgatttgatactgcaatcatcaagtgttggcggctgttaaatgccaattctatgctgccaatgcctgcataaaacatcatgaataacacattcaacatagtggtagggtttaattctaacatattccatgagtgttggtgtatatttggatgcaggtaataaaccgtcaaagttgggatgaaaaccagacttcaatgaaggatttcttttatccatctaagagtgggccttaaactttgtagaattattagaaaataggcccatcgctcctcgaattggataagacagagcaaggggaaggcccaggctgaggcaacaggccatctagcccagcctaggtggtgacaaccgtttgattcatgttttggtatgtacgttcctgatttgctcctgatggcggttggagggcagattagacatttcgcatcatcatacctaccctataaatagaattcacttcactcatttcaacacgcacttggaagcttgagctgaattataagaggctctattgtactatattgtatactaaaatgaaggagagagtagagtacaggaagtcggaggaattccggagttatcggtaatcctcttcttgtttcttttactctgataagtattctgctttaattaaatatcattacgagtatttaaaatttattctatgagagttacctcttagttagttcctaatgaacgtacgggatcactgatcactataatccagtaatttatagtggttgctttagtgtttagctaacattaaagtagttattaaactgcgtagacgtagtgtctgggtagttaatttccggtgtttgctttgtatctcacagtaggtttgagggggtgtagaggtggtgacagccctcgaaacactaaagtcatccctgtccggtacgttgtagagtcatatctgggagccagactttacaggcaacggttcgatgtcggggccaatagaccacgagcatccccatggaaggcgtaaagttccaactggcggctttttagtggcaaagggtattttggagtaaaaggagatatttgaaaagcaaataacatttaaataaattaagaaaattcaaataaaatagcaaattgggtatcaaaatgtagattttgaatttatatgaatttaggtccaagtttcactagaatcggatctacggtttaggagatatgtgcttctaaagaattggatttgaattaaatagggaaaataggaagagttactgtgctggggtccacctgtcagggaatattcttaatttcttctccttcccgtctccgtcttttttttctcctccttccagccgggtaacagaggagagagagggagtagggcgtcggtgctccggtgagtgaacggcctcgacggcggcggccaagcgtgttcctgcttgctgcgtatccggggaggtcggtggaaggaagagggagagaggaggatggctggaacggcagtggcaagagtttggttgcggttaccacaaggaggggcgatggtggccaagctaggggtggagggagaggggaaggtgggaaaatggactctcctcagtgaggcaaggtcggtggtgaaaggtagtaggaaggggatcaatggaggaggagatcgtccagtggtgggtggcggccgaacatggcaggagagagaaaggaagagctcgaggctctgttgatgtgtggagaaaaggggagggctcgccttctatttataggcggcgagaggcggtggctaatggcggttcggaggagaaggacgacgaggatacggctgcagcgacgtggagaaaagaacggcggcgccggctctgtcctctgattggctgacgatggcggttcgtccctgctgctgacgtcggcgtgatgaagtgtagctgacgtcgggcggcgattccttcgcgtcgacggcaagatagcagcggcggcgggaaagccgcgggcgacggcgcaagactacaaagcggcggcgccatggctgtgggcggcggcagcggcggcgtgcgcgcccacagagagaggaagagcggctcagctgggttgggccggcttgggctgaagaggaagatgagccgaaaaggagggagaaaggaatttcggcccaaaatatatttcgtggattctagagaattacttgtggctaaaagaaaattaatttggaagaggaggattaaataaaaatatcattctaatatttataatattgctattcttgtgccgagaagacttagttgaggaaattggaatgggaggctagatcaaaataggagcatgaccaaagagttaatgataccccaactaaaagaacaattgagagaaatggtggaacttttgtatgaaggtaaactggacatgaggagattaaactatggagtcataactttgatccccaaggttaaagatgctaatactatcaaatcgtttagaccaatatgcctcctcaatgtgtgtttcaaatttctcaccaagatcctaacaaggaggttgtctgaaattgctcagaaggtaataggggagagtcaaactgcctttattccaggaaggcagaatctggatggggtggttatcctacatgaagttttacatgaactaaaaaaagagaagaaatcaggtatcatcttcaagctcgattttgaaaaggcatacgacaaggtgcaatggagttttttgtttgatgttctgcataagaaaggtttcagtgatagatggattcagtgggttaaaatggcaaccataggagggaagatggcagtcaatattaatggggaggtgaaagacttctttaagacttataggggagtaagacagggggatccactttcccctcttttattcaacttggttgctgatgctttatccgaaatgttgaataatgctaaacaagcagtaccacatttagttcctggtggcttgacacacttacaatatgctgatgataccatacttttcatgaccaacacagaggagaacattgttactgtgaaatttctgctatactgctatgaggctatgtctggtcttaagattaactaccaaaagagtgagatcatggtcataggtggagatgagatggaaactcaaagagtggctgatctgtttaactgtcaagctggaaagatgccttttacttacctagggatcccaatcagtatgaataaactgaccaacgctgatttagatattcctcccaacaagattgagaaaaggcttgctacttggaaatgtggttacttatcttatgggggaaaagcaatcttaataaactcatgtcttagcagcattcctttatatatgatgggagtttacctattacctgagggagtgcacaataagatggattctattagagcgagatttttttgggagggattggaaaagaagagaaagtaccatatgattaaatgggaggccttatgcagacctaaagagtttggaggacttggcttcattgacacaaggaaaatgaacattgctttgttatgtaaatggatctatagacttgaatctgggaaagaagatccctgttgtgtgttgttgaggaataaatacatgaaggatgggggaggttttttccagtctaaagctgaggagagctcacagttttggaaaggcttacatgaggtgaagaaatggatggatttggggagttcttacaaagtgggaaatggtaaagcaaccaacttttggagtgatgtttggattggggagactcctttaaaaactcagtatcccaacatttacagaatgtgtgcggataaagagaagactgtctctcaaatgtgtttagagggggactggtacatagaactgagaagatctctgggggagagggatttgaatgagtggaatgaccttcataacacaccaagggagatccatttaaaggaggaaagagactgtataatctggaaactaaccaaaaatggcttttacaaagcgaaaaccttgtatcaagctctaagttttggaggagtcaaggacaaagtgatgcaggacctgtggaggtcctccatccccttgaaagtcaaaattttattctggttaatgttaaaggggagaatacaagctgctgggcagctgaagaaaatgaaatggtctggaagtccaaattgtaaactgtgtgggcagactgaagatgtagatcatttgatgtttagatgccatatctctcaatttatgtggtgctgctatagagacgcctttggttgggataatattcctagttctagggaagatcttttagagaagttaaacattcaaaaagatggacaaaaatctgttttgcttgcatgcttagctgcaggcacatgggcgatttggctgatgcgaaacgattgggttttcaatggaaaactaacctctgatccctctcatttgcctccaaagctgtttcttttcttctacagtggagacaactggcgccgcagatccagcggagcgatttggacgcctcaagggccttactgcttgccagtactcgaagggcaacaggctcaaacccctgatgaagacctgaatgattttcagcttatactccagggatgtctttttggttgttcactctgagtagttatttctggcttgtcttttgggctgtgccagcagccattgcgctctatcacttactgggtagtctccagccccttttatcttcatgtcttgttttactttctgtatgaaccttgttggctttttaatgaaagctgggcaatgccttttctccaaaaagagttaatgatactgtagaagattttggatggagaagaactaaggaattttagaggcaa

SEQ ID NO: 12964 - DNA, 1321 bp, Oryza sativa
aagctgctacaaaagtacatgctcaggaccttatgcaacattctatggtattggggaagtaatatataatctataagatttgacccagcaggccttttccatgctttctcaaactgcatgaattgggctgttgtttctcttatttaggtcaggtccagccattggtgggttcacatgaaaagctgattgtcttgtatttgtcggtccagtaagctgaagggaaagagcagagggttctatggagttagagctgccgtcacctatggtaagcttggacatgccaacaacctcatcagccttattgatcacctcctttccattcactggagtgggctttaggatttcatgatttgtgcctgattcacccacattagcaacatttggaggccaaagagttagtggaacaggtattaatgccgggtagaatgttggcattgtcagaacaaatttagtcttgaaaggtgcagcatggttcatctccaagtgtagtgatgctagtgaaggttctgtgaagtcagattcctcatggttccttagctgcaaatccgacaggtgtgtaccaaactcaggttccttttgtttcacaagatgtgatattggcaattgatttgagcttgtggcttcgtcttgagtactatggagcataagctgttctacgaccactggggattcgtccatgggctgcaggttgaagatgaaattcgaacataagatggtcgtgatatagaaatatcaggacacaatttaacatatatggagataatagacacctcctgtctcaagcgaaaattgcaagcaaaaattgcataccatttctgggaccatgtcaaacaagcttgacctcctcttccttcttgatgagtttgtctgtctaatgaagtacttttgagcatggctagccacctgagttggtgtcctggaaacaacaaaattacgagagatcccacgccagtctcctttaccaagcttctgcagacccattagaaacattctatgctcttcttcagtccaaggtgtacctgaagcacaacatcagcccttgagttgaaactggactgaaaaatcccagatggtttctgtgaaaaaataatccacgaccccatttttttagaggaaagatcattatattgatagtgacctggctttttcagagagccaacagtagttcaacaaagaggtaaaaccaactcacacaccgagggttacacccactggatcattccagctacggagtacatgacaagctcagccaaaaaacacactggaactgcagggaccagcactgtagcatactccctctaacaccagaatactccccatt

SEQ ID NO: 12965 - DNA, 835 bp, Oryza sativa
tacagatgattcctgacaaatatatgagcagaacttttatgcgaagtgttaaggcagagaagagaaaaagagtcattgacagtgaacattacctttagaactatcaaattgctagcatcaagtaacgatgttgcaactattgaatctccaccaccatcaattaacattttggagttccacataagaagcatctttacagacattctcaaggcaccaaacacctgaaaacaattcatattggtgcatagaaattggcatgcgtttagcacatatagtaaggtgaataccataaaacaacacaatacatggcaagaacaaatagtaaaataacaccttgattgttgagtcactcataagaagctcctcagccatcaattcaaactccgagtatggataacgggtcaaaccaaaagttagaatagcaccggatagaagactaagttgcccttggacctgaaagtataaataaaaagttgcggactatcgttaaatattgcgcaaagcaatattgacaagcattttcctaattatcaggtaatggcaactcccacatttgcataatgtacgtgaaggaagtgcagtgcaaaataatggaaactgtaagaaatatgtgacttgccaaaatgcagagacagcctcaaactcagaaaaagaacatgtatagaccttactgattgagtgtaaattatcatactgtaccagtggcagacgcagctataaaataaagatgggggcaaaaattctcgataaagataataaaacgcaacatatactgtaccatatttatattgtaattgtattaaaaaaacatattacagtcaataaactaaggcac

SEQ ID NO: 12966 - DNA, 2174 bp, Oryza sativa
agtatagattaacagtcttacaatttgaagtgcatatgcatgtaagtattatagaaaccaatgaatttatgacagcaaaatggcaaatatcatactaaagagtaaagaaaccatgatctgtagagagagaattaatgaacatctgaaagatacagattcatacctgaacacgactccatagcaagggaacagcaactttagcatgattcttgacaaaaaattggtccatagtggttgatttgggaactctaaaagaagagtgtcagtttgtgtactcaagttgttgttgctaacaacaagactcttaggtacagcctcataaagagttccggcagctcctgcattatctggacagcccgaactcttcccccctgaaaaaggtataaacgttaattcaaacataaacaaaacaataaaattgtctacactatagctccatccatattctatatatcattagaaagttactcagaatatgagcttcatctcattaaacaaaagactaataacatactgaggcctaacagtaataaaaaggagtctcagaatattttgcgacaaacaatacagtacgatcatgttgcctgcaaatatatagttgctatttgataatctgcatttcagggatataagaaaggatcagtgtcacagtgtgcataagaccaagcacaataccatgagcaaaaacttgggtgtcatcatgtctcttgaaaacattaatagaatcgagtcctccaccacccccagccaggccattccctcatgaagcctatcttgccagctccatgcctgttgcaaacagaagatcagaaggggaaagtttgcaattctgcatgggcttattgaatatactagagcgcatagtcaacagatttataacaaaccaaaataacagctagttcaagctaatgaaagcattcctcaactcaaatgccactcattactgcattggtggtctagtgtttagctggattggtttgaactaccaaatatgtgcaattgtgaaagttggtaacaataaaatgaaactattcctatattcatttattagtcaatcaattatatgcataatttaaccactgaactaatctggactgtgacattaatttctcttattaacacctagtgcaaaaaaaaatcctcaaatccaattgtctagtaccatagtcaagcttgagctcatgactacatactaaatatgctaaactcatacattcctatcacattagtccttaacttctcaagtgttaagaaaaattacaaccagactgaacatttaataacttcatgttctttttgttcgttgaagaagctgcaattccattgtggcggctaatcgtttattaacaaaaatataaacagcatgacaggaaatcttgttctcatatctattagaccgagcaagcctctgtaaatccctaatatgtttagtactacctccccgcatccatgactcattaataacaaaatgaaaaacaggtataaatacgaaataaatcctactgaaccaatatattcatatgtgacctcagctttggaaactgtttctaatctgcaagtttgttaggcagtttaaatgcccatgcatcatttcaattagcacatgtaggaagcaggaaggaatttgaagcaattctaagaacacttacatagtcttagacttgatatagatgcttcccccagaaccaccaccgcccttctcgctgctatcccctccatcggcgagcactgtgccattcattatcaggtcatcggcatacagccacacgataccgccgccgcttccgccgtagtccttctcaacgctggtagagccccctttgcttccatagctaaacgggtgctcgaggtcggaccacgcgtaggcgtcaccgccccacgagtcctcctgcgtctgcccatccttgacgtagcagctggcgccacggccaccgtggccgccgccgtcgccgtgcgtccccgtgggcaccccgctggtccgctcgggcggatcgccggcgagcgcggtggtgttgacaacgaccgtgtcggcgattgtgacgttggccgcggcgagggagaccctcccggcgatgacgcggacgccgcggccgaggcggacctcgccggagaggttggcggagatgacgcagccgggcctctggcaggtgagggcggcgccggcgaggagcacg

SEQ ID NO: 12967 - DNA, 772 bp, Oryza sativa
gccacttgtctctgttgtgtcggtgaactaatctccatcgccgtcgatcttaggccagccattttcagcctgcgacttgacaaacgcggccagtagcttgatatcatcttcgaccagccgaggtccgaaagtgcactgccctctcggggtgcatttttctccgaagcccttaacgcagcaaacatacaatcaagaaattaatgagtatctatctatactactcaaacatcatcatgatagcagctaagaattactcaccggcattcttcccttcccgtagtacgttatattgtatagctcgtcctccgtggcaactccatttctgcagcaaatttgcccttaattttgccttgatccaatccaacaatgggcagtaaatttcgagcagttaaaagttttcaagagcacacatacctctcaagatccttcatgtacagagtggcgccctgtacatgacaaatcagcaagctaataaaaaggttgaaaatttgtgtccggccatcgagtaatggtttcagaagcttaccggctgtaggatatttcctcccatatcatggcagccgatgcacgccttccggaacagcgctgcgccttcggattgagcaaaagctacaacaacaaaagggggggaaagaatgtgatgtgcgacgcgtacatttcagcaaatatggtaaattggcaattaatcatgctcggtgtacttgtgtagaatcattcagagttacttctgttatgttcctctactgcttcccccactaaaaacttcaagagg

SEQ ID NO: 12968 - DNA, 776 bp, Oryza sativa
cgccaaatgtttggccacccgtggggcatggatcaatataatctaaatacaaacaaacaaacaaaccttccaacaatcacctaatgcttcatacggggcaccaaaatgaaaaatagagcagtggaaatctcgagaaatgagaacggaagaaaatagtcgtcaacaaagaaccaggaaagctacacaaggttttcatctggggaattcacaacttgcctattccgtcatctatctattgggtagttgttaactgcaatgatccatctttctgaagttttaggctgaggctagtgaaccgttctcttgaatattgtcttgaggctttcctccaatctgttccggccttcatcattgccgcaaactcatcatagcttatcttgccatcctgaaagtacagaacaatgctattaatactttcagagtcatgtgtgctatgaatcattatgtcaaaacattttgtgcacaccaccaaattaattaaactatttgaagaagaaaaaactagcagtctatcaatttcttaaaactagtcaatgaagagccacaaaccttatcagtgtctacatcacggatgatggcattgataacctcttcatgatttgctcccaggtcatcagccaatgattcacggagctcatcgatttcaatatatccactctggttccgatcaaagtatgcaaatgccttgtgcagatgctcatcgttgccaatctttctcaggtgaacagatagagcaacaaactccccgtagtctaaagatccatttccatcgacat

SEQ ID NO: 12969 - DNA, 1115 bp, Oryza sativa
gatggcaacgaggcacccatgatggcttggtgttgttggtaggttgcaccctgcacgccgagaggattgataaatgcaggcatagtgtttgcgccattggcggcgtcgccggtgtcaatggccacggcgccatgtccgacaacgagatcaccggcatgctcatcgccctggtcgtcgccggccagcacatgagctccagcgcgagcacctggaccggggcgttcctcctccgcgaccccaagcacctggccgccgccgtcgacgagcagcggcggctcatcggtgacgaccgcgtcgactacgacgcgctgacgacggggatgagcacgctccaccgctgcatcaaggaggcgctccggatgcacccgccggcgccggcgctcgtccgcaccgtgcgcaggggcttcgccgtgtggaccagggaagggaaggagtacaggatgccggcagggcacagcgtcgtgtcgtatgccgcgttcaaccaccgcctcggctacgtgtaccgcgaccccgacgagtacgacccggagcggttcggcccggagaggaaggaggacagggtcgccggcaagttctccttcacggcgttcgggggcgggaggcacgcgtgcctcggcgagcactacgcgttcctgaagatgaaggtaatatggagctatttgctgaggaattttgagcttgagctggtctcgcctttccccgaggttgaactcaacaacataatgctagggccgcgaggggaagtgatggttagatacaagagacggaagctgacaagcacctagtgcattaagttgtaattacagtcaaaattatttgagagcagacgtactctttactactacctccgtctcaaataagtgcagccatggtattcgtatttaatatttgatcgttcgttttatctaaataaataaataaataaatataaaaaaatagtcacgcataaaatacaattcatgttttatcatctaagagtaacaacaataaaaaaatacttttaatccaaaatcataaatattttaaaaataagacgaatagtcaaacgttgaatatgaacaacataaaactacatttattttgaacaacataaaactatatttattttggaacgg

SEQ ID NO: 12970 - DNA, 981 bp, Oryza sativa
atgcattatggaacattacttcactggtcaatgttgtaagtatgctatgtccatctgcatttcattgttgcatgcttatttgtctatattgtattttgagatcctaagacggctgtagttagtgtctgccattattcactggttttagctttccccgattttgttcttattgttgatttatcttcataatcctcttcccatgatattcaggttgtggcttttgcttgcggccttgtacactacaagtcatcaaccaaaagacatcctagtacgcagccatggaaccttggaacgtaagtgccatttccctttgcagttatatacaatacaactaaatgcaattaggatatggatgcatttttttcccctttgccttgtcttgatcctcctttcatctcatcggcgcattttcaattctatcacagggatgaaagtggctggtggctcttccctactggactcatgttgctgaaatgcatccaagctaggcttgtcgattggcatgtggctaatttagagattcaagaccgcgcagtatatagcaatgacccaagcatattttggcagtcatgacacttggcattactactactaaaggttcttttgggagctttttacaactcaattttttgggagttgataaaaggaagggtgggggtactcaaagcacggcctttctttattgacctttggccgaagaagaagcaactactacagtgggttatagatgcaatttccgcgtccctctgctaatcatatgtgcagtcacaaccaacctgtattttggtgttgtatatataaaaaaggtgtacttgatccattatttgtaggatttagacaccatagagtttataaacagttcccaagctaactgaagagatgtgattttgttgttgttgctactgctcttgttgtcggtgctatgtactttgcctctagatgttgagctgggcaaggcaggcattgactgtgaaacttgta

SEQ ID NO: 12971 - DNA, 1092 bp, Oryza sativa
gagttttaaggtcccatacctgatgaatagagttttatggtcaaatactagtactaacataatactccttagtagccaacacagaagcacaagtttgcacaagttttgcagcattaccatactttgatggtcttgtcaagtgagccagagtaaagccttgttactgagacaccgagcgaaatcacttggcgctcatggccactgaggattgccactggtccagagtcacccttcttgtcaggaattttccaagccatgatgcgaccatctccggtaccagcaaacaacatctcatccttgatagtcatggaacaaaccagaccagaaggttcacggagactggacttcatccctgtttgtgtgttccatgcctacaattcattgtagggatcaatatcaacagttcaatgcacaatagtaacatcgcaatatgtaacacaaaatggactactcccacaaaaaaaaatcaacgaaattaaaatattacctccacggacttcgtgattccaacaaatatccatgggccatgggtaatcatgcaaccaatcttgcctcccatcttgatggcatcaacgcactatgacagaaacattaagaaaacaatgcaatgtaataaatattagaatttttttatcagccagacacctatcttttcctccttgttcagtcttctctttccaagaaaatataatcatcaatcatctcacatctttttttttcttttttttttactttctctttctttttttcactactttttttttgacaaaaccatgtatggaccatcagccagagagaactgtaatgtaattccagagagccccttgcttatcagccaaaccagcctcattgccttgctcgcaaactgaccctgatatactgatcaacagtacacaagcaggcgaaaagattcccgtaacaattcggtccggcatgccgataaccccaatcttgcaaagaaaaaactgatttggtaccaatatgtctgaccacaggaagcaatcagatagtactccccaattgatctcatggaagcacttcaaagaccgccacaatcaacggaggaatcgacgcagatgcaacccccaactt

SEQ ID NO: 12972 - DNA, 672 bp, Oryza sativa
gtttcatccttcttcataggcatgtctggattcaggcttcttctatgtggtggatcatggaataagccaggagttaatggatgatgtttttgcccagagcaagaaattctttgaccttcccatcaatgagaaaatggagcttctccgggatgagaagaatcgaggctatacacccatgctagatgagattcttgatccagaaaatcaagtgaatggtaataatatttaactcctgcatgtgttgtttattattaaaattgcatgtcatgatgtactgacatactcttggttttgagattattagcaagctattaaaattggtagcaacagtacctcccaaagaaaagttgataaaaaaaaatgttatgcatagacagctgccttgagtaaacctcatttcattttctacagttatgtagtttttcctgctccaggtttcatactattcatacttgtgcattttcaggtgactacaaggaagggtattatataggtattgagataccagaagatgatccacaagcaaacagaccattctatggtccaaatcagtggccatccgatggtgagttgtctttcttctgttattagaaaaaagaaaagatctcttccaaaactgaatgctaatgaataaaatacacactgtctaagttattccatctatactatgct

SEQ ID NO: 12973 - DNA, 674 bp, Oryza sativa
actatcaagaattccgcctgtgatccttttgcgcataagagcttccttaattctagaatggcctagttgagtatcagcatgcatgttctgtgttctgtatgatgcaacaagtcattaggaataaatagtaatgaaaaagggaaagaaaacaaatgatcaggacgaataaaaatagtaactcacagtgaatgttgctctattttaattctagggctaccatcaagctctgcactcattggttcttcaacagcataaacgacaagaccaagttggcaataccctaatgctgtagcttggaaccaggcaagatcaacacgaacaccattcacacccagagagggattagcatgggtttcaagccagtcgaggacaggaagaaatgttcctctgagacttccacgtcgaaccaaacgcaactgggcattcaatccagctacaagacggtgccatatcgatgagggaacagcctgtaatgtttaaaatagtgttatagaagtataagaaaaagcttcagaacataactaatgcagttagaaagatcttaaaatcatacctgactcataaggctagtgagtacactatcactatggagtgaaaatggagccatgtaacttccatcacctccaaagatcaagcacattggaaacctttggcgaagacgaagtggaagatca

SEQ ID NO: 12974 - DNA, 3152 bp, Oryza sativa
ttttatcttactaaaaaattatatagctatttttattatgatttgttttattggtaatttaattttgtcttatattcatatatatttacactaattattttaacaacacaaatcatcaaacgtatattaaaaattaaccatgtcatacattcaaaaggggaataatatgggtcaacattcaacaaaacacgatcgatcagactgcaacgtaaggcataactaaaaataacttgattagatacgacgtgttgcaacttgcagcgtgtggatgttgatctaattaaacccttgtcgtgtactttggcatgcatgtgttctaattagctgatcgatggggacttgcatatacatctgtcgacccaagggagcaatgtctttaaaaagtgtcaaattagtgcaaattaaaccaaattttcacatgcatggttcagaagtttccaatattatgaaaacgtcacgcacgcgtgtgtatcgtgtaacctggtcatgtcacttcacacatcatctagaagatatattttcacactaaacatatttttccttttatctttaacgcttgatcagtacaaaccaacagttatataaacttaatttgtgctagttatatttgtaaaaattacccaagttggacatattaaaactacaccactctagatttgacgattttgtttatgtttatgatattgcgaaattttgtgaggataatataataaattctataaaagatagtgatgtaaagtcataaaaatgctagatatatatagaattacagaagggatctgggacctatatattattttgtccttttcagatcagtaacacttaatagttaagtcatcgagtgctcaccaaaattccaagtaggaaattcttccgaagaaccgatgttctttttacgattacatgttgttatgtagtgttgatcaattaaattgacatccatgtcgtctctgctaaagtaatatgtgttttctttacatctaccgtaggttaagtatttactaggagaaaacagcagaagagtcaaacagctagcaatttaattccacacctagtcatcaacatgttcttttcttaattttactgaaatggacaaaaaagagtgtgtcatgcacacgcagtcatacatcttagtacatttgcaaaaccagaggcaagtatatgaactaaacgttaatagcaatggctatatataattaatgtttactcagatttgcttgttaacaccccagatcattagtctctgaaaaaaaatgtcatccaacaggcggcccaactgactgcaattctggaatattttgagcacattttcttgcctcaggtaattaaatctaataaatgatcacttgttgactaggatatgtcacaatcaggtatggaattgttgttaattttgtgtccttttctgtagcgttgcttatgaatgttaagatgacttaaagtgacatgaaagcttaaaaaaagtcagtgcaattaaattttagtaccatattattctatctccttgctttttcaaagaaaaattatttgtgcagtatatatggcaccttcaattaatacaaggactttgatgtatctggtctacaaataattaattaatgttcagtcatatatacctattaatacaagaccacaaaattaaattaatgtgatcatcgatcatattcagtgcattattgcacatatttactacattaactacacgtacatatactgccaaatccacatctagctaaatattaattgtgtacacctaaaaatatgtacatgtaacgtaaaaatacgtggtatatataccagtattctacggcaatcaacacgtatacatattactttttttttctctggtcaacagtagaaatagaaactgaagatcacctatacgtcaaagaatcccattgtgatttaatgctttaattttggcaacaatctcctggatataaatgtacacgcataattagatagatcatctatctatatatataggtgtgcaagttcaagtgcaagagcacaacacccttattaatccctaattaccaaacactctcatcgatcgatctcgcggattaattaaagtggtattagcgagcttaaacgcgccgctaatggcggcgatttacctgctgatcgccgcgctgatcgcctcctcccatgcactcgccgcgcatggcgccggcggcggcgttccgttggcggcggcggcgcctctcccgttccccggcgacctcgccgcgtccggcaagctccggaccgacccgaacgccaccgtgccggcgtcgatggacttcggcaacatcacggcggcgctgccggcggccgtgctgttcccgggctcccccggcgacgtggcggagctcctgcgcgccgcctacgccgccccggggcggccgttcaccgtctcgttccgcggccgcggccactccaccatgggccaggccctcgccgccggcggcgtcgtcgtccacatgcagtccatgggcggcggcggcgcgccgcggatcaacgtgtcggcggacggcgcgtacgtggacgccggcggcgagcagctgtgggtcgacgtgctccgcgccgcgctggcgcgcggcgtggcgccgcggtcgtggacggactacctccacctcaccgtcggcggcaccctctccaacgccggcgtcagcgggcagacttaccggcacgggccacagatctccaacgtgctcgagctcgacgtcatcaccggtaatcacagcaagcaaccgcctgcctctagctagctaattacgtacacctcactgcaactccttttgctagctaattaatcctcacacatacaaacctcgtgatcaagaactaaccgtgcaatcaacatttataaaatttaaatatactatactacatcagagtgaaatgtgatattcctatagaattattctacgtgttttctattcggtatttaaggtaggatgctgtgatcaaaagggatacatgcatttgtctcataacctcgagttttatgtttatctaatttattacctacacatctattaatagaggtaggagatgtaaattattttcattatttttaaaaaatctgttcaaaaataatgtgtccacatgcataattagaattttttttacatattgttaactaactaattttaatcttgttaccc

SEQ ID NO: 12975 - DNA, 1420 bp, Oryza sativa
gactgggtgaggcattttggcgccaaatgggatcgcttcgtgcagaggaaggacaagtacgaccccaagaagctgctctcccctggacaggacatcttcaactgattgattaattaattaattaattgttgcctaattaattaattaattaattaattagttacagcggttaactttagtcaaaaaatgaaataaacataatgttgtcgagaacttactgttgataagtagttactgtgacttgaaaacaaaagtgtgtagctcctcctcgcatcttgtatgatggaaggatgagatgggggttacaagcaataaaaaagaagatgatgaaactagtaatacaacttaacgcatgttcctttgtttgtaaaaatgtacaactgccacttatagtagacgtatcgctgtaacatgttaatgtactttttcccgcacttcgggtctccttttccctaattcatagtacaaagactaaattgattggtgattaaaaaaatattacattttagaaacaacacacttgatagtggtaaatttgtgggtgcattattgcggtagaatactttttaaaatataatgagaaatccatcctttactttaaagagctaataaattattacaaagtatgtagttttaaagtattcactctgttttttaatgtgtgacgtcgttgattttttaaatacattatatttgactattcgtcttattcaaaaaatgtaattattatttattttattgtgacttaatttattatcaaatatttttatatttgcaaaaaaaataaataagatgaatggtcaattaaaaatcaacggtgttatatattaaaaaatagatatgagaaaataaaaccagacaccaatagatagagacacattgtttcgccacatatcctattgttaaactttaatcatagtcgataaaaatttgcatgaccgttgttttcaaactcatgacatgcatgttgcatcctatctttgtgttcaaacctttgcacggggcttattgtcaaatccaataagtggccacgtatttagtgaggatcacatatttaatgagagcagcgcatatgtttcttataagcaggactgtgcatgttagaaaaaacaattctacatttttatgtttgaaactttcaccttccaaacaaagacctttgtttcacacgggttgaaaaatgcatctctatctatgtgagcatggacgagattcttgtagatgttactgggaatctcattaaactacatggctgttacgtaactaaatcggcaatgatcatttgcaagtcggctgctaaccataatagttgaccccaaggggaagcataagtggtgtggcggcgctggagtcgtggatatatgactccatacaccagggtttaaatcttaatgtccgcaaatattacgcacatgcaagt

SEQ ID NO: 12976 - DNA, 590 bp, Oryza sativa
agctgtctgtagcagaatttcgaacactgaaatggctaggaattacctaggttctacttctatgagcatcatttgtattttgtaagatttaaaaattgttaaattaagtcaaactggattatataccaggcccctctacttgatcagatttcactccatgtgtcaataaaacaagactccagaaacatttttgctagtttcattactaatgagtccaatattagtagtatgtgatacatcaaacactaaatagtaatcctggattctatatgataccaatcaaatcatttcaggttttgggtcaaaagcataaactcatttctttgttaattagtgttagatagtaaaattagcacctatgattaatcaaatgctacccttaacaagagtcacagaatgagaactacaggaacatacccttccttcacaaattcctggaagaactccagctccagtgtctccgacagcatgacgacacaagcttcagggtgttgccgcagtaggctctccagcccacgctggtgccgtacgccatacgcccactgtgggctgttccacaccatgaacaccttcacggagcacttcccatg

SEQ ID NO: 12977 - DNA, 535 bp, Oryza sativa
tttggtttcatgatctctcaagaagtggtggcgaatatctatgtgcttggttcttgagtgttgaacgggattgttggtattttgatggtactctcattatcacataggagtgggatcttggtgaagttgtagccaaaatcttttagggtttgtttcatccaaaggagttgggcacaacaagaaccggcggcgacatattcggcttcggcggtggatagggcaatggaattttgcttcttggaggaccaagaaacaagggaccgcccaaggaattgacaagtcccggttgtgctttttctatcaaccttacactcggcataatccgaatcggaatagcccaaaagctcaaagtcacaacccttaggataccacaagccaatattaggagtatgaactaaatatcttacaattctcttgacggcaatcaaatggcactctttaggctccgcttgaaagtgagcacacatgcaaacactaagcatgatatcgggacccacattgagcgatataccttttggagcgatataccttttgg

SEQ ID NO: 12978 - DNA, 1891 bp, Oryza sativa
ccgccgcccatcaccggcggtagcaagggcgccgtctctctcagggtacgtacgtatatacgtttgtgcgtgacagtctcgcttggagtcttggactgattgatctgatcaagttgattagtgtctcagctggatgactgggtgctgtgccgcatatacaagaagacgaacaaggccggtgcggggcagaggagcatggagtgcgaggactccgtggaggacgcggtggccgcgtacgcgccgtcgtcgcagcagcatgccacggctgctgctggcatggccggttcggacggcgccggaggagttgctgcagcgcacggcggcgactacagttcactgctccatcacgacagccacgaggacaccttcctcgtaaacggcctgctcaccgcggaggacgccgccggcctctcgaccggcgccagctctctcagccagctcgccgcggcggcgagggcggcggcgacaccgtgcgacgccaccaagcagcttcttgctccgtctccaaccccattcaactggttcgaggcattccttccacgggccaaggagtttcctagtgggctaagcaggagtagcagagacatcggcgacatgtcgctgtcatcgacggtggacaggagcctgtctgaggctggcgccgtggccattgacaccggcgacgccgccaatggcgcaaacactatgcctgcatttatcaatcctctcggcgtgcagggtgcaacctaccaacaacaccaagccatcatgggtgcctcgttgccatcggagtcagcagcagcagcagccgcctgcaatttccagcatccgttccaactctccagggtgaattgggattcctgaataaaaggtgccggcattatgcatacacatatatgcacatgcatacatgcatggcttttcaagtagtagcacaacattactagtaattaatcacactaatgtgtgtggcagtcgcattcagtgagcactgatcgagtagttgcatggacacaacactaatgcatgcactacatatatatggccgcattgctcatagggcaagtacctgtaccaactaggtaagtgacctacccagctaaaccatgttcagaataaggagaagaagccgcatgcaaacacgtaggtcatatggctttgccttcacatgcgtttgcatcatatatatcgcattcagaaagtagtgctgcagctaacacatagatatggtgttagcttcatgcgtttgtaccatattagcggatgcagaaagtagctagttgcactgttcatcattatcccatgagatatgaactttatatacctttggggccagcgctctacagactagtacagactacagagatcggcaaggctgcatgctggaaccagagacgctgacgccccactccaccaccgatcgatcgctggtatccgagggggaggttttgtccgtcccctcgtcccccgcactgttcgcgctcgctcgcccgctgctctgctcgtctcttccaccatcaaatgatcacatgctgtccatcaactcacccccgtcgtctcgtgtgcgtgcagctttcccccacggcctcctgctgctgccgacccgacccgacctagcgtccctcgccatcgcgcgatcgtgagaaaaatcgggtgttattgtgtagtagaaaaaaaaaccggtcccgtcctttgattccctctgcctgggcgccgcccgctacgggacgcgagagcagctaccagcaacccgacaaaccgcacaggcggcctccccctcccgcgcgcgccagcgtccaacgctaacggcgacccgcgctctctcacagtgtctctcccgctagcgttatcatcatcagctgcgggcttgctatgctatgcttgcttgttgcagtggttttgccacgcagaa

SEQ ID NO: 12979 - DNA, 2092 bp, Oryza sativa
cgataatgtatgtctcgttttacctttgcgaggagaagaccatcaggcagccggttggtgaagacaaggtcgccaccagcaatgggggcagagtacaccagccatgtacgcaaagaagccagccagcggcgacgacagcagccgacatacatgcataaccattaccgatcaaaccattattagtaatctgtgaaataatctaatttgcgaaagaatttaaaacgataaacctggcttgtaatccaagatttttaatgcatgtatgtcatcagcggtgtatggcttgcttgatgaatcagagactccagcaaaaaggtcgctgcgtgcatgtatctgtctaggtagatcatgcacctgcatgtatggcttggacagaagtggcttgatcgatgcccttgtgcgacaattgctccaatcagctgggttggagtccatatcgattccgaaattgaatctcgccaacaaattttgatgtcgacgaggaaagacgccgatgcttcagagctttgcatgcatgttttctgctgatgcttgatctgttgcttgacagcacatggcgacagatttgatctcattgcataaaatagaattgacaggaacaactacttatggaggctcataatagctgttggcttcaaatcttttgctgatcaagaacaaaactcggtgactgacgtccggtcttgccgatcaaagaaaagactcggcggcgacggtgattggatcaatcgccgagattattttcccggctagatggaatctgagtggaagaagaaaagtttaggaaattggtcgcgggcgaggaagttgcagctcccgaagtgaagacaaagccggcgactcgtaaagttgattccatcgcgctttttgatagataactcgacgcaacccctacttggcgcgccaactgtcgaaacatgaattcggcaataataaaagggggtagcgcacgagacctaaaagtggatggatgcggagacaaaggatttagacaggttcaggccctctcaatgagaggtaataccctactcctgtttggggatttgaatccgccgagtgtgtattgatcggacgatcaggttgtctcatgccccctaaagggcctcctgcccaccttatatagggtggagggcaggattacaagatagaaaccttaacaacacgggatcggtttcctaaatctactttacaatcttatcaaaccaggactttaggccgttccataatatacagggaaacgtaatacccaagtcatgatctgttacatattccatagatataagctatcccctaagactagtcggataaccatgtcgtgtgggtatggggtacccataatctccacagtagcccctgagaccttcacagccgaaaagataaccttctctcgaactagattactccaaagccgagtgcttcaattatcttcgccatggtctcccgagtacttttaccaaatctgaagactgtggagggctgaaaaatatagtcaggtgcatcgaatagatgcacctaataggtgttgcccccgactatgtggttaattgaaccaaccaaacatatagtcaaggaataaataatctaaccaaccgagtggttttgataattgtaatcaaccaagtgacttgatatcaatgtatagcatatgcggtgtgaatccccgaataatatgatccaagtgatataccgactgcttggcaaaatatgatgcgtacaacctaaagttgacaacatctttgaaagttcacatagcaaaacaactataaagaagcttgaatgctgtgaataaagaaattttcaaagtattgggcatacgccatgcgcacactgctttaacagatgtgcttaagtccataaaagacacattgtttcaccacacctggaaatatatggcacatgtggtataacatccgagtaagtaaactcataaaggatttaccaaccgcctgaaaaatgaccataatatataatcagcctaagccataatattggtcaataaaaatgcacacttacgtggcaaaaagcaatgatattgtatccaatcaattgcttgataaacccaaacagcaccttgactatataaaaaagtcag

SEQ ID NO: 12980 - DNA, 1146 bp, Oryza sativa
tattatgccgccgctgttgggcctttatacaatttcaccgccggcttgcttccgtcgccgccgactggtgcctccgcctacacggctggcctattatgccgccgctgttgggcgtctacgacttcaccgccggcctgcctccgtcgccgcgactggtgtcctcgcctatacggttggttggtcacaccaccgttcatgggcgtccacgtcttcgccgaccggctggccttcgccgccgccgactggtgtttctgcctacacggctagcctattatgccgctgctgttgggcgtctacgacttcaccgccggcctgcctccgtcgccgccgactggtgtcctcgcctatacggttggttggtcacaccaccgttcatgggcgtccacgtcttcgccgaccggctggccttcgccgccgccgactggtgtttttgcctatacggttggcagacttcgccgccgttaatgggcttcatcatctacaccactggcttggtgccactggcgccgactggtgtttttgtcaccatcgatggactgcttcgttcccacatcggctacttttgctgtcaccgagggaatattacaaagctaagtcatcatttattttattctttatatgatattttgtcttttcctttgcctcactacatcaactggttcgccgttgactagtgagtcgggggctatagatgttatatcgtattttttaaacaattttcataatatttatcttgattgcttgcgacataatctgagtacaaaagtacctatcgagttatggagttctatcttcctatgctttccgtttggtttgccaatggatggttgcctttgggccgattcctagcacccgggggctcgttggatggaccgagtaacgcaaggtgctaagtattattcagaataaatcaaaagcatagagatgagataaatttattttctgctcttaataattgcaaaagtacccgagtagtaaattctgattcgtgaaactttggtccattaatggcgaactcatgtcactcatatgcatgtctgggaagtgcctaggccgactcccggtgcttgggggctatgactagtcggacagagcgtttaaacgtaatgaatcatctgctcggggaaatcaaaattgacaagagga

SEQ ID NO: 12981 - DNA, 2428 bp, Oryza sativa
agatcatatgactatgagactgttaagaagtaattttcaaaaagagagagagagagagagagactgttaagatgtgttgatacttgatgggcttttgaagtcggtccatacaaacaaggaataagtctattttgccaccctcaacacatgctcttggttaaatctcatccctcaaccgcaaaaccgggtataacccgtcctctaacttctaaaaccgctacaaatcagactcttaggatggttttggaggcggtttcgtcctacgtggtagttgacttgctgaatcatcaagcgggacccacttgtcagcggtctccacctcatctctcctcctctttctctttcatctttctcttctctcaccttctatcgacacagaggcatcgcgcagcaacaacgcattggggaggagtcgtcggctggccgcgttgcgccgcacgcgggggagcagcctggctcgagcacgcaaaggaggcgggagggcgtcggggcatcgtctgagaggggggaagaggggggtcgtggaggatgaggcagccaactacgcatggggaggtggtcatcagccggccgtgcgcaaggaagagctcgtccaccggccgcccgcagggaggatctcgtcggcctaccaagcgcggggaggggcacttcagcatggtggccacacagggaaattcgtcgatcttccacgtcggcccggctcgagcgcgcagaggaggtgggtgggcgccggggcattgtccaagagggggaaggagatggtcgtggaggacgaggcagaggccgcacaggcaaacccctccacgtcgacagcagcgacggtcggcgaggaggggaggcgtgaccctcgtgctccatcccgccgccgcctccgtcaacgccggtcggcgttatgcacctgagaggagagaaaagttatagagagaggagaaagggtaactaacgtgtgggccctgaacgtgcagagatgtagcatagagggggggtgaataggctttcctgaaattttctcaacaacgcaagcggttaaattgacagggccggaaacctcctggtgatgaacaccggaacttcctggcagtgatgagtagcctgaaacttccggagttcttgagccaggaactttcgggcaacagacaaaaacgaaatatgagaagtataacaggtcctaactagtgaaaatcaggcacagggttgcacaagatgaaaatcacaagataccagcagattcaaacactgatcaagcacaagagagacataggcgatttttttttccaaagttcagatcacacggatcctactctccgttgaggtgctccaaagagccaggtctcgattaaccccttgcctcacttatgcaaagatcctagaagaggtccacagccttcaactcaacacttctaggtcgtttctagaattgagtgaccaccaagatccaactcataattccttctagaaaaggccacaagtgcaagttgctctacctaggacaacctctgaaaactcagcacaagaaacttcactcacttacctcgtttccttgcggaggtgaggaaaaccttcacaaactttctcgggacatccacaagatctttggaagctcatgggcgacgcctaaccgtctaggagaagatctccaagagtaataagcccaagtgacagcccacaaggtatccaaagtgctcaatcaaacctaatcttcaagccatctccaaaacactcctacactctcgtctaatctctcaatctcacaagataggctctagatttgagtggaggaagcaaaggaagcttgggagtggctagaaaaccctagaacatgaatgaacagaagtggaatggccaaaaggtgacctggggacgaaattcatatatataacggctaggtgatatcatctagccgttactcacaagtttgaactagaaacctgccaggaggttccggacaaaagtgccaggaacttccgggcagcacttaggaaattttttgcaaataaacggtgcccaaaagttccggccagaacctccgggtagccctctctgtcccggggagaaaatcatttttcaaaaatgattccaaaaaatcttttgactcataaatatgactaagagcacttggtataccctagaaccacacttgaaaccccttttaatagtacggtttttcttaaactcaatttcgaaagtgaaaaacctagtctaaccaccttcgatgatttttgcacttaggaacatttgaattggggggggggtctccttgcattcttagccatcccaactcgctttgggactaaactcctgtgaataaacttgataaacacgttagtcccctttaaccaccttgtcattaatcaccaaaacccactagggggtttaagtgcatgttcaatctccccctttttggtgattgatgacaacatggttaaag

SEQ ID NO: 12982 - DNA, 583 bp, Oryza sativa
cgctgtcgccgcgctgaccccttccaccaccaccacccgcctcgccttccgccggcagcggcagcggcagcgccagcacgcggcggcggctagcggccggcccgctcctccaagacatggccgcccgcttcggccccctcctcctcgtactccccctctcctccgcgctgctcgtcctctccgccgccacggcgccccgtggccgtcccagccaaggtatgggagggttgtggattgttcacgatcgtgtccgtgctagagatttgttgttgttgttgctgctgcttcgctgaccaccttgttgcagtggatgtggggaggcagctgagggaggagttgtgggagagaaaccaagggcacgagatgctcaggtcgtggcgcgacggtgacccgtgctcgccgtttccatgggaagggttctcttgccgatggaaggacggcaacctcttcgttgtcaagctgtgagttccctgaatccctcgttctcactctcacgatcacggccatccattggtgctattcattcggctttgatgagaatttatttggtcgttcctttgcatttgttatatatgcaagtatg

SEQ ID NO: 12983 - DNA, 667 bp, Oryza sativa
ttcctgcagccctgtatttacccaaaaaataactaactagaaaaaaaatgaatgaatccatcccaagttaaatgttatttgttaaattgcccccggtttttcttagtctcgtcctctgaattgtacatggtgaagccgcgatgaaccattcaaattacagcctggacatgatcatatgtcttccttgcgtgacctcatgcttggttttgttttctatgttctccaaaactgcggtagccgccgatgttacgagctctgcaagatctctgtagaggcagatcaccattacaaatgcgtcagttgcgatcaaacgagaagctaaccgagcttagctactaagtatgagaatataatggcgccaaatggctgcagcattttaaacctacctgtgtcgtaggtgaggccgactgtgttcttgacctcgcgtagcgcgaatttgaagcgttcaatgtcgcggggatggtgagcgacggactcgacgacggcctgcgggaggacgagatccgagggtttgatgttgtaaaacaccgggatgatctttttccgtgactcgacgaggagggcgagctcgcggaggcaatactcggagtcgcagtagtgcggcgagaagatggccaccgcgacgccgcactggctgatggcctcgctgatccgctcgtcgaggcga

SEQ ID NO: 12984 - DNA, 1071 bp, Oryza sativa
cctaagtgttcaaatcgttgggatatatagttaacccttccgttaagatgtcccgaacaaacaaatgctcgttcggtaatgaatatgccgagttagagagtacgataactacaaatggcacacaggtggaatcaactggttaaacatctcaatttccaaatgcctctagttcttgagttgagtgtttccagtaagcaaatctgctgtcaaaaagtgacaatgggtagtcaggtcaacacaattgtacatgcctgtagcaccaacactgcagccctgttgaaaagaatatatatctacaatgccaccattttatccccccaactaatttttggccaaaattcaacaatatactactagccatattgtcgcccattaaactcatgaatttcttctatatatgtattctaacccaaaatgaagctcttcgtcagaacttcaacccgctacaaactataaaacatcaaggcaatgaaaaccgtaccggttaaggattctctcaacaagaaagttgggttcaggaaccagcgaaaaagtaatgctgttccagaggtggaaagtagaagagtcatttacaatcctagaaaacaaagcatcatgttgggttctttcatccgtgctatctgtttttgagaagtacctgcagtacatggatatcataatgagagtgcatattgcaaatttgtagccacacatctaaagagtcaacaattacttgaacaacaaaaatatgtgaaaggttgacttttaagttacttgaacaacaaatatatgtaataggttgagttttaagagggctggggtgcatctggtttatctctagtactgtaaaagcggtgtagttgtcctccccaacaatcgcacctcccccacataaaaaaaaccaccccacccaaaaaactagtgttcccatgcgaaaattgacccatcagaaaaaccggatacaaaaaaccgaacccggtaaaaccattcagccatcttcctgagttccttcagatcaatggcatgacactaataggttgaacttggctagtgaatagagttcagtttttcttttaaaaatgctcatgcgct

SEQ ID NO: 12985 - DNA, 548 bp, Oryza sativa
tgaggctcaagatgtcttcaagcgcttcgccaagcaagcccaaaacctctatgatctcaccatcaagagggtacgaagtgacaatggaggagaattcagaacacacaagtggaggaattccttgatgaagtggggaatcaagcacgagttctccgccccttatgatcctcctaaaaatggcattgttgagaggaagaaccgaactcttattgaagccgcaagagcaatgcttgataagtacaagacttcggatatcttttgggcggaggccgtgagcaccgcatgccatgccatcaattgcctgtacctccacaaaattctaaagaaaacttcatatgagctcttgagtggtaagaaccaaatgtttcctattttcgtgtctttgggtagatgctttattttgagtaagaggcctcgttcatctaagttctcacctaagggggacgagggattcttacttggctatgagtcaaatgcacatgcctaccgtgtcttcaataaaaccttcggtattgttgaagttataagggatgtgacatttgacgaat

SEQ ID NO: 12986 - DNA, 816 bp, Oryza sativa
cgttagtgccgtcatttcatgtcggccaccattactcagctcgtaataaccactctcttcatacaaatccaatgttgccgttttataaaaggaaaggagaggagatggtcctcactaacaatactgagtagtagagaaagagaaagaacggagtgcattgaggaggagaggaagccgcataagagaggaggcagtggagagaagaaaataattgcacgtaagcagtcagacgcgccgaaagtgtcctcgtctctttctaaatatgcatattttctctgaacaacccattaataattgagatggtgcgcacttctctctctctatatatatatatccactagagttcaaatcatagtgtccatagatatggttaccactgcatgtggttccccctatgtgatatggatctgtgctgaacatccaaatttctcaccaatttttgtaagagttctaaaattttaatcccttctcaaattccaaggtagtacaccaagcactataagcttgctacttgctacaatgtatacacacacaaacacaaccctagctagctacccagtatatacatactgtacttgtacacagcttaattaatttaattgaattgattaattagacgttgacgaagggcgagccggtgaggaactcggtgaaggcgagggcgacgaggccgagcatggcgaagcggccgttccagagctcggcgtcggcgctcatcacgccgccgctcctcgcctccgcgctctcgccgcggagcagcggcaccagcgacgccgcggagagcacggtggcggtggcggcgaaccacgcgagccc

SEQ ID NO: 12987 - DNA, 1501 bp, Oryza sativa
attcctgcagccttgatctgtacatctacaattacaaatttatgttgtttactgtatagtgtttcactttacctcacaaagctggaccgcaatgatgtcctggttgccttgctggtaccagatctcaaattcaagatagttggggaaattgctgctctcagtaatcttgaaaacgatattcttgtttgggtaggtacaagaaaccctgtagtgtagaggaaaccagaaccatgacatgtcagtaacagcacatgcgtccataattccttatgcagatattgtttctatagtagttttcattttatttttcatctaagaaaacaaatagttatgccgttcaatcaagaattttggcagattaattatatgcgcagacctcctgtactcaatcccaaccacgccaagggttagcagcgctgtaccagcatctgtactctgcgccatcctggtgaaagcatgctggctgaggatgaaatcagtgccatcactcgccccagagtcggtgatcacaattgtgacgccatttggagagcaatagtaaggattcgtgcacctcacctattggtaattggcattgttggtaaaaatgaaaggatttttttttaatgattcacacagcctagtcatacagatggattacctggtagcatgcaccacagcctaccccatccctgtagaggcttgctgaagctgaaacatcaccattgttgagtgttgccccaaatgcgccatactcacatgcaccgtctagaagtacaattagaaacaagtacaatttctatgagctagcttagaaactttatgcatttccgagtttaagtataatttaacttcctttttttgggttcatgtgaggtatgctaacccaattgaagtaattttatctgaaaggtacttactttcggtcccttttatatcagagttggggtaatatgctgctctcgacacagtgaagtttgcatctgcagtagccttagagaggaacaagatgagagaaagtatgactgggagatgccgacgaagcagctgagccattggtggtttggaccgtggagacgcgtacaaagccttaagagatgcggtgcatgcaataggagaggtgaaacaagccaagtagttctatttgatgttgatcttgcctcagaggttgttatgtatttatagtgttgatattgcctggctgtttgctatccttaggttgctgatgagtttacgagctggaatttttttttattttttatttttatttttattttttggttttgaatgccaatgccgttgttgacaatgcttctctctgatgaatatgttcccccaagttgtgtgtttacacttttttcgctttctcaattgcaagaacatttttacattgttgttgtgtacttgtgtgtatgaaacttgctgtttgtgttctagttagttatatcccttttccctcccatttcagttttcagcgtcttgttctggtaacagtgccgtactgatttgaaggtaggagtag

SEQ ID NO: 12988 - DNA, 3696 bp, Oryza sativa
tcattactaccacttgtgacagctgtaccattaacagatctacagtccaacaagctcaaatcaacattcataaacaatcaacagaaaaacagaaagtcccatttgatggaacttaatcaaggagagaattttgttcaaggcaaaagctacctgtctaatggtgatgaatcatcatcttgtttagtttcctttgctccttccaacaaaacataaccattttcatcactgctgtttcctgactttgcatcctatagtgcagtagaagagcaaatacaaacaacttttcagatatgagcttattgataactcttgcactgcactcaatgtcaacaaatagaagttactatagatgcttcataacctggcgttcaaggagcaatctagcatcactgacatgctgttcccagccctctactataatgcgaaaagcttcatcgcgtgacaagaaagatccaaagaagtgctgcaagcaatgcaccttgagtgagatagatctggcataaccacataaggaatcaagacagtgataggttcctcaccctttttgtaccggcaataatttcgatggcattatgaaaaatagcagctgtttttgctttacgtacatcagtcacttcctgcaacggaatagttttctgaaaaaaaaaggaaagatgaaagtagaagagagttgtagtcaataatcttttatagcagtacgagcaacgcatcagtataacatttttgtacatatgccgctataaaatatttaatgagaaatagcagcataaaactattgcagacaaattaatgaaattaatcagatgataatcatattgtagcagcaaaattaactttattggtcagccaattaggacaaaagcaataattaaaacaattttgttggagagcaatccttcatttccagttcaatttagctcaccaagtcagctaataaacaatgttccacttgcaggaagccaacatttaggcattaattacaatcagcacagagaaaatggaaattactagtgggaacaaccactagctcatgcttcaaacagagtaacagggttttgatggacatgtggccttccatatgctaagtgtttaacctactacagaaactatatgaagacaaagcataacagagtagaatgccatttatgatggtccatcagcaacgcaaaatatcaaggcaagaaaacttcaatttagataacacagttccaaaaaaaggagcaactattttaaggacaacatttcttcagctcaatttattgcaacagaatgtgtcaaacaatacaacacaacacagaagatatgacatcaaccagaatccactatgcctcgataataatgtgtatccgaaaaaaaaatgttcggtaatacacttcttaaagtgcaagtgcgactgaacaagctaaaggagcatatatgatgattgccttctgatcattcattaccttggtctcatatccaaaaatgttagagtagaagcatatatggtgtagaaataaatacatatgaccctgcagaataatgtatatttgttagaatctgaaaatcgtagatagtgttgaaggcctgaaactaaagcctatttttttatttaccctgcaaaataatataaccaagctctatcatttgcacaggtcaaacaatggattttttaggtgcaaagcactggctaaggacagtagtgaaaccagattgtctaataatgcagtagtttgaactctgaaactaagtaatgaaagaaggagtgtcatttgcaagacagcaaggatgatggacagtagcacccttaattgcaacaagttagatacattcatctaaacttgttcggtgcctagattagaaatcaatctacactattattgtattatgaaaaatatggattagatcttagtgttaagcctttccatatgtctttgcacatgcttctctacatcaaaggcataaacttgaattagaattggtggtgcacatgtcttaaatcaatacaaagcaaatccaaacagtgaatctaccctcgaaactgcagggccaacacttgccatgtgtattatatcgaaatcaactttggtataggtgatttatgtgtgcttgacctcaaattgactctgttcgtgagtgattgacagctgtgaacacagtatgaacaaccaggttatcattttatttctaaaaatgtgacaagttgcctttggtaaccctgtcctttagttctgcaggcaagcaatgcacaaaagaattttctagatgctgctgtgctcaatggggtggaataataaaatgcaggcaaaaagggaagtatgtattgttgtatttgtaacaagtatgagttaataggtattttggccaaaagtgtcaacataaatgccagcagcttgtcaatattcacagggtcacgatacaagtaaaatagatgtttaaattttgcatattttggaaagattctttttaagccataggtgattctctacttttattgtctagaaaacctgtgttacgaatcaagacttaagttacaagaagtagcactgaatgatgtcatataagaactacctgaagaagaatattttcttggagcgcacaattaaaatcttgcacaagaacctgcaatgcacaaatactaccatcagggataatcataagtgatataatagttcatcaaattactgttcaataaaaaaatgaacttggcatattatcttgatatggcatgctaggtcgacccacaattagagtcactcaaattcatttatcatcaaccaaatgaagtcataaaaagaagttcatgaaactacaagctggctacaaaatcccacaatttcggcaagcttccacaaaatttagtcacagttcaaccatcaactccgccacacattcaatagacagaaccgaatcgccacaacctgatgccactattcaatagaaaatggctcgatttgtcatgatgcgccatgttccaaagcaagtacaagcaatgaacaagtcatgatgcgatttgtcaaggaaaaatgaccacggcacaaaaagtcaaagttcaccgaatcgaacacccagctcaaccactggagcactcaaaattccccgcaacaaaagtatgtcaatccagggtcgtcgaggatcagatcgatcgaatagatgaagcgagaagcagcgatcaaatcaaaattttacctcgtcgggtggcaggcgaaacaaaagcctgtactcctcgctcctgctcgcgagcaacgggctctgcatcaacgaaccaaacaaacccacaccgcgtcagaaacccccaccaaccagtagtagaagcgtagaaccaaacccaaacccaaaatcgaggcgatattccggcagcaatccccgacacgggaagcaaccgacccacccaccgaggggtctggcgtggcggcgagctccccggaccgcgcggactccggcgatgacgcgtccaccgcgggcggcgccgaagcgagccgccgcggcggggaagccggggagggcgcggtggtgtcggcggcggcggcgggggggcccctgctgggggtccggctcggggacgcgacggccggcgacgccatgcccgcaccccgagggggggagggagagggggatacgagggaggggaggcaatcgtacgccggcggcggcgaggtggtggtcgccggggaggaggggggaagagaagagtaggtggagtgaagggggaggagg

SEQ ID NO: 12989 - DNA, 8567 bp, Oryza sativa
cggtgacgtgttcgcgggcagccacccgggcacccggcgtgtcggggtgcgtgtgcgctccgtcgtcgggtcgggttgggtgggttcggccgctggcgacttggagggggaggggaggggggaagacggaacggaaggggaagtgaaatactaccggcagcttctatatgcttctttttttttcgttctttctactatatgtatgttgccatttgtttgtttgtttgtggtatatagcagaaaatctattattacggcaagataataatactctctctgtacttaaatatttaatatttaatgttgttgacttttttaaacatatttaaccgttcgtcttatttaaaaacttttttgaaatatgtaaaactatacgtatacataaaagtatatttaacaatcaatcaactgataggaaaagaattaataattacttaaattttttaaataagacgaacagtcaaacatattttttaaaagattaatggcgttaaatatttagagacggagggagtactattacagaagagctttgttatttatgcaatgtagtacgccaccctataatatccaacgtcttacttgctataaaacctgattatgtaagattaaaacatgattatgtaccatataatgtcgatacaatcccagtatcccaccgatgatacaaattatttttttatggatttccctacagcactaaacaaagagtcaagtttattatacgagaaaataagtgtttgcccttcgaacttgatcgattctctcattttgctatcatcacactctaatgctccaacaattgaatatattatttaaatatatcgtaatgcaacattctttgattttttatatggcatgaaacattaaaatgaatactaagtttgtactccctgtagtcacataccacacgaaaatattaaatggcatatgcatatgctactacctctgtttttttttttgaaagatgacgccgttgactttttatcaatcatcttatttaaaaaatttacgtaattataatttattttattgtgagatgttttatcacttaaagtattgtaagcatgatttatatcttatatatttatataaaatgtataaaatgtttaaacaagataaatggtcaaagatgagttctaaaagtcaacagcgtcatctattaagaaacggagagagtatgttttaatattccatccaatcatagataagtgatatttttggatgcgtaaaatgaacacatttaaactaattaaccctataaactttgaccattgattttatttaaatattttaattcaacttttaaaaagtgatatggtatattcgtttataacttcttttacaataatgtatattaacctttagtgtgaaaataatttgtaatttatttataattatcaacaagtttcttggaacatacaaaagtaatacactatggtaaaatcatctttccacccatctcctaatgatgacagagaactaacagaaagagccaataaataaaagacaaaagctgagaatgaaggatataaatgaagtgctatttaggagggcaaataagagaatccgccaactttaaaaggcaaataaatattcttttttattaatttatcttcactcagaatacatatgcagcccatgcaagttcactgccttttttggttcctccactgattcattatcaacatcacatagccattataactaccatgtcaccattgttttcaggtgtcaccattgttttcaggtatagggattgaaatatcatatatgcagacaagcatggacctcgttcactatccctacgtgaaagattttttttttcctttaggcagggatcgaattatccgattataatataatttgttatagatgcacaatggagtgtatggttttctcttttctttttttatttttacctaggctacagctgcacaatttcagttgtaccttgcaggatttatgttgagttttttttaaaaaaatcacttcctccagttccgtagttcttaacattttagacaaggttaagatcaaagattttattattaataatagaaaattatagttaagatctgttttggtgattgtgccattgttctaaacgtaagaatttttttttcttatacactctaaacgtcaaaagtatgtaaccaaagggagtacatacatttctaacaaactggatattttatcaaccagctaataaatgccttatcggctatcgcaatgtgttctcaaccactgcatcgccgtgcaaagaaaattgggacagggacatgtccttagcatacagtacagataaggcaggcttcattcatggtcagattagtatcaaagcacggacaggcaaatcctcaaaccagcatagaatatcactagcaaccacgccactgacaaatgaaaaaggacaattaaacttccatcttgcccggtcaccctaatactctatatccgcatgcgttgcgttcatgcacggtcgtaatatatattatcagaattaattaaatgctcccctaatcacacatcacgtcgcactagaaaacagttaacgaatgatgatactgatgactatagtgatgtggtagcagtaaacaatcaacaggttgcaaaaaaataaacataaaccagatataaatatgacatattctagtacaataaatttaaacaaacttctatctaaatttattatatttgaatatgtagtattatatctgtatcttaagctgcccgcacgctacggcgatcggaaagacaaccaaagacgaaacgtgtcggtttgggcgtttttttggttttttggaggagaggagagacacgccaaggaacgcatggagcggcggggccagggcagggcggcagtggccgcgagcgcgacggccggccgaccggtcggtcggtccggcttaaaagcgaccggatcgagaatgagaggctgtcccgtgggccctcgctactcgcccaaagagaacagaaggcgtatgaccgacctttacgtcgtctttgtcctcctacaaaacacatgcacattgtacatttgtacctcttccgtttcatttacttttgggattatcaaaaagtcattggatgtaaaacggagtcaaactcaaagcctgtttagatcaatttgctacggtaatttttttttttaaagtttggtggcaaaagatttggtattataattttacaagttggtgtttaaatgcatggtaaaattttgctattaattgctgctgcctctctcatacgcgggtccaatgctttttggccaaatttgctactattaactctcaaatgacaaatgtcaacttgtctgctttttgctattagtgtttagatccattttactaaaaagtgatttaaagcggtaaaacttttgttattttggatgatctaaacaggccctcagtcgtatttttctcaatcgccaatccataccatctttttaggttttaaaataattgataccacacatttatcaatatggatttagatcgagattatacatcccactcgatcaggaatttttttgtcatcattaccctgaacaagttgatttgtattggtatattatacaccccactcgactaggggtttttttagtcattttaccttgaacaagttgatttgttttggttgattacttgattatactcccgaaaaaaaaagaagattacttgattatacatcctatactatactaggcgctttttgaccattttacctttgaacaagttgatttgtaacggagattcttcgtaaggcttctcgtgggacaaattaacaaatatctgaggaatttcattattttcatacgaattccctttaattaatattgtcacgtaaaattccaaaggaccctcgacatttatttttctaacacagattatagacaacttttgattgcatatgttaacattagctaatcggttagatgtttcttcgcgataaaaaaaacatcagttagctgttcacattgaaatgatggagtcatggggatgagtcttatgcaccaggacttaagtcctgatgtctttaaattttagtgcttccaaccaagaacatataggcattctatttgtggtgcaatgtattcaaagaactgtacttagtgatgtttcatatggaattctccatggtatctttcattttattgtcccagagatatcagaaatgtattccaactcagcaacactttactcagttcaatctttgattgtatgcaaccaaaggttcacatatgatgctctgtgcaagctcaattatattcaatataatccttacacgtgttgcataacttagaaaatagggcatcatgtaggcaattgtcagaatgacacatgattaagccaatccaaaagaaaaacacaaacactgctgaaagtatatatagcgaatcaaattattagaacatacattattattaagtaacaaaagtaatggatggcaagtttcacctagtttcttcaccatctcctctcagttttgctttctttttcctgttctcccagaggccccaaatgaccagagcgggagaggcccctcctctcccagggattatggcggccaacatttcacccatggcaggagagcaaaaaaactgtggtgggagaacaaaaaagagttcatcttttcttctccccagtactagaaataggacgatactttgacgtgacatcagattactgagtgatgtcattgtcaaactcaaagagtcaccaagggggatgatcctgtggcccttatgtgaagagtcaccttttcccagactaaaaatcctctgatggcacttgatacaagggtgcaaaaagagtcgctaaatgatcttagaaacaacctttgataagtgtgtttcaccctgaaaggaatggttaatcctaactatgcaccttcatgatataatagaagagaaatacaagagattggagcaactttagttcctcatatgaagttatgaacaaaactgaaaagcaattgtttgctctgacatgctaatattattattgatgtgttttcacgctctattgtgcttaatctccagcaaatacatgaactgtattctttcgtgtctcaagcattactcaaaggtcatacctcatataagttgcagaatatccagggactgagttattctatacttaggtgtcatctatcgtgctttgacttcccatattctgggatccttatgactaactttcttggagtgagttattttcttttccttagatgacatctatgctttgacttctcatgttctgggatactcatggactaactttctttttctctggttgcaggtggaacattgctctaagtaaacaagggtaatagcatttcgtttagttgttcaaaattagcatgtttcaatcttcttgaaccctgaaatctgcgagactttcaaaaatatttgtagcaggagattctttctcctgcacatcaatgcaatagataggggttgtcgatggcatctctactcaaaccttgtttcagatgtgaggacttttcccaatttctgtggggggaaaagcatgtaaaaattcatcagtaactctgaatgtcttctcactttcaagaacaatcatctgcaactcactgaaacagggtctgaaacttcactcttcttttgatgctgccagatctttcatatccaatgcctatcttactgtgcactagtttgacagccagatcagtatttcctgcttttcgaagtgcattgatcatcatcgtacgaactctcccaggtatttcacgtcctttctgtacaatgccatctgctaatttgcaggcctgcttgaatctgccagccttacacagcacattgatcatatcctcatgggccgtctctggaatcacccccattggagcaagttcatccaatatcctgcatgcccggctgaatttaccagaaagacagagcccactggcaagggtcctgaaagctgcagctgtgggagtaattcccttgtcgatcatcgcgtcccaaaacttcagtgcctcttcattcttgtgttccttgaacaaaccatcaatgagaatggtataagtatacactgtttgatcacagccatcatcttccatccgtttatacaaggcacatgcatcatccattcttcctgatttggctaatccatcaatcagcacattgtagcagtatgaatcaggcacaaaacctttagcaatcatctcctcaaatagctcctttgattggtcgaccattccagcttttccaaaaccatctatcaaacttgtatagaagatggcattcactgcaatccccttctcttgacaacttctgaagcatgcaactgcctcatctagtttaccaaagcggcacaagcagttaacgatcactccatatgtgactgagtcgagcttaagcccactatctttcatcctctcaaagagtgccattgcctccttctctcttccaaatttacccatcgagtcaatgagtgcagtgtatatagctgcattggctgcgcaacctcgcttcagcatcctttcaaacacagccattccctcgaatggcttcccatccttgcagagtgctccaatcaccaaaacataagcatgttgtggtatgtcgttccccattcccctctcctccatttcttggaacaaaccaatgcacaccggaaacgtgccttcactgtaatggcactgcatcagtgtaaggtacgtcaccttgtccggtgtgagcttcgcctgttcctgcatctcgctgagccgcgccatcgcatcatgcgccctcccggcgcggcagtaccccttgatgagaatgttgtaggagaccacgtcaggacgcacttgatcctccgtggacattgcgtcgaacacgttgacggcggtatcaagaaggccagcgttaacgaggccgtcgagaaggcagttgtagatcagcctggaaggctcgacgcctgcgaggcgcatggccttccacgcccacaggagctcctcggcgaggccgagagccgcgaggctgcggatcagagacgccgaagacgacggcgtgaggtgccgcaaggcggtgtccccgtgcgcgcgcagctcggcgacgagctgccgcgcgtgcgccgccgcggcggcggcgtcgggggtggcctccctggaggaggaggaggaggagtgggcgaaggagcggagcagcgagacgtagcagctcacgagatggtgcgggtgggagaggaggtcggcggcgacggcgctggggagggagcggtagaagtggagcgaggggagcgggttggggaggaggtgcggcgagcggagcgcggcggcgacgaaggccggggagaggcggaggaggaaggtcgcgcagaaggcacggaggtcggcggcgagcgtggcgggaggggagcggaggatgagggagacgacgcgggcgagccacggcgacggggtgggggacgaggaggcggaggaggcggcgtacgggcgggggtccgagaggtcggtgtacggctcgatccactccggcggcgggagcggcggctggtgggggtggccgccgtgggaagcggcggccactcgccggcagagcggaacgtgacagaatcgccgcattggggcgtgcgtgataggcaattaggaaccggaggaatatgttagagcatctccaacagttctccgtcaaactctacaagttaaattttaacaacttcagcacaaaatagcagtccaacagactctctactcaaatggccaagttaaatgcctgcccaaactcctccccccaaatttagccatccaatcagaatagccaaatgtgggccccaccatctctctcctctctcacccggagaaaattgacattgtgccatcctcaaaaagtgggtttcgcccaaatgccatgctggaagtgggcttcgttaaaatgccactttcaacacatggttacacgctaaaatactatctcggaccaaattaccctcctctcatcttcttcctccctccatcaccatcagctctcgccggcggccaccatctgccttcgcgcgagctctcctccatggagaaccacaggccacaggccctgcggggacccctcccatggctcccctccccgtgccccctcccatccgccaccatcccagccccgccctccgcgagcccccgcacccgtcccggccaccgccgccgtcgcctgcacctccgatgaccaccgcgccgccccttcgccatggccatgcccaccaacgactccgccgtgcgggtgcgcctccgccgcctggaagaacgggagtggctaggacggcgggttggcatgaaagacagagaccgccgacgtcggcgtcggtggcgcggatggcgtggagcgtgaccacggggtcgtcggttggggacggtcgaggcggggaggaagtggtgcggagatggaggcggacgaggcgggggttgtcggggaagaaggggagcggaggtagaggcggatgaggtgggcgtggcagaggcgagccggctcggcatcccttgtcagaggtggaagaaggtagtacaggggtatttttgtccgttcgggcattatagcgtgtagtcttcgattgaaaatggcattttaataaagc

SEQ ID NO: 12990 - DNA, 11563 bp, Oryza sativa
tgtcattatatgatatagcaagcaaatgtataaatatcatagtagaagagtaatataatgagaaacctgcaacttttcaaaaacaaaatacctgaacgtcatcattaaacatccgataagtcttcctgtaacgctgcaacaacctgaaggcccacttgctctggaaatcttcaaactatgaaaaaaaagagagagaaaagcatcagaaaaaaatattctagctaaagccacatgtaacaacaaaggcaagtccaaagtaacactaaaatcagaagagaacctgtacaataacattcggccagcgagcgaaaaccgcttccataaattcatcgataatcgctacatattcttccccctccagacgatgttcttgtaacccaagatctgtatggtttataaaagattaacataaaaaactgtctagaataattcttaggggcgaaaaagctatccattctcacgggctgttaaatattacaagtaaacacatgtttacaaattacaagtgtcttcatttgctttagagaatagaggctaactgtgtgtttgatatgaaaaatatgtgataattagaagcttaattacaaattaaactacttcaaattatacaacacagaaatattttaagaacaacttacacagaggatccttgaggagcttctcattgtttgttcccacatcaatcatgaccggaagaacctagaaaaaaagtgaagacagttttaaatcaatggtaaatataaattctgctagccacatgagcagtaggcaaacaacaagaaatgaatagcagtagagtacttatagaatccataacatttaagcactaggcattggtaccacttttgctaaggtacagtaatttaagtcaatgtatcttaatttgaagctttgttatttttccgaccctatgaattcacactttagtaacatatttcattttagctgtgtccagaaatgagtcgagatagtaaaactctagcaggtattttatctccccaatctataataaaatgggcctaactgacacattatcacataagtagcaggaccatcattactgatcaaacgaaatccctatagatgatacatatgaaactgtatttttagcatccactaatagtttttttaacctcttcagcaaacaagcttcactatactttcttagtttagctgattaactcctgcaacaaaagtcattacaaaaaagcacgggagatgtaaaattagaagagggagaaagggaagagtctaacaatcttctaaggtaccataaaccaaaagtttttaccctctggggatttattccagcagcagcaacatatagatccaactttccaatggcaataccaataccatgcaccccgagatcacccaggcccaatatcctgcttccatcagtcactactatcatgtcaacctgcaaaggaacggacatattttatttactttgagattatatgacattttttttcttgagagatgttcaaaaatcaaaagcaaaaggtagactgtcttatgctctgagatagcgttactgaattataccactaaagattaaaccaatgaaagagctcagctgctaaatgtaaaatcagtaactggatgaacacaaatgagtacctggtcagctggccagttgtacaccatggacatcatttccccacgatcttctgcactaaaatacattccccgaggccgtctaaataaaccactatagttttgacaaacaagtccaacagtcggcgtgtaaacaataggtgcatgttcctcaatattatctattaagacctattaaaaagatgaaaaaaatatggaaatcaggtaaccactttgaaaaggcacacctcagcctgctaaagttaacaacaattgagattatagtagaaacgaagttagcaacgaacatgtgtaatcatacagtgtcccgtaaacagtccaaattgtgcgtattaaatggtgagagcatacatgatcaatagaaataaggttgcacacaaatgtatgagttgtaaagttacaaaccttgtaatacattgtttcatttctgtcatgcagcctgttaaggatacgccattttgctaacgggtaagtatccgatgggccatctctcgcatatttctgcagccgttgcatgtcaagcactgttataaaagtgaaacaaaaaaagaagtaaatgaaccgctcacatcagcattcacgcagtattgtgatgattcacagatagctggtgaaatgttcaggtaatttagtgctaaaccctttgcatctatatgctgtatctctgagtggaacttgtactgatacttcagagttggtgctgtgcaagtgtgtggatgtttgggcagtctttttccgattgaagtttgtgagcataattctaaatgtgcagttgtctactcaagttggttggcccagaaaggacgatccaccttttgtgaagggactttttttagtccagatcaaacgtgactaaataaatgacgattgaaactttctcctagaagctggattataccatgtccaatcgcacagatcaaacagaaattctatctgacggttctacaattgatgcatgcgcacatacagacagtcagacacacagtcattcactcactcacttactccagtgcctgctgtcaattataggtaggtaagctaactcattctaaagctcaattaggcacctagtcaatttacagtttggacgtggccaatcaggcacaattcctagctgaaaaaagaaaaaaaaaaacaatcccaattcgattcgacccatgacgattcaagcagcaacgaaaaatccaaaacaaatttaaggatggaagagagagagagagggggggggggcgcgggtgccgcgtactgaatcggtcgatctgctgctgggaggagacgacgttgggcgggagcaggccgcggaggccgaggcggtccctctccgtcatcgagaaccccgtgccctgcaggaaagccacacagccaaaaccacccacacgcatcagaacgctctcgcgccgccgcgagggaagaacacgagggcggaacgcgagcgagacgagagcgtgcgtacccggttgaaccatgggtcgtggaggatgtcggagccgcgcttgtggagcacgacggggcggtggcactccgccgtgacgaagccgcgcgccagcaggaggaggtggtgctccccgccgccgcagcgggatcggcggaggaggctccgcgagatggacgccgccgccatcgatctcactctcacactcaccagcgcgatgccgcgttcgaattattctctctctctctctctctctctctctctcttccggctttttgggggaggagatgagagcgagacgacgcggcgcggcggggggatctgctctagctgcgcggttgcggtctgcgcgacgaggcgccgacaccgcgacgcgagaggccgggccgtgcgtgcgactctccccgcggggacggacgactattccggtgccggttcggttgatctgagcttttgcgttggtacggcgcgtgggtggcaggtccaggtcagtcagtcgcggccgggaccaggcgtggcctgagatggggcggagatctgccgggattactcgttcaaatgtggacttcttttttctcacttcagatggcgcattcattagccggcaattcgctagcccataagacgggggtggtgcatacgcaggagaggaggaggcagcacatacgtgagggcgacacgaaccgtacgatgcattgccattatatgcgacacggtctgagactagtcattcctcgtaaacaagcgatttattaatatttatatttttcgatgtccatatagccaatcttatgtggaagaatagagaatcacacattaaattcgagaaagtcagtaagaggataagttgttggattgaaatatgcctatcaaaaataaaaattttagatttggaaatatgactatcaaaagtagatggagggagtatatttttttaaaaaaaattctataaaaaattgtttaaaaaacatattaatctatttttcaaaaagaactagttaatactaaattaatcatacaataatacgtgtttcgttttgctctcgtctcttgtgaggtcggctgctgcgagctcaagctcgtcgacaaggaagggggtagagagagaggaggtggtaggggaaggggataaggagaccaccaccggctacaaggaaaggcggcggagctcgaggggcctaatgccacgcctcgttgctcgcatcccctagcgaggccggctgctgtgagcttgagctcatcggcgagggaggagaatggagcaacgaggaagacagcggttgagggatagggatgaggacgggaacggagacggtgatgcgacggagatgacatagatcgtgacggagtggcatggttctaatttatttaaattctagtggcatgtactccaatatgatgaatagtagttgtatttttttaatttgccacatttgcagtggcatggatccaattaacccataaaattatcactggtgagagataatttcttataactatttaccactgtgtcttaccagcatagaaagcagcgtgggtcccatgagtcagcctcttcatttttattcttctccaccatccaatgatggagcacgagttgcttctccctccatcgtcgttgtgtccccatggcgactctactgatggcacacctagcaaggataaaggattctgacaagctattcttatgtaaaaacaacccgtctcattcgattatgaggttcagctctaagtcaaccttgtctgcatcgtcgatggacagattgatcgtagatggcggtgcgggatcggaggacgaatgatggctcaggcagtcaggctccttcaccggccggggagaagaaggagaaggaagggggtgactcgtgggatccatgctggcaagtcatagtggcacaccacgtaggtaaaagtggtaaataattaagaaaccatctttctccagtggaaattttgcaagtgcaaacctaataaggatatttgccaaacctcatagtcgcaaatagttaaattccccctaaacaacattgttttttttcttttcctttttttttggaaaacaacaattaagaacctaattacatatttgctaaatttggctatcatcaagatattccatcgaaggtgagtttacttttacaacaaaatatatcacgaaaacaagctacttttgttacaatattttatggacaagataaaagtcgatctttagaaaagacactttcaaaatatgaatatttgttccacacaacatgtattaaaatattcattttcaatataatagcatagagaaaaaaaggcaaaagacagaaatgcacagggcccaaactcatgcccttagcattttggttgcctcctcctcggtacaaacatactacggagattttcatccacttcaaaatgcagtgaatggtgatgcgcagataaagtaaagcatcgaggcaagtggctgcaactcttcttcatggagtaaaatcaacaaacacatagctatagctagcggcaacaaagaaagcaaaaggtgacaacagcgaggaatcctctgcatgtcttggcttgttcggtcattgtgttcctgctccacaccacacgtatcggtactacctcgccgccttctctggtcgtgcgctatcgtaccatgccagtattgaggccgacacgacacacaccatggggcgcacgcgttccagcactccttgacgtcgtcgtacttctcctcgacgacacaaacgcccctttgctttattgttgtcatcgtcatggccatacattcctaagaggctcacgtatgctgcaaatgaacagcaagctgcaagcggttgaggaggttagtgtagaccgtgcgtccatgccgagcgcgacaccacgtatgccgaggccaagcttgttgactaggacgaagttgatgggcatgaggaggtgctcgtagcttggtgtagcaggtggaaatcgagccctcgcccatcccaagtcaagtattgttcacactaggagaaaaggaaaaatagagagcaagaggaagaatatgcgtgggtctacggtggttttgacttttcgtgttatttctctctcttagtcaaccaaaattaaatatttgcaaatatcggtagcaaattatcatattttgaaagtgtcttccctcaaagatctaactattattacgtctaggagtgtctttacccttatgtctgtagagtatctttcttcctttacttaacatttacgaaagatggatctagttggataggggctgtcaacataggccggagttgtcttggtcttttcaaagggttatcatggtgagaggcacgtttgagtcacacctaaagggaaaaggtatataaattattagggcaaccatgctcgagaatacaataagtaaagcttatgtatgaatatatcaataaaataagggtaatgcattttttacgactaacatggttgttggtggcgagaaatgagttcaccacaatctggctaatggtgccgtggtggaaggactcgtgatcgtgtgtgactggtgttgtcgagctgcaaagcatggccaatagacaacacttacgtgcataacaaaaccaagtgtcaggttatcagcaaaggaagaaagaagaaataagagatcaacacgttcatgggtatagccaaacaaagaaagacaacacacaagaggtgggtggcatatatccttgagaagccattcagcgagcaagaatagaaatagctgatgatgcattcaaatctatcactttgttaggcaccataagagaaccatgttagcgacaataggttttaacgaatctatcggcagctgcatgcaatgaaaaagcattagaatcaaaaggaaaataattacataacttaagcagtcaacaatcgagcgaagtggtgaaagatgcattaaggtgcaacacaagaaaaagaaaaaaggaacacgtgccacacaacgacaatgaccaaaactagtaggaagcaggaatcctaccaagaccaatatctatctattctaccattcaacttggaaacctatacatattcctaattattatcattatattatgtgaaacccatataattaagttgtgtgtattatctcatactatttacttcacatgctcatggcaacagttacagaaaaagtatacattgcactataaaacattgtagtttggataatggcggtgtgatgtttatgcttctaagtgtgccattaaaaaaccaaaatataccaacatgccattgtcttctcagcattctcccttctttcctggggatcctctgttgatttttatgatagccatcgtcttcctaacatcccttcaacaacgctccatctctcacttccaacaacgctccatctctcacttgcctcaaatgcaactaaagaaagacgtgcagtgacaatgatgtcatcatataggatgtttgattggagcaatgtctcaatgggtgagaagatgaggcatactcgatgctgtcaatgcaactctaatacccataagtggtataccaagttgccttcactgttacaaatccaaatcagttttgattgaagacacacctattgtcgcgaatactgctaaccctcactcccgagatatgctttttctacctctagttgtatctaaaagagtgcctagagagctgcattgctagctttggtggtaggaagtgctaagtccgaaaaaatgatttatgatgaaatgtttaactacatcttcgtaggaagcgatccaatatagttactgtggctacgactgttatggctggcataacaaacacaaccgtggctgcgagcctatgactttatttataaaggttatgtaagatgaaatatatttttattttttctgaaaatgaaagcgaaacagctggaacattttgcgctccctccagcccacccacgtccaaactccaaacgccaaacgaagcaggcttcgctccgattaaaaaaaaaaggggcctccttctctgcttggcggggcgggcggtggtaataaccggcaggcagtcaggcaccaatctcggagccaaacaacgcccatacgacgagacgagaagaggagaagcggagcgcatcgctcggtcttccttccttccgtccgtccgcggggcacaaacgcacccaccacccccccataacgcgcgagatcccctctccgccccccctctcccgatccgccccgccggatcccgccccgccccgatccgatccgacctagcccgcctcgccgccgccgccgtcgccggccggagaagggaggaaggagaaggagaaggagaagaagaggaggcacgagatggcccccgtgtcggcgctcgccaagtacaagctggtgttcctcggcgaccagtccgtcggcaagaccagcatcatcacccgcttcatgtacgacaagttcgacaacacctaccaggtgcgttcttcttctctatcggtttcgccgtctgctcgcctctcttcggggggttggggttggatctgatcgggggccagatccggcggtggcgccctggccggccggccggccgatctggaggagaggcggttgggattggatctgtgtcgtgggttggccgctgactcggtcccgtggcggtggtggttttggtcttgttgattatttggacgtgatcctctctgctagtgaagttgaatcagcagtatctcgtgtgcgcgggtgatgtgatggtgtcaagcaaggcgtgatctcggcggccttgaggagagcgagcaattaagcctcgatcgatggcatggcgggatccaagtgcagccccatgatacaaatttacagatttacagggagcttaacagtaggcaatttcaacgagaatgggctgctgcattcagaatgtggtctttggatattgaacttgggattggaaagcagggaacatgagccttgtgaatgtggtttttcttcagctacagggcattgtggaattcgtttgggatctgggattgcaatttttctctgctagattgcacatgccttgtgaccggcgcacttatgccatgctgtagacaagattggggatcatctgttttcacattattgtaccacattgagacatccgtattcggaatggtgtctggacgccttttgatacatcgaaaagatgtccttcctcacgagggctatttctattctgtatgatggtgggaatgatgatgctgtcattatactattgcacgcttattttgagcattatatgtcactgcaatgtttcagttttaatacttatcttaaaatgtttcagttttaatacttatcttatctggtcgttatgttctcatgatttattctattttgcgaacaggctacaatcggtattgacttcctgtcaaagacaatgtaccttgaagataggactgtcagactgcaactttggtatgatggcatcttttgctgcatttccagttagttgttctactccttgggaatcggcaggcattatcttatgcattttgtatttttttttctgcagggatacagctggtcaggaacgattcaggagtttgattccaagctatatcagagactcttccgttgcggtcatcgtatttgatgttgcaagtatgttctctcatctccatgtgcgcacatgggtggcatgtgtgttctcactaactgcttttatactagcaacaatgcagcagaccaacagagaattgccaagcaaatttgatggcacatgtcaacaaattatgatttttaatagcaatgtcatttttaattcgttttgcattataaaagctctttcctatcctgcctcctttttccttaaatttgttttacatgctgtaggcagacagtctttcctaaacacttcaaaatggatagaggaagttagaactgagaggggcagtgatgttatcattgtgctggttgggaacaaaactgatcttgttgacaagaggtgagtggagttcaaaaaaattcttgttttctttagccctttcctgttatcttgcttatctgatgattttgctgttaataatgatcctctttaccttctggattttacttggtgaattttattttgcagcagtttcatttgaatgcccttgtttctgtatgatgtcagattttgttcaccatatgctttatgtgttactgttagtggtgtactggtgtttaccaaacatttcatttatttgtctcatgtaagacattactgaattatgatttctagaaatgcattctaccagggttagtagagtaaaattaagtgcaatacctgctgccttaatttttttagttgggttcccaaccaatatttctatatgatgtcaaatttatttctctagatgtctttgattttatggtgtttaccaaacaatgcaatcttattatgtaagatagaactgtatatttacttttgatatgcagttattacgcgatgattgaacagtacgataatttagcacaaaactcactaccttataattttagttggatcaagctcaaggtttgtgattcaaaacaatgccatgtaatgtgagtgtatgataaaatgttgacctatgcccacttgttattggcattgttatgaactacaaactgtaggctcacatgtgtctaaaagtctgtttaattctagatatttccttgtttcatttatcgctaaacagataaccacaacatgtgtgattcaggaaaatttctgtcaggtccctaaaaaagtcagaccttgctataattccaaattatcgtggcaatttccattttttaggcaccacttgttgtggcattggcgattaagatacatcaatttgtggcatcagtgccagttcttaaagccaatcttgttttggtgtgaatttttggaataaaatgtgtatggccagagcttcatatttcatgactgcagcttctgtgctctttaatattattttccatgatagtttaagctgacattcattttgaatctctcagtttaattttaaatattatgtgataacttatttcttgctgttgcttttgtgctggtggactcatttcctgctttagcttcattagattaaatatcatcgatctccataaatttttatgtaaaatgtatatattgttgagtgttgctgtcaattttaagtcatgtactttctcatgcaacaggcaagtctccatagaggaaggagagggcaaagcgaaagatctcggtgtgatgttcattgaaaccagtgctaaagctggttttaacattaaggtgtgcttaggaaaatataaatttcttgcatatcctttgtattacatcaggagattagcacgcgtgtagatctggcacattttcagaaagttcaaaatcgtgttcttttatttgggagatgctgaaatctgaattatttatgggttacatggggataatttgttctgacattttttctcatgctgatcaggcgttgttccgtaagattgcggctgcacttcctggaatggagaccctctcatcagcaaagcaggaagacatggttgatgtgaacttgaagtccagcaacgccaactcatc

SEQ ID NO: 12991 - DNA, 6625 bp, Oryza sativa
aattcctgcagcccattcctctttcacgtagaggggccggcatttgattgtactaacaatcataaggaatcatcatatgtacaccctcagtcctagaataagttaatctagtactcgctccatctctaaatataagagattttggttggatgtgacttatcgatttattgtagtaggatgtgtcatatccaaccaaaattccttatatttagggagagagagtacttgatataacacattttagtgtccaaattatagtattaggatgtgtcatgtgcagtagcactagagggtgtatagtaattttcggtaggtacgtggatgttaattgtggtgacagggaaagtagactgctgctagagagaggaacatttggtttgaagcacaggtgttttttctgtgtgattctcaaggagcagggcatgtgagagcctgcagtttaaaagcctttgcatcattctatacacctctgcaacaccatccatctttaaattctctaaacttcattagtagtactattttttaatctgtctcagtttccaatggctgcatatcacccatagctccatcatcagtcatcagagcaagtttaacagtatagtcaactattagctccaattcatttatagccaatctaatagctcatttatacaatagttacatactacactattaatacctggtctcacttatcatacacacactgcatcttggagtctgtgctacagctggctataaatttgtagcccgttgctattctctctccttatttatttacttaaaatatgtttgcagttggcttatagcctgctattgtacctgctctcacaatgcgtggcttgagtggcttcctcgtttttttcttttctgaaacaatagactgcattgctttctgaacccgaagagtgaaacggaagtgattgcaagtttgcaacagagaatgtggagaaagataaaataattagactgctggacgaaccgcaaaggcacccatctgatatagctgaagcgctgatgatgttgatggtgctgatactcatgggataggattcttctgtctatcttttttcagttacacaaaacacacatagaagtaatttatagagccgccaaccatgtgaaaaatgaatagggatatgttggtgatttccctagataatgtctaagggtggtttctcaactacactttcccaacttacactctatcgtttttcacatatacgcttcctaaactaataaacgatacgttataaaaacagtacatattgatattaatagattttttaaaaaaaaatctatagaaaagatatatttttttaagtttttagctaatactgtgctaatccatcattccgttttacgtgttggataagaagggtacctaattccttcaaacgaacacagcctttaggccccctttgaatcaaaggaaaaaccataggaattctagagtattttatcctatgggaaataatcttatagagtcctttgaaacaaaggattgtttcctatcaattactttgaaattcctatggaatgaatcttactagagcaattttggaggaaaataagcatgaggtctcacctcatgttttcctcttcatgtgtctaagattcctgcgtttttcctatgtgctaatcaaacgacagtttgaagactttcttgtgcttcaaaatcccataggaatccaataagtatggcattcaattcctacatttttcctattcctatgttttttcaatcctgcgattcaaagggtccctaaatctctccaccctcggaccgggatccatctgtccgtggaggatccaaaggccagaacggcggcatcaacggctagcacgaagacattgacatgagcaccacaaactctaactccttgaaacggcttaggtcaacggtagaggggagcaaacatcgccagctgttccttgaaacggcggcccaataggttaatcgtgatagcgtttacctcttgttccattccctatacatgttttttgaccagactcaggtaactcatggtagtactcatctcgtcattaacttgccgcacagcaatctaccagggcaggctgcaaaattatgctggtgattttagatgtatactacttccaccccaaaaatataccaaatacatagccaggatccctacattttcggacgaaggtagcatgtattaacactaggtggtctataaaggaaactgacagaaaatagaagaaatatataataccattacaaatcgacaatcgcatacatatattgcagtacatggttagctggggaagcttgtgaaatagaactggttaaatggacttacattacatgtcactggaagaaacaaaaagattaagatttaaaaaaaaaaacagtttctgccagatccaaagacttcagttttgcagcaaattaacaagtcagcatctttggtggagttgccagaaaaaactcaagtctgcagaagggcatagttctgagcaatgtacattccatgactatggggtttacaggagtaacattcagtctaattatttaagacgtgaccacgtgaatgatcaggattaacattacacattacctagtggaagctacaatttatctgaggatgagaaaaaggggaaatgattatgtacatctcagccattacatatatctaaaatatcaggggacaaccaatatagaccgaatccgttaaaagccggttgttattactggttttcgccaggttgagccttttctcacattcctcagatggtcaggattcaggaaccctccagcatgaaacaaggtaattaataactttgcccatcttgcaagtctgtcaaacttagaatattctcaacgcatggaccattgcatttttcacctcatctcactgaagctgagacctgctactgctttcaggccagtggaagctaggtgcactgttgtattgagacaaatcgaatgaaatagtctccacctagaaagcaaacacaattttgaaaaaaaaaagtgagaagggttttatctacatcagatccaccaatacagaaagaacagataaggagaaaaacatgggatgtgtatatttgatcttactccataagggaaggtttcgtgtgcaccagtagatgtcaatggccatccctcattaacttgattatgctgcacctaatgagaaaaacttcaatattagacgaccacaaggaaaaaatttcaactaactcagcggatcttattacaatacatacatttgtggcgtcagttatgctttcggttgtggtgactgccgtgtttaaggtatttgccatggcattccttctcttgttatatgctcttttagttttcttcttcaaggtgtcaagaacattcggggttgccagtttcttcttgcgggaacgttttgactgaccttgtacaacatcccatccttttgtactaagagaaatgggcaaagtgtcatcattaaaatcctcattcactggattgtatgcaaaatttgcggttgaaacatgactatcaaccctctgatctcttagtgacttctcataagaaatcactttatcccttatctccctcatgattgataaagcatagccctttgattctgagttcacagaaccaaattccactacttctgtgaaatattggtgagtgagtttgtagagatcatcatagcctcctgtttcctgattacttaatgatacaggctgtgacatggaagaacaagtttgtttacaatccttgcaccagcgatggatgatgtattttggtggaatcattggtacaaactcctgcctcagtacagtaagagcatgcctgcataatatacctttgaattggaacaatcggcagagacacaatatgtcatcttcgacattatcataagcaactttgtagtccaccttctttgtttcatcaatgtgatctgaaactatgtatgtaaccactgattcattccggtcaagtatactataattgcaatgaaaagaatgcccgatttcatctaagaacttctgaaatatctccaatgtgtacatctttgctgcttgctcctccacagatacaccagtcatcaccggtggcctcatctgagatgaccgtaaatcctcatagttttccttttctaacttaactttcacagcagactcatactgctcaacaaacatttttacagaggtatctggcatcaaccagccatcaaaatagtcagatgcactatcacttctttctgtaatagacattcctgcccaaaaggaatccttcacataaacaggagcccactgtgtcctgacctcaaatagtttggacaaccattcgtttccctctagatgaaattgttcgaccatttcttgccaatctttgtcaaaatcaggcatggtaatggaatcaaaggctagtgagctaaatgcagaaactatttcatccttcttttctgtttcctccaacttttcaggaagctcatttaagatgtcgagaaggcaaaagcggtaacgtgcattagggaaaacctttttaacagctattgcaacatcatgacagtagtttgtaattactgaaggtggtggcgtgctgttcatacatcttacccatgtatcaaaaagccagacgtaagctccaagagatctaccagcaagaagaccacaccctagtaatacttgctgagcatggtggttagtgcccacaaatgacacaaactgtatttcatattggtcgctaaagtttctgacattaatagcaacaacatcaccaaagtaattgtaagaagaacgtgatttggcatcagcccaaaatacattccttagttgtccttgctcattcatatccaaactgtaaaagaagtacggattttggtcttgcattttgttgagaaaactcaataaggcatctagatcaccttcagcaagcttcagtttcctatttctatctatcttggtcctgaattcaatctgggtagacaaaggtatgccgctatcaccgcctctgctagaaagcgcagcagctgagctactgtctggtgcttcaagcataagaggtggattctgaaggaaaggagagttctttagctgcttcttaaatttaagtaagctaggatccaacggatggttatgttccaactctagaacaataacttcccagcggttttgaaaatgagcatccttaacaatcatcttagccttgcatccagtctttgtgcctcgttttcttgcggatctcgtcgcgccagacctcagtctagactgccctcctttagagcatatgaatgtagagcgatagcggaaaccatcgaaggtattgttcgatcttcttgtgataccaaaaccagagcggcagccgtaagacacatagaactgaaaggcgtcttcctccgactcaaacaccatccctacttttggtacaaacgcgggatctatatcaaccggcttgaagatatcaccctcggcaacatttccttgtttctcaccatcatcttcttgcatgtcttcctcattagacgattccgtattgtactcctcctcttccattggccccaaataatctagtcaggcagaaaatagaggaaataaatcatgccctgtgtacatacatatccttgacaaaagaatggtggccactaacagaacactctgcgcgtcatcatcacatacgaaggtaaataaactgataagcggaaacagtttataaaacaaagcttcctaggctttgcaacacccagtgcaaatttccaactctactgacagtggcggatctaacatgggacattgggggttcagttgaaccccccaaaccttcttaggaaccatcaaacagttactagtattaaggttaaggcaaatttctagagcagaagctagggttaacgcaaattcgagaaaaaaagtgcgtgggtagagagagagagatgggaaagaggatgtgcgtaacggatgcggcggaagcagcaggacgagcgacggcgacccagctcgctcgctcgctcgcacgcgcgattggatggggatcggcggtggcggaggatgtgctcaccaggatgcagcaggatgaatgacggcgccctgctcgctcgcgggatggatggggatcgccggagccggagccggaggcggcagcggtgggcaagagcaaactaaagaggaggggtcgtcaggataagggttaaggcagtgttcttccccataaattgcacccacggtgcaacaacttgtcaggtgggtacaaataatttttaaaagttactttaaaaatcatatcaatctatgttttaatttttttaattaatacttaattaatcacgtgttaataggcaacaccgattttcgtgtgtggaggtggagtcgaactcagcctaattagatccatgtcattataaatttgctgttttagaaaaatagcattactatttacgaaattagaaacatgccattacaatttaataggtcttcgagatatactactgcttaccccttcaccatgctttctaattttttcggaccaaattatcctcgcgttcttcctcttctcatttctctctctcatctcacccctcttctctcttccattggtcaacgccatttctccgtcgatgagctccattgggagatggatatggagggtggcggaaggcggggctgcaggaat

SEQ ID NO: 12992 - DNA, 4001 bp, Oryza sativa
tagacaacgtattgagtggtattttatccggtgcattgtattaagtagcatttcatccgaacccaatctatagggtggcatactgtccattttctcgctttaccatgggatctcgtttggacaatacgataccaaggaggtatatcagaattagatcggatactcatcaggtatcatctcatatctcgtagttactagctaatacttatcggtaccaagtcgatacccaacggccaatggtacagctcgatatccatcgggtattagatctgagctaaaaggagctaaaaggagggagagaataagggaaggagttggttacttgtatcggtttgctcatctagaaacgatgacgacgacgaggtcgggcaacgtcaaatctgatcggtaggatttcagagtttcaaatccgcctcggacaagcaacggggagggcatagatatttgctttaaccattcccattccctgttgtgtgaacatgagatcctaatttcgacagcaacaattgctttctccctcaacgtgacgatttcggctacaacgatcacgactatcgcatggctacctcgataaccatacaagggctatcatcattaagttttcttgttggtttgtactcagttctaagcggcatgggttatgcctgaactgcatgggattttggagtatatgattaagatcgatacaatatatagttgttatggttgatactgttatgctagatattacatctttagaattggttaacatccaaatcaattgtattcttttctgcaaagaatggttcattacaatcgaaccattgtatgcggtacatctccccttacacaagctttcagaatttcagttttctgatgggccaatttgtacttgggtggagacatccttacacgtctgaccaacctaccaaaggcttctgccgtcacttgtgttctttctatttatctaaaaactcgtgttgtttctgcagagcaaagcatctctttagcatcatcactcaagttctcatcaatattcaagatcatcctgaatgtcaattgtgatacagaagcaacaggaaaaaaaaagaaagaaaaatgtctgcaaaagaaacaaaagccattcaaccaaactgctatcagaaagcttaccagcgtcacagagtgagagacaaggagaccaaactgcagagattaccatgatgaaaaagcagagtcaaaagagaggagtgaaaaaaaaaaagcagcaactgtgcttgagcaagcaagaggaagcttgaaacaagctggaattctactaatgcaattctattcccctaaatcgatcataatttatgctgcaaataaaataaattgaaatgaaaaaaattgcatgcttctcactcctacagatcgatcagaattcagaacccaaagaatttctcccgatctgaacaaaacccaccccgaatctctgatcaagaaagggatcagatcaaattggtgcgacgttttcaggtgtcgagctctgaatctgcccatggagtcttccgtttctactagccattgagcgcaatggcatcgagtgatccatcctcgcaagaatcccggcggccatggcggcggcggtcagctgctggagttggggccgtagcacgcgccgcggacggggttccagagccactgcaccatgaaccgccggccgttgacgccgttgacgttgtaggaggcgccgtcggcggcgcgcgacacgttcccgacgagcccgcccgcgccgccgccgtcgccgtacacgccgaggcagaggtcggcgatctccgtcggcgccgtgggcgtgtctccggcgtaccacgcgttcaccagcgggttcgtcgccagctccgccagctcgtgcccgagcacgatcaccatcccgtccaccccgacgtcgccgttcggcggccgcagcacctgctgcccaccggcgccgccgccgtagtccggcgcggcgaacgggtacgcgcacttgcccgggcactgcgtggcgctgttcccgacccacgcgtacggcacggtgacgccgacgacggaggcgaaggtgaagtagtggaagccgcagacggcgcggcagaactcctccacctggacgtccggcgaggtgagcaccaggtagacgccgctgtaggggtcgagcgggagcgggtccgggtaggcgtacacggcggagcggatgacggactgcatgtcgatccgccgcagcgacgcgccgtgcgagtacccggcgtcggagcgctcgccggcgacggcgaacgcgccagtcacgtgggcgcccgtctggtccgcgtacagccgcggcgcgcgcgcccaccagtcggacaccgccggggacggcgccgccggggccgagagcgaggcgaggaagtctcggagcaccgcctgcgccgcggcctcccaccggccgtaccagatgaggtagaggttcgtcggcgaccccgacacgacggggcccatgtggtactgcatgtccaccagctggttgccgtccaccaggtagtcagcccggtacaccggcgcgccgccggcggtggagacggcggcggcggcgaggaggaggaggagtggaagcctccccatttttctcgacgagtggagtggaggagtgagagcgtgggggaagtgaagtggagtttttggtggtttttgagtttgaattccgactctttttaacttcaaagtttggttgtactaccaatgtggtgataaaaattgtgacttccaaaaaagaaatttgatggacttgcattgggagggaggccgacaggtgggccccatgatgtttgtgcgtaaatatccaccatctgatttgaagatttaaacccgggtttataaaaacgtgcaattcgaatgcttcaattcgaaacggacatttttttatatatacttctaaatataaaaattacataaaaagatatattgcaattttttcataatataaatatactagtataattttaaacatttaattatgatatactgagtacatctttattttatcaattatttaagattttaaggtttgactgtatacattatctgtttggaaatgaatggaatacatcagctgatctttaacggtataatccacggaatgaattatatacacactcttctatttataaaatcagacttgtgagtggatttcagatcaaatttgcccaagttgatttaaactaggtggcatatgtggccagaccaggggaggcttcctgctagatctttttaatcagactggacccacctacttgatgtgcatttgcgaatagcatggaccacatgtcaacggctgcacgaagctcgaacatggcccttggttctagaagcagtgcggatgacgtgtgggccccacccagcggtaaggaatcatcatggcagtcacttgttgctggcttgcttccagtggaaagcctgaagacttgtggtacaactgttaactaaggccctgtttagataggactaaaacttttaaaagtccctatcacatcggatgtttgaaaattaattataaatattaaacgtagactattaataaaacccatccataatcttggactaattcgcgagacgaatctattgagcctaattaatctatgattagactatgtgatgctacagtaaacattctctaattatggattaattaggcttaaaaaatttgtcttgcaaattagctttcatttatgtaattagttttgtaagtagtctatatttaatactctaaattaatgtctaaatatagagactaaaattaagtccctggatctaaacaccacctaaacccaattcagcaatattgaatgattcggcagacgatgtaactaagagtacaatataaatactccttccgtcaagaattagatttaacataatctaatacaataaatctggacaggctctatgcttagttattttagatgaaaaaaggagtataatctaatacatatatgacatatcgtaacactacaattctaaacactgtctaaaatatgaattcctctttcacgtag

SEQ ID NO: 12993 - DNA, 4810 bp, Oryza sativa
tgatcacaaatgagcattagaacttttgagcaatgagctcaaatgcttatttttcttccatttagcgctgagattttccctttcccaatggtttccagtgtgtggaggtatcaggtacctgccttttgtgtttgtatgcttagcccagaatccagatagagtaaaaatccagggactagtagtttagccctctagtccagcgggagcaaactctcgaaagcctctatatacatgaagtgtatattttcagacatggtaccttggacatggacaagtattcatttatttatgcgtgtatgatttagatagtccgtttaccaccccactcccagggttacaatttagaaatactacatgtttgtctatggaaaaaaaaatcctggttacctttttaatccttgtgttcttcagtttttgttgttcgaattatccatttccttgatacatagtgccttgctgccattacttgattaaaaatggatgaaaatgcttcatattcagtgggctaatcgagtatgctccaaatgatggaagctatcacggtactccctaaaagccatgaacaaaacaagaaagcctggtcccgaaacggacctgcaaatttattttcggccttcatcagtctatgttacaggttaaggggttaagggcctttgaatcaaaggatttatgtaggaatttcataggattcaaatcctataggaaatttttctatttgaccctttgattcaaaggattgaagctttccaaatcctatgaaattcctatggaatggcacattgcaggtggattttggaggaaatttagcaagagctccaacctcttaaaaaatttcctttgaatctatctctctcatccgattcctgtgttttttatacgctccaatctaacgactatttatatgtttttcctgtgttttgtaatcctctgttttacacttcaattcctgtcagaatcctgtgttttttctattcctccgttttttctaccctgcgattcaaagggtccctaagttatcaatgtgtgcaaaaataattcttgcaggttggaagttgattcatacagcaacatgcaccattgaccgttcatttaaaaagaacacaaagtacagtgcctagatcacagcggatgaggatactaactttacttctctctaacttcgagtcattgacaaatgactccgttgagtagaggatccacatctcagtgacccatattagagaggatccacatctcagtgacccatattagagggaagtaagtcaaaggatctcgatccgatcacagcacatctgaatataacacaatcgcagcagtaagtaggttacatttacagatgctcaagctcaatgttctcaacggcgtttggtgtcagactgtcagtaatcttggtatgcatttctacatccatttggcgtcagcaatacatttctagctcctcactcctcagcatgtaggtgagatcattaaactactgatccaaccctgcaattcaaaacatatccaaggttggtaatgcatctaaatttacagagacctgctcctgcagaagagaattcagatgtgcgcgtgttagtaacatgtaaaagtgccgtaatttttaaagctttttgtagaacataatgtaacatgacaacaaaacaaacaaggctgttctcaggctaggctagattgtaactaaagcttgagttggcagatcctagccttgcatgagaaccacaaaccagtccttagaccctactttaccttgaaaaaactgaaaatactccttagtgcttcaacttaaaggcattattatgtcttttaacagtacatcgtgtggaaagttaaatgagataacagttatcatggttcagtaaaacttaactctaaatcttgctgggaggcagtccatccgggttcataggcttccagaaacatgagctttgctttgtttggaaggtcatgtggatggacaaatggaacccctggcggccatccgatttcagttctgatgttctcacatggacggtctaacgattttatgtggctttcacagtccctgagactgcaaaatctcagcttgatgcctttcttatccgcaatatcctggacacgctccttgagcaccctctgcgcctctaggcgaagtcttttggaaggagggagtgcctttgtttttctaccttccttctttctcttcatcacaaagttatacgatgctacaccagacaattgaagaagccatcaattcacagtattccaatgaagtcataagctcaaatcacttaggatgggtagaatgaggcatgcatcagcatgtacatgtagaaataacactctaggagacttcaaaaagaggtcaacgacaacgcgtccgtcatagagcatagtaccccattagaatgttccaagagaaatatcaactaatcttgtttcaacatgtcacagtatattattaactagaggcagagaaagacttggcctgaccctcatgttgtgctttcttgtattagaggtgtaagcctgatccgtgcacggatattgcagctaatgaaaatgcacaaaatgatatcaatgacaaataatattatcctataaagaacacacaattattatttcttgttggtcttctttttctctaaactagtttatcttcaccctaagtcagtggggacaaaaaaaaggacttcacaactgtggacatcacattccaccaccccgaacttatttgatgaatcgttatggcaaaaccacatcttgttataatataatgtagatcacgaagaacatattaaaggcaagatgtaccagatatagcaagtactggatgtagataaggaattttacgatggctaacatgaggatgtagcaattggtgccacactgccacttagcagttatttcttctgaatgaaaaaaatgtatcataaatcataaagtattataatgcaccaatgtagagttggcctgaaggtatagcaacttggtatgggactatggggtacataaacagttaccttcctgttcaacatgtggtgatggttcattgttcttgggaaaaagttgatttgctgaatgttctgtctgcatgaaatcattaactagtatggggacctgaaactgagcatcaacaccatggccagcagccctcatctcttcaccactcagccttgcaactgacctaggcatgagcttgaacaccaacgaacaccgcccaaacatacattcctgcaagttgccgacctccgtcttgtgcacagctgggtttacatagccagctgtttcccgataaagcgcaaggccaggatagacaacaatatcaagcggaccaagatccccatcgacaagaatccagcgcccttgcaaatctttgatatacaggcccgacctatccgacttaaccagcgtaagcaaagtcttgtcaatctggttctcctgatccgaaaacatgagcaattgttcatcatcctgagaagcgacgctatgctgctgtgctccttccatcgacggcctcgaatgacaacatgccgaaagaacagaagatgatacctcctggcttctcaagggtatgttgtcaagcaactccgtaaatgtggagctacgcagattcagcgagaagctaatcgcgtccaagacctcccgggaaaccttcccaagcaccgaaaacatatcaggcaacccggacggcggcaattccgccacaccgttcggctctaccggcgtgatgccgggcctgaaatcatacatttccagccacatctgaggatcagcatagtagccagacgtcttgcaccactcccgggcatcacccgagccgccgccaccgccgccgccgccggcctcgccggatccgtaccctcgctggtggaagaagaggcgtgcggagtccagccccgacctcagcagggcgccgtcggccggaggcagctcgacgacggccgccgagtactgcgccagcgactgcatcagggccgacacgcacatcttgtagccgtcggacgggaggccgtcggcggcggcgaggtcgcagaggcgcacgcggccgagggacgcgaggatgttcgcctccgcgtcatccatccggggaggggatggttcttggatcttcttggaattcacctcagggtcaggggcaccatccaatcgccgccgggaaggccaagattcgtagctacgcgagtggaagcgcccctaccaactcgctcgccgggaagatgcctgcggcggcggcttcacggcatgatcaccggcgaaccagctaagatttcaaggcggtacacgacacaccgtacctttcacgggtggtagtagcattcgattctctgcctctggagctgcggattcgtctcccgaggcgagctcgccggagaagaagtggtggtcggggatggagatgggcgtggcggcgccggcgccggcgagggcctcggtcgaactgtagaaggggattctcgtcaatgtaatgtacgaaaccaccgtcgccatcgtccgtccgataggaaaccgacggaccacaacacttcctgtaattcacaccgtgtatagtgtgtattggggctgctttagcagagaaaacagacgatatgcctctctatatattgggttcggataaaataccacttaatacaacacaccggataaaatgctactcaatacgttgcctaccggatgaaatgccactttacctgcccccgccgttgccgcctccggcgaacacgcgggtaggcgtccttgccgtcccgtcgcctcctcctccctctacctcgtcgtcctcgccaccgctcaccctccgccctatccttctcccccgtcatccctgtcggtcggc

SEQ ID NO: 12994 - DNA, 2144 bp, Oryza sativa
actggcaatgctgcttcatcaaaacatcacccaaaggcagcagatatctccaattcaggaactccacatcaccttttacctgttcttggcctttgtgctccaaatgctgatcagatgaactcatataaagggtcagtttgtgggccaagcacaaaggagcaaaaaagagctagtggtgaactagccaacaaaccgctgttgactcctgctgttgatcattctagcgaacaaaaacatgatggccaaccaactccttgtaagcctatgtttcctggttcctccgaggagactttgcgaaggctgaataatatcattccagacagttacttccccttccaacctgtatgtcctcttctttctttggtagcatattatttcatctagttgctttatcgttgttcatgctttttcttcaaaagtgaaaaatataagatagttgtccactttatacttattaggaggaaatggtgcaacctaccctgatattagtttttaaaatattttttatggatgcaaaattgggaaaaaaagaatccattcttgagtacagcatatatgatgttttatctagttaagagcatcattaaagaaaaagaatgacaaggtttttgtgtgcagattcctcctatatccgggaaggggattggtgatcatgtagaaaatcctgtatcgtccattccttcatttcaagggaaactgggtcttcctaattttagtctggaagacagtattccacttaagcatttgaagtcagtaccggatctatttcccaacttgtctttgggcactagcaatgaatatcttcgtaattgtgtcccagaattgccaaatagttcatttctaccaagctttatggcagatattgctggaacttcaaagcagaagaacaagttcatggcagatatgtctggccttcttccaggtttggcaatcaacccagttcaacaaatccattcgtccatgcctgaaaatcataagaaggtcttggacaaattaatgatgcgtgctcagtactcctcaagcaagttcttgaagaatgcctcaaataaattcctgaagaagagtttaaaaccagactattggtcagaagatgaactcgatgctttgtggattggggttcgcaggcatggaagaggaaattgggaggccatgcttagagatccaaagctgaagtttttgagccaccgatctcatgaagagctggcctcaagatggattttggaggagcagaaaattatagaggaaccaatgcctacagccaccagaagctccaactctacatcatttcctggcatatcggatgcaatgatgtctcgggcacttaatggaagtagcttttccaaactgaggatggagccgccaaagttgcagtcccacctaactgacattcagttaggttgcaatgatataccaaccagattttctcatgttgagcccactaattacatgaatttaagtgagggtggtccatcactgacaccgtggcaggatttcaaaaatagatcaggacacagtggagattttcctggcccacttgacaagtgggagaaacctgatatggggttgatcccaccatttatgccgaatccttttatgaaggaaagcattgggtcactgcccataaacagacacagcagtaattccattcagcagaatgaagttggatcaagttctcatgagagcatacttcatggtttttcggacggacaggccaaattattccatgagatgcaacggcgtgtgaagttagggaaattacccattgagatgaatctgaatcacacaaagctgtcagatcctctagctgagaactctggtgattttgaaagttcaaaaccgaacaagctaccgcactggcttcaggaggctgtgcgtgcacctccatccaagccacctgaatgtgagctaccagcaactgtttcagctattgctcagtctgtgtgcctactacttggagagcaaaaaccagcaatacctccattcccgattccaggacctcgtctctctctccccaaggacccaaggagtgctccaaagaagaggagagttcacaaagttcagcaagcttcctccctggtagatcattccaaaactacagttgggcaaggtgaccacaactctactccgtcagcaccactatccat

SEQ ID NO: 12995 - DNA, 545 bp, Oryza sativa
gttcgcgtggccaagatccaccccgtccacccctccttcgtcgagggtcccgtcgccggagaagcccgttcccgtcgtgccgacggtaaagggtttgccatgtcccgcccgccttcggcccagtattcccgcctcctataggcccctctcttcctctctaatctctttcttttcgttctttaggtcgtcccggtcgccgtcggccgcgtgtcgacttccctccgtcgctcctcgtcgccggtcgccgccgtccccttcggtgaggaactccctcccctttcctttactttcccgattcccgtgcgtcgccgccgcccgcgctcgccgtcgcctttggtcgttgccgccgtccgctgccgccgctttcgcgtcgcttttgcgccgtcgcctctgccgccggttgccgtcgccggcaacgcgttcgcgcgcgcgccgtcgccgctagccatggccggccggtcggctttgatgccgagccaagcccggcgggcgcctctatcgccgcccgtccgatcggcccgagggcgatctgggccgtcggtccc

SEQ ID NO: 12996 - DNA, 550 bp, Oryza sativa
gggtaggtgagcatagcggggctcacctaaccacatttattgcggtttgaacgagcgcgtcacgccgcatgtaacgcagtgcagcgcactcgtttatccggtctgtgaccagtcacagaccgatcagatcgtgggttaggtggcgacaggcggtctgacgtacgcctcgccccatcccgtcaggatgagagcctccaagcactcatccctagccggagccggcgtgttagctcctggagatggcacgttggtcccggtcagatatataccaggcttcatcctaaccattacaagcaagacattgtatgaagaggggcgaacatgcagattgataaactgacgcgtggtggacaagaatgaccgatttgtgaccggtctgacattggtcatgtcgtcagcagacagccatgttcccacgtcgcgcctgcttccggcggaagtggaggtaggtatgggccgtcccatcagaaggtcattcagacggcaaccatacaagtctccgtctgtttatgaaaatataggataagtccccacaaaaaagagagagatg

SEQ ID NO: 12997 - DNA, 619 bp, Oryza sativa
ctcgctcccgctcggtgagcgcgtcctcgcggttgcggtgcgcggactcctcttcggcgcaggcggcctcgtgcgcagtcagcgttgcctcccggatggcaacggcggcctcgcgatccgccaggtccctctccacggcgcaggcacgctcttccagcgccatggcacgggcctcaagggcttcttcgcgccgccgggatgccacctcggtctccgctgcccgccgttctcgggcagcggcagcgtcaaggaccccccgggcggcgtcgagcttcttccctagctccgcctcccagctcccgtattgaaggcggagggtgtcctgcgcctcgttcatcacggtggtggcgatgagggcagccccccgctcctcctccacctccttggcgatctcccccagcaccttccgacgggtttcgagctctgagacgtgccggcggtgtgccttgcggcccacctccaccatggcctccaccgagcgtcgcccctcttcgacacgcgcccatgcggcgtcgagctccgaacgctctgcatgcagggcctccacctgggcacttaacccgtccaacaccgtggtgtttgcgacggccaaggcctgcagaagggtaccgagctcgaa

SEQ ID NO: 12998 - DNA, 552 bp, Oryza sativa
cgcttcaaatgcttatgtgctcctctgcttatagaataccttctctcatcctgcataaaacattgtagttagctcaacatgatgtagtcttggaattttggtatggcaggaggcaagtacggcaccctgctgtattcttctagccatctctcttcatcacatgaagccatccatttttcaaccttgtccattatttctttacgacttgttgcctcctcttttactttgtatatatattcatccattgtctttagtagatcatcatggtccacatcccctgttcatatttttcgcaagtactgttattagtcaatgttgtagaaagttctttgtactttaagattataatgaaatctaattggcatcacacacctgacattatcacatccattattttgttcatctctgtctggtaaggcatatccatgtgtgacttcttgcaaatttcctttatctcggtttgctttatcatgaagagctctttcattttgcttgcctttagatggtctagtcgctgaacttcagattcgatctgtttcatgcaatagtgga

SEQ ID NO: 12999 - DNA, 845 bp, Oryza sativa
ttgaatgtgcaaaggagcagcgacttctgaagttgatccacgttctgtatcagtactggtcgaagttgtaatctctagaggtccatctcgatcagcatcaacagtacccgaacccaacgaccctggccggtctgaccacacgtcctgcgccggtctgaccggaggtgtgccggcggtctgaccggcctggcgcccggtctgaccggccgacccgacctcatcgtcgtcgttgtcatcgctctcgtctacaaaaatacgaccattctccacctgaacctgtgacagtgtacctgcaatatcgagtctagtacctggactagcctcatcaaaagaaacttcgcaagtctcaacgattttgttagtctccaaaataagtacacgatagccatgagtatgtgcggggtaaccaagaagcaatccatcggtagaacgtcccacaaacttatccaaatttccagatttcaagacaaagcacttgcaaccaaaaacatgcaaatgtgaaactttgggttgatgtccaaatcgaagttcataagaagtttttccaagtttagatctcaagaaaacccgatttgaaatataacaagcagtgttaatagcctcagcccaaaattttctaggagttttatattcattcaatatcgttctagccatctcaaccaaaacacgatttttcctttcaacaacaccgttttgttgaggaacatgaggagaagaaaattcatgttcaagacctctttcgttgtaaaattgttcaaaagaagcatttttaaattcaccaccattatcacttcgaattcttttcaaagaaccaggaaattcaagctccaatcgaagaaacaaac

SEQ ID NO: 13000 - DNA, 713 bp, Oryza sativa
caaagttaaggcaaagagaggaggtgtggggtagagaaggatgagaatgagagaggatgcgcgtcggcgccggtgctcaccggaggcggaagcagcaggaacaccgcaccgccgctcgcgggatggatggagatcggccgcaggcgacggggcgaactcctcgaggagacgggagtcgaggccgaggcgacgccgggacggggagatggactcggggtcagaggcgagagtatgcgatggaagcagcagggcgcccggcgacggagaccggcgcgacgacggcgcaggcggcgagccaaggagatgacgcgggccgcggcggcgtcgtcgggtagcggaggccgcgacgcacgcagcctcagcgtccgcggagtcggtggataaatggaccgagcccagccgtgctgtcccgggcacgatggcgcgtgggccgtgccgtgcctggaccggcccgcggtacggcacggcctgctcggcacaccggcccacgtgccaccatcgtgcccgttccggcacggcacgggacggctcgataaagcagccgtgactaacgggccgccgtgctgtgcaggtgcggcccagtttaccactaaaacgcgggatgtataggtatgggaaaaagtacaccgacggtccctcaacttgtcatcgagttacaaaattgtcccccaaccataaaaccagatatccaacgtccctcaacttataaaacc

SEQ ID NO: 13001 - DNA, 2630 bp, Oryza sativa
ttttaccacgtcgcatataattctttttttttactccgacagatttgttttttaatattttggctctttttttactgcgtccacgcagattgttttttttggccggacttttttttcacctggttttttttggcgcccgttttttaggaatcagacagattccttttttatttcttcgcgcccttttttaccgtggaatcggatttgttttccttttctttttctcgcccgttttttgatcagacagatttgatttttcttttcttttttcgcccggtttttcgcccgttttgttttggatcggacaaatttttttcgcctggttttttttgtcggcaaaaaaaaagtggtgcaaaaaacactagatccaattcctttaaaacagaaaaaaagagaaaaaaaatgtgattcctttaaaggcgaaaaatgtgacgacaaaaatggttcctaaaaaataagaagttggttcgtataaaataaaaaatgcacgcgagaaaaaaatggaaagtgcgaaacatagtggtgcgatttctaattactatatatctcttctctatctctaatctaatctaactatttaaaaatagaaaatgcacgagaaaataaaaaccgttcaataaaacgtgtgagaaaaaagtcagaaaaagcgcaaaaaaacgctaaaaaatgttttccatcttccataaaacaaataaaaaaatgcgcgagaaaaaaacggtcagaaaaaacgtgccatttctaaaaaatggtttgaaaaaaccgtgcaaaaaaaacaccgtctattaaaaaacaaatcgctttgaaaaaactgtcagagaaaatactaaattgatggatgcttgactcggataggatccatcgattttttgccatctactatacggcttttatttcgtcatatattctcctgtattgaaaaaaaagcaaaaaaggacatttgaaaaaacaagcaaaaaaaaagcgcgagaaaataattgtttgaaaaaacaggcaaaaaacacaaaaaaataaaagaaaaaaagggagaaaaaatatggtttttgtcgtcagtaaaaaatgcaaaaaaaaacatgctatgaaaaaaatatttgaaagaaatacgccatttctaaaaaaatggtttgagaaaatcacgcaagaaaaaaaacaccgtttataaaaaaacaaaccactcattaaaatacaaacattgtcattaacatgattatacatgaaaaacatatattatcattagaatcttttcacccattacaacgcacggatataatataaatataaaagcaagaagaggaaataataataaagggagcactgtatgaggtagctagtagcttggtgcggtgccgagcgcgtagctcttgagaaggtcaccgcagatggggagtgggcgggtctggaggctacattacctggatacttcccaaaagctacgtatccgtatctgatacgtggaaggatacggatacgtatcggatacgtatcccatgtgtatcggcgatattggtgattttcagaaaaatcaaaaaaaaaatctggatactcccccgatacgttgagataccttctggatacgatcgagagaactaaacatcgctttatcctgcaactccacgccgttcgtcgcttccgtggttctcgcatatggcccgacaccccacgcggctcgcgactcctagcgccgctgccgctgacggacgccaatcgcagagttgtgcgccgtcgccatatgcgggcgtaacaccggatgctgaatgcagtgctgccgccgccaggcatagcaccgccgtccgccgccggcgccatctccaaccaggcaaccacttacttcagcagtgaggcaagcaagttccatcggtcgattcagttgttggcctctcccatgcagctatgctagtgttagcaatgattttctttttcttttttaacttcttgtccctctttctattttcttggtacaaagtgctacttttagatcggatgaaatttcggattggaatatcaagtgctaatgcatctaacactctcgacgtgtatgttcattacactcttggaataaacctgttggcaagttattggcaagttggcagtcttcagtctgcatcatcattctcggggttaaatcgcttcaccaaccttagtcaattacaattattagaaaatatttccatgacattatacgagcttatttccatgcaagagttcataaatttatatattaaatttttatattgttaatatatatatagacgtatccccgtatccttagtttttcacaaatgccacatcttcgtatccacgtatcgcgtatccgtatcagcgtatctagctaacatagtctggaggaagccgagaggattggcgcggcggaccatggtggcgaggccgacgtcctgaacgagggtgaccggcgcgcggtcgcgacccacctccatctcgtggcattcggtcaccgggctgctgagcagcgccaccgcgcacaccaactcggcaccgcggttgtccacctccaccagctccatgcggtagtgccccgtcgcgtccgttgtcccctccgccgatctctccaccgacccgctcgcgctcatgtagtgccggcactccagccgcacccgcgcggcctggatcgccgt

SEQ ID NO: 13002 - DNA, 18424 bp, Oryza sativa
ctatagttgtgattaaaagattatggccagcttgtttgcaaccaattttatgattataattagggtttttccgttgttttaagttacttggtacttttctaatgctaagaatagacgtgcaagtatcaacataaattattttctattgcatcggttacatatcttcagcttataaagccatagcttaaaaagatagcttccattcagccttgcatcaacatcgaaaagacataatctctctctcccagaatataagaagttttagggttggacacggttattaagaaagtaggtagaaatgggtggtgaagggttatgattggatgagtagtggaagtaggtgggaaaagtgaatggtggagggttataattggttgggaagagaatgatggtggagaagttgttatattttgggacaaatcctgggaagtagtaaaatactttgtggcatgtgtttactgggtactccctccatctcaaaaaaaaaactcaacctaagcggcgatgtgacaacaatttagataagtggcgatgtgataacgaatttgtttagattcgttatattgggagctcttataggttgagtctttttagagggaggaaatacattattgctgatcggtgaaactcttgtggattcgacaaactaaaggaaacaatccccaaaattgtggtagccttgcaccttcttgcaccttattgcgtcctaggctcctactcctacactaccactctactacttgtactagagaaatggaattggtataacagaagcaggggcagtacagggtgcaggtaagccaatttattgaagcagatgctacctacctcttgttggatttggcccaaggtgcatggagggagggtagtagctcagcagcatctcatctcattcattgacacacctttattattacaccaccattgctgctgctgctgcctgctgcctgctgcatctcttctcttccctttccttctcttggcttcccttcccttcctaggaatgccccatgagtacaccaggtctacatccacagctccatacacctgtgtgacaatagacaatagttaagttgctgaaatttcaaaaagtaatataattctagcaatgtttcacttcaaaaaaaatatataattctagcaatgtgacatcttgcaaacaccaaattaatagcatagaaaagaacaacattttgcctaccgtttggcctccgactgttagatccatggtgtgacactctgcgactgttgaacaattgcacttagattgatacaagggacccggccacccgcaattcagagacattagccaaggaggcaataacacagcctatttagtgcaagtactggcaccaactacatgttactatcttcattttgcaatgttgttccatagactaaaaatatatacaagaaaaaataatgagaaaagacaatgtataccacctacagaaacatactccgtataatataatcgccaacctcttacaaagcatttggttacgggtaaagagcaaaataaattgcaacaataatatattggcattggtcttctcagtagacaaatattgagatggataatccaataccataaacaacaaatattgtgaaacaggagagcagtaacatctgatgttgtagtgcatgaggaccgggtccatgcacagttccatggagggaaaagagggtgccattactgatgaggaggtcctgcctcctactagtactcaactgtggtggcctggtgtttgtagggggctggctggtctggtgactcgcgaattaatccaggtcacagaatgggttttattaatagtctacgtctaatatttataattattatccaaacatccgatgtgatagggactaaaaagttttagtcccatttaaacagagttaattaggcttaaaaaatttgtcacgcaaattaactcttatttatgtaattagttttataagtagtctatgtttaatactctaaattcatccgatatgatgcaaattagcactggaattggattggattggatggtgtaggaggaggagagcatgagtggttgttgatgggtgcatttaagacttcctggccttgacaaagataccagatctctgtactatggggactggccactcagctgcctgcacccaacaaggaggagaaaactaacctaacctctgggagttatttccaccaatcaattccctagctacccacttttccatgctccacatgcaaagccgaaggccaggagcctcagggcacccgtaatagtaaagtaaggtgttttttataaaatatgtatatctcagcaatagactagattaatagtaaaccaactcaatagtatgtctgcatgggtatctatagttctctaatccattgcctcgtttttctctatagactatctctaagttagtagatagctttgctctctctctctcttcatttaatctattccaaatagtaaaatatgctgacatggatctcttgtagagagcctatagataatcattacgggtgccctcacctcctctccaatctccatcaatttgccttgcctcctcttcttctcatcagtagatctgcatcatgttttggagcatttcttatctgcaccacaaatgaagaaacatggctgaatgtgacacatatatagtatagggtgacgtgtttacatcaacgcataagcagttttcatgctaaatagctaaatccttgcatgccagagcaaatgacagaaactctgaaagcacctgctatgaaaacaatctttcaggattgttattgtctcaattgatcgctttggataccatgcttgtagtactagttctctttttgatggagcagataagcacttttaactgtagtagatctggtggtattatctttggactcatgcaacagaaagaatgcaaagagtgaggtttcatggcaccaaaaggggggcagctgactggaccggagtaccacgaaaaatattctttagcactgtaatcaatgtcaccaccaaaccccgaatgagtttacaattcttaaggatacatcgttggagattaaaccattaaaatatttcttttgtttgaacatgaacagctgagcttactctactaggattacctgtattttgtcctctcaagactcaagactccaggatgtcctcatggaaatggaaacagtccaaccttcctctatattcgggttttttttttaaaaaaaaggaaccttcctctttagaattcaaatattgcagcaagactagttcgaacagtcctgccaccatcatgaccatttcactatacaaacttaaccaaacaacaaacaaaatagccataaaattgacgtaatacactcgtgatgatactgttgtcgcaacagctggatgtgtgaattccgatgcagcaagcatgagtacatggaatactcggcctaccctaaccttacaacatgtacaccaaccaagaataaagtaacgggttaaacaagtgcacaacttcctccatatcaagagggaggggaattaggagcgggaaggaaggagggggtagctcaccaaattgatcagattctcccctttcttgcttcaccctttccctttctttgctttctttcttgcacaatcacacacacaaagacatgctgctgggttttctagaatctcagaaaggagggggagctagcgtggggtgctagaaaaatgtcggtgggtgagcctgaaaaaaagaggaaagattacgggattgtagtagtagaaattaaaaataagatgagaagcaacgtagtctgagtcagagtgagggaataaacactttctatacccattaagcatcgccatgtgctgctgatgtgtgccccaaaaaatctactaacgtggaagtgggtgttgagccattgaagtttgtttccaactcagactttttcttccatcaagcaacagcaatcccttggaccaattgaaaaccttgggctagctcgtgtcccctcctgtccaatagaaggcatgcatgatagaatcaggtttaactcattgaataacaaaggaacgaaaacatagtacatgttgtatattatataaagtacatatagacgaacaacacactaaaaataaacaatactgatcgatttatgtgaacggcatgcatgcatcatcatcgtcctactagcaaaactaacaaataccttattcatatatcaatacacaattatacaacaccgtagatgctgtaataaaaaactttttttttgctgttaccacatacgtatttcagaaagatgtaccatcaaggacacccaccaaatcggaggcgaagaaaaacccctacctatgcgcgcccaactcacgcatctggtacactcaccgggtacaaccaacaatcccatttccaaaaacaaatcgaactgaaaaaaaaataaaagatgaaacaataaacaaaaccagacacagaaaaaaggaaagggaataggacgaggagcactgggagtgaagtatacctacctaccaaatccagccccgtgggggggagggcctttgcaaatggcagccactcaaccaacctccgctcctcctctcgtctcatcgcaccaactcggtcaaatggcccagagggatccgggtcaatggggccctcccctcctctccctctccctcgtataaaaccaaccaaccaccaccctcctctctctccttgctcacgaaaaagctcccacaaagcatcacctgcaaccagcccccgctcatctccatcttcctcctccctccctcgctcctgtgcttcttctcttcatcaacaagagagctttccctcgatctgtgtgtgtatatatatagagagagagggactgatctgggtgtagcgagctaggtagcctagctagcatggggaggtccccatgctgcgagaaggcgcacacgaacaagggagcctggacgaaggaggaggaccagcggctcatcgcctacatcaaggccaacggcgagggatgctggaggtcgctccccaaggccgcaggtatatacaacgtcgtacaaaatcatgctactccggccatggcgtgcatggcggcggcgatcatggtcagaggtcgacggtgactgactgagtgttacctgtgtgtagggttgctgcggtgcgggaaaagctgccggctgcgatggatcaactacctgagaccggacctcaagcgaggtaatttcaccgaggaggaggacgagttcatcatcaagctccatgagcttctaggcaacaagtaagcctccatgccggccatcctgcaaagaagataaatattgtattagctatataagagatagaatcatgatccgatcatgacaacatggcgatggatgaatcgacaagcatattactgatcactgatcgatcgatgtgtgtataataacatatatctatatggtgtatatgcaggtggtcactgatcgccgggaggctgccggggaggacggacaacgagatcaagaactactggaacacgcacatcaagcgcaagctcctcgcccgcggcgtcgacccgcagacgcaccgcccgctcaatgccgccgccgaccaccaccagcagcagcagctccaggcgccacggcggttcgccgccgcgccagccggccaccaccaccaccaccctgaccatttcgccgtcctctccaactcgccggaggcctgcagccacagcagcgacgacgagcccagctccgccacgccgccgccgccgccgcgtcacctcggcatcgacctcaacctttccatcagcctagctccttaccagccgcaggatcagaccagcgagccgatgaagcaggaggaggacgacgaagcgtcagcgacggcgaacggcgccggcaatgcagcgatgacgacgacggcgacgacggcggcggtgtgcctgtgcttgaaccgcctcgggctccacggcggcgaggtgtgcagctgcggacgcggcggcgccccctccatgcaggccagcacacacatgtttagattcatcacgccgctaggaggaagccaccacaacagtagtagcacaacaatgacataattaattaagttgagggaggagatatatatacactacttaattcgcaattaaaacccagccacacatgcttagctctttgtaatattcatcaggaaatgtgatctctttctcttttttttttatttcccctcatttgcagcctcggccagagtgatcatcatgcttcatcgatcatcattcatcagggtgacatggttcatgagttagttttagttgttatttctttcttgtcttcctctagtttcttttaacccatatagatagttttttttagggcaagacatgggttgttgatgatctaccattagatctaaacatgcccttttggagacctcataagaatgcatcactcaacacatagctttccaaacactttatttccctcatgcatgctagtagcccttttgcaacttgtttttatgtctccttttatatggagatgctcttgattggccaaagatgagggaggtaaggagtgagtggtacatactgatgaaagtgaaggagggtgcatgctgtggttgtggtgctgctggtggttatgggaagttaggtttcttgatgaatgtttgcaatcacatgagcagccagtgagaaaaggaggcacagtttttaaagaaaaaaaataaagaaaaggtttgtcttgtagatagagaggagggagatcagggggccaggggggagagaatggagagcatgtgagatgctctctcttttttgggggggttaggttggtaggttggtagaagggatgggagaggtgttaatgaaggggataaagtgccatctaggagggggcatggattgaggagcttttggttagttaatgacttaatagtcggagcttggctcgtggtttgtccttagtccttgggtggatgctggtaacaggtggaggtaattagtattttaatcatggatcagtgctatagttagcacttaactaagctagcttcaggcttttctgaagaggagtgggggcccaggaaggatgatcttcagagttaagaggattaagcacaagcagaatgtcagtggtctccctcactgatcactctagtctcatcctacctatgtacactggtggagaaaccatctttcgtcggtcggccgatttccacaatagtcccggatgcaataaaaaccggggctaaagatgatctttagtcccggttcaaaagggtaacgggcatatttgatctttagtcccggtttgtgttaccaaccgggactaaagatcatctttagtcccggttcaaatgctgtcaggacctgtcaggcccccccgggatctttagtcccggttggtagcaccaaccgggactaaagatcttaactttagtcccggttggactaaagatcccggtgatctttagccccggttggtgctaccaaccgagactaaagatcttaactttagtcccggttggtaataccaaccgggactaatgatcccggtgatctttagccccggttggtgctaccaaccgggactaaagtcccacccctatatatatgtcttcttcctcctccagctgcccgagcaagcttcaaaatttcttcaaaaaagaggggaggtcatgccaaaatttctattgaatttattttggtgattacatacaaatcggaggtgcctaaaaggtttgcaacttcatcctccaatgttttttttgtcatactacatttgcacctatgttttgcacactttttttgtctccaaaatttagttgtaagttgatgagagagaaaatgtgtgtggggaagaaagaatatatagaaatttagttcatttgctaaacaaggttttataaaatagttgagaaggaaaactctagtgaaagttaatattaaataatagaaaacaaactaaaataaaaattaaaagaagtaaaacacattaaaattagtttaaaactttacaaatagtttttaagaattatttggtgtaatattttatgatttttgtatgaataaagatatcttataattattgtatgactgtcattattgtaagaataattatttgtgtgcggtttttttgactcatgtagatggatcggcaatggatgtacgctgaccggcggtccaaagagtttattgacggcgtgcactattttttgagagtggccgaagctaacaggcaaaggggttttatttgttgtccatgcaataagtgtaagaatcagaaggagtattctgcatccaggactattcatttccacttgtttgagtcggggttcatgccaagctataattgttggacatcccacggagagcaaggtgttgaaatggaagaagatgaagtggaagacgacaatattccggactttgctcagtatgttggatttgaaggaaatcaaacgggcgaggaggaaatagctgctgatggtaacgacgttgcggatgatcttggtcagatgttgcaggacgccagggaagactgcgaaagtgaaaaggaggcccataaattggacaagatgttggaggaccacagaaattcgttgtacccaggttgcgagcaggggcacaaaaagttggataccactctggagttgttgcaatggaaggcaaaaaatggggttagtgacaaggcatttggcgatttattgaaactcgtcaagaacattcttccggggggaaacaaattgcccgagacaacgtacgaggctaagaagatagtctgcccgttaggactggaagttcataagattcacgcatgtccgaacgattgtatcctatatcgcggtgaggagtatgagaacctagaagcatgccctgtttgcaaagcactacgatacaagattagacgggacgatccaggagaagttaacgggcagctaacaaagaagagaattcctgctaaggtgatgtggtatttccctataataccacggctaaggcgtttgttcaggaacaaggggaatgctagaatgttgcgatggcacgctgaagagcgtcaacaggacgggatgctgagacaccccgccgatggttcgcagtggcgaaacatcgacagaaaatttaaagaatttggaaaggacgcacgaaacatacggtttggtttgagtacggatggcatgaatccttttgagagatgagcagtggccatagcacttggcccgttacgatgtgtatctacaacctccccccctggctatgcatgaagaggaagtatataatgatgccgattattattcaaggccccaagcaacctggtaacgacatcgacgtgtacctaagaccactggtcgaagatcttaaacagttgtggaagaaggaaggtgtccccgtgtgggacgaggacaaacaggaggagtttaacctacgagcgctgctgttcgtaaccatcaacaattggcctgcacttagcaacctatccggacagtccaacaaggggtacaaggcttgcactcactgtatggatgaaacagaaagtacgtatcttaagcactgtaggaaggttgtatacatgggtcatcgtcgattccttgcagcaaaccacccggtacggaagaaaggcaagcacttcgaacataaggccgaccaccgtacgaagcctaaacatcgcagcgggaaaacagtgtttgctatggttaaagatcttaaagtagtgttcggaaaggggcctggaagccagcatatagagagcgaagatggtcacgcggcgatgtggaaaaagaactctatattttgggagttaccatattgggaattcttggacgtacgccatgcaatcgacgtgatgcacctcactaagaacctttgcgtaaaccttcttggcttcctaggtgtatacggaaagtcgaaagatacactggaagcacgtaatgatctgaagcatatggaacaacgcggcgaccttcacccggaaccaaaggagaaaggaagccattacttgagtccagccagctacactcttagcaaggcagagaaggaaagtatgtttgaatgcttggagagcataaaggtaccgtctggatactccacgaatatcaagcgaataataagcacgaaggagaagaagttcacaaacctaaagtctcatgactgtcacgtgttgatgacacaactgctaccagttgtaataaggggtatccttccagacaatgtccgggcaacaataacaaagctatgtgcattcatgaacgcaatttcgcagaaggtcatcgatccggatagattagaagcccttcagaatgaagtggtgcaatgtctcgtcagttttgagttgatatttccaccttcatttttcaatataatgacgcatctgctttgtcaccttgtgaaagagatccgtattctcgggcctatgtacctacacaacatgtttcctttcgagaggtacatgggcgttctgaagaagtatgttcgtaaccgtgctcgtccagaggcaagcatcgccaagggttatggaacagaggaggtcatcgaattttgcgtagaatttatcgaagaccttcgcccaatcggggtacctgaatcacgccatgaagggagactacggggaaagggaactctcggaaggaaagcaataatgacggtagacaacaatttattccgtaaagcccatttcactgttctgcaacactcttcattggtagctccttacatcgaggagcacttggctctagttcgcgccaggaacatcggtaagtccgatgcatggattacacggcatcacattgatactttccccgcgtggctacgacaacatctcatgggtaacgagtcgatcaaccaacaacttgccttcctggcgaggggaccgtctgggtctatcgcgacattccagggatatgagatcaatgggtacacattctacacgagagcccaagacatgaagagcacgaaccaaaacagcgctgttcgtgtcgatgccatgggacacgatggaacaactgccacgtattacggtgccatcgaggacatatgggaacttgactatggtcctctcaaggttcctctgttccggtgccaatgggttaggttgactggtggaggcgtaatgattgatgacagtgggatgacaactgttgaccttaacaaggttggatactcggacgaaccttttgtccttgccaatgatgtaacgcaagtctttttcgtgaaggacatgtctagcaaaggaaagaagggcagagggcctgatgagcctaagcgtcaagtggttctcccaggcaaaagaaaaatcgtcggagttgaggacaagactgacgaggattacgatcagttggatgggcaaccccctttcacggtgacgattgaccctagcatcctcctatcaaatgaagacaccccttactcacgcagcgatcacaaggagggaacaatagtgaggagaaagtacgtgcggtcaaccgtcaccgccgatgtaatgccgtaattattgtgtacacgatgtaaactattttggatgtattgattatccatataaatcaattgatgtatggcatatgttaattacgcacgattattagaggtttcaacaagtttaaatcaattgatgcaggcaagtgacgtaataatataaatgattgttatatttgtaatgcaattaattaagattattagacctgtaattagacttatcatataagattgtgtagtgttctaatattatttgagttttaatataagattattttattgcaaattagacttagtatgacattattgactacggaattggtgcgactcctaggaattgactattgtagtcttaattagacttagcatatacgcacgaaatacttagcatacattactattttagtcttagcatgtaatattatttgagttttaatataatattactttatttgtaattagacttggtatgtaattattgactacggaattggtgcgacaagtagcaattgactattgtagtcttaattagacttagcatatacgcacgaaacacttagcatatacatgactattttagtattagcatgtaatattatttgagttttaatataagattattttatttgtaattagacttagtatataattatttactagctagggttgtataatatacgtcacctagacttagcttatatcacgatttgtaattagacttagcacgtaaggttgtgtagggttctaatgtacgacatttacacttagcatacatgacttagattgttaaaacataaatgtctcgtgacttagcagatgtttcttgtatcaacagatggctgaccgcgatgaggaacagatattgtacgatacaatcgcggagggaagcagccagtactggaatgaagaagaggggaacgaggatccaaaccagtacttgaacgaggaagggaacgtggagagggatgcggaggggaaccagcaggggcacgtggaaagggatgtggaggggaaccaggaggaggaggctagtggtagtcaaccctccgttggacagaagagggcacgcgggcaacgaggtgcagcgaagaagcttgagggtcggcacatcataacggaagtggaagaagatggacgtcctagtgccccggccgaagccgccaagaactatgtacgtcacagcggttgggttgtgcgggataacgtgcctgtcagtacggtgtactggcgaagaacaagggcacgcggagatcatgagagctttgtccaagattcggagaaagagatgctgtggaccacaatgctcgagacattcacccttcctgcgggtacagaggacaaagtgaaaaggtggactctgaagaaaatggcagaacagtttcagagcttcaagggagatctgtaccagaagtatatactgaaggggcagacaccgaactttgacacattcccaaagctaagggatcactgggacgagttcgttgcatataagacaggtgaacaagggaaggcgatgatggaaagaaacaaagaaaatgccgccaagaagaagtaccatcaccacttggggtcaggaggctatagcgtcgcgatgccgaagtgggagcagatggaggctagcttgattgagaggggtatcgaaccggcaacagccaattggccggaacgatcgaagttctggtactatgctcacggtggaacgctcaacccagctgatggctcactggtcttcggctatcagatacaagaggctgtgcgacgactaacagatgcagtggaagcctcctctcagggcacgttccgaccagacagagatagggacgagctgacactcgccctgcagactccagagcatccaggacgaactcgagggaaaggggtgattccttggaagattggtttcaaggaggacatccacacgtacaggagtcggatcaggagcaagagagataccgaggcgaagattgcagacctagagttccgggtatcgagctacgaactcaacatgcaagaggaggtggcaaggaaggttgatgaacgcatggccgcacatcggtcccatgatccccagccgaccattcctcctgcaatggtgagcccgtcaggaaaccgtagcagctgcgcctcaacggggcaggtaggatcacagagcatggacgccatgcaaacacaggacgaatcgacctgtcccgttgatgacatcactcagcggacaccatgtgagctgcatattcctttcaagaacttatcaataaaggtaagatttagccattccgctagttgctgcttatatatgttgattactaataaataatctctcacaacatgaaggtggcgtcgggcatggccatcccaacggacccttcaggtacttaccactgcaggccgattccagcaggatactccaaggtcgaagttgagttggtcgaaggcgcgtacgaggacctcgagctggattaccctggaggagacggtgagacgcatctacgagacacatgccatgccattattctatggcgcaggcggtacatcatcctccctgggcgacaagcggcgtctcgtgcaccatctcctccggctccgccatctcctcctcaggatcctgcaccgtctcctcctcatgctccgccagcaccgtctccacctcaggctccagcatcgactcctcaggatcctgcaccgactcctcctcgtgctcctacacctactcccccgcaagctcctgttccggcaccttcaaagtcaagggcccccccagctccaccgcttgcccacacaagggcaacaaagaaggcgaaagttgacgccgccaagaacaaggacccggggtacgattgcacgcaagaggagcttgacgcttacgttgcatcagaagtcaagagacaattcaagcctcgaagtccagaaaagaagattcctatagaccccagtgtcaggaacttcttcaggggtatgtctgcatctgtcaaggaggccatcaagctatcggactatgagcaaacgctgaagaaagcatcttctggaaagtccaaaccagtccctcagcttggagagcaaccaaaccaggagatcgagccgttggtgaccggtaaagaaatgacgatagaacaatttattactgacaccggtctaactacggatcaattgctaggagtcgcaccaatcgaaaaggcggaagtgaaatacatgtacgaactcggtaaaccgcttgtcaagcctgagctgctgcagtccctacccacacaaatgtacaagttccatcagctgtacatggagatgagcgccaccggtagagagatgatcggagcgaggatcagggacacggacttcttgcaaggagatgacattctctggatcaatttcaggggaatctacgaactataccagctggacgccctcgacgtctctattatgagttgctggattttgtaagtatatcgttcagttagatttcttactatacgtctcctttaattaattaggtccttgtatataagtagaccatagaaaataatatactcccttttatcgttgtagaatggagattcaaagggcccgacggcggagggttttcgatactggattcatcgaccctcggaaagtaaacgtcgcaatgctcgaccaatatccacaagaaacagaggacaatctcgtccatctcctgaaggcgcagcattacaagacgttcatactgttgccatacaacacagagttagtttaattttactgtcttcctacataccaaatttcattcccgtacgaacttgctaagtgtttcatatgtaatgcatcccacgcacattgcagattccactgggtgcttttactcatcgacctggaggcctgcaccgtcaacgtatatgactcaatggataaaaaagagtctacgtttgacaaggttttcgaacttatagacaggtaccgtcataagttcctttgttaattaagaaaatcttgttatgttaattgctactacgaatcatagctttaaactccatgtagagcttggtatcggttccgtcatttggtccgcggcaaatggagagaaagacttaggcggaagttcaaatttcctgtgagtacacatgctctacatttatatttctccgattcaaatacatacaagtgtatattaattagatctctcgttgtttgtcatttatttgtagtgcgcaaagcaaaagcagggaactaacttgtgcggctattacgtgtgcgagtattgccactgccttgcagaccaaatcatcaccacaagagagctcgatgtacgtacaaataaattcaaaatttcattacgtagcgatttcttgtttaattactaatcaatttcatacattcatatagtttattcgcatgagggataacctgaccacacacaaggaatttatcgcggcggttcaagaacaactcatgggattcatcaacgaagaaatccttgatcccaagggtgaattctactacgacggaaacacaattcaccggtccttagcttctgagctagcagcgagtactactacgtcgaaatcgtagctagctaggacatataatggattgtaattaatacatgactacatatgtttctatatgcatgtgtacacattttctataatgtaaatatattttgttcatatatatatctatatacatatgcatttgcataacatatatatgtataaatacatatatatatatgtatgcatatatatgtattgaaacatatatatgcatggtttatatatatatatatatatataaaccatgcagcaacagaggcatgcaaaaaaaaaaaggtcagctctatctttagtcccgggtgaaataaccgggagtaaagatagcgatctttagtcccggattggtactcccggtttggaaaccgggactaaaggggggttacgaaccgggactacaaagggtttctccaccagtggtatcttccatattgctagatttgacgcttgcatattcctccatgggcgcataattccttgagcaacttttgttttagctatattcaggagcaatctgaaactatacatgggagcatgcatacgttttaacctagaatataacaaagcccagtccttaatattgtccaacagtcagctgtataaaccagaggcaatagctaggtaggatgtgctttctacactttgacaacaatcaggtaccacagggagaagctcaaagttgacaaagatggtcatgatatagggtgtgtttagtttctgaaaaaaattgaaagtttgaagaaagttggaagtttatgtgtgtaggaaagtttttgatgtaaaatgatgtgatggaaagttgggaatagagggaaactaaacacggccatagaagagaactagaaaccatttcaacacatatagttgatatatgtgtccgccaaagtaaatacgcactgattgatacatagaagatgtaaccaccggaggaatgttcatttagaactatgttcagaaatttcatactttttttccggtttcgcgagaaaaatgctatgaaacaagctaaaacaactgttctacaggtgctacttcttaaccaccgtatagcagctttctcaaaatattttttaacacaagattgtcggttaattttcatttatgaaaagggtttgctgcataagcgtagtgtaaaagagtgcctcgttttgttggagagcaaggcataatattggtagtccttttataaaaggagttgaaatgtgatagtgcatcgttctaatcaatcatgataaaatcgtaatagtaaagattttattcttaagccccatattttggggcaaaaggtagattaacgttattcctaaattgcatatgctatctaaaagtaacaatgcatggaattgccaagatccaatatttttcctttatatattccgtaatgcttcacttaaaacaaaagcaaagcacctaataaaatgctgttagttattcatttgtttccatatgtcatgatgtcctagccatatttaataggattcatcctttttccctagttttggtttgcattcaaaatgtgtgatgaaaatatgagcagctacaaactttatataccataatatagaatctacctgttgtaaagactagtcagatatcagaaggctgtacttcagatcttcgattgtgttcactattagtaacaactcgcactaacccagatcattagctagatctaataaaagtcggatatacactagtatataatactaagctgaggttgttagatagcctacctcatttgtttccaggtgtagtgtaagcctctctatgcagacgtaagatgatagaggaactgagctgaaaaagaaaagtcaatataaaaacaataagtcgtcatctcgaactaaatagaaattatgtagaagtcagtatcaacggcaaacacatctcatcagatctttgcaaagcatgcatgtgacacctgcacttataggaaaggaccaacacctcaccctacgctgtagttccttaggtaaaaaatgtttatactcgagatctcaacaatttttgccctggaaatttaatcacgtgaggtagaaaatattcccaagatcctatcaatcggatctaagatgtctatagaaaactaatataaaatagggatgcttaatcgactagttcttgctgcaacacagatttgctttttttttctcgtaaacaaaaagaaaatataaagacatgctcatttcaaagaactgccaaagctaaacgtttgcttaaccaaagaacgtcagtggaaagagtaggtttgtcttgtttagtctaagcgtgtgcgcttatggcccacaagagctggcccaacagcaacctgcggcaataataattaagaaatctaattgtcaaaaaagggatcacctatacatttatcgacaaattttctactaaaaatttgacagatgtaattatagtacaattgtagtgtaattacactgtaacttatatataattacactgtaacttctatgtaactacagtttaacttgtatgtaagttcacg

SEQ ID NO: 13003 - DNA, 1981 bp, Oryza sativa
aacgacgcccaaagcatcgccattgtctgccacaagactgggctagacttttgccttccacccaccccggttgttctacagctactgctcaaagccccgataccaagtagcgactatcaacgtgtagacaccgctgtaccaacgtccccctcccccgttagccagcccctacatgccttcatgtgccaatgctgcaactataactgtatcacgctatcatcgttgcaagcctccaccttagggcgtcatcattgccggtcaccatccccgagcatctagacctcagggggcctggaacttccgacattctttgacagcacaccagaaaaacggtcataactctttgctccggagtccgttttcaacaaagttgggctctgcggaaggcttattgagagggttattgtcgacgggggatacccgtaggccggatatagagggtactggggtacgctggtacgaagatttacgtaatacaacatcaagcagacagaaaacaaagattatactggttcaggccccttgataggtaatagccctaatccagttgatatgggattatatgatggaaaccacagattacagagagaaaagcagaactcgatgataccgatgagatcgtaatcgaacaggttcgattagatctcctggcgacttggctcctgtaggcttcaactccgtaggatgtggtggatgtgctgactatgagattcgatgccttaggtcctcccggggggtcccttttatatcgcaggtcaactagtctccaagtaggactcggagacatcggacccggcacgatacaatgacgacccagttctgtccgagtaggactccttccatctgtgaactccatgatgaatttccttaacgtatgctgaaaacgtccttatacgcgcaagtataccatatcgatatgtgacgtatatcgaagggtagagggtataccttacccgtaaccctgacagttatccaacccaaccaagctctgaaccactcataggttagtttaaggctctggtttctctcaaggtaacacttgcatgggtcactttgagtaccgagagataaacaaacacatcaacaatgcatcactcttaatagtacggaattcgtatactcaaatgcaaataggaaatctataccactaggaatgttttcttgtcatcttcttgctttaccttgacagttgccaacaccaacgccatctcactactaggactattctcacctataactcattaagcacattaatccaaaattgactatatatttgtcttgatcaatgaccactttggcttttggcttgatgttcatcaacgaattacatcctattgatcttcggcattccatcttgcgctcttcaaataatttatgtggattactcatggcttcaaatggcctcgcacgatccatcgtgacaaagtctttgctcgcccttcaccaccagattgagtccatcggcgccaagcctcttgctttcccttcacctcctcatgatccattgtagccgagtcttgattgcccttcacgatcttgccatatatagccactcataccccgtgtccccgtatcgtcaatatctttacttgctcctcatcaagctgtaatgtccatcttctaccttcaatctttcagcttgatgtcggaactcaacctatatcttccaacatgtgttgtcataaatcaccaaaataatcaccacactcttagggtaatagatcttccaatctcctcttacaaaggcaattctagggaatagatctttcaggctgcaccccctcctctatagccgcatcttgccgcctcgcctccatatggaccaagccgagtcacgacgcatccaagctctcgttgttatgttgtagtttgctctcctcaacctctgtggaatccactatcggggtgtcagatctagccacattgatatcggatatggcaacctactattgttgtcattgtcggccaccttgcgccacct

SEQ ID NO: 13004 - DNA, 642 bp, Oryza sativa
gtggttcgatccgccgctcgccgctgtcgtcaacagtccgttccggccggcgtagtagtttacctcccgccggcccgagtggcagctacgtaggcgccacgtcggcgccagttcggccaagaccgggtcgagccgaccccggtcagtccctccccgtgcgcgtgttccaccgcgagccgtgaggatgcgcgtgggcccgccgcatccgtgtccaccgcgaacagcgcgcgtacaccgcgtccctcccccgcccgtgcgcgtgcgccgcgtgctcgctccgcacggtgaaccgtgtcaccgacaagcgggtcccacccgggaccgcgcgaggtgagcccggtccaccggccctctctctcctcccctcccgcgcgcgcacgcttgggccgccttgggccggccggcccatttagctcggccggaacgctccgtttctctcgggccgcgccctagccgcccgaggaaaagtctatttcccctccctcttttctttcttttcttttatttttcaaaaaggatttaattcaatccttttcctttagaccaaaaatccaataatcttagaaattcaatatcttcccaaccgcaaatccgtttgactccgttcaacttccaaaattcctcaaatctcgagatctatct

SEQ ID NO: 13005 - DNA, 10541 bp, Oryza sativa
taactcctattttcagcagactgtcaaaaaaataacaagtagaaaatcttaattgttacattactgttgttccactttcaagcaatagcaactaattaatatagtgattcatgtccctctcatgataggcaagagcaatgtaaatattatcaatatgtacgaaatgatatgacctgcacaaaggtgactaagcttgtatggcattattaaaaggaaatgtctatccaaaggttcaggttaggccttttagacaagttatttaaaggagtttccatggtagagcaaaattgtctatgaaataaatgtttgttgcagcagaagcctatttagatgtggttgactttaaatgcataaagcaaaagtgatcagctgctgaaaaatgtaccttgctaggacaatatttctcaaatatttgatgaagataaatactgtacagcagaagcaggaaactcagattctgggagaggttgtgttttctaaagaggtgtgtccaaaagatgctaactgctcaggtcatcctacaaacagacatgagatgataaacctcagagacagaatacccatgacacaagctaaaaatattttgctgcacatggttgaacagttggagcaattgaccagatgttcaaaataagaacttctggatgggctggccaattcatgaaaagaacatagacatggggtccaattcttgttcaagcatttagaagaaagcaagaattaacaaggccagtcatgggccttgggcctgaattccagaccatcatttaagtcacactacaaaaattatgccctccaagaaaatcatgccctagttttcaaggaagacagacaagatggaggaaaagatattgtgatttacagatttccatatttacaccgcttcttgaatctttgtcgttgcatcaccagcttgaggattattacttcacaaatatgattagttccttacttcctttggatgttgttgataatgaccgtgctttgatgctcaaatcatgggttggaaacttatgctttttcctttgaagtatttgggagcccaccttcattttaaatagacttagaaaaaaaagataaccagcctaatgttgataaagttgtgaagagtggctggctggagggtcagaattctatcctatggtgggcaattggttctgattaaatttcttgtttatctacttttctgttcttaaattcattgtttggtctgtgaaggctataatagatttctgatcagaatgggtctgggtaaatgaaaacactcagatgatggttcttgttgattctgctctgaaaatgaatctgtaccaaaaaaaaaatactgcaatgttgctaaaatcctttggacagagatgtcgaacatgttatctcgccaggccggcagaagccggccgaagtttattaagggaagtcagacatgctatctgttttggtaatagtttaaactttgaatgtgttgctataagtggaaacaagatttaacatccttgtggaatatgagaaatgacctactttttttttctgtgttacattgaagaagtatgaagattgtgcagcacaggatgatgctgacattgaggaactggagtctggggaatgttgtgcctagacagctattatggctgatggaccagaatatgtaaagagtgaagaaggggctggtacagaagagattgaagattgagctgtggagcaaggggcagagcttgaagtggaggaactctaccctatgtatgagaagtaatcagaaagcatgtcaggttgtttagatttgtgtgccaaaagcatgcgttgctgtctacaaatctttgtactctgggttagtgtgccgtgaagtcatccatgtgtggaattttgggcctgtactgcttcttcagcttggaactctgtaaatatgttggtctcgttctaatgaagtccagaactgatgcttagccctttggttctaagaattattaggattatccttgtttccttagtgacttacctccctgtattcccttattaacagcatcatgccattgggccaggtatgttttagtatgctcctgagctccataaaaaaaccttaaagttctagtcaaggtcaagtacaatggaaacaagaacagtatcatatccactgggcaatcatctgatctgtgcatgaccatagataaaccactccattatttaagatcgaagtttcaatgcaagcagaaaatttaatggagtgtgccaagaaatagaagattagcatgtaagcttattttcttcttgtgttttatatagactaggcatatccgcatatatcaggattgtcaacatacctgaaccagagtgccttaccactatcgtatcacacagatgcatttgctccagccaacagtaatctcttttatatatgtacttctaatctatctgtggtacgcattgatgcttcatttgagcagtgctgatgtatatccctgcagaactgaaaagcccactgaaaaaaaggaaattttctgcataattagtatttgtattggacaaactaaaatgcataaccattcccttaatcctgaactcaagatacagtgcaactttctagtgacagagcatcagaccataaaatgtgggaagattgtaataatattggtcgttagttatgaactgctaaagtgctaagacaaaccactacctgggtataaatataaatagctattttgttcaagacaaaccactacctgcgtataaatataaatagctattttattcttttcttttacaataaatagccattgtgttgattgttgaccactataaaagacatggcggaaaacttgtattgtcaactaagtatttacaggataaagcaaggatcaacattcacatttcaattggtgaacatcgaccaaatgctcaaccgtgcgaaaccgtatcagcttactatggttgagaccaatatgcaagtcatgttgtctgctacgcaacaatttaggtctgtacctgaggtcatgctatgctctaggcagaaatttacagattcctataataagaacctgaaagccaatttttcagtcacactgaccacccaattgcaaccattgatttcaaattggcaaattggttgcaattgggtggtcagtgtgtgtttgataaattattttactaaaattcatcgaataaatatttcaagtaatatcggtcacatgaagcagaactgtatgatacgtgggcccaaaattatcaaataataaacatgtctaaatatatccaatattggacttgttctgttgcgtattccgaataaaaaaatagtggtgcaaacagatttcaaatttgatgcacagtctaaagttttgaggtattcaaaataaaaagagattgactagtactacgtgtaaattacatttgatctgttggtggcaactacattaaaggtgggacccactgtcattagtagagataatttcctgattatctccagacttcagtaccacgtcgatgggttagctcatctctgcgctctggcttggcttatcacggagattaacgcgtggcgctgaaagtgcattaatccccctagtgggttttggtgattaatgacaaatgtggttaagggactaatgagttcattaagtgactttcaggtgcattagtccaaagtgtggaagatggatgcttggagaccccaaaaagtacaaaatcaaagcggaccggaactcgagaagtgcataggatagtttatcttttgaaatcgagtttttaggaaaaaccgtactattaaaaggggttccaggtgatgctctgagatatatcaagtgctcttagtgtgaaccaagtgtcaagtttccctaggagtcatttttgcaaatactccatttgtccaaaaatgcaagtccggaacttactgtcttccaggtccggaagttccggtcttgtgaaaaagattttcctaagtgtagtccggaagttccggtcttccaggtccggaacttcctgtctagtttccagttcaaatttgtgagtaacggctagatgacgtcacctagccgttatacatatacagctcgtttccagctcgttccttggccattccactttcatttttcaaacctagagctattgctagcctctcccaagtgtttctggccttctccactcaatctagagcctaattcttgtgagaaagagagattgagagggagagaagaagatttggagatgtgtgaagactagatcttgggtgagcacttggaatatctcgtgggctgtcatctcggtgcttattactcttggagatgatctcctagacggttaggtgtcgcccgcgagaatccgttgcatattgtggatgtcccgggtaagtttgtgaaggatttcctctcctccgaaagggaacgaggtaagttagtgaagttcttgtgctgagattctagaggctttccaagtagagcaacccacacttgtggtggatttctagaagtaggttgagttggatcttggtggtcactcaattctagaaatttgcctaggggtgtttggggttgaaggctgtggattttctctggggtttttgcacaagtgaggcaaggggttaatcgagacccagctctttggagctcctcaacggagagtaggatcgcaagatccgaacttcgggaaaaaatcgctcttgtctctttctgtgatgtttctgtggatgattctgtgatatatcctctgcttagaatacctgtgcaccatcttgtgaagattagcttagtctcttgtttcgaaatttgaatttcatctctgttctgttacccggaagttcctgtcttagaacaccggaagttccgggcctgggaggccggaagttccggagttccttaccaggaagctccgggtctgtttgaattttaccgcttcgatttgtttttaagttttcagggacagcctattcaccccccccccctctatgcttcatcaacgcgttcaggcgctagaaattcggaggcaatttccattgcctctgcctatataagacgtgaaccactaggtgtcgcgggagaggggaggagaccggagaaaattagaaggagaagaagagaagcagggagaggcgcacaaaaacaactcacattgatctatttgctggtggtgttccgaggagattagaaacttctcggtgactcgcctgcagttcgtgagcaagcgcgccacagtgagattaaatatctctcatcgtcgagccgatgtcgcaagtggagatgatggtggtagatggtaagtatgataaataatcctctccaaccctgttggtaaaccagtcgttctaatggattatcggagtacctccttctcatcaattggagcgctttggaaatcaaatcgcctccattttcttgaagcataaacttggatttgtctaatctgcggattggattatcctcgtattttttataatcaacactcttatttttatggtgcgcatgccgggagcgagccctaaattataaacaaaggaggagtggagataaaaaaaaaaagatatatgctatgttcatgaccgacgaggccaagcaatgcattggctaaagctgaaaaatgctatggctgttatatatgtctatttataggcgaaaccatggccgagtgctgacaaggccaggtcactatactattaacacgtctagtctaaaatgaacgggagccggatacaccgttgctgggcactgacgaggcaaaagcaaccacaaaaaatccatgtttgatgaaggccgagatacatgactgggcaccgatgaggcaaaagtcacccgcttcaccaaatttcctctacacgccgacgtgatggtagtgtactgtgaccgggttttggtgaaacaaagccacccgttacacattcactatattcaccgtaaaatctgcaccaacctcaaccttcagcgagcaaataatttttgagacggcgatcacaaagcgcagcttaatcggaggtattccataggctcgtcctgtggatgtaattaactggtagcctcattgctaggcgccgggaatcagcgaactgcacgcaatctccagtcagcataccttttcattaagcatttctcgcgaaggcaaaaggcgaactcctgcgggagccctcatgtatttgtaaatattcattaaatacagggtttccctattttctgtgtgttcattgttttgttttcatcaaacagtgtgaatcgctgcagctgatcaaaatcccaaaggactaacactgaaaccaccccttcttggtgaatattacatttttgctgttgtcgccgtgcaaatgctcccccccccccccccccacacagacaagagacgatgcaattgtggctgcggcgtatgccaaactgccaagacggtgctgatcaccgatcagccaaaccaccgagcaggtcgcgggcgtggggaggcaggcaaccaacaacccaacgtaccagagctgacacgacgagaatcaacgacgccgccaatggcgaaccaaaatcgcaatcccggcgccgaatctcctctactctgtggaatgacgcgaacagcagagcagagacaacacccgatggaaactaccacatcatctgcaacggattgctcccccccccccccttcccccatccgcttaaccccacggattgctcccccgatcccgcggcaaaacccctcaaacctcacatcacacgcagcaacaagcaaacaaaccctagatggagtagaaaagctggagagaactaactgtagatgcgttcgcgggagctcaccgattgcggccggcgacggctggtcccgaggaatcctccggtggcacgggtcgctcccgcggtggcggcggtgagctccattgccccccgagagattttgaaatgggagtaaaaatcaagagatcaaatcaaaatgtcctcgaaatttcgaattcttttttttttttttgttgagagatggtgttgtgcacttgtgcgttagcgggaatgcggcggacgacggcgttttggcgctgtgacactggtgcgtggggcccacttgggaagctttcgcatttgcaagggatcgtctcttctttgctaggcccaccactggttttatcgaaatcattaacaggtccttccaggacttggattgaaaaggcgtgaagataagcttgtgatttttaactcttacatatgggttttgcgcttgtgtaattgtgttgcctctagcacctggccacctgctacgagaaaatggccctgctccttttataatttttctcaagatttttaccacggattatttgctcctcacttcttaaaaaatatgatttcttaaaaaaaaaaactttctctccactacagtgattagacaacctattctaaactatttttaagtttagtcttcaaaatattaatcattatattaatcaaataaacaatccgtgacaataatccaagcaaatgtatatgcatctcatgttggtgtcatgattggggatgcgtcacttagatttgtgttgtgttgatagcatgttttagattgttgggttagtagtatattagatcgccaaaagcttggatgtgacataagagttattgcctgtataaactatgcatattagcatgctcataattttggatttcctctcttgtatgtctagcaataagttgttcccttttatttttagtgccccattgctaccaaaagattagttacgctaggtttaattaaaaaaacataaccaatttactaatgaaaggtcattgagatttaaggtaagtgttatatttgctgtgataattcaagtcttgtcctaattttatcaaatggaatcacagtttcacatgcaaattaaaacatgaaagatttgatgaagtcaaaatagcttgtcatgttccgctatagacaaatacatgttttatacttgtcaaaggaaggtcattgacccctttgacaatgacagatgcggcttcatcagagaaaaggcacaaaaagtgacagaaactactgaacgtggaggccactagaggtgacgtggaccattggaagtataaaagaccaccagcggatagtaaagacctttgagagagtttataccacttagatccaacagagtaggcttgtcctatgaggccaagccccacaacaaggcccgtaggacctagaagttggaggcttgcaaaaagacatgtatgcccttgtacatacctatttgtaaggggttgggatataaaattacctatgtaccataccctagccctatacaatactgggtttcaagggaaatgcaatgaacatattttttaagaattaagaagattagggtttgagcgtacatcacatcaagggcattggaacttctctaaggctgtatttggaaccctaagttcccaacccctctacctcgtattccacgtgcacattcaaactgctaaatggtgcatttttttgcaaaaggtttctaaatgaaagttgcttaaaaaaatcattttgatccattttttttaaaaaaactaatacttaattaatcacacaccaatggaccactccgttttccgtgcacactgtgcgtgttgggaacatatgcttccgaatacagcctaagttcttgccctaacaaattgttgcctttgataacactacctttttatttgttatacataggatgatataaattcgtcaatcatacagtaattagcatttacttccccctctcaaatatatgactagcctaaaattgcaccaaaagaaacacaaacaataattaaaaggctagcatatctatcttctccatttctcatactcaaaactagttggtggtctaccctaagccttagattttgttacctagactctcgttgtaatatacagatttatgtctagatgaaaaaacaggtcttttatcctagtatgagaaagttttttttttcttattttctttttcaaaaatatattgtagggtcataaccggatttagttactcgtgatcaatctccacaaaactatatttgttgaaatgagctacataaacacgacatgtttttcacatgcaaaatttagacacttcttagataattcgttcgtgagcataatagcctttgcccacgatttcttgaaataaacacccacttaacacaaactaaacatcttccctagctaaggctaacttatgccttttatcattttgttggtcatgatgtctctataacaagctataattggcctcgaaactaaaccttggtgaggtcagcttttaagcaaatgacccccataggatcatagtctctcatgctatgtactgtagatgacagcaacaaattatatgagcgtgtgctttcaatagaattttagcaaaggttaaggagctgctgctagtctccatctatttgaccttatgttcgggcacatattcccggagcgcgagtatagtgatatatgtgccttcactcttatcttgaaaaaaaaagagacaaaatttaagactttatttaaaaaggatggtcatttataaaatttgaaaagtataaaaaaactacttctgccttactttcactacacgaaacaaatgaaggatcatgctgcatgaaataccacattccacaggcacctcccgcaaaaacaccgaaggtccccgtatgaggaggcagctcgtgctcgggcggcgagactgagacgagacgcgagaccaaaccctcccctccccgaccgcgccccgcccagatctcgccgccgacgagatgcatcgccgcggcggccaccacctccacctcctcctcgccgccgccgtcgtcctcctcctcaccgtcgcggggctgcccctcgcttccgcctccgagtccgaccacaaggtgcgttgtcgcccgctcccccaccccctctctctctctctctctctctctctctctctctctcttccttccttcctttcttccttcccttaaccctagatccgaacccccgacgtgttcctcacgctggatccgccgagtcgccgcgctggatctaggagcggcggcgcggtttcggtagctttgggttccgtggcctctttgctttgggcgagtgctgcgtggttcgaggtgcaaggttgatcttagcaatatgataggaagggctggacagctaggaatacggaagctatgggctggaggattggttcgaaggctgttctaaaggcttgctacttgatgatcttgtttgccatgagagtgaagaaaaaaatcattagtggaaacacatttggtagaaaaaacgtttttggtgctgtagtgcttcgattagcttgttatttgagcagacaagccactgcaattgtattgctgttcaaataatctgtatcatgctaggcctttgaataagattatgacagcagacttttcctgccttagcttcacatcatcaaaattttgaccttttggtggcgcatcaaaatgctgagatgcgaagcatttcatgcttgggatacatgaagcgcacactgttgtgggcttgttacagttgatttattatcctttggcgccttgacggggcagttatccttgtccttgctgcgtcttgaatgttttcattaattcttttttcctattttg

SEQ ID NO: 13006 - DNA, 1732 bp, Oryza sativa
cttttaagcctaattgctctatgatttgacaatgtggtgctacagtaaacatttactagtgacagattaattaggcttaataaattcgtctcgcggtttactgacggattctataattagttttttattagtgcccgaacacccatgcgacaccctatataataccttatgtgacacgccaaaactttacgcccctggagctaaacaccccctaatatgtgttgcatgtgtgttaatttctagttgtctttagtacatcatcattgatggtggtgtgtttaattagtttctagtaagaagcttccatctttggggaataaagtggcatatatatgaaagctaagaaggcattgatcttcaaaaaaagaggctaagatagagaaagacaccgtccgattgttctactccatgcatatataggagatcatataagttctattcctctagggttctgaagaatcaactaggttagcttaattatacgtacatatgccctggtccctctgtttgctaagcatatacattaaaaaggcacatctgactttggtctcctccattgaacatttgtactggccattaatataatttgaaggtatctaggtgtagttgggttttttttcttattggtattggatacacaatttgatccattagatccaaaatccaaataatctgaccaatcatcccctcaacacatataaagctccctggaaattaccttaatttcaattactaaatatatcttactaataagaaatcaatactatgtatttcagtgtctactaagcaaatggttcttcaaactgattactgaacaggttgtttggcaagagaagaaaatatttgaaaaaacactcaattactcaagtagggtcaaaacaaggagattctcattttttttgtcgggtcttgtgaaagctaaagataaatccttacttctggaaattgggtagtaaataggggcgaataagtaagatcttgggggatgtttgggttgggaatttccaactctatatatcatttttcgtaagagaaatgtctcgatcgcaactgttatgaattttgttccgcttaatgtttcttttaggagaacgttggttggtcagaactgaattaactggtataatttaattgtcttgattttgtatactagtttgaatggatctaatgattctttcaaatggaatcttcatcagaatagaattttctgttagatcaatatatttatctttgattaataatggttttattgagaggaacaagtttatatggaaattaaaggttccaattaagattaataacttttgtggtttttgttcaaaaagttgtgatctaaccaaggataatttagcgagaagaaattggaatgggagtcaaagatatttttgtttgtataatgagactattcaacattttttttaatgtcatattgcaaaaatttctttggagaatagtttatatttcctttggactgaaaccccctgatagtatatctaatatggttggaaattggcttagtggtgttgagtcaaaaactaagaatctcatatttgttggagcttctgctttatgttgggctctatggttaagtagaaattaatgatgtttttgataaatctccaactaaatcttatatgcaagtgttctgcagggcaactttctggctccggttctaggcacaacttcaaaagtgtgaagagaacaaggagctcctattttctacatgtcgaaa

SEQ ID NO: 13007 - DNA, 586 bp, Oryza sativa
gagaaacttttctccaaatatcataatcttcagccataatataaaattgcatcctactcaccaatgagaaaaatcagttccatcgaaaacatgaggcttagttgaaaacctagcgggagtagccatggcaaaaactctagatcgataaaaatccaaagaagaaaacaaggctctgataccacttgtaggatcgaatcacaagaactaagccaaccagaggggggtgaatggttggtataccctaaaaccgaaaacttttagcggaaataaaagttaccctcgaaatcgacggaagtcggcctgaccgaagttgttctgccggtctgaccgagtggatgccaccggtctgaccggtgttgaatctccggtctgaccgccgagatcgcctgctgcgcctgtcgccgccgccagtctgaccgccgtgctcccgccggtctgaccgccgcaatgccgccggtctgaccgccggtgagttgccagttagaccgccgaaacccggtgaaacacaaatcgaagaactcttaaagtagatgatgactttattgattctctctgtgttacaaagtgcaccaacaacactccttac

SEQ ID NO: 13008 - DNA, 10436 bp, Oryza sativa
agccactctggcgccccaaaaaggaccatttctgggataaattttttcaggggtctatttgcgaaataagttttttaaaaggaccaaaatgtgaaaaatccagtccagctgctctagctgtaaagggatctttccaaaatgtgcattattgcatgccgtatatttggcttttccagaaaaacaaaaaagacagaactatactataagaaatattcttctcactcccacttttcttgcatggagaagaaaatattttgtactttaattagatgtagaagtaatgtatctaacacagacattcaaccatacgtacgttaattagaatttcacaaagtagtaaatttacttcagtctttttacttatggatttaactactagaaagtattaattatatttcgcatcgatctcggacctttgtaaaaataaattaatttcacttataagaacttatgacaatgaacgctcatgaaaagccaacttagatgttgtacaatactatatatgaaatgataaacaaaataagggaaacatgaaaaattaatactacacaacatatttgttcccattgtatatgtatgtagcatatctgcttatatgttgctcccacacggtaacaattaatgacaacctccagttgcaattatactcacatagtaatatataatgcacaagagatcagtcatgcatcgacagcatcattctgcaaacgttatccaatagctagatggcacctagcatgcatgacacagatgttgagatggaattggactcaatccagagaatataattcaggacatgatcgatcgatcgatcgccaccagtagaacaagaataaaacaaaccgcatacagtactgtgctaactcttatctcatgctgacgaaaactaaacaggaagagagagaatattatctcacatatatcatgcaatgcatcgatcagtgcatatgataattaagaaacaaattaatcagagtatatgcctagctagggtctctctctctgcaggtgttgtagtactgatcaatcaatcacatatatatcatatctgagcacagcatatagtatgtgtcaagaattatatatatactcttcatatcaggaatcgatcgagagcttgtcacgcttagacgctaagtgctctctctaccaagcgttcgttggtcttaatcattggtcgatgcaatgcaaatatttatatgtgtttctaatgtgtagatgctacctggctagctagcttacacgttacatgcacatatatgcatgcgttgatcactctcaagtttgttgagtttgtctttcttttgaaggtgaatgacatgtagccatcctccaaaaagcagcttttttttccctctcctccctttcatctctatctgtcttaatttctgcactatgcacatgctagcatagctgcaagatattgtagtcagtgatgatcgatcttaatttggatggacaacaggttggctgccaaaatattggaggtcagatgtctacatatttctcataagttaaagtgtatgtacttttcactaataaggtttgtgctcaaaattgcaaagttgacaaaaagcaaacggtcatactccaaattctcagtaatatagaattaactgagatttttttttcaaatagtactaatttaataaaaaaaattgcaaagattgtgtccgatttcgccaatgagagaagacacatgtttgcaaaccatttgccacaagaaacccgtcacaaatgaaatacggataggtcggttgcgttgcccgtgcactagctgccccatataggcatgtcagaatcaaattgccgacaactcccttatattggcagtattgagtactacttcagtataattattatattattgaaataatattatctaaacataaatcaagcaccgaataataatcaaccgatcgaaacataattatcaggccacattttctcttcttttggaaaaaaaagaaggaaatatcttgcatctgctagctagctagaatgctagatgttggaagccaacaccggatcgatcatagatcaggtgctccataacatgctgcacgcatgatcgatgcaggtagccaaccagcaacaatccagcaaaaaaaaaaatctgcctttttttttctgctgcttttcagcggcatcctagcttgcgtcgctgcacctggcctccgatccttggtgccaacttttctgtggccgtagctttgcacgtggaaggccggccggcgaagccctgccccacctagttgccggacaattctcggtgggaagaaccgatcaaagcatccatagacggtcaggatgcgtgcacgtttccagcctagtggactatcgatctccatgttcattctcaccgtctgattgttgcgcggaaaatgcatatgtataaattaaagttatatacagcccccgtttataaatacgtgtgacgttatttactttcaaacattatgagcctgtttggcacagctccagctctagctccacccctcttggagctggagctcagccaaacagtttcagctcatcaaaactaggagtgaagttgggtggagctctctcacaaaatatattagagttgtggaactgggttttggcagctccataactccactccagactcaactcctggagttatatttaggagttggagctgtaccaaacaggccctatgtttaatgatatagcaagttataacaaactaaacaatagttaactatttatttttcaagaagatgaatagtaaaaactcatgtacaaaagtcgataatgtcatatagttaaaaacggagttagtataataatccttggactgttagcgtatatgttgattaatagttaaggcgatttttgctttttttaaattaatttttattaaattaaagctaaaaaacacgaataatagtgaatgacctaatatcaaataaatagaaggggtgaggcttcgaagtcaggccggttagcccatcaccttaattatggagctagctggaaaacctgtgtgtttctctatattaaagctacacaatgagtaaaattaactcgatccagtagacgagtacagatttacttcaactttgttgtgcacccttatgtagttatgtagatgttgacgaaaaaaatcgaattactatattttatatattgacaaggatcaacacaaaattaaatacaatttttaaaatgtcaaagttgtgaacacatcatttgtttcactcccgaaagaaaacaagtgacatatagcatgccttggatttagttagatatcgatgacctacataatggttgcaaaaaagattgatagataaggggcttgcttttactgaaatagttcttctattaatcagagaaaaaaaatccgtacactccaaacggagtcgtttaaatttatagttacttgtttacacaagcatataaaatatatgcacaactagtgacggtgtacatttatatatttcaatcgtgctgggaccgggcctgacgtttcggcatcatatcacaagcagagaaaaggtgtgaaagaaaaagctaaaatcatgcaaaactttagtaaaaagagtagattaattcccatggtggaggaccctcttcctctcactctctctttctctccattgtgaaaattaggatataccaaatcaataagggtaaattaaatgacatgcgcaatgatgtcattttcatgacccttcttccaagcagattccatggtggggatcaaaatcgattttgttatcacatacacaacaaataatattcaatatatatatgggggacaaaagctcaattaaaggcaaagtcatgctctttttctctttagtattttccagagattatgcccttgaatctcctgtgtgcttgaccacaaccaatgggtgattagtttaatcaaataaccaggaattaagtggagtagtaattattaattttaccaccaagcctttgtcccattggagatgtcaaagctataatttgggcatatatgatatagtagctaggaagatataggttatcatgtatataaccaccagctgcacataatattagttgcagagtttgacgacatatcactttcacctctctctcgcccatttgttaatctttttgtgtccttgatggcttgaccacacacattgtcataggctgatgacatgctatatctaattaattaactgttcatctgagattgactgctcgcactttacctacagtattgcacttaattaatataactaccacgacgaaggcaccatagaaatatgttttcacagtggggtcgagctcgtgcgcttggtgacgtggataattaaatgcaagttaattaatttaaagcagcgcacaagatagtcgtaatggtgaaagatgtagttacctctaaacagaaaggctagaaagagaaacttaattaattaattttgtttctacacttctggtttatttggatcttgcatggattcctttttcttatttatgcaaagtggtttattgcagcaagctgtagatcggggaacaccattttggatgtgttcagctctcatgagtgaaggtctggcaacagcaattgtgaaaattgaaaattggcattacttcttcttgttggcaacttgttactttatttatattaatttcatttattgtgtagcatttgcaaaaatgtatccaccacttaaaaaaaaccaattttcacaacacccctttttatttttgcagacggcataaaaaaatacacacatgtagaagtcgatctttataggtggttaggctaggagagttgtctgcaaaaataactatatttttataggcgctcactactacaggaatgatttttcgtacaggagtcattttagattgcagatgaaccgtaagtggtcgcgtctgtaaaaatcgtgttctattttcgcttgcggctgtttaaaatgaccgcacggaaaaatcaattttcgcaggcgggccacttaacaggtctacacgcaaaaataggcttattttcgcgtgtggacatatcaagtgacttgcacacaaaaatagccacccaccttttaatcccgccgtcgccgccccacacccactcctcccatctccctctcagatcccatcgccctctccgtcccacacccactcctcccatatccttctacgtcccacacccacctcctccctctccctttcaccctcctcctcccatctcccggcaacggcagcggtggcggcctcggctagggcggcggaggtggcggcatcgggttggagcagcggaggcagcggcggaggcgagtgcggcatcagccatggtgggggcggcggagcggatccgtcgccggcgaccgcggggaggctagatccgtcgctggccaccgcagggaggccggatccgtcactggcaaccaccgggacgacgacggcgggcctcgggcaaggcggcgatgacgacggtggtgatggcaacgatagtggtgacggcgacgatggcggtgacggcgtttttgatttttttttttgttttgattttttattttcccatgcagacgactaaagtgcctgcacgtgaaaatcgcgatttttgcgcgcgggtgcgtcacccacatgcgaaaatcgcgattttcgtagacacctcattccagacgggtggaagatccgcatgtaaaaaccgattccgaatgcacagaaaaatcgttattgtactagtggctcctctcaaagtaaaacaaggatttttgtaggcgttcctttaagatggttgcctgtaagaatattgttacgttttgcaggcaggtcttctaacccaaccgtctggaaaaagagatgtgcattgtgaaaacaatagtccctcacccatgacctctcaccatcccccttcctctctccatcacctctggtacgtgctccaagcctccaactaggagtagggtgggggtggtgaaggggaggggaggggttgtggttgaggaggcggatctagtgtggcggtgagacgacattcgtgagtgtcaaatccggtgactccaaagggcatgaaggggcaacaatagcggcaaaggggtgtggctcaatccctctctcgacgatcaggtccaaggtggcggtgttggaaactgggtaaggggagaatggggcagccatgacgaggaccctgacgaccgcgctggcccgatcaaggccactagattcggtggagagggctcaacaactgcggcgagtgcaaaggggaggagcggcggtcgagtcaaaggggagaggcaatctcatccagctggagctcgggaaggagatggcaaccgcttcggggcgtctaagagggtggcgagggctatagcttggtggcgggcaccagatctgccgaaggtcatatagctcaatgctaacacgatggctgttgttagtggtgtgacctaaatccaccggcgggaaggccgggtcggtgcatgccaccaccaatatatggggcttgatgggctggtcatcgtctctcgcccctacctacagcattggttctagcaggcccacgcatgtacaacctccacttctctatgatgtattctctctgctgtcaagacattgtgaatttgtgatatgatcgatgatttagaaatccatgatgaaattgtgatgtattctctctgtttgttatggaactgcatatgtttttttttcaattgtatttttattttttctagctaaaataaatcactgtggatggtcaacttaacctacctgttttctcaggcgggtgaagcctgccatgtgaagatcatcgattttcacatgcttttggtcataggtgagtcgtctagtcacttacagaaacttgttttggcatcctacagaaacttgttttggcatcctacaaaaacttgtttcatagtagtgatctttggtctttctgtctttgagtagccgctttgtctgcaggaatcaagttaattggctcatatgaaaatatgccaaaattcaattgttacggaggctttcactttttgttaagctaattggctaagccatttatatatatgctactaattcttcttaattgaatatgaacagctatttgtctattctctttttcaagaaaaacgaatccaaactaatattttcttatttatttaataaaaattagagaaatctagacaagttagcttaagcgcctttaatttgctgccatctaaaaatttggttgttttttaaaagaagttctgttacactgcatgaatagaaggatccttgttaaagtatatatactcccctccgtctaaaaaagaaaccaacatagaattgagatgtaacataatctagcccatcaaatatagatgtaagcagtctgtctagattcgttatactagattatgtatcatcataattctagattgagtttttatgggacggagggagtagctaggatcgttacaataattaaggagatgaagaatatggcatatatgcatatatacatgcatgaatgaagatttagcatgattttaccaagtcacttcaatatattatcaactggcatcttattatcccttgcaaccaaattttgtggtgcatcatacatagaaagatggaaaaaattcctatttccaaaactgcactgcttacatattcctggggccggcaaaattaaacatatgtgatgtgtacagttcattttcatcatgcatgcatgctgggataaagcaaagatgctcacaaatccagtaagcactgtacacaactaatcaacatacaaaaaaggctataatacatgtacatctcctgacatcctgtacatagagtacctagctcttttgtaggatgaggctaatgcacgttccagggctaagggggcaaggtctcattgttggccccccaaagatactggtgctagatcatatatataaatattcatttcacactactacccaaaacatctttccatacagctaaaactaattttacagacggccaagccaaccatctcactctaatcatttgtaaaaatcactattttcacgtgtggatcatgtcacaaccacacgcgaaaataacttttcacaagtggcctccatggaagccacctgcggaaagcgatttttcaagtgggcatattaaaatgcccgacaacaaacttttttctgaaaaataaaaaaaaataaagaaacgctatcccaatgtcttgaagaagctgccactacattatgccgccgttgtcatagctagtagcccgcaagtcgtggtcgttgtagtagcccacattgcaaagccgcggcaagatccacgatttgtcttggatccgcctaggctccaccaccgccggatccgccgctctccaccgttggaagtctcctatcgccgcaccatccctcccaaggcatctatcggcggatccatcactcttgaggccataggtgacagatctgccgctcccgtcactgctcatgggtagatctgcctggctcatggttgtcgctgtcatggccaccgtcactccagaagactcctgcgcggccacgccgctgggctttcctctgttggcatggctgctgccactctcgaagcgcgctgtgctaccgcctgagcctcccgtcgccatccggagaagtgtggaggtaggctgggagtgggagatcgagggagagacaagagtaggaagtgagagagatgaggagtccagcagtgagaattatgagacagctcgcacattatcctcgtttttgtatcgttctctacttttcaagcagtagtgttgagagctccgcttgtaaaatagccatatttttacgggtgagcctcttactacccacttaaaaattaaaaaataaggattttcacagacgaactcaaaataggatctcctataaaaaatggcattctataaaaaccaatgttcaagtgcgagcctcgacctttcacaggtgactcttctttttatcgccctatgaaaatagagggggtgtatgggaaaatggttttttaagtgtttatgcctccaaaacgacattaatccgttccaataatgtaaggctcatccatgtaggtataacatctggcttacgcatttattctcgctttgtgtaaaatgtttaatccaaggttactactatatgtttgatgcacatgattttgacatattaaccaatttactgaaaagctagctagtaattgagcctatatatacaagcctaacctcatcatttttgaaatatatacggagcataaaagtataatgttattgatctgcacgcgcacaacattctgcttctagactgagacatattgcgaccaaactctcatgatcaatatatagccctagataattcatacatatatcgcccagtggctttaataatttggaatcgatggatgccaatttcattcgtacgacatttctatcacttcattgacatatagatacagtggtttaggtatatatacttgggctagctagtaataagctagcttttgttgctttgaacttgtcacaaaagtgtgcgtgcatgcgtaaaataataggcccacgatgatgtttatcacacataaaaagaggacaatttctagcatacacatttgatataactccttgatacttttcctcaatcgatatcatggattgatatggattgatattatgtaacttttctttctgtacataattatatgtatatatttttaatataccgtgggatgccgcactgttttcaggttaaaaaaaataccttgataatcttgcgacagtaaaatatttacattttatattagtatatttcagtcgtttttagtggttaaatctctagtgcgatgtataacctcttcttactatgcatttactacctttttagccttcgaattttagtttattttttaccataacatacaaaaccaccctcacttttgaacctgaagaaaaaactcattggtaccttttttagtggttttgtttgaaatatgggtgattttgtttcataattaagaaaggttcgatcggagacaaacacttctcataaatcgatcagtactgatccacaagccggccaagctttggcaagaaaagttaaccatggaaattgaagacaatgatttgtactggcagctggctgagtcatcccagcacacacatatataaattaaaatttatctgccataattttctagtattttttagttagcatgtctgaagattaagcacgtacggcaagtgatcgatggcataggggtaacagtgcaagttccctagaatttcctgtccacaaatgcttaactgcacatatccccgaatcttctcatatactccctccgtattttaatgtatgagacaccgttgattttttaataaacgtttgacctttcgtcttattcaaaaaaattatgtaattattatttattttattgtgatttgatttatcatcaaatgttctttaagcatgacataagcatttttatatttgcataaaaaa

SEQ ID NO: 13009 - DNA, 10131 bp, Oryza sativa
tgcatggataaatacatagagccgtacataattggatttattagcatgtgttttgttgagacgccacatctgttccgacatgctttatcatacactaggttgaatttgatttgtcgatagatagaggcgtacacaattggatttatcatgcatgttaatgagaacgtctaatctgttccgacaagcctatacgtgaggttgagtttgatttttgggtagattattgagtctgatttgttacaacattcttattgatttggactcttgcaaaagacaaaattaaacaaacggagaaatgaattgtgatgccgaccgggcaagcaccaagcttgctaagccaccaattaaccgtttgatctcagataaatccacgtactgcatgcgtggccaccctgcattacttgacaacctgaaataatatctcactttcactgcccagtccctctcctgttatcaaagtagcccatggaataattaactttaatccttttcctcttcttttttcctcaccgtaatttatgtatgctagctagctaggtcgatctggagcgactactgatcaatcgaatcttttattggatcatgatctctatcagttttgttgatcagtgacacaaaagggattgatcaagtagcagtgtaccactgcaagtttgtgaatgcctctcatattctgtccagataaaattaaagatattcatcaattcacatcaaataatatgaaagtatatatactactccctccgtattttaatgtatgacgccgttgactttttggccaacatttgaccattcgttttattcaaaaattttatgcaaatatgaaaatatttatgtcatgcttaaagaacatatgatgatgaatcaagtcacaataaaataaatgataattacataaattttttaaatatgacaaatggtcaaacgttggataaaaagtcaacagtatcatatattaaaatatagaggtagtaatatgaacacttctttttagaaacataaagaaatggctcacaatttccagagttgcgagtagaagtggcttttgttgatatatcgatcgacagagtactttgatccaatccggaccagaaaaatatcagaaacttggcctctcgtgtcgatccacggacaacgttgctatctatctgttcatcctgttgcattgtgccaattaactactgtaactatctacagatacgatcgattgcagagtgatgagtaataatttatgtgcgcgcgtgttcatagatcgtgcaggctcactaaaccatgcgtaattcatatcttgcattattgttaatatctgaatcgatggcatagtagtgcgacatctttccgatgtaatcagtgcttgcattggcggctgcttttatttaatttgcatgcaacatatatatgaacggctgcacttctagctaggtagcaccatgaccgatcagcatgcaaatatatgtaaactatgactttatgaattaatatatgcataccgataattagagcaatagctagctgaccatagatttggtctatgatcgtgctctctgagcatccatgttattagaattgagggaacaaaattacacaaacaaaacactatgatccataaaagacagttaggttggttatacactagattgtacatcaaggaaccacgcacatgcaccaaccacacatacacatgccacggagaggggaacctaacacctagccgctgcactatgcgttgcctatatcaacacccgatctacagcagcaccacaaagcggagtcttaaaaaacgatacatccacggaggttgcaacgccaaggacactattgccgcccgtccaagaaaatggacatgattttcacctagatattctcgcctagagagggaggaaagagttatcttgacaatgtccccgggtgggttgacgtgctcgaaagcgtagccgctatcagcctagtgaattgttatgctaggctttgtcctggaacccttgcaacccagttgccgcgatccgttgcccatcatcttaggtaccacaccaacaaaacattggtagtgcatggcctaccacaccggaccaacacctcttcgtcagcagacttccagttctgtgtacgactagactaccatttgcaccccgggcactgtctcaagcctcctctgcctcaccgcccacgaggctacttgatggatctgaccaaggagagcctggaattgggtgatatcatctcggcagcccaagccttcccttaataattgattgttgccttcactataccaatggagctccctatagaaagaggggcagagctcctcaaagggagagggtgctaagccgatgggaagtctgatgctcgttggtcttccaacaggctgctttggatagcggagtaggaagagggatggagaaacgacggtggtagaggttagggagctgggtgccacccatgctgcccctatctctcatccatttcgcgtgttttttctatggtctaatcaaacgtgtttttcctgtgttctataatcttctgctttgtacttgcattcctatcaaaatcctacattttttatatttctctatttttttcattcctgcaattcaaaatggcccttaaattttctaataccataacttgtgtaacgtgcgtaggccacacagctcccgattcataatattttgatgaatcattttgttcttattttagataaatatgaaactaatgtttaggtgcttcaataccataacctgtgtgtacatgcgtgaatctcggatgcaaagtgctgcgggacttatgtggtgtttgcatctatggactaaattttagtccatatcacatcggatgtttgtacactaattagaagcactaaacgtagactaataataaaacttattgcataaatgagagctagttcacgagacatattttttaagcctaattaatccataattagcacatatttattgtagcatcacataggctaatcatggattaattaggctcaattgatttgtcttacgaattagttcagagttatggaatgggtttattattagtctatgtttaatacttctaataactaattagtgtccaaatattcgatgtccagggattaaaatttagtccctgaatcccaacaccaccttactaatctttgcttcttcttttttcagaacttactaattagtcctgctatgacgacatttctgcgaggctgcatatgtatgtttcagctgggtgtagtggacctatggttggtagtgtggaagatgcatatcgcttatatacaaacctgccgagatttgcggctcctggagatttttgagctggcgtggccacctgcgcgtgccgacgcgtcagcgaggcgctggatggcgggtggttttcgtgagctctcgcacgtccgtgtcgtcgttggtgattttgcaaaaacacccttcatttacttgataatttgttatagatccctggtccttagttctaacgttgtgcgctcttacttagaggacctcttaagaaaacaatattctatatgaagaagcgaaaaaacggaaaattgaaccgcgctctgaaaactagaagtttaggggttgtttttgcaaccctcacccctttccccaaaccctagccgccaccattcctctgcctcctctcctctcgctccgctctctctcctgcccaagcgacggccgccgccgcgtgccgtcccctcatcctcttcttcccgcagttggcgacctcccccgcgcactccctactgcgagctgttgctgtcgccgcgccgtcgtcctgccatcaccatcctctcgctcccgcgccgcatccgccaacgaggaggccgggactgtcggatccggtgactccggcctcctcgccggcagatccggcagccctaaagcgaggggaagctaggagccgccttctactcttctacctctatgcccggcactgcccctctctccctctccctctccctctccatcctgttcatttccggatcagcggatgcctgcgattaggcggccacggacgtgcgtgtgggacgtcgaggagacggggaatcactggatccaggaggtcggtgaaccgatttggagagggagctgcatgatctgtggcattggtgtcccgtttcggacagcggcggtctccagtacggcgggtgctgctggatctgccgcatggagggctcctcgtcagctccatcctacctcttcttctgcctttttggaaggaggtgaggagaggaaagtttcctctggaatttcatactgcatgttatatctttgtcaagttggtggtcttagtgtgatactgtgattaatttggaccgatgaagatatgtgtattgaatttttctttgcaagtttaaatcagtgtaacactatgaatgtgagcgtgtgaatgcagcttgtagtgaagctttgttgagcttacgcaaagcagagaagggcatcggcgcggggttcctagaggatgctgccacctccatccccttgcgtcacggccgtgctgccctactggtcctctggcacagcatctaaggtcatctgccaccacaaccaggttgcatctccaccgaatatgaccccactttgatggcggcgagctttgctttggtagtgttgctgtcaatttggctgtgcatttctttaaggggttcatctacgatccattgtagcatgctgatgactttaaattacaaatgagttaatgcataagattctttgtttccaagtataagaaattgatatatcttttgttgaagtatgagtatgctgatttgttccagcaaaatatagcaatgtacaatattttttgtggataataatttgataatgctccatccaaatgtagtcatgcatcttcatcaaaatagattgtggctttgcatttttagtttgttcattactaattatgccccttgaaggtagtgacttctataaaattaatttataacgagcatgtttgtaacttgacattagatgatcttttacatgcagaatctgagactaaacgtatacactaatcacactaatcactactactgctgctatatattactgttgtaccaaaaatatacaagtgcatttgataaaggttatataggtctggatcagaactgtatattactgttgcaccaaaaataaattaatgaactgtaattttctctgtattatttttggatgtgattactaaagctcgctatgtgtctgctctttttgcactatagatgttatgtggggcattcagtatcagcgccggaaccgacgccaacagccagagcaggcgccgtgatgttggatcaagttgttaggattagtttcagtgattaagtttgttaggaagattaagttgttagttcctggttagtagctgtttggttttccattgtaagcctatataggccattcggtttaagtgattaatcaagaaagaagttaatcccagttcctgttagtttccaccacggctccggggaggtgaggcgtgcgtcctcgccctcccgtcgagcacagctacgcgctatgccacttagggccggcgcctaacaatagaaaatcaatttatctcaatttgttgcacaatccatctatagcttcaattctattctaagctatctaatcttcccaacgccaatcagctgctgcattacaatggattacattattgctttgcgaataatattagaagaaccaaagaaaacatgatggattggtgcaagatcaaaggactggcatagctgtccacttctcttattcttgtaggctttagctggtgcaatggtttcagtagtaaaactaggctatgataggctgatgcctgccttaacacgccaagactccaggtgcacacaacatagtagatcagaacaaaggatgcctgcattggtgccatcctccacgaggagaaatggcaccactggcaaccagtttggctgatcgttgttcgttgcctaccttgagttcaccgtttaaattatatttgacatgttctttacggaagtgaaaatttagttgattatctgtttaccaaataggcatatattagttctataatttggttgtttgtgaacaagaattctgttgcaagttatagctgaagattggtaactctataaaaaaaattaattattatgacataatagacattaactctgaacatattaaattatcatgacatccccacgatgtgcaacagaatttaacttgatataaaaaaaatgatgttacattgttttctaatttgcattcagtaatgcctatgatattttacaaatgtaactgacttgtccttcagatgcttctcatgttctacattggatgcatccagtttttattgcagctcactttgaatcttctacctaatgcttctaatatttatgcccttttttatttaatatgtgatgattaggtaatgcttagactagcatataaaagattggcttgattagggttctaaaattgaagttttctttgaaacgactaatgttattatttgctcttgccatagaagtggtttttcaggactcttgataatataactattggtttaggatgataaagcttcagtttaggacgatgagcgctgccctgtaggttaaaatcccattttaactaagttatgtattatttgactaacttgcactttcaccctcttcctttaaacatactgatagtatctgctcataaaattattgtgcttgctatgatttaggtattaaaatcacataccttttataatctatgtaaaagatgtacaaccagaaaccaataggttaacttgacatattgacctttacaatcctacaataccgtccattccaactttctttgctgaataaatatgctgctgtgtgcattatttggttcacatacctgattattagaaaattactgaaaacagtttggattgtttacctgtttgtttttttagtatggataaatcattactttgcttttggttggtacctttttgtgccccccctgctatttgagatgtttaattaatttcctcacattgggctaaatttgtacctgctggtggtccttcagttaattcattcacagattacttgacatcggcaattgcttctttgattcttacaatctgaatatataccaaaaaacaactatgttaacttgcttttttcacattcagaaaaagaacattactaggaaacaaggatgcttaattgttctaatattgttgagtagttcaatgccataagattattgactgccagtattgataaaaaaaattgtatttttgcatcacttctcaggcagctatgtacacgggggaagcaattcatcatagcaaaaaatattgcacttccatttgcacatcaacaaaagggcccctgtgtgaattcggtgaaggcatccaaaccatattagtagaatttagccatgtgtaatatagttttatagtcctatactcctatgtgctcatctagcagaactgtttcaatgctaccactataaaactactatgtactgtctatcctgccatcaaacatgtgacacattttgctatttaggactgtccacaatctgcatatatgttgtgattagcttttagcctctataacaactatcaatataaatgctcacgtcacaaaacttcattttttgcactacactaaacctaaatctcacaccatgtcgttagcctatacttgaccttcacagaccttgcaaatagcatttgtttcagttacctaccagaaccaacaaacagatgtaatcaatgatttccctctcctggcaccactggtgcaacgcgcgaccacaccggcagctccaaatgccggcggggacgacacgcggaaagcaccgcactgaccagaccacccgccgccgccgccgtggacagctggcgccgtggcggttccggatccaccggcgccggcatccgcttcttcgtctcggatgaatttaattggatgctgacgtaggcgtacgttaattcctacatttcgtatatatactccagctgtgtggtggccgctgcgttgtcgcatacgtacactagtcgtacaactttcttcaatatataatactaacaaagtgcaggtcgtagaggtaggcccagtgtacacgcatgtacattgtggacgatttgtatatctatactgccgaatttagtgggtgcgtctttaattaagtttcgaactttccgtgcaacacgatcgatcaactgtatacatatatttgcttctttttttttcttttggcttagctataggttttttatgttttatgagcacctccaaaatactgtaccggtatattttaagattgataaagtcatcataaacggatacttcggtagcaacagatatgtcacttaactaccacttaaaaaaataattagttgtaaacgtgtgtgtgcgaccacccgtgttaagtttataactttatttcggataggatggttttatcacaaggaatctaaccaattgatcctgtgtgtctggatagtatagattttattttctttcttgaactaaatatgcatgcgtacatgtttatatctgcatgtaaaggaagtggagttttatactccctccgtcccacaatataagagattttgagtatttgcttgcaacgtttgaccactcgtcttatttaaatttttttactcgtcttattcaaattttttttgcaaatataaaaaatgaaaatttgtgcttaaagtactgtagataataaaataataaataataatttcaaaattttttaataagacgagtggttaaatgttacaagtaaaaactcaaaatcccttatattaacggagggagtatatgtgtagcatctgtcgctgttagaagtagtggaggagtttttgcttgccatagtaattaatatataggagatcaaaaaatatatatagatatatggatagatagatcgatagatcccaaaagataatgataatgctgcaatttgacagcctactcccccagcgtgtgtagctaaagtgagcgttgaattttcagctgcggttttgttttagcttttatatatacatctttcaggataggcttacataccatcactacctacggctggctgcatattaagtactatatatactaaccttttcattttaaaataaacaaatttattatgaaagtgacacattatagtattatgaatatagacagagaatatatcatattttatttattttagaactgatagagtacttcatataatttcgttgtttctgttagggatcaaatgcgtacgaagcacactacaagataattgagctattgccaccaaattattgcaacaaaaaaataattcgtagcaatatattatactattgcaatgataatttttctgtggcaaataattattttttattgcaacgatctataatcgttgttttatttcgtacttttgttgcaatagaaaataagatatcgccacaaaaaatcgtactgttgcaaaaaaaacatgttctatcgccacaattttaatttttgtggcaatttatatagtacatggtacttttcactattttttgttgccacgatcaacaaattcgttgcaataaaaagattgtcgtctcataatttaacttaattttttcatatggacacggattgagacaaattttatatggaaattatagctctcgacgagatctacaattttataggtgataactttttcatttgaaatcttttagatattcaaatctatgattcaaatctcatttagctaggctcaaatggaacgatatgcattttccaacaaaattgatacgtagatgagttggtaaaggagagcacgcgtgaaggataggtttgggtttgaatcttagccaagacacaaaatcaaaaaaataagtatacaaatagataggatgatagattaatatttaaacttttaatttggtacgtaaaactaatgccacatatggagtggtggcaataatttttattacaacgctgtgaagtgttgcaatatgactttttgccacatccattccgtggcaacatctaaatttattaccacaaaataaaaatcgttgcaataacctattaccacgttgtttattaccacggctagcaacgattttacaattgtggcaacatgtatctattaccacaattttagt

SEQ ID NO: 13010 - DNA, 10454 bp, Oryza sativa
gttaagatatgctcgctccatcctaaaataaaacatgtattgaaacgatgtgtggacgtgagtataaaatagatcgaaaatatgaataattatggcacatatatgtggttaagatggtcagaaataaaaaggtgttggaaaaacaggtgtggtggtggagttgtgggtgtatgactctatccaccattacgtacgcacatgcaagtgagctagcttttaacaggattttagtgagattggggatataatatgtcgctagtgatctgtttcttagagtatgtgttagaggcgcattggcgaatgtatgtaaagtgtagtgctacgtgtgtagcgatgtgtgtatgtgtctacagtacaatataaagaaaatgaaaagtggctttgttcataaaactcactcgtgcagtgaagcaaccaaattcagggaggctgatttatacatagattgtataagcccatgcctggaactggaaggcccaatttaaaagaagagcgaattaaggaataagtccattttgcctccctcatctcttgcgcttgtgtgaataacatccctcaaccggaaaaccgtgtataacgcctccttcatctctgaaaaccagagcaaatcacctccctcggtggttttgctggcggtttcgtccgacgtggcattgttgacctggctgacaagctgactcagcgtggtgggactcacatgtcagtgtgtagcgcgctctctctcccttatctctctcttccccggcctttctcttcacacagtgcggctcgtcgacgtgggtcaggcgcaaggtggccgggcggcgcgttgcgacggagagaggtagccgtgcggcggcagtgatgcgggagagcgcacggcggtggcacgacgcggttggccggcggggctcggccgtgcggcggcgaggcgtggtcgatggtggcctggcacagccatttcgcggacgcgacgcaggtcacggaggcctttgcggcgtggtgcgcggcggccgccggcaaggccaacggccggcgatgcgggcgcggcgtggacggcgatgtggctagggaggtgtgacggctggccggatcttcccccttttctttttttcacttcttctcttctttgtttcttgttgctcctgttgcatgctgagtcttgtatatgtagatgcatgtgtgctgctgcagtttgtcgccggcgctgcttgtcacacaggccccttctttggcaacgtatcatgaggtcgacgcgccgaggatgtcgtgtggtggcggacgaagatggtatcatgaggtcatgtggcagcggcgggcgggcggccggccgtggctccggccgtccatcggcagggcccaggcgaaggcggcttggagaagctgcgtgtattcgtcaccggcgagtgcgcatggttccgccgcaatgatggcttccaatgtggtggctgtcatcacgagcagcatgtaggtggcttggtagaattgcgtggcgacggtttaatgcttggattctggcgaggtggtttccggcgtcgtggccggagaagatggagaggacgcggacgccatcgtggatggccgcgtcgagcgcagcgaggatatacgatatcggcgtgaaagcggtcgctgccgctgacgcggcattcgtcgctggcgcctctccccgccggccgccacccccttcccgtctccccgccgccaatgcccagctcctctccgccagtctacttccccgtttgtcgctagcgagcgccgctgccgccaacgagggccaccgccgggcgttgcccacctctggttctatcctgtggaaagtttctgggagaaacagcagcacgagtgctgtgcgctggatgcgtgttgatcagatgggaatagcccccatcgtggcttttacatatatcgcttcaaggaaacagatccctcaaagctaggaaacaaccatggccggctgaggttaaggttgtatttgaacctgtccagtaacctttctgacaacggttctgtaaaaccatctgcaacttgatcaccagaggaaacaaaatcaatctctaaaagtttatgacttaccctttctctgacgaagtgatagtctacttcaatatgtttagttctagcatgaaacaccggatttgctgataaatattttgctccaagattatcgcaccagatcattgctgcttgaggacttttaatccccaattctgcaagaagagtttgtacccacataatttctgctgttgcatttgcaattgccttgtactcagattttgtgctggatctagataccgtggcttgttttctagcactccaagatactagatttgaccccagaaacacagcaaacccacctgtggatctcctgtcatccaaactaccagcccaatccgcatcagagaaaccactaactagagtagaacctgacttatggatcttaagtcctaaacatgtacattgtttgagatacctaagtatccttttaactgctacccaatgtacagttgtaggtgcatgcaataattgacagactttgttaacagaaaaggctatgtcaggtctagtaagggttaaatattgaagagcaccaacgatactcctatactgggtagcatcactatctcccaaaagagatccttcatgcagagagagtttatcacttactgtcataggagtgtttgaatgtttgcaatctgacataccaacccttttcaatagatcattggcatatttgtcttgtgtcaagacaataccattctcaaccttgctcacttctataccaagaaaataatgcaactcacctagatcttttagggcaaactcccctttcaggtcttgaagcagagctgcagttgccctctctgaagaactggctacaataatgtcatcaacatatactagaacaaatatagtgacaccacctctattcagaaagaacaacaaggtatcagccttggaaccactaaaaccaagatcagtcaactttttacttaaccttgcaaaccatgctcgaggagcctgttttagtccatatagggccttgtcaagtttatagacaaactgtggtttagttggatcctcaaatccaggtggttgttgcatatacacttcttcttcaagataaccatgaaggaaagcattttgtacatctagctgtctaagactccatcctctagacacagctaaagacaaaataattctaatggtagcagctttaacaactagactaaaggtatcctcatagtcaatgccatatctttgcttaaaaccttttgctactagtctagctttatatctgtctagagtaccatcagctttcctcttaattttataaacccacttacaacctatgacattcttccctctctgaggtggaactaggtgtcaggttttattctttactagagcttcatattcagcatccattgctagtttccaatttttatcctttaatgcttctatatcagtagtaggttcaccagactcagtaaaccaggagtttttgtatttaatagtgccatcagtgtataccttttctttgcgaaccccactttgcaacctgatgcgaggtctaacgtggtcctgaggcacatcgtctgcagatgtcacatcgacatcatcagcgacatcattagcccctcctgtcggctgttgttgctctgcaccccctgtcggctgatgatgggagccgatcggatgctgccgcgcgtgctccattgtccgggagtgcctgccagcgtcggggctggagccacccgtgttgccaccggattggccggtgtcgccatcaggttggccactggccaacgtgtcgcccgacgatttgtcgccaggaatcatgtcgccaaagctactgctgagatctgtgggcgctgaaattgatggcgaatcaagctggaggtgagcgccgtcagccccggtgggatcttctacatcctgccactctgcatcgcttccctgggactcattctcatcagaaaaatcattagggtgtggattagtcacatggtttggtggttgttcattccccctagagtataccgcccaaataaatctgatggtaggagttctatctcagacctaagacgagcgccggcattggcatgaagctcagaaaaaggaaatattgtttcatcaaaaacaacatcacgagaaatatagacacggccagtggacacctctaagcacttgaaccctttgtgcatattactaaacccaaggaagacacaccgcttagatcgaaattggagtttatggttattgtagggacggagatttggccagcaggcacaaccaagcactctcaaggaggtgtaatcaggtttctgatgatgcaatttttcaagaggactcatattttggataactctgctaggaactctgttgatgagataggtggcagcctgcacagcttcatcccaaaattttaaaggcatagtcgcatgagacaaaagagagagagctacttcaactatatgacggtgtttgcgttcagcagacccgttctgttgatgtgtatgaggacatgatacatgatgaactatcccgattttagtaaagaaagaattgagagactgatattcacctccccagtcagtttgcatagccaagatttttctatcaaatgtacgttctaccatggcctgaaattcttgaaacttttcaagcacttgagatttgtactgtaaaagatagatccaagtaaatttactgaagtcatcaataaaactaacataatatttctttctcccaacagattctggagcagggccccatacataaaaaaaacaagttctaaaggatgctgagagacacttgttgacacaggaaaaggtaattgatgactctttgcttgttgacaagcattacaaactgactcatttgaagcatctaaacaaggaaggctaaatttattgacgacttgtttaacaatagggatagatggatgacccaaacgactatgccaccgctctagtgagggtttcacgacattgtaggcttccttcaaggatgattgcggcaagggatagagtcggcgccaagacctcccactaagaagcgttctcctggtgattcgatccttaagaaagaaataatcacgatgtaattcaaggaaagctgagttatcatctactaagcggtgtacagaaatgagacttttcttggtttgtggaacatataaaatattctttagatgaatatttctactaggggaatgaacaacagtatgaccaatgtggcttatatccatacctgctccgcttgcggtgtgaatttgttctcctccgttgtatttttccttgacagtaagcttgtccagctccccagtaatatgatcagtggcacccatgtcgatgtaccaatttgtgtctacaccataggagctggtagccgctgctgcaacatgcttattgttagggacaaaatcttcatcatacctacaccagcagtcggtagttgtgtgtcctcgtttgaagcacaattgacagatgggcctcttgtcaacgcctcctccagacgtgcgaccgcgacctcgtcctcctcctgggttgccgcgaccacgaccacctcccggattgccgcggccacggctgctgttgtcgctgtgcccaccttggctgaagttgccgcggttcgcaagattgacctcttgcgttccactataaatggcttgtcgtgcttcgaagttgagaacctatgaatacagatcacttacagagatgggctctacccttgcgcagatagctgagatgacctcactgtagccttctccgagtccagtgatgatatactggatcaattcttcctcatcgatggggcggcctccagcaattgccatctcatctcctagagatttcattttagcgaaatactcaggagttgtcatgttacctttcttcgtgttggtgagagcgaagcgcgtgttgatgcacctggcgcgagtatgagtggaatacatcccctcaatggcgctccaagcctcggctgcagtttcacaggttgaaacctgcatgagcacatccctcgtcaaggacgagagaaggaagcccagaacttgttgatcagtggcttcccagtcgtcgtacaccgggttcgccgtcttgtttgtggcgccatctaccgtgacgctgatcttcgccggtggcttcttcgtcgcaccagtcagatggccttgaagccgtgctcctctgacggcagcactgatttgtaccttccagagggcatgatttgccttcccgagcttctctgtgatcaggtggccttgaagtggattggagttcgtcgagctagacgacaacgccattggagactgatcgcaaggaacggatcagagctctgataccatgtggaaagtttctgggagaaacagcagcactcatgctgtgcgctggatgcgtgttgatcagatgggaatagcccccatcgtggcttttacatatatcgcttcaaggaaacagatccctcaaatctaggaaacaaactgcatgtgataacaatcaaaacaaatcttatctattctaactaccggatcaatatcacatgtggcgcaaggcctatcttcagctgaatcaaccgaacccttatcatgtcatttaacatcttcgcccgtcgccggctgcacccctcccccgccgcccgttgctgagccccgccggccaaccgcgtcgtgccgccgtcatcaggccgtgccaggtcgccacgtgccgtgcccggcctcgccatctgctgccatctgccttacccgtgccaggtcgccgcgtgccccgccgcccgtagccgaccagcacaccgtacgcgccgctcgccgccgtgcgctctcccgcatcaccgccgccacacggctacctctctgcgtcgcaacacaccgcccggccgccttgcgcccgactcacgtcgacgagccgcaccggggtgaagagaaaggccaggggagagagagatagctacacactgacatgtgggtcccaccacgctgagtcagcttgtcagccgggtcaacaacgccacgtcagacgaaaccaccagcaaaacaaccgagggaggtgatttgttctggttttcggagatggaggaggcgttatacccggttttccggttgagagatgttattcacacaagcgcaagagatgagggaggtaaaatggacttatttcacaaaataaaggcgcattcgagaatatatcagcccagtccaacaggttaattacccgtttctcaataattcacctcgccggatgggcttaaatcctttttggcccagcgcgatcgatgaaaatgctgattttttttcattttaaaatttgtattttttaatatttacagaaatattatatcatccaaaatatttacagaaatggcccctgccacccaagtggagggtgacaaggtatgcgtattttgcattgaggtcctttgctgccctctgcaaaggttgcaagtgggcaaatgcaatttttaccctgccaaaaaatgtatttttctagtttttattttcatcttgtccgttcctcgcgtcaccctaccgccctcaggtagggcggcaggatctacttctgtacaacttttcgccggtataatatttctgtaaatattaaaaaataaaaatttaaaaatgaaaaaaaattccaaaaaagctcagatttacgtgtcaacgtgatccatgcatgcagatgaggaacatgagttttggacgaagttcaattattttgtcttcaaaaactatcgatcggcttttatctgagtgcagagcctcccaaccacaaaaccggatagagagtatcccccatctattaaaccagagtaaatcggatctctcagtggtttcgtccaatatgatatgttgacttaggctctatgcacctacttcctccgtccaaaaaaaaaaagacaaaccctagctaggtttccgtgtccaacgtttgattgtccatcttatatgaaatttttgtataattagtattttcattgttgttagatgataaaacatgattaatactttatgcgtgacttgtctttttaattttttttaaataagacgaacggtcaaacgttagatacggaaacccagggtttgttttttttggacggagggagtacgtgacaacatatcactataaaaaaaaacatctctaccctgttttctccccgtatctctctcctgatccttaaccgatgtaatcccagagtgcagaagcagcaacgacatcggaggatgcgtggtgatggcattggaggagctggtcgttcccaacgaccttcaccgacgtgcgtatggcaacggggacgaaggagaaggcagttgttgtgtcggtcacggagaggcatgcagaccgtcggcggcggcgcaccccccaggatgagcatgcaggacgtccgtcacggcagccttccctctcggcgaaatttcggactgaaattgatggcatggcatggcgacggacgggcgcgcgtacgtcttccctaatcccgatagaacagaagatcgcccctgccaaacctgcacagcggcgtcgccatggtcctagacgactcgacggcatcgcacgtacgtacgcacggatcgagcggccggcgtgctcctctccgcgctgctgcgtccgtcactggcttcaactcgcctagcttccagctgctctcaccgacaacttgctgctggggctcgacgtccgtccaccatcgccaccgccaccgccggccgggtgagctctagatcgagctcgtcgcacgccggtgtgaagaaattaggaaaaggtggtgaggatgctgacacctgggtcccacatatctcttcaggttcaggggagctgccatgtgacatgtgagcgctctacgtcaatacagatcgatggacctagtcaacgtacccatatactagtaattaaaagttggggaccttttatatccggttttaatttctgtttgacggacgcaattaaactcgaccaattgttgagggatttcaagtggacttttctgtgcaataatttcctttcgtgtgtgagagtggcccaaaaaatggcccatgtagcccaagttttagagcattgcagtacgtgtctatggtcacaaataagatggcgcgtaggattaaatccgtatgacaatgcgaagtgagggtagcttaatttgttacttaggttccttgggttaaaaccagtccaatcagatttaagtcatagaattgatgtttgtatttacgactaattacgctttcggtgataggtgatatatccatcgatagggagatactcgtggtgactttgtcaatcacaagcagggtttgaaattttgtttcgaaattttcgaatttttggtaatttcgtccccttcggcaagctcatatctcgtccgaaatttttgggtttttacagttttttgtcaatttgatcaaattttattcaaattcattcaaaatttcaaagttttcgaaattttggtccgccccccctcctgcggcaaaaaaaacaaatttcaaaattaaaaaccctgatcacaagatatactgatctaatcttccagaggtgttcatatgggtaaggtgtacatgtgtggattcgtagaagtgagtgtgcgcgtctttatgaacatttgtatcttttttctaaaaaagaatgtatggcaccgtagaaaaaaagaatgtacggtaatatactccctccgtactcgtaaaaaaagtcgtttaggataatatttaagtcaatccttgagaatataaatcatgaataactttcaagttgttgagtttgaaaatgtaaaaattatatgaatagatttctcttgaaaaatactttcataagtatacatatatcatttttaaatatttatttatagaaacaagaagtcaaagttatgttttggagaccatatcgctgtccaaaacgacttcctttacgagtacggagggagtagttaatacggtgagccttaaaaaaatgtttgactccaatccctaataaatttgagtcgcggagattaaagacaacgttttgacataaaacaaacaattgttatagcatggtaaatctcagtcatctgggctgcagaacattatataatactccctccgtcccagaatgtttgacgccgttaacttttttaaacatgtttgaccgttcgtcttattcaaaattttttatgaaatatataaaactatatatatacataaaagtatatttaacaatgaatcaaatgataggaaaagaattaaaaaatacttaaattttttgaataagacgaatggtcaaacatgattaaaaaagtcaacggcgtcaaatattttaggatggagggagtagtatatattaaacataccatatgctgccatgggccgggcatcactgagccaccaagcaaagtgaggaaaagcgagagcaaccatcaggccctaaaagaaaaggcaaatcaggaagaaaacggcacaattgccagccacaataacggaggcatcgtttggggagtactattccccccccccc

SEQ ID NO: 13011 - DNA, 682 bp, Oryza sativa
ctcccccactccccacgttggccggcgaaatccctcccctaccggccacgtccggggctcccctcccctatttaggcttccccgtcgccccctctcgctttttccccatttcgccgaactctcccgagctccccatcgctcccgcgccgtgcaaccacccgccgccgccgtttccgctactccagccgccgctagccgccgctagggttgccgccgcaccgcgccgtccccgccgtcgggttcgcgaggctaagctctaccccggccgccccttccccgtcgagtttcgtcgccggaattcgcatcccctcgcgctccggtgagttcaaccgctatcgccgctttcggccatgaataccggtcgccgtggttcatctccctctctctaatctctctctcttccttccttagggcaccccaaagcctgtccgccggttgccgtcgccggtaacgcgttcgcgtgtgcgcgtgccgtcgccgtcgccgcggccggtcggccttgagccaagccgagccgggtcgccgccgccccttcctccccccctgagccgctgaccggtgggccccgcgtgccggcgccccttcctccctctcccgagccgctgaccggtgggccccgcatgtcggcgccgcccccccctccgtgctgacgtcagccctgggatttattgcacaataaatg

SEQ ID NO: 13012 - DNA, 23208 bp, Oryza sativa
gtacgggagcgacgtccttggccaacgacgaggaggaggaggaggaggaggaggcggcggccgggagcggtggcagctgccaccgattctagggtttttatttttttttgaatttttttcggatttttgtttttccatgcggatgtcataaacacccgcacacgaagcaaaaaatcacgatttttgcagacacctgggtgcgtgcgggccacctacccgcacataaaaccggttttgaccgcacacgaaaatctttctcgtagtagtgacagggttatgaaaataagcaaataattaaggactcaaagaaaaaagcagtcgagtccctccttcacttcttcttctaatccgatgaccaagatgacaaagctgatggtgacgactgtgaggacgaggttgactgctgaagatacttcccatcaagccacaaacccaacatgggcctctcacaagtgaaggttgaagcgaacccgatgaataacagaagattcagtctaaccttaaaaaaggtatatcggagacaagaaagggcatcaaattggtagcagcaaactggagggagatgatttaaacggccaacaacaccttgtcattgtggaggaagaagacctctcaccgttgggcaaatatgctacacttgttgactcaaacaccaatgaagaaccccgtaccagccttctagatggcacaaggcaaagcaatctatgaatttagagctcaagtcggtcatggaaggaggtagccaggatgaaaaagacgggtgttggcatttccatcgagctatataggaaaggggaagaagtggacctggtactaagataaactcgatatacaataggatgaacctgactacgggataaacctgacggctcccctaactctccatcctccctcgtcggtgactagcggccaccgaagacggagaggaaaggggatccagtggaggaaaagaggagtcgctcttttcttcgctcactaacagagagaggataaggtcaagttgacccctggatgatgtatcttattgttacttacccctctaaattgttagctagaattcaaattgtcaaggcctgattgagcacaaattctcccacttaattgacatgtctcaccgctcgctgcctatgctttgtaggtatagacgctttgatgcgcacacagtgacgataatgattgtaacatgataatacccaccggttagcaggtaaactagacaatacaagagagaacattgcaatataggagtctactacattcattcaaaaataaataaatctaagatatgatgagatattttctagtacaataaatttgaagaaagccttgtctaaatttgttgaactaaaattatcacattttactctaggatgtttattttgagacatataaagcctgttcactttgatgctattttcaaccttactaaattttagtaaagttaccaaaaaagtggctacatttagtttgttgccaaattttggtaactatataagaaatcctgccaaaattttgataagttgccaaatttttggcaataccaaattttgataaggttttttttggcatcaacgtaaacaggcccatagtgtagttgatatgagtcgtgacaagacatgcactagccaggaaggtcgcagtggcagatgagatggcttccattcccgttaaaaaaaaaaaccatgcagaactattttctgttgtggcacattggcagcgcccgaatgaagggccacgtcagctcctttgtccggtgcgtaacggttaaaagcggtggacccatccaacatggccggaccggaccggaccacccgctgccactatcaaccaccacagtatgccacttccactgtccaaccttgtcttgttaagagcaagtttagcgcccctttgaattataggaatgaaaaaacggagaaataagaaaaatatagtattttaatatgaatgtaagtgtaaaacagaggattgtagaacacagagaaaacgtagaaatgaccgtttgattagaccacaggaaaaacacaggaatttgaggagagataaagactcaaagattctatgaatttcctttgaatcaaaggggaccttaatagtataacgcaactaacaactctaatttatctataatcaatgtaatagctaattcatacaatagttatttactatactattaatatatagtttcacctgtcatatacatattacgtcttagagtccgtgctgtagttgtctatatatcggtagaccgctgctcttttatcttattttttatcttattaaaatatatttatagctggctaatagtctattattgttgtacctgctctaatgctaatgctaatctaagaggaatcccatcaaatcagcgagtaagggttcaccaatcaccattgacgccactctttcccccctcccgagcacagagcagagagagagagagagagagagagcgctgcggaggagaccgatgccgccgccgccgccggagccggagccggagccggtggtgatccacgcgtggtcggcgccgcgctccctcagcaccagcctcatgtactccttcgcccaggttcgcgccttctccttcgcctcgcctcggactcgcccaccccgctgcgcacgggggatccccctgggccggcggcgagtcggcgaaccgggggccaccgccgcaaccagctgcattacctgcacggccggctcgcttcccccgtttcgctttctgatgattttttttttaattcttgtgtttgggatagagggatgacatggaggtgctcgacgagccgctctacgctaatttcctgcgcgtcaccggcgtcgacaggccgtatcgcgaggagcttctgtctaacatggtaaaccttgacaaatggtttgattatttaatcacactactaccgttgctactggagaaggaaatttttgttgcgtgatctttgcggcatttagtaatggatgtttatttgaagtagcggtcgtttggaactgaaccaaatcagctgtaatcatgctcttctgacatgattgaaacttgaaaggatggggagatggttttgacatcctgcttcgtgaattaccttttttttttggttgcttctagcacttccctgactactggacctttctgtccaaatgttctcaatgtcttaattagatcatttccatttcaatatcgaaaataatactgtgcaccatccttgtgtgtgctttttaaaactagctctgctaagttaccataaatttctatactagcaatatgcatggagcatggagccttctatataatagaatcactaggaatacttccagtgcaggatcctgatggtaacaaagttatcagtgaagtcatttttgggccagggaagagaaaatatcgttactgcaaggtagattttttattttctaagatgttgctcacagatttataaatgatcccttaatccctcaatcttttgtttgtagcacattgcaaagcagcgcctccctaacctgtcaagtgacctgatgaaaaagggaaaacatttcatattgatacgcaaccctctaaatatcctggtattactgccttttgttttcagtatcacatagacacatacatttttactcatttttgctttgcatactgtattgtgtatatatttcctcctgctaatagcattcaacatacctcagccatcatttgacaaagtcgtcccaccatcattctttgagctcggcatagcggaacttgtctcgatatacagtgaattgtgtgagcttgggagccctccgcctgtgatagatgcagacgatctacaacgggatcctgaggtatatctattcttggatattcaatgatgttattactgtggacactatctacttaatatagtgtgtggcatgccattattttgtagtgggctgctttgaagggcatggcattgcagtcctcaagcaattagtctaggttatactacactaataaaaaaatgaagttcatattatcttcatttttttgaaatcatgggggcctgaaatgatttttcatattagattgaaaaataataatccttgagataatttctaatattatgacattatctcaattcctgtattgcattcgcaaattgctttgtttttacttcacatgcaggctgtcttgagtggactatgtgaggatctaggtattccttatcagccacaaatgctccagtaagtatattctacatggtaaccacgctaaaattttctattgttaagtatgcacgttagaacaagcatggttggacatcaagattcaaaggcctgttcttcctttttagatgggaagctggccccaaggactttgatggtatttgggctccctggtggtataggagtgtacacaagtctactggtttctctatgccacgccgttatcctttggtaagcttgcatcaaacatttctttcaattttcagcatctattcttgtggtttttgcaaagttagtatccatatcatctatttttcaagacaagtattgcattggtatagatagagaacagaggacctctgaagcaacatgacgatgtaacagggagttgaaggggtcgcttgcagaaaatgtgcttagatattgtaaaacaaacgtgttatagctaaagcgagaaaaccagatggttggggataataccttagatgaaagttatttgaagttatgtacgtatatcttcatttggatagcctgatcattctgctgaatttctagatcatcccatctaattttttgcaagtagtttttttcaccattgtattgaatatgttatggttcttgcaggttagctttttgagaacatacaaacaatagggatatttggtttgaagaaataacttttggaataaataatagagcagtgtgatgatgctggaaaggtccaagctgaacttacaaaaatggtacaaaccacaaacatgaaaacaaacatacatatatggctaatctgaaagcaagaaaagaaaacaccaatgctgttcaaaagttcaccagatagattccttggttttgtccttaaatagattatgatacctacacatgatcatggactttttggcatttgtacactccatttattcgagaagaacatttttgcgtaccattgaaccccatgctgcttcatataggagtcaaccatcaaatatgaaacaccttatttgaaaagagctgatctgttaagtaaatatgcattctaacaaaatatccattgagatgtaaaagagtttaaccttattgagtggcagccctgtcaaacaagtttccgttcctaacaagatgcaattcatttcatcgtgagttggtgtaacatttggtacagcttttaattatcattgactttctctattcgatttcagacttttccatttgctttgtatgatctacttgaacaaagcttgccattttacaacgtgctgaaacgccatgtaagcaaaaccataggatccccgcaaccaacattacctgatcctcctcttccagtacctgaaaataaaaaaattcttgtttgggttggagatgagcttttgccccgtgatagtgcaaaggtacatcacttataacttttggtatgctctcagtattataatggtcacacttgagcagttgttccttttttttttattctaatcatttatcttgtaaaggtttcagtatttgattcagttgtacaaggaggggatgctgtgtgggaaggattacgtatatacgatgggaaagtgttcaaacttgatgaacacttggataggtgcaataactatttctgtatttccattcttttttctgcttgtgatatatgagaagattgtccttatgtttttatctaggttgtttgattctgcaaaagctatggccttcagcaatgtgcctagtcgtgattgggtaatttgacttgactgctctcatctatactgttcgttacattgcaagaaatatcaaattaatctttgttaagaatctttgatgttctgttgtgccttttttgcattgatgtttcagcttgtgtagtaatagtctctgaaattttggtttctaatattaacagttgtatgtccaatgaaaagattattgctgtgggccaatgttgaagtttgaactactcctgaatcaagcttccattatgtgcatgtttctatgcagattaaggatgccatctttaggactctcaatgcaaatggaatgttcaataatgctcatataaggcttacactcacccgtgggaagaaggtaaaaagatgaacctagattcatcagtagtgtcacttttcaagtatatatatttgtcgacatctttgcatatcctgcttgatcacttcattcgctaccttcaatttcaaaaaactgcaggtgacatctggaatgagtccagctttcaacctctatggatgcaccttgataggtattcatcctcctagtcctatcttgcttgcatgagaatgccaagtatttgttttcagttttccaccttgtggcataaggacattatgtaggacaatgtgaaggtttagctgcttaatcacctgtagtgcttggtacccatactgaaaatctggcgttgctactgttggctggccagtgctggtataaaaccacataaccaatgatatagagtagcaacttttgagtgcctagcggtggtatgctattaataaattgaccaattgtattgtgaaaaatatatgtatgccactatatatgatttgcaattctgtggaaaactaagtgggtgcaataatgctaatttctaataagacctgttctttcagtgcttgcagagtggaaaccaccagtttatgataactcgcatggaataaagttggtaactgccaccacgcggcgtaattctccgaatgtaaggtccatttggaaacatatacatgatccatgttaatttgaaagttcacaaagcatcctgtttagtttcctgtttgggaataaacattgactttggctgctcttacgacttttcagagcatagattcaaagatacatcacaacaatcttatcaacaatattctggcgaaggtactttatcctttagatttgtatagctgtccttacatacatttttttaaatggagccctttattaattgtaatagcactaagttgctaatgcttttatgcagatagagggtaaccttgcacaggctgaggatgccatcatgctagataaagatggttttgtatcagaaacaaatgcaacaaacattgtaagtgtacatggctgttatcattaacatatctcgaatttgcctcaatattttttattgaaggagagagtttacctcaattttattcataacttttgttttctaaaaatgccactgtgttaattgcagtttatggttaagaagggcattgtgttgacacctcatgctgagtactgccttccaggcattacgcgtgcaactgtaagtctaatcaggttccagttggaaaactatcagcagagccaatctaaaaaattggatacctccattggaatgacatggaagagaatttattagaacttttctgtctaattgcagccactactttttcaaggagcgttattgcaatacacatttcatttatacactattttgacttgtacaactatatttgtactggaaattattgtgaaaatcagagaaatttttgtttttactgacaaagaggcccgataaatattgaatatgaggaaccacttctgttactccctctttttataatatatcttgaggttcttgaatcacgggcattttataaattatcttcaagagaaaatgtaaaatatctgatagtggctttgtaccatgagatctaccgagttactttgtttggcactgatagtgccttttttttttcttttcgtttcctatgaatgcaaaattgcaaataccacaatatgtttacctaagcctatagttatatcatgtagatattttttactggcttgctgcatcatgacttcaagaaatatgttgtatctacttacgtgcaaggaagacgaaatttgtggtttcagttagcatgaagcactatgtgattatcaagttgaacaaacttcttttctggaaaaatcagaagagtcatatttgctgatgctaatatttttcatgttggatgaaattaacaggtcatggatcttgtggtaaaagagagcctggtgttacatgaacgtcgcattagtttatcagaatttcatgctgcagacgaggttccagtcttattcatggacataagttcatatatgatttttccctctatgcaatggtgaatctttgttaggaacaatgaaacctgccttttcaagaaaaaaaggaagtgtttatggttttaaggaaacctgcttttctagggtaaaaagggtagagaaaatgccatgtgcagaggtctgaattggcttgaccatagaacccccgttacagcgtgtagtactgtaatcctctgagtaaacgaaatgatcgacaatactccctccgtttcatattataagtcgtttgacttttttcctagtcaaacttctttaagttggaccaaatttatagaaaaaatatagtagtattttcaacacgaaacaaacatattatcaaaatatattcaatgttagatttaatgaaactaatttaatattttagatgttgctaattttttctatgaacttggtcaaactttatttctataaacatattatcaaaatatattcaatgttgctaaatttttctttaaaaaatcaaacaacttataatatgaaacggaaggagtattattttgcttacttgaatgaagcaattgtgattatcaagttgagcctacattgttttctgaaaaaaaaatcaaaataatcatctttgcatatgctaacatctttcatgtttaactagatagttcttatctaccttttcatgaattactataataagatggacatgttgagatgttctataacatttacttgaaatctgaattttgataatgggggttttcacctgcaggtatggactactggaacgatgggtgaaatcacaccggtgagtttacatttttgcactatgcgctcatgttttcccttagccatttaacagcacagctatctgatggttttgttgaatttaataataaatatctagtttacttgcatgtattctgttttctaaaccagagtatttagtcactctagtcaagtggccattttacacctaagttattatcataaaattgtgttccctattaatcggggttttccattttgctagtattttattagatacgtcaagcataaatagactgcgaacttgtaacagtgttggcacgtactgcacatatgctcgttgctgacataatctattctacaacaggtcgtaatgattgatggtcgtgaaattggtgacgggaaaataggtccggtcacaagacaaatccagaatgcatacaaagtcataactgcaggttctggagtaacaatacccagaaatgccgatgaataacaggtgtatatgccttcctggtctacctgccggaaccagtataaagcaaacttgattgttagagaaataaatgtgaaaagatgcatcactaaattgtcgtgccaattggaaaatgtgtatgaagcatgtactctgtttttcttagactcagtaggggttttcgccaaaattgcagatttcatttgtggacgattatgaattcaataaacatgtccaatgctagtagctcagtttggcactgtggtggcctttctaaaaggacctgtgcattatattttttttcttgaaaagttagttcaaagcatttatcttgaggccgatagcctcgtgaaaatgactaaatattccttttcagaggatttcacggtgcggtaccaccccctcattcggaacaaaggaatatagtaaagttgcatgtgttccaaacatgaactgtcatttaaaaaagtctttatgcattttattcgaccccattactcaacctggtaatttttttcgtgaagaaaacggaaacctagatggttgttttattcagagtttgatctccgtcggttcatcccctaaactgagattttaacattagcataatagtgccccccaaatggcattcaaatttctgcttttgttttaggatcaatacgccaaacaaatacgtgccacatggtacatacattggtactcagcaaaggaatgcttcaaccaggtaaactgtaatcactaatcagaaatagctctgtccatgcatcccatttactccaacatgataaaaacattcagatttccaaagagccaaagcaggatgcacacagaacataacagtaaaggagagcaaaagtagctgcattatgcatagatactgccagtacaagttaagcagatgatccatagaacgaactcctgcaacaaaatactaccttgcatcaactaccaattcttaactttttcgacgaatttgctcctgtacctggagcgcgacatatttggcaagatcactaatgatgctgttattgcatctctctgaagctaagttttattttggtcggtcaatcatgtttgatgaaccacgctaaaaaaatgtttgaccgcggcgcacggtccagtccaggtgaaaatatgctgtgtacaaacgggcctttttgttagcccacataaaaaacagcccaattacggcctttgctgcatatttaatttggcccactgagcctacaaacaagcccatgtaagaacggccgaatagagaataagttcacttttgatacctcaacttgtcttcgagcctgaaattaccccaactcacaataccatgtcactcaaggtcataggtaatattatacccaattttagctgacatggtgggctgagtcaacgtggaatccacgtggactaatttttacttctttctctttccacctctcttcatatctcatttggggcagcatgcagtgggcagcgtggagagcacagtgggagatgcagagaggacggtgggcactggtaggaccgtaggaggctgtcccgtggtgatggaagtcagacaagagaggagacggcggctacatgctccccgtgccaatccgcggtccacatctctgactccgcttccggccagtccccgcctccgccttcgaccggccctcgccttcggctagtctcgcctctacttcggctctggctagtaagcgacggggcattgaacgagaaaaaaaatcgtccacaaataatcaaagtatcatatgccttgaaaatgatataaggtgctcggaaatggttgaagaaaatgaataggagaatcactatgactatagtctatagcccttggtagagttactaaagaagtaaatgatttatttgatattatggttgactagttacgaagggttttagacagctagcctaatttccttgtggaggatgtaagagaagaggaagaaggagaagggatggctgttgacatgtggagcctacatggatcccactcattatgtcaacaaaaaccaaacactatcctactaagcgcaagtactacaatgctccatatgctacccctaagagtgtcacattggattgagtgatgaggtggaggagagaagtgaggagagagatgatgaaccacccctaaattaataggcaacatccacataaattttaaaaaaggtgtgagagtattagagacattggtatttgtatactagaggtgacatattgtatgggtgaatgatatggataaatttggatgtggtagtccacaacacttgccatgtagactcatatgattatgtggaggacagaagagaatagagagagagaagaggagccacccctcgtacaaggagcaacctccacacaaatttcaagaaaatgggagagagagaaacggattggtagcaagtgtattgggtgtagtgtaagtaaatgcaatctattatatgtattacctctaagggcaagtacaatagcaggctataagtccgctgtaagcacatgtggagaagagaagagtgagaagaaagacatgatacagatttgtaaccagctgcagcgcggattccaatacattgtgtgtgaatgagatgtgtgaccatatattaatgatgcagtatatgttaatagataactattgtataaataaactattatattggtttatagataaattagagctaatagttggctatagtattaaacttgctctaaattaatgtatagatggtttaggcaaaattaaatgtgaccactacctctgctataacacatgctctaagggcagtcccaatccatagtgtccataagtagtgtctatggtgccatgtcaataagacatcacaatagaaactacactatacaacccatggtttcttaaagtgggccattaataaatacatcatctctcttctctaccaatcatatttattcttcatctattatgaagacactattatctcccaatacaaaacttggtagtgtctagtacataggttctcgtgttgaagctgtgtcttgcatgagacccagtttcttcctctcttcactctcttaattaatatagtaccacataagctaaaagtcctacatgacaatgtagttaataccatagacaccatcctaagtggagggttgggactgccctaaggaatcaaagtggagatggtactgtgagttaggggatgagttatccctaatatatttcggttcatgtacgaattttagacttgatgatgtggagggatctaaaagtggacttattccccgaataaataccgcccgaaggccatatggccaactcatcggtggcggatagagagctggaattgaatcgcgtgagttgagttgaatccaggccgttgatctcccccctcccggacggcggcgcgagcgacggtacggaggcgcggcctccggtgggcttgccgtcttggatagaggtgggcattcggtctaaccgaaaatttcggtctcggtcttcggtctttcggtcttttcggtatttgaaaagtgaagaccgaatttcagtgcaaaaatgtcagaaccgacaaattcggtctcggtcttttcggtctcaatctcggtcctgaccgaaattcaacaatattttcatatatgcaaagaaataatggaaattttcaacacaaaaatcacaaaaaaattcgtaagcacttatgagtaaagactcttattaggttgcatgcctagaagaagtagggatgtgaaaattagagtttaatcctattaaacatagtggattgtaggttgcatttagacattttttttagtaattcggtcttttcggtctattcgattacccgaagagactaaccgaattgaccgaacaaaatttagtctttcactatctaggaccgaattgatgaccgaatttctcggtctcggtctcggtctttcggttcaatctttttctgcccacccctagccttagagacggagaccgaagcagttatgcaccgaggccgagaaagaagagagagagatatggtctccactctccagactccgaggagtcaaccttcctcggtcaaaccgagggagcagcagcgccagctggcacagaaaaagcgcccgagccaatcatgggccgctgcccggtgggcccaccagcccagccgaagcctgggaagcctcgggccatgcgaccgtgcagggcccacccggctctctctcccggatgcaacggggagatctccggccgcacgtaccgaggaggtggcgtacccacccaccccgccaggtgggccccacccgtcggtctcggggggtctccacctgcgcggtattactccagcctagttgcagttgcagttgcagttgcacttgcgccgttgcgttgcgcgctgggctggctggctggatgcccccaataatgtcctgcacgtggcccaccagcactggctgggcccacctccgaggcttttccagtaggggcggtttatttttgcacatgagacctctctgtttgtgatttttttttttgtttgtgatattcaattattatgtttgggttttgttggctggctgaaagaatgagaatgtcaaggatggacaacagtgaccgaaatggtcgtttgtatgatgaaaagaatgtctggatgtgccttcacgaatactaatactactatgacatgtggttttgggtgactatgacatgtgatgacggatgactaagaggaagtaagtagtttgtaatgtaataatcctatatacttatatagttcatccccactaagtgtagttaatgatatttctctcttctctcattcaaccacattatcccaatcatttctagcttttggatgatagatctatggtttaaatcgtctcttctttactttctcataacaccatgcaatcttacttatttttaggctcaaaattcataagtatcaattaattttagttttaataattacattgcatcttatgtgtacacgttatgtaaattaatttcccgcagcaacgccgtgggatattcatctagtttatctttagaggatgtttgtaatagtttaatactcctatcgtttaccatttagcttataagcagcatctaaaatttaaatttaaaacttatttgaagtagtatatttttcaacatttattttagactgctaagaacacacatatatatacaaattgtttttttttccgataagctgttacgacttacaaccagcacaagcaaaatgatcacggtgtaattcgatatttggtcaaggatgatgggtttaatatctcgagtgtgatacatcgccatcagtagagtcattgtgttgaggtttgcgtaattaagcgtccatgtaaaaaaatgagagaaataccatgcgtcaaatttggtgtaatgaatttcataaaactattgggcaaaacagatcactcattatggctatatatgagcatcttacacaataactgatccaatatttattattgaggtggcctttaactttgtttaatcactacttcatttgtcctaaaataaacaaacttagtactctatccgtcccaaattatatggtgtcttttttaaggaaaattaaactcggtaacttttgactaataatcatactaactatatatatatatatatatatatatatatatatatatatatatatatatatatatgctaagtattatatatgttacataactagattcatattttaaagtactttaatatgatgtatttgtaactagaacataacatgaaataaatcaatgatcaaagtatgtcattgaaaaccgtgtaaaaaaaatatagaccttataatttgggatagagggagtacgagatataacacatcgtagtatctagatagagacatctagattagtagtactagattgtgtcatattccgtattagatttgtttattttgagatgaacgaagtaatcgcttagcttggctaaaaagtaagacaaataatctagtctaattttgctttggccgttgcttcttcctattgttgctgcggtgtacaaacttaaactatctaacaaagagtttgttgcaagacacataaatttattttaaaaattaatcgagagatagatgcatacaaaaacgacataattatatgatatataatacctctgttttttaatagatgacgccattgactttatcatatgttcgaccattcgttttattaaaaaaaatttacgtaattatatatttttttggttgtgagttgttttaccagttaaagtactttaagcatgatttatatattatatatttacatttacataaaatttttttgaattagacgaataataaaaacatgtgtttaaaagtcaacgcgtattctattaaaatagggaaggagtataatccaagcaagacagcaccaatcggtgtgaaaacatcaaacacagtcacagcacaggtgacacactgtgtgacaactgacaaatgacaaaaatccggtaggggagcaatcgtaccaaaaataaaagaacagagggtccaaaacggcaaaaaaaaaaaaaccggtattccccctcccgtcgccttcccgtcccctgctgcgtttgccgtcgcgtcgcctgccgtgcggagccgagccgtacgtaggccgtgagccgacgagggcggaaaaggggaaggcaaactacgcaagggaaaccccaaccgaagcaacaattaaaaagagggaaggtggccgtggtggcctcgctgggattgggggatcagaggaagcaaggagatcgagagacgcacccaatctcccaatcgcctcctcctcctcctcctcctcctcctctctccgtcgccgaagatttgccttgcctccgtctctctctttctctcccgatggaccagctcgtcaatttcatcatccgcccgcccaggtgagagcctctccgctgacctcacctcccgattcgtggatctggtgggggggatttcgctttgcgtccagccccgatttggttgctgccggatttgggggcgtaattccggcgggatttcgtgggttagtagtggggcgtgcgggaccaggggcttttgcagctcgattctgtggagtgtctccccccgtgtgtggggggttaggcttctgctgtgctgcgaatgtgtgggggtttctttaattgtgttctcttagaaattgtttagctgagagtcggtggatttctctttctagagtactttttttttaagcgcgaataaggaatgtgtgagctgacatacttgccaatcagcttacgttacgggatgcttgtcaatcgatgttgtagttcatgggcttatcaatgtggcatttccttgcgtatccttaccagcaatgcgtgtgcatccgttccagcataacaaagcgttctacttgaccgaatacgacggtttcgggagtagttcttgctaccatgaactaacaagctaatattgtttttttgtgaccttttatttcacgtgtacaagacgttatgttcctttgagcaactcccaaattatatgttgctgacttaattaacttgtctgttatatgtcggtatattgcagagctgagtacagtccaaatgatgatctattggagcaggaattcatgttgaaaggaagatggtttcagaggaaggatttggaggttatatgtttgcttcaatctgctgctaaaagattaatagaaaccttaggattatctacttctttttgcgttttagtaatacttttgtattcgtggttaacgtaataaaatctacatattgtcacatttgtgtctcaaaattttaataccaacatatttttcttgtcctctgcttcaaaaactagaaaagcaattcttgcctctggtgaatagcactgatttgcacaaaaaaaatggcatcagtttttatttcctcttcatttggtgccccaaccaaccgggttgcattggtttttgcatcttaacgagaaaagagcttcagctaaacaggataaatttagtctcttagatttctccttgtttctttcatggtgctctggtttaatatatgcaatatctgtttcaggttgtaaatggccagggcaagaaattgcaatgtagccactacatgcctgttgtgattcctgaaggaaaagctcttccttgtgttatatactgtcatggaaacaggtaggggtatactatatattacatgttaaatacttgatgaaaaatataattactattgcttattataggtcgggtgtcagttttagcaaaatacttttacacatgtggcgtccctaatgaagcgaaaatataatccttacatatgctaatatattatattctttgtattttctaggcattaattaaatggcattattttttttccagtggatgcagagccgatgctagtgaagccgcaattattcttctaccatcaaatattacagtctttacactggacttttcagggtctggactctctgaaggagaacatgttacattaggctggaatgaagtgagtcattcttgtacttatagaagataaatatgatacttgttcttttttaaaaccttctgtttgtacttgttcttttttaaaaccttctgtttgcttgtaaactttgtgcattcaaagctagttgaatacttcatatttcttcatgttgtcgttcagaaagaaataacctggaaaatgattataacagctattaaatggagggctagagagtagagactgaaatataaacctttctacagaaatcatattgacatgcttcttcttcaattctgcatcagcttgtctcagtaacagcacattgccagcaaggcaccaagcatagatttttttaggctaatgcaattcttttacactattcgaagagcataatggtagatgatatctgtttttctttacagagagaagatctgaaagctgttgtcaatcatttgcggacagatgggaacatatcttgtattggtctgtggggccgctcaatgggtgcagtaacaaggtatcttctttaaatgagtaaattatgttaggatggcattcatctttagtattcttttaggacacctgctatcccaatacttgagctgctaattggaaaagagtgatgccgattatcatcctttagtatgtgaaatattatccttaagtatgtagcacctgccgcccccaaaaaacacccacagtcccacacaaatctcctcacatttacagtcgttgtcctattgtacataatacacatcatcattctatataattttagccttttagtgtttatgaaatctgctatctttatttttcagtctgatgtatggagcagaggatccatcaattgctggaatggttcttgacagtccattttctaacctggttgacttgatgatggaactagtggatacatataaatatccactaccaaaattcacggtaagcatcatttgatgaaatgaactttttgcttttcggtgatgaaattgttggtccagtaactattatagttgatatgtgctttaactttactgtgctgttattaacagttgctctaaacattactcccttgtggcacctgctaccgtgactgcatgatgcttgcaatcatactgcattgtaccgcataagctagcttatatagatgtcatccttggctgataatccatatctaatcgtttctctgacaaataaaactaaacaaacaactaatcaggctttcattgaattaataaatccgttcttataatctcttagctgacaaacttggaaacaaactgaacttgtgtagaaagcaacctagtcttgccattggatgattgaccttattggggacacccatggcaactatcaagttagcaactacaatttgttccaatggtgcataaactgtttccagccatctgtgcatttctcagaagattgtgacatctgttttttggtgtttccagttatatttaatttgttaactgtactaattttatttgatgatagatatgcttagtctttatgacagtgtcataagggtaggccccatatttgtatcttatttattgtggaacttttgtttgtttcttaggtgaaactagcaatacaacatatgcgaaaggttgtcaagagaaaagccagctttgacatcatggaacttgataccattcaggtttgctaccgtccatatactaaatattgtgttgctccaatgttttggctggtgtagtgatttgcccctccttgtctagattacacgcattgtatccatgggggaagatttcatttatcataatctttgacctctttatttgattttgattcagtttgcttttggtattaccctttttctaatctctattttgtgtttgcattcttatttttggttattttgcatgtcttattgaattttaggagcttttgctatagcatctctgttctttttcaattttgatgcccagccctagattgctaggttggctttcatatacaattctttcttcattccccccttgtgcccttgagtaaacaagagcagaaggctgaataagaaacaaaggaaggcaaaccttttcataggatgtgcatgcattttcttctcccaactgtgaatgacactgcaattttatttgaatagccaaatacttgtgtgttgcaatctattccaaacaaatatgtgacaatttctaaacttaaatggagatatatatttctctagaaaagaacatgtacagtttgcaccaaaacatcaccatacaaatagagtcttatatctatccacagaagatactgatattcaagtggtggtagtgggatggcatactgcctccaccactactatatgttgatttatatagttgagataatcagataatgctgtaaaacacctccgctccatttatttgtgacagttgtgaccatacatcagtacacaattaatatctgaaatttaatttttcaggtagcaaagcggtgctttgttcctgctttgtttggacatgcgactgaagatgattttatactgccccatcattcagacaaaatctatgaatcctatgttgtaagtttccaccttacccttcaatgtggacaaatgattcctttgtctgataaggtagtaatatatggttgatttaaatgcatctgcagggagacaaaaacattattaaattcgatggggatcacaattcaccccgtccacaattttactttgattccataacaatatttttccataatgtgctaaaccctcctgatgttcctgatgaccattatttcctgacacctcatggaagccttggtcaggtactacaaattgacatttcttagagtgattgcaatatgttcaacatatcttaccttaggtcctgctgacagggtcattgggatacagaacatgacatagagtataggttcgctcaatcaccaacaggtatgattttgcaaacctcgatctgcagttatgtttggtgcatcaataacagtatgaacttatgtgctatttgttatgggacagcccgcacagctaccacagaagatgccattgcgcagttacgttctagaaggctcatgagtagaatggaggtgggtattttcattttgttatcattctgaacaatgctaaaattctattgtatctttgtgccagtggtcttggaagtaaccgatagtcatttctgtctgtactgcacatggaaagtcaatcactagaattattatattggtgatcaaaatattactaaataagttttcatatctgaggcagcagtgatgtctcctttgtggaggtggagcagcaaaagtaactcatggtttcttttgattgttctccaggtcccaactggtgccactgcagaagacagggctgacagaaatgaggtatattcttttttgctatttttcaatactttagaatcatattcaagtcatccgtttctttaaaatcttctacctgatcatccactaccagaatttcacatggtcactgttctttctagaaaaaagaaacaaatgagatgcttttcacctagaagtgcaatgctagctcataatgatttcccaagaatcatctggtttaacgtgtagaatgattcgacacctgcattttcgggatagttaaattaatatattttacgggaaaaaaatgtgagataggtggttgtttcagagcaagaggaggtggcagtggtaaggtccagactccataggggctactgctactgctaccagtgtcaagtgagaatggtgggtttggaagagaataatggggcttaggtgatgtttactgaaaagaatgatgcatagaagtaatagaaggggttagggccctagttattcgtgcattctactgattaggactctgtttggtagcagagtattacacaaatatgttcatatgccaagttcctaatatatcagtgggagttgttcctaataaatcacgcaacttaaccataataaaataatatattctttgttgactggcactgaaatcgatataattcaaatgaaataattttgcactatgaaaattgaatctcatactagtaatagatatgtcgataactcgatctgaaatagaaactaccatataagattattcactttttccaactgaagctgtaatcaatactgagttgtagtgccaattggatctgagtagaatggatataccaaatacatcttgttcaaataagagcacaatcatccttgacggtgttgggattgtggctgtagtatcatcattatgacacatcagttttctttcagtatatatgtggatgatacaaatcttttgagctttcagaatataatgctcagagtatcaccactggcattgagattgctattcgattctgtttgtacaggtaatggacagtgataatggtccttcctcttctagtgtatctactgcaactcctcctaatggccgcaatggaaggctcctgactccaacctctgatgatggcgagtatgtggagtactcatttgatagtctatcagatatgccctacactgaggaagatgaggatagagtaagttataccttaacatccttcagatttttcaccatgtcatcatgttgcactaccttttgttgtttccaagacaccctcgtagacggttcaacatgcataaaaacattgtgtatcacagaaaaaaaagatctagtactggagaatggttgtgttggcctgttgggagatgtggagctgattaggcccaatatatttaactattgatagctttgctataagaaaattggattcagcatgtggatgggaatattacaaccatctaactttttttttgttggccaaagcttaacatgttaatatggacttctctctaaatctttaattgatatgtctctaaatcttaacctgttaacacgtgttttaagaaggatcacaattaccggttgatgtttccattatcagctgtttatctcttttttgctatactgaaatgcagatgctaatgcaagcaattatggagtccttgaaggatcttgaactgtcaaatacaaaagctgcgcaatctgccgcatctgatgctgcatccaaagaaaataaagaaaatggttgcaatggtgcaaccgtgacagtattggagccagatgcatcttccacctcggcgcgtcccactcccacagatgctcctggcaaggatgtaacaacctgcagtactaaagcaaagtcacctgaagtgcaaagtgcaagcaaccacaccacaaacaacgccgcttctgtgaacacctctagttccttagagtccaatgcatcaacccatgttacgaacggaaaat

SEQ ID NO: 13013 - DNA, 9212 bp, Oryza sativa
gaaaatttttaaacgtgaacgagaacgacaatgaacgtgaacgagaacgaacgtgaatgagaacgagcgaacgaacgtgaacgagctagggaacatgaacgagcgaacgaacgtgaacgtgaaatgcaatatatatatgttacttcgcatttatcctaatacatattttttgtatcttgtagaaaagacgtgttgtcggagtcgtccctcaagccggagtggaagagctagccctagaagtaattcgtgcagacaagtgacgtaataatataaatgattgttatatttgtaatgcaattaagaatattagacttgtaattagacttagcatataagattgtgtagtgttctaatattatttgagttttaatataagattattttattgcaaattagacttagtatgtaattattgagtacggaattggtgcgactcctagcaattgactattgtagtcttaattagacttagcatatacgcacgaaacacttagcatacatggctattttagtcttagcatgtaatattatttgagttttaatataagattattttatttgtaattagacttactatataattattgactacggaattggtgcgactcctagcaattgacaattttagtcttaattagacttagcatatacgacagttacacttagcatgcatgactctttcagtcttagcatgtaatattatttgagttttaatataagattactttatttgtaattagacttagtatgtaattattgactacggaattggtgcgactcctagcaattgactattgtagtcttaattagacttagcatatacgcacgaaacacttagcatatagatgactattttagtcttagcatgtaatattatttgagttttaatataagattattttatttgtaattagacttagtatataattatttactagctagggttgtataatatacgtcacctagacttagcttatatcacgatttgtaattagacttagcacgtaaggttgtgtagggttctaatgtacgacatttacacttagcatacatgacttagattgttaaaacataaatgtctcgtgacttagcagatgtttcttgtatcaacagatggctgaccgcgatgaggaacagatattgtacgatacaatcgcggagggaagcagccagtactggaatgaagaagaggggaacgaggatccaaaccagtacttgaacgaggaagggaacgtggagagggatgcggaggggaaccagcaggggcacgtggaaagggatgtggaggggaaccaggaggaggaggctagtggtagtcaaccctccgttggacagaagagggcacgcgggcaacgaggtgcagcgaagaagcttgagggtcggcacatcataacggaagtggaagaagatggacgtcctagtgccccagccgaagccgccaagaactatgtacgtcacagcggttgggttgtgcgggataacgtgcctgtcagtacggtgtactggcgaagaacaagggcacgcggagatcatgagagctttgtcccatattcggagaaagagatgctgtggaccacaatgctcgagacattcacccttcctgctggtacagaggacaaagtgaaaaggtggactctgaagaaaatggcagaacagtttcagagcttcaagggagatctgtaccagaagtatatcctgaaggggcagacaccgaacttcgacacattcccaaagctaagggatcactgggacgagttcgttgcatataagacaggtgaacaagggcaggcgatgatggaaagaaacaaagaaaatgccgtcaaaaagaagtaccatcaccacttggggtcaggaggctatagcgtcgcgatgccgaagtgggaggagatggaggctagcttgattgagaggggtatcgaaccggcaaccgccaattggccggaacgatcgaagttttggtactatgctcacagtggaacgctcaacccagctgatggctcactggtcttcggcgatcagatacgagaggctgcgcgacgactaacagatgcagtggaagcctcctctcagggcacgttccgaccggacagagatagggacgagctgacactcgccctgcagactccagagcatccaggacgaacacgagggaaaggggtgattccttggaagattggtttcaaggaggacatctacacgtacaggagtcggatgaggagcaagaaagataccgaggcgaagattgcagatctagagttccgggtatcgagctacgaactcagaatgcaagaggaggtggcaaggaaggttgatgaacgcatggccgcacatcggtcccatgatccccagccgaccattcctcttgcaatggtgagcccgtcaggaaaacgtagcagttgcgcctcaacggggcaggtaggatcacagagcatggacgccatgcaaacacaggacgaatcgacctgttccgttgatgacatcactcagcggacaccatatgagctgcatattccttacaagaacttatcaataaaggtaagctcgtagtttatatattttagatttagcaattccgctagttgctgcttatatatgttgattactaataaataatctctcacaacatgaaggtggcgtcgggcatggccatcccaacggacccttcaggtacttaccactgcaggcagattccagcaggatactcgaaggtcgaagttgagttggtcgaaggcgcgtacaaggacctcgagctggattaccctggaggagacagtgagacgcatctacgagacacaagccatgccattattctatggcgcaggtggtacatcatcctccctgggcgaaaagcggcgtctcgtgcaccatctcctcctcaggatcctgcaccgtctcctcctcatgctctgccagcaccgtctccacctcaggctccagaactaactcctcctcaggatcctgcaccgactcctcctcgggctcctacacctactcctccgcaagctcctctttcggcaccttcaaagtcaagggcatccccagctccaccgcctacccacacaagggcaacgaagaaggcgaaagttgacgccgccaagaacaaggacccggggtacgattgcacgcaagaggagcttgacgcttacattgcatcagaagtcaagagacaattcaagcctcgaagtctagaaaagaagattcctatagaccccagtgtcaggaacttcttcaggggtatgtctgcacctgtcaaggaggccatcaagctatcggactatgagcgaacgctgaagaaagcatcttctggaaagtccaaaccagtccctcagcttggagagcaaccaaaccaggagattgagccgttggtgaccggggaagacatgacgatagaagaatttattattgacaccggtctaactacggatcaattgctaggagttgaaccaatagaaaaggcggaattgaaatacatgtacgaactcggtaaaccgcttgtcaagcccgagctggtgcagtccctacccacacaaatgtacaagttacatcagctgtacatggagatgagcgccaccggtagagagatgatcggagcgaggatcagggacccggacttcttgcaaggagatgatattctctggatcaatttcaagggaatctacgaagtataccagctggacgccctcgacgtctctattatgagttgctggattttgtaagtatatcattcagttatatttcttaattactacgtctcctttaattaattaggtccttgtatataagtaaactatataaaataaaatactcccttttatcgttgtagaatggagattcaaagggcccgacggcggagggttttcgatactggattcatcgaccctcggagagtaaacgtcgcaatgctcgaccaatatccacaagaaacagaggacaatctcgtccatctcctgaaggcgcaacattacaagacgttcatactgttgccgtacaacacagagttagtttaattttactgtcttcctacataccaaatttcattcccgtacgaacttgctaagtgtttcatatgtaatgcatcccacgcacattgcagattccactgggtgcttttactcttcgacctgtcggcctgcaccgtcaacgtatatgactcaatggataaaaaagagtctacgtatgacaaggttttcgaacttatagacaggtactagtataagttcctctgttaattaagaaattcttgttatgttaattatttctactacgaatcatatctttacactccatgtagggcttggtatcggttccgtcatttggtccgcggcaactggagagaaagacttaggcgtaggttcaaatttcctgtgagtacacatgctctacatttatatttctccgattcaaattaatacatacaagtgtatattaattagatctcacgccgttaatttgtcatttatttgtagtgcgcaaagcaaaagcagggaactaacttgtgcggctactacgtgtgcgagtattgccactgccttgcagaccaaatcatcaccacaagagagctcgatgtacgtacaaataaattcaaaatttcattatgtaacgatttcttgtttaattactaatcaatttcatacattcatatagtttattcgcatgagggataacctgaccacacacaaggaatttatcacggcggttcaagaacaactcatgggattcatcaacgaagaaatccttgatcccaatggtgaattctactacgacggaaacacaattcaccggtccttagcttctgagctagcagcgagtactactactacgtcgaaatcgtagctagctaggacatataatggattgtaattaatacatgactacatatgtttctatatgcatgtgtacacattttctataatgtaaatatattttggtcatatatatatatatatatatatatatatatatatatatatgtatatgtatacatatatatatgtatatgtatacatatatatatgtatatgtatacatatatatatgtatatgtatacatatatatatatgtatatgtatacatatatatatatatatatgtatacatatatatatatatatatatatacatatatatatatatatatgtatacatatatatatatatatgtatgtatacatatatatagatatatgtatacatatatacatatatatgtatatatacatatatatatatatatatatatatgatatatatgtatacatatatatgtatatatatatatgtatttacatatatatatgcatggtttatatatatatatataaaccatgtagcaacagggccatgcaaaaaaaaaaggtcaactcgatctttagtcccggttggtagggactaaagatggctcagccggccacgtggctgagccaaagatcgatctttagtcccggttatttcacccgggactaaagataaaccgggactaaaggggggttacaaaccgggactacaaagggtttctctaccagtgccgtgtccttgtccaaaacgacaagtattatcaacccggagagagtaattaactactcctctatctcaatataagtgtaacttaatacagaagtggcatattctaataacggtctagatagatttatagtactaagatatatatccgtactatattgtacttatattgaaatggaaagaatagaatgtaagtttgagcagactataaaaaaagcaaggcataaaccacagctacagcatatagggtaaattcaatgtgattgttccgtctacaattgattttaagccgtaacacttgtaactgaacaaaagtaattgcggttaaattttttatatatgtgttcttagttacttaaagccaatgctaaaaagtaaattacaacaaaattaaaaacatcaaaatcaactcgtatttacatttaagattttggttgttataagttatatagagcatgcagtaaaatatgtagtagtagtggtgaattaccaagtaccaaagaacctcgtttttggtagaagaaaccacattggtgccatgaacccactgttcaacatctatgtccctcaccctcttggtcggtctatgttcggtgccaacctttacccttgtcctctttacgaccaagtattcatcgccgtccgtcgcctttgtcctccttaacaccaagaattcctcaccatccttctcgttgatctttgtctttgctgacttcgttacatgctttgtcttgcaatgttgtcgtacctatgaaagatatgatattaccgtgttaattagtaaccaagaaaatacttaaaggacattgtcttgtaattgctcagactgttgtttggagtgtgtaacattttccctctaaggtttgtcattgacggttgatgagatgaattggttgatttatgtgaacaaccggtggttcaccacttgaattgacaaaagtactgggtactgccagctcaaaaactggtatattgcttatgccagtgatgttacttttgaatagctgttagcaatattggtttttttagcagtgttatagctggtgaaatatttattctagtactattttacaaatatgatattagtagttaattacttgttgctcagctatcacagcctgacaaccgctttggctagcgacgattcgtgtctctgatccaacttgtccacgtagggttactagtggcaaggctccttctgagtccagggccgcagctgtcaaaaggcatacacgtttctttaggagatttttggtcagctaagatattagcgtgcaatgcatcaaacgagcaaatcaaaagtgatttccgcaaattaattagtacatccattttaatatacgatacaattcatgttttaaagtttatttgactattcgtcttttctagagaaaatatttatgtaaatagaaaaatattccagacatgcttggatgagtggctctcttttttactttaatagcatagtaattaaataaatattatatatatatatatatatatatatatatatatatatatatatatattaattataagtattcattttggttaagtggttaacttttgaatacacatttgattatgccatattatttaaaaattttatatgtaaattaaatatacaaaatataaattaagtttaaaatgtcattagggataaatgaaatcataataaaataaatcataactatagattaaacatgtgtttaaaaattaaccgcattatctatgaaaataaaccagtaataaggttatactatacttacacaggtcggagatgcgggtgaacctgcgcgccatacgcagctcggtcgcgcccctgcatccattagtcaccattagccaccattaggcaaagagaattaaggacgagaaacaacaataagtagtattaattaataattcgattaatcgagtcagggcgagacggacacgaagtagaaggccgcggcggcgcagcagcacgcgatgccgctcagcaggcagccaaccccgccgccgccgccgcagtcgcactcgccgccggcggtggcggtggcggtggcggcggcggcggcggctgcggcggccgtcgtcacttgttgcatgctgtcctccatatcgatctcgatcgctttgctagcgtagctgcaggtacgttgcgcgcttaatccggaggaacaagacgatattaattacctctgtcttcgatggcggaggttataattactgatcaaccaaatgcttctcctacaagaaattataagtatatatatgtgacctgatatgatacgtatgggaaatacgcaaggtaatctgttatcttaattagctctatatatctacctatggccggtttgtgcggcgtgcttaattagaggcatcaccaagggatgtacgccagtttatagtttgttagcgtgcgactgcaggactgtctcaagactaactaaagccgatatcttcatgtgtttcacgttataagagctaagtctactactagctccaatttatctatagccaatctaatagccaatttaatatatggtcccacgtgtcatacacacagtgtatcttggagtccgtgctgcagctgctacatatctgtagcctgatgttcttctctctcatcgtttatcttattaaaatatatttatagctggctaatagtctgctattatacctgctctaagatattttccgtttcagtaaagtacacgtcccttgtctaaatttactcgtttgtgtcaattaggtccctgaactcttaaaaattttattttcgaataattgaactggttaaagtatgttattcgatctcaaattgtcacgacacctctggaatcccatgtaggagtaacatgacatgccatatataaatattccgatcgcagattttattctttcttttcttttccttttttttttgccatatgaataagaaaggaagaaaagaagaaaaatggagaaaagaaagagttaacacccgtgggacatgccacgtcaacatcacgtaggatccaaaaatgttataataatttaggacaagaatatcatactttaataaattcggagacccgaaaatacaacttgagagtttagagaccaaataagaacatatttagagactgacgccgcactttactcttttgggttttgattagatccatacataaacccattacccatgcatatgtttaataaatgtgtccaaattcacaaatatatgctaacctttcagcacttgatctgatgatataagttgcttcaaaaccatttttacttttttttttcactgctcgttcgctggattaagtgttagcatttttttcaaaaaaaaaactcatgcatttattcaatataagaggtttacatacaacatacatgagtggacaccacatctttcaaataaagagagattaagttgcctatggtaggacagacatatacacatgcagtatgatttacataaagacccctcaaagataaacaagtaacacacactactaaaaaacaattttcctatacaagaacccacttagattataggcagaccataattggtcacgtctggaaaaatagtcccattttcgtatgcggtccatttaagaggaccgcacggaaaataaatggaccgcaacgaaaatgagcctattttcacgtgtggatctattaaaagggccgcacgcaaaatacccactccctcttt

SEQ ID NO: 13014 - DNA, 19011 bp, Oryza sativa
gacgaacggtcaaacatgtgctaaaaagtcaacggcgtcaaacatttcgaaacggagggagtatacaatagctagctagtaatcttttagatccagtcatgcatacatctgaatcgatttccacggagcttctcagcatgctcatctatctacaacggcgggtcactgtatattgcctgatttctggatctaatgtagtgtcaactaggcaatccgcgttccgtaaaacattttgggcatcgatagaagatcaccatttcattcttctcgacaggtgccttagaaattactagaatccaaagcaggaaaccaattaaccaaagcaggtgatgctaaaggaaaaaccagctcattaattctgaactcaattttatccacagaactattccccacatgtaaaatgtaaaataatgtagtaggggtaattgctaagcaacggatttgaacaaattaataaagtgtgtccaactcctcgaaacagtatgctagtaagttgtatcaacaacggtgagatgatttggcgactttgacgagccgaacgaacggagcaaggtgaaaacgcacgcacctcgtctcgtcgacggggtcctcgcaggcgagggccgcgtggcgccggaggccggatcccgtggtgacggagcaggagcagtactgggggaggctacgaagcgcggggcgccacgccacgccacgccaccggaggggaagacgacgacgcgcacaggagggggaggcggaggcgggggaaacaaatgccgctccgcttctgccctaggccagtaggcccctctccccgtctcccgccgccgccgccgtctcatccatggattttgccgcaaagatctggcaccctctcctctctgggcgccgccggcgaaggcggaggacccaaaccatggccgatgggcggatgtcgctgcgggttcccctggattcgacgagggaacgttgaggcggccggcgcggggtgcagtgcaggcccgccggaattcgagggctgaagcggttgccgttggggtgtcggcttgggcgcgtaacggcggcggtggttgtcgtctcgtcgtcggtgacgcgaatgcggcgcgcgtggtacacgggcaacagggtaggcgtaggcgggcgcgcgccaatgcctcgcgcgtcgcgtcgcgtggcgtggcgtgggaaggcaactttttctctacacatacacattggatggtcgagatgtgatgggggccttcctcttcttcctcctcgactccatcgtcttcctcttccatgcgcacacgcgcacagctaagaaggaaaccgatgcccatgcgcgcgctgtccagcttacacttcccccaaccattcccgctcctcccatcaacgatgcctcgccgctcgcatcagcgaatcatacttgtgccacaagcaatgcgcacactactctgctcaaccggccggtcggacggcgagctccaccaccgcctcgccttcgttagtcatttccaaaatcgtgctcgacaagcaagatatcggcgttaaatacccctcccctccaccgcctctccaaatttcgaacccccccactccctctcgcaaaccaatcccgtacgctccccaccgccgccgagcggagagagagagagaccaatcgaggagtgctcccgcgatcgccatggttagggttatccgatcgctgggcgacgtcaaggctcttcttcgcacgcacggcgacagaatcggcctcaccgtcagcatcaggtgcttgtggcgcatccgccatgccaggaggatgcgcgctctcctccggcagcagatgaagatcgacgggatgcactgggaggtggagggcatagagcacctcaacgctatggttcgtgtccaccgcgtgatcgccaccgccgcccctctcctggaccagatcatctccccctcacgacacgcctcctcgacgccgggacgaagctgcgccgcctgcacctcggcagcgccgccatagaggagatcgtgcatctgcttggggagttgctggaggatgtcgccacggcgatcaccacggagcggcacccgcgccctacgatgatcgattatcttcgccgagccaagttgctggtagaccaggtgtgggatctgaggattccggccagggaattctcacggctttgagtaagccagtctactcctacccttctcatcgtctcgtcctcctcctcctcctcaatctcggtctgtctggtgctactgcgtgattgctacccctcctcccttctcctcctcgtcctcctcctactcaatcttagtctctctggtgccctcctcgtcgtcctcctcctcaatctcagtctctctggtgccctcctcgtcgtcctcctcctcaatctcagtctctctggtgctactgcgtgattgctacctctccggtggccgcggcgattgactacggttgaatatattgatttttgatttctgaattctgaatgagcctacggttgaatatattgatttgtgaattctgaatgagactacgattgaatcttcaattctgaatgagactatacggttgaatatattgatttctgaattctgaatgagactacgattgaatcttcccattatcatgtttttgctacctttcggattcttccttgggggtaacttggtagttgcatgaattcagattttgtcaatcactccaaccatgcatgtcatctcagggttttggaagctgaatttaattgtttttgtgacggaatttgaatttgaatcatacgtattctcagaaactgtaacccattagtatcaacagtgctctacaatctagattgtgaatatgcagtacacaacacataacagagaaaaaaacatatcaacattagtactgtccctaaagaacaaaattcgttgcactcattttgtattgtgcatctatttgcaactatttcatttcaaactccaaaaagacgcaattcttataggcacaccctgtcatgtattttcagtaaaggcagtttccctaaaccagctattccattaattcaagtgtctatgctgatgagcaggccagcttctgaatcccctgaatgattagattcctctcctcatcaagttcatcttcgcctatgaaatgaagtgaaatcagttctatcaaacacatccaaaaaacatttccttacataactggtatgaccttatggtgctttagcgaaaacaatttcggtccttttgaatttgaaccgaagtggaggtaatagcatatcaaacaatcaagcgccgcggctacctttacttgtaggaagattttggagtagcttcagcagttctctgcgattttcgatcaaagcctcgatgatactgcgaggcttgttcggattggcaacaaaaacctgtggtatcacaaagaaaaaagaacccatcaatttttcaatttttcagcatcatcttaactgaactactacattctgatcaatgtaacagaaatttttgaatattcaaactaaacaggccttgttgtgcgtgtttatgtgtcgttttgtttgagtgcacatcaatttatcctatgtgtacttcatgttatgtacctacagaatatgcacacaatcaaatataataccttaaaaacatggaaggcgcatattctgatatttttgcttgaatcctacaaaggctgcaggttagtagtgacatggaagacccccaaaaaaaatcaatggaaattttgactattatgcagaaagtgaacttataaataaatgcgaagatttgttcacttgatggtttcagaagatctgcaacaatttatttaaaataaacatatcttttttatgtacttctatgtatggaaggaggacaaccgctggtgctcttcagataaggggtagaaacttgtgttcaagagtagcaaaatgctcaaacaaaaggatgtaactggcttactaccatagtctgttgttaaatagtttatgaatgaatagtaagaagattataaagaataccttcagtagagtaatcataatatttaagaaacgaacttccgtaatataacgcttcattattcgagcgtttggagcctccaacagaaattccgaaaggaactgagacaagatagatcactttaaatttcatataaattgaatgatgatcaaagaacggctgaacgtagtctaaccttcactgattgtcttcttgttacataattaggtgatgttaagagccttgtgtagagttcaaagaactgtacaagattatacaatcagaaagacacagaacaaatggaatatctcaacttctcaagtatgttagtaatacgattcaggttttcgcaaagttggaaaacagattttgtaggtcatttggcaaacaacagttggcatgcaatgcaatcgttttgatccactggaatatcaataatatatatattaaaaaactcacaagaaaattttgttgttttatttttctgtcatgaaaatagagtatatttcagaccacctgctcgtagtgggaactcaagaactcagcaacaactgtttcatgtttggtaagcagatcctgcaaccatcttgtcaagaacaaccatcaatcttgattcttcgacctccaatataattctttagtttctatacttgtaaatctgaaaatttggattaaccttgaaggtgttcagagcatcagaagcaatatcgaagtttggcagctccacatactcaaaaaacagttcgaagctactggaatccaatatgtatctgaaagtgggcgacaaagtcaaattcatgcaaattaataaaatgattattatgattattaattctttctaatccaggtaattcttattaattctttctacttcaggtaattctgtactgttgatctgttatactacatactctgtgcgcgtggtaaggatgtgcccatttttttatatataataattaacaacctattaattaaatatctagtaaatgatagagggaaattttaattgtaggatggacgctaagcgctatagcgtccaggaatggacgctcttcgtaacaatgtccagacctggacgctgtattgaacgacgtccagcatcccgtcagcctcgttcaacattcggttattatcatttgaagaaaatcaaaaaggggaaaataaatcgaaaataaatcgagaagagaatccgtctcgtctcgaccctctcagcggtggcgcggcgcctcttgtccgctgccgctgccctcctccaatccagtggcggaacctgctctcatcgcctccgccgtccgcttccaccccagatagctgctgtgcgtcgccgcaggcggcgtaccgctgtcatttgcctccttgcgccggaggccgccgccaccagtgaccgctcgacagcgacatcctctatgcggaccctagtcaggttttttgtgtggtcgattgtttcagcaataagattgtttcatcctgatagatttactattgttgtttgtggtgccatggttctgttgagatctgaaaaggcataaaatcctttccaagtgcaccttaatctcacttattgaagttaatcctgacatcctgttcatactactctttgccaagatgcaggtgacatcatgcatttttcctgccttctgatattcgtttgttgatggactgatctccaatatgctggtcactaatttctgtagagcacagaaataagctctatcatactgaattttgatatcaggattattacatgaaacacatcccatttctagctgcagaggaacatgagggattcagacctaaggtgttctcgaaggttcattaattcatgccttttgtattgagtatatatattaacctgaccatcacattactaaaatgtttgattggatctggttcctagtgtctttcaaagtccttatatatgtgctagtcctacaacagcagtccatacagtcgatactacttccatgcataaatggaactgatgatatattcagttttataattatactcgactcttatgctatatacttccttttcatatgtacaacatggaagatgaatctaatagtaatgttactaacttttgtgaaatgtctagcacgggaaagcgtttatgaaaatacaaactaccagaggtgcatgactactaattatctcagtgatttgttatatggatgcctcatggtcagcacgcaaagtataaagatttcagaatacgagaaatgtttttagtctacctatttcttcaacttctttttgccctcagttttttgcatttaaacgtcaagttctccaaaattatcaatacaatgaagtatttgactattgggtatactcaggattgcagtatagagcatggagataggagtgcccacacagaagatagcggaggccaagctagtgactcaacaaaacaaacagtaactctgtgagaatcagctagctgccttacttcatcttggtaaaactaacattttcgtttgatttacgttttcgggaagttcaacacaagtagttgagtgccaagaaaagtttcaagaagcacagtgcaactagcttatatatttaagtgagcttttttagattgtggatgtttcttcgtatgtataagaacttatctagtgtccggatatatacttggtttgaatcgttttgtttgcctggttgatgcaagaacgcattgtatctatccagattgtttgtcctgtctttgtaattgacacagttggctagattattgaaatatatgagtataatttatctagaaccatattacgttgatacgatgtgcagcgctattaaaatgaatcgacatacctatatataactacaaattgattgatccaacaacaagctatatatctgttttagaggcagccggaccagataaagaaaaagctaacgcatgcgtgggcacttcaaaggcagtgatagcatataattaagtaattaaacatgctcaatcgccaacaaagtgatcgagctaacgttgcttaggacaacacgaaggctcgctagcaggagatgtcaacaagcacttgcagtggccggcgtggtaaggcacattgggtcgcaccagactgtggacgctgttaggaagtgcgtcccgagctggacgtgtattctaacagcgtccacacctggacgctgatgacaatagcatccttactactttggtaaatccctacagataattactacttatttaatttgtgaaggattagttcttataaataaaaaaatcggaaggatgtgagcgtgcaaagcttctttgaaacgttaagtggtgacagacttataattctggtgaagaaacattagcctaccaatataataatactattgaagaaacaaagacatgtctagtaacataaatattatataacaaattaacaatgcataaggtgcaacagtggttttttagtagcaggcacaaacataggaaatcactttcatgatgttagaattctgtttttcatgattactgccattaaataataagccatttttatgtttcattgtcatttaaaaccagagagttcgtagcaaacgaaagaaaaatcaacagttcaagcacttgttcatttaatatcataccttagacatttatataggattaaccacatatcatgtaaaataaaggcaggcacgataatgttagtaaaattgcaagacagaataatgtcccaactgaatggaaactttaaacccttactttgtaagtgttgggtattttatgcattctctcaacatgttcccgcaattcagtgcaacgtccaagttcttgtagctgtcacaagagttgatcaattataattatccttcaaaagatacactgtaggcagaaaatgaccaagaaaccacaagctaggctccaaagtgcaggacactttgaatgtacgctatggctaaagcaataaccaacaattacaaaagtttataaaggagaaaatgtgacaactgactgactaaaggccgtgagtagtcaatatcctgtaaatatctgaacgatcatgttattactacagaattgtactagaagttcgaaagattatctgtgatattaagtcaagaaattgatgtgttaccagccaactaggaaatctaaaagctccagatggttctcaatgtacttcacacagcagtagctctcatcaaacttctgcctgagcaaaatgcaccagcagtgaaccagatcttttcgtacctgcaattcagagctaacgatttcaacaggctggttaaatggagaatgcaaacagattttaagtgataaaacacttactccccaaccaagcgaaggcagattctgaacaaagagggaaaggacatcctccttgcaaatctcaagggttatttgcaagacttgttcttgatttggttctgcttctccatcaccagacagcatttgcctcaatgacgagaggtttttctcaacctcttctagagcctaatgttaaaaaagtgaatcaggatgcattcggaatttcaaactatgtacagcagtacaagaaatcttcacaatagagtgaacaaacatgatgaacaatatcatgacatgactgagcacagcaaaccttacaatcatcctgatctaaaattcactggtttctggaccattgaacaatctaccgaaataatacacaattacacattctgccacaaccacaagacttaaaaaaaaagcacaaaaaaggaactcgtactattatcaccaggtttgctgaaacctttggttcgagaattacaatgaataacgctgcatctccccacttaaacatatactgacatgcccagagataatctcgccaacaataggccgcaatgagcaatctcaccgctaaaaggctcaggtgcccctcaattacgaagaaatgatcctcacgccgaggaaagaaaagtctttaccatccgaccaacgggcagcaagatcgccggttttgatctacctccagctgcatgcgtgatgaagggggctaatccgggatcgggcacgcacggatcccctgccttgatcgtcggacgcggcggcgagcggcgggccaagaagagaagaggaaaaacagaggagaagagaggagaggagaagggggatttttaccctggcgccgttcttggtgtggagggcctggaaggagtccttgatggagcggaccacctcctccggcgtcgacggccgcagccgcgacgccatgcggaagaagaaggacatcgccctcgccctcgccggccggggggggcgacggaacggaacggaacggaacggaattacggtgttgctatgctatcgcgggtcagagaggcggctgcgatggccctttcttattggcaaggcaacccccgcccagggccgttttgcctttaaccccctcttatttaacttttttgcttcttttttccctttttatttttatttttggtttctcttctcttcctttcgatgatgttttttacccattgttttgtttattcaaatgcttatccgaatcgcttattagcaaataaaagatcattcgtgaggaaaacttttatatatgtattcttaacgactcaaatgaaaatgatgtcaaataaactacaatgaaaaaaaatcaaattcaaactttaagttctaaagtttaaattttgacttataaatataagcataagtcatgctccagcataacataggtgcatatccttaatgatgtcttggttcaatgagaattactacacaacttcatgtgtacaaatagtcaaagaaaattgtgaacatcagcatccaaaccggatttacagaagaagaaaaaaaagcaacagcagtaggagtgcacatattatggtttcgacaaatatgaccatatattcaacattcgtctaaaccacaatacatggttgaatatatggtcctattcatcgaaaccataatatatggttgaatatatggtcctataatagccgaaagagggccaacgggcaataggttcatgccatattgcctttacggtaaagctcttctatatcgatgcatctgatatgcggtggcggagctagaaattattgaagcctaagactaagctatggcttaattgataggttgttgattttctcctaaatttacttgtgatctaaatggatctaaacttaattttggagataagactatggcttaagccatagtagctactctagacttgcctttgcccccgttgacatgcaaaagaacatgtgatctccaacttttgtttttcttgttttccttgcattttttttatcttagcttctcctagaattgataggttgagtaacctagtcatgtagttatgtttgtttgcatggctagtttctgctcactcctagaccaccataagttattgagtaaatttcacaaaattacagatatgttgaccaaattatcacaaaactaaatatttaaatcggcgtatcataaaactatagatttagcaacaaaattatcgtaaaattatagatttaaaaagtatcagaaaactatagatttgataacaaaattatcataaaactacaggtttggcgctaatttaattaccaaactacaatatttgtagcttcaacatagcaatagtgctaaagatttaaaatacaaaatctgttgttttgtgatgactctcattctattcttaaatctatagttttttgataaatttaatactaaatttgtagtgtgtaatactatgtcttaataaatctatagttttacaatagcctgttcaaagtgtgtgtagttttgttaaattcactccaaatatttgtgttgcttcatttttttttatggcttatcagctgtagattaaacaatcatatcaacgtgaccatattctaaaggcaaattttgctataggacatcgtggcttcgcggtttcagccgtaggatactgcacgaagtgacttttggggaaagacgctatgtaaagatgggaattagcttgtggacaccgcgcccattagaatattcatttttaattgaataggagaaagaaaccgcatgaaaatcctaaaatacccctggtcccaaatgacatatcttccatctctctctgtttacctctctcgcacagaagcgtctcgacgagcacgttgtactgtcgggaggtctgccgcgtgcacaagggcgggaggaggcagagcaccttgaccgcctagtccatgaaactcaaaatcacactacctgcatgggcaactgtggcctcataaacactcgaaccaaatgcatgatccacagtccccaattcgacaaccccaaagcgacattcccaagaaacgacttacatgaagcatagttattagaacccgaccggaccggcggtccgaccgggaaaaaccggaaccagggcgccggccagtccggttcagataaaagatcggcacgcaatcaaaccggcgataaaccggttgaaccgggcggtttactgcagaaccggtgaaaaacaggggtggttcgaccgctcgaacggcgtcacacgtggaggtggcgacgctgcagagtactggcgtcacgtgaattagataaactaggtaaaaaggtggcgacgctgcagagtactggcgtcacgtgaattagagaaactaggtaaaaaggtggcgacgctgcagagtacaggcgtcacgtgaattagagaaactaggtaaaaaggttgcagagcttgtgagtagaacccacaacctccatgcttctaccgagaatctctaccaccaggctatgtgatgggttgtgaaacaaccataacacacatctatttgaacctctttaaaccggcggtttgaccggtccaaccaataaaccagtgacccgactgccttaacggttcgatcatcggtccggtcttaataactatgacatgaagacgacccatccgatgacggagacaacgaggatcaccgagaagaacttgtctggcgacgacactatcgccgccttgccagggagagagctcgacgggatccatggtcaacccgcccgaatccaggccatcgccatggatggccccccacccaaccaccaccaccgacgcagccaacgggatcgagacccctgtctagctcactccctcgaggcggccgcaggagcgatctctcgccaggagtcgcgtcgggaggaggagggatgccacactgcactatgggcaccctttagtgcgagagatacaaatagagagatgaaagagctgacatgtgggctcaggggtattttagtactttcacgcaatttctctctcctatccagccaaaatgaatattctaatgcacgcggtgtccacaagctaattttcagagtgctttcccccaaaactcacttcgtgcggtgtcctacagttaaaaccataaagtcgtgatgtcctgtagcaaaatttgcatagtctaaattcaccggtaactatattcagctcaattactcattttgtgtattctgtgtttgcaatttgcattaacaaaatctgagtataccatattatagtacaattagtatagtacatacatttgtcagagtaagtcggttccttcccccacctagctcccagtattcacactaatcctcacaaaattaattacaacattgtgtcctatacaagataaaccaaagagatcatgaagcaattcgcacgttcatatcctcatcgatttttgcttaatttcccaatcgagaccccccaaaacagcagctagcagcacagatcatagcacccattgctgattgcacattaatttcttctccttttcctttgaagaaaaatcaatttcttcatcatgttcttgccaacttctttctttttttttaaaaaaaatcttttaagcttctgcaagaacaaagtaggagattgatcagtttagcttgtgcatggctcgatgctgctgctgctcactcctcgagcaccggcgacgatggccggaagaggtcgtacggcgcccagaggtagtcgacggcgcacgggcgccgcgcgtcgagccggatccatggcttccccttgccgctccaatggaggaggctgatgggccccgggtggaggccacggcaccgccccttgacgttgtcgccgccgaggccgtgctggttccagcggtggtcgacggcctggatgtcaccggcgagaacgaggaggaacggcggcagcgagccgaggtggtagatccgcgtctgcttctgcacctccatccaccgctcgacgcggcgggtgtagccgccggcgcgccacttgccgacgtccatgaccatgacgccggtgttgaagtagcacgggcggcggccggcgaacgtgccgttgagcgccgggtccgaccagaacgcgtcggtgaagtagttggtgaagttggcgtggcagtactcgggcgcgccgacgacgtggccgccgaggtcgacggacgccagcgcgcggatgtcgtcgacgaccaccacgtcggagtcgaggtagatgacgcggcgcacgtcgggcgggagcgtgtcggcgaggtagatgcgcgcgtagttgagcggctggtcgagcgcgtggcggatggagcgggagatgcggccgcggacgcgggacgggtcgaagcggtacacgcggaggtccaggtacgggaacgtggcgcgcaccgccgccgcgaggtcggcgtccatcccggccgcgaggaagtggaacgacacgctctccgggcacgccgtgtgctgcaggatggacagcacgccggccatggtgccccggaggtagttggcgtccagcgtcatggccacgtccaccctccccccgccgccgcactcctcgccgttgcggaacgcgggggcctcccggaagctcgggatggacgacgacggccgccggatcaccatcccggagtgctccacccggatgcgcgcggccgcgtgcccgccgagcaggacgagcagcgccgcgacggcggcgatggcgctcccgcagcgcgccatggtggcggtgcccgcggccgttgctacgacgaccgcgcggcgggcgggggtggagagagcgaattggacaaggaccggtgggtggccgagtggtggtggtggtggtgggggcacgacgacgtcttcgtcgccggcgagccggcggcgaggggggaccgcggcggggggaggaggagaggtggccaccctggtccttgggcaacgttggggtcggtgctctaggcgacgaggggggccaccattggagatggtggggaaaggatcaaaggaaggcggagcggtggaagagagaggaatagggttggcagcagcaatggcgggtacgtacgtgcatgcgcggtggagggacgggagggaaggtaggagaagacgacgacgacaacaacaacaaacaggtgcatggctgccctgcccattcttggttcaccaatttcctccatttttttttttgttagctgcttgtgttttttttctttttcatggaagctatacttgtgttacaagtgtgttataagttatcccgcaaaaaatacggaatacaagaatttcatataaatcggtataattgccatatggttccgccggtttttaatgtctaacgctgttgacttttaatgtatatttgtttacttgttttatttaaaaaatatagttatcactttttttttgtggtttgttctattattataagtgctttaggcatgacttttttttacatacttgtaataaaaaataattagtttacatgaatgatgaaacgcatgtctaaacgtcatatattaaaccggatgaggtaattcggaaaaaatattttattccatatgagatttaagataatgtaaattgatggctatgcaatgccaaattgctctattcaacaacaaggctgtctgggaagaggacgaagattagttgcgttttacactttagagagacttcttcaatgattcgatcttttttttttgtaggtttgtgctctgcgtctttaatatgaggcggcttcgctacgggaggggctccacctggatgcctgcagccacagagcaccagcgttgagcttgcttgcgtggcaaattcagttgcattgtcatacatcacaaaaaggtttagtatgaatcatgaacagttgatctagtctaatttaattcttatatatacacagatgttcctaccatttccaaattactttggacatgaagacaacgaagaactaacaaacgaacagcgacgtatcaacagtcctacgaaaacagataggggagcagaaaactgtgccatcaactaaccatggccgtcgatcagatatcagatgtcgaatttgtttcttgctcctaacaacaaaaccatgttgctcctaacaacaatgaatgaacatagctggaataaccagtatcgtcttgtgtttaatatagttgaaaacaatttgctaactttgttactaaccactaccagattaacataagtattattgaaacgagttaaaactaaattcatacttaaacatttggacaaacatgtacgtaccttcacgatcttgcagcatacgtttcttcaattcctttcccttcattgtttgcacactggtgtggcctccaaacgtggaggagattaacataacgcaaaagagaatcttaaaaaagataccggggcgcctataaatcggacgtccgatttttgtaataaaaattaggcgctattccaccaagtagatcggaattgtttaactaagtagatcaaaaatgtttcaatcatttaaaaaactgaaacacatcctggaacattttgttacaacgtatgaaataaacagtttccaaaaatcgggtgttgtttcaccatatataaaaacaatgtttcagcaaatagcgaaatgatgtttcaattcactacaacatttgatctatacatagtgaaacatcacgagtacacttattgaaactttgttggtggaacaaaaattaaaacgaattccctgagcttttccataatatgtaggtaatttattgcaacagcgcatgtggtggggacggtgcggaggttcgggaggcacgggaaggggcgtccgatccccagcattttcgaaaagatattggtgtaagagcaattcgagaattaaaaaagatattggtgtaagagtaattctcaattatccaatctctgctcattttagtatcttctgttcatatatctgaaagaagaatttctgcaaatcctgttcgttctatgtttctgtttgtcaaaaaaaccgacctttatggacaaccgataggaacaatatttcagtttggtccgaatcatagggaatgtacgtgtgtgctttactaattcaagttattataagcctcaatttaagaaatgagcttaggacatgtaacttctatagtcctagacagcgttgcaacgcacggacatcttgctaatatatagtgaattcatgcaatttgattgatttttgttcatgaagagtaaataaataattaatagctatgagaagacatccttgaaataacaaatccattttctggtgccttttctgccgctacttaattccttcccagctagctggtcatgatcatcatctgcgatctcgatcgaccattagttacagcagtgcatggaacgcaagaagaacaccgccgcagaatgcaaaaatcgctgccgttgcgtctttacccctgcagttgagcagcaaattaattaagcacgcgatataaatataatcaataaatttcaacagaagaagagctcatagtatatcatgcagcgtctcgatcgattaattacgtggaagcctccttaaggtctgagataatctgatcgatgcctctccgtgaaacgtaaaaccgtccaagttctcttggccgtttaatcagaactgttccgcgatctttgtaagcctgtccgatcgaaaagaatgcattaattaaggtccattatttaatcacaataatatatggttattactacctctatcctaaaataacagtagtagtgagaatccatgtccaatgtttaaccgtccatcttatttaaaaaatttatgaaattttttttaaaaaaatagtcacacaaaaagtactagtcatgttttgtcatgtattaacaatgcaaatactaatcataaatttttttaaataatgaatagtataaaactagactttttttgggacgaaggggagtagcaaacagaaatttcacaagatctgtcaacaaatttcgctccaactgatgaacgaaaattgacggattacctcaccaacaacagtaaatgttgtgccggttggaagaacccgctcagttcgctccaatccaactacctgtagaatcaagaactcatcatcatgaagataaattatttctctcttttttgacaaaaaatattaaattttgatcgatccaagtgtcagcagaagtactccctccgtaaaaaaaaacaacctaggaggaaatgtgatccattctagtacaacgaatctgaaaatgtgtcacatctatttctaggttggttttttttttttggaacggagggagtagttaaggtttagtagttaacctttaccgaaccttcttgtccacagacttggcacctactgcataattgtttgttctcctcaaagacgctgctctcacgattcagagtaaaaccagttgccttatgtgcttcaacaacatgcaaacgcccggtagcatcttcctagtaaaagagttagatatggtgtaacagaatgcctgaaaattaatttacctgatgacagttttatacatgtagaacatgatgctacatattctactccctccgggctgataatattagtcgttttggacaagggtaaaatcaaactttaaaatatttgactgcaaataatttctaaaatatttatcttaaaaatataaaaaccatatgtgtagatttgccttaaaatgtacttcaataaaaccatatatttgttgatattttcatatatattataatagaaaatagttgtcaaagttacttttgggagaccgcactggtggagaaaccatctttcgttgatcggccgatttccacaatagtcccggatgcaataaaaaccggggctaaagatgatctttagtcccggttcaaaagggtaacgggcatatttgatctttagtcccggttggtaacaactaaagatcatctttaatctcggttcgaatgctgtcagggcatgtcaggcccccccgggattaccaaccgggactaaaaatcgtaactttagtcccggttggtaataccaaccggggctaaagatccttgtgatctttagccccggttggtgctaccaactgggactaaagtcccacccctatatatatgtcttcttcctcctccagctgcccgagcaagcttcaaaatttcttcaaaaaagaggggaggtcatgccaaaatttatattgaatttattttggtgattacatacaaatcggaggtgcctaaaatgtttgcaacttcatcctccaatgttttattttgtcatactatatttgcacctatgttttgcacactttttttgtctccaaaatttagttgtaagttgatgagagagaaaatgtgtgtggggaagaaagaatatatagaaatttagttcatttgctaaacaaggttttataaaatagttgagaaggaaaactctagtgaaagttaatcttaaataatagaaaacaaactaaaatgaaaattaaaagaagtaaaacacattaaaattagtttaaaactttacaaatagtttttaagaattatttggtgtaatattttatgatttttgtatgaataaagatatcttataattattgtatgactgtcattattgtaagaataattatttgtgtatggttttttttgactcatgtagatggatcggcaatggatgtacactgaccggcggtccaaagagtttattgacggcgtgcactattttttgagagtggccgaagctaacaggcaaaggggttttatttgttatccatgcaataattgtaagaatcagaaggagtattctacatccaggactattcatttccacttgttgagtcggggttcatgccaagctataattgttggacatcccacggagagcaagatgttgaaatggaagaagatgaagtggaagacgacaatattccggaatttg

SEQ ID NO: 13015 - DNA, 3699 bp, Oryza sativa
tgatcttggtgagatgttgtagcacgccagggaggactgcgaaagtgaaaaggaggcccataaattggacaagatgttggaggaccacagaacttcgttgtacccaggttgcgagcaggggcacaaaaagttggataccactttggagttcttgcaatggaaggcaaaaaatggggttagtgacaaggcatttggcgatttattgaaactcgtcaagaacattcttccggggggaaacaaattgcccgagacaacgtacgaggctaagaaaatagtctgcccgttaggactggaagttcataagattcacgcatgtccgaacgattgtatcctatatcgcggtgaggagtatgagaacctagaagcatgccctgtttgcaaagcactacgatacaagattagacgagacgatccaggagaagttgacgagcagctaacaaagaagagaattcctgctaaggtgatgtggtatttccctataataccacggctaaggcgtttgttcaggaacaaggggaatgctagaatgttgcgatggcacgctgaagagcgtcaacaggacgggatgctgagacatcccaccgatggttcgcagtggcaaaacatcgacagaaaatttaaagaatttgaaaaggatgcacgaaacatacggtttggtttgagtacggatggcatgaatcattttggagagatgagcagcggccatagcacttggcccattacgatgtgtatctacaacctcccccctggctatgcatgaagaggaagtacataatgatgccgattattattcaaggccccaagcaacctggtaacgacatcgatgtgtacctaagaccattggtcgaagatcttaaacagttgtggaagaaggaaggtgtccctgtgtgggacgaagacaaacaggaggagtttaacctacgagcgctgctattcgtaaccatcaacgattggcctgcacttagcaacctatccggacagtccaacaaggggtacaaggcttgcactcactgtatggatgaaacagaaagtacgtatcttaagcactgtaggaaggttgtatacatgggtcatcgtcgattccttgcagcaaaccacccggtacggaagaaaggcaagcacttcgaacataaggccgaccaccgtatgaagcctaaacatcgcagcgggaaaacagtgtttgctatggttaaagatcttaaagtagtgttcggaaaggggcctggaagccagcctatagagagcgaagatggtcacgcggcgatgtggaaaaagaactctatattttgggagttaccatattgggaattcttggacgtacgccacacaatcgacgtgatgcacctcactaagaacctttgcgtaaaccttcttggcttcctaggtgtatacggaaagtcgaaagatacactggaagcacgtaatgatctgaagcatatggaacaacgcggcgaccttcacccggaaccaaaggagaaaggaagccattacttgagtccagccagctacattcttagcaaggcagagaaggaaagtatgtttgaatgcttggaaagcataaaggtaccgtctggatactccacgaatatcaagcgaataataagcacgaaggagaagaagttcacaaacctaaagtctcatgactgtcacgtgttgatgacacaactgctaccagttgtaataaggggtatccttccagacaatgtccgggcaataataacaaagctatgtgcattcatgaatgcaatttcgcagaaggtcatcgatccagatagattagaagcccttcagaatgaagtggtgcaatgtctcgtcagttttgagttaatatttccaccttcatttttcaatataatgacgcatctgctttgtcaccttgtgaaagagatccgtattctcgggcctgtgtacctacacaacatgtttcctttcgagaggtacatgggcgttctgaagaagtatgttcgtaaccgtgctcgtccagaggcaagcatcgccaacggttatggaacagaggaggtcatcgaattttgcatagaatttatcgaagaccttcgcccaattggggtacctgaatcacgccatgaagggagactacggggaaagggaactctcggaaggaaagcaataatgacggtagacaacaatttattccgtaaagcccatttcactgttctgcaacactcttcattggtagctccttacatcgaggagcacttggctctagttcgtgccaggaacatcggtaagtccgatgcatggattacacgacatcacattgatactttccccacgtggctacgacaacatctcataggtaacgagtcgatcaaccaacaacttgccttcctagcgaggggaccgtctgggtcgatcgcgacattccagggatatgagatcaatgggtacacattctacacgagagcccaagacataaagagcatgaaccaaaacagcgttgtttgtgtcgatgccatgggacacgatggaacaactgccacgtattacggtgccatcgaggatatatgggaacttgactatggtcctctcaaggttcctctgttccggtgccaatgggttaggttgactggtgaaggcgtaatgattgatgatagtggtatgacaactgttgaccttaacaaggttggatactcggacgaaccttttgtccttgctaatgatgtaacgcaagtctttttcatgaaggacatgtctagcaaaggaaagaagggcagagggcctgacgagcctaagcgtcaagtggttctcccaggcaaaagaaaaatcgtcggagttgagtacaagactgacgaggattacgatcagttggataggcaaccccctttcacggtgacgattgaccctagcatcctcctatcaaatgaagacaccccttactcacgcagcgatcacaaggagggaacaatggtgaggagaaagtacgtgcggtcaaccgtcaccgccgatgtaatgctgtaattattgtgtacacgatgtaaactattttggatgtattgattatccatataaatcaattgatgtatggcataatttactatcattcatatgctacatttaattgactatcattcatatgctaattataattgactagagaatttttaaaagtattaagtcattcatgtggcatttacagatgttaattagagtttttcacaatttaatttactatctttcatatgctacttatatatgactagtcgaatttttaaaaggtttaaatcatgcatgtggcatttacatatgttaattagagtttttaacatttaatttaatataattcctacgctaagtatatatgatgattacaatttttattaattttaaatcatgcagtatgtatatacatatcttaattagagtttttaccaatttaataatatcattcatatgctaagtatatatgattattggaatttttattaattttaagtcatatatttgcttattacgatttatctacttaatttattacagacaaaaataatttttcgaagtaattgtcattaatctttgtacctttaataatgttaatgcattaacttctattttagaaacacatatataagcaaaaataatatgcagtgctataatctttagtcccagttcttatccctaaccgggtttaaaaagaatttggaaatagcaagaaaagatctttactcccggttgatgaga

SEQ ID NO: 13016 - DNA, 7927 bp, Oryza sativa
tagttcatgcacatggtgaccgcagtggatgattggttcggcgacgacagataaagttggcggtggtggacgttctcaatggcgacgccctaggggtggcggcaacaagcgagctccagcgcccagatctgactgcgcccaagataggatggcagaatggtggtcgttgatgacagggatggttgacggtgtgatggtcgtcggctcgcctagcacaacggaggctcttagcagcgaagccttggtggagatggctgccaagcgagcaagcgtcgatgccaagatctgacagtgggtaggtgtggacagtggtggaatatctttctcgagctcatggcagtaaaggtaggtgctcgtcgtgctgcatggctctgagatgctctaggaacggcggagggttcgacggtttgtggaagacagtggtgatgtggaatagcggctttttggcgcactaggggcgttcagaatgcaccggtggcgtaaggggatttggacgacaacggcgaatggcacgcatgataattgatggcagatgttggttgtgacatgcaggggtggagatggtgtggcgacggacagtggggcttagtttcggttctccctttcctcttgtgttgtcaaaaagagtatgccgtatttgaagtttgaaactaagtcttctagtagttttttttttgtgtgtgttttatgttttcctctatggaggtgtagagtctaagaacttgtatatgttttggccgtgtatatccttcctagatatataagttggattaatgaaaatccattattaaaaaaacaatatggattgtaggatgttaaggcctagtttgaaagggcttaatgaatgacgatggattatcttattttggtatataatttgagggtacaaacacaaataaatatcaattacaaataaaaaagctgtttaaaaatattttaagcaatatgtatatagattttctttttttttaaaaaaaacaatcacacactttatgagctctgtaattatgcccgcaataatttctaatctataatctacaagtaaaaaaaagagcagaggtaatactagactccatgcattctgtatatttactttactctctaagatagagttccactaaattatggatttcaggatagggatatcagtactacatattttcaggcataaataaagaataaaccatgctcacattatacaaacttgcgtgatagatgtaaatagatacaacttaccaatcattcgtcccgatgcatcaactttcctagtccattcaaacccaggctaaaacattccatgcaaacagaaataatctatgcagtacacatgtaagtttaggtattgaaccacatgcttgtgttatgcactactatagcaaattaactgaactagagcaaataggaatacaaaatccctcagatgcaactgagttttggcattgaatcagtacagaagctactgcttgattttaattctttagtgcttgaaccatcataaaatagccgcaaagattaaaaaaaaaacaacaacacaatatatagagaccatcatagtaatttgatccttccactttcacttttgtacgaagctgctgcatttctgctgtctaatcaacattctataaacaacatcataatgttctctcattacacaactgtaacctagagtatcagccagcttgggctaggatatagacctaaatttcatcaatgagtgccacatcgaatcattttcacttacgtgcattgttttggcccgagtttgcacgagataagcaagtcgttctatctacttcacgtaacatgtgagtttgtgcactgtgagtgcaatttactcaaaataaattgcatcatcatctttttgtgatactccgtggtttcgaaactattaagattcagatagttgtattgcatagtttcaaatataaacaaatcacattttttttttgtgtgtgtgtgtggggggggggggttaaattatggtgttccatagtttcacttgacaatttcactttaaattcaaatttaaaatttggagcctttaagtttgtgaacaaaagtacgagattggtcctccacaaattgaatcatgtgcatgaagttgtcacaggctcacagcgactgcacaacagcagctggagtaacacaaaaaaggccatttttatcactatgccattcatatgtattaaattatctctactctttctgttcgagtgatttgaacattttcacatccaggtataatccatgctaacaccaggacgtgttctcatttcagctataaatagcaaaaaaaattcaaatatgtataaacccgtcaccgttctcatccaaaattatctactttcccgataatttcattttcattaactccattcccgatcagtgagattttgctacgcattgttattgatataaaaagatggctataccttggatgcgagtgtggccatggagcactgcaatggcatcgccgccgttgggcgctggttgtccaccaagcccaaggttatcttcgtgctcggcgccaccgccaccggcaagtccaagctcgccatccgcctcgccgcgcgcttcgacggcgaggtcatcaactccgacaagatccaggcgcacgacggcttcccggtcatcaccaacaaggtcaccgacgaggagcgtgccggcgtcgcgcaccacctcctcggcggcgtcagccccgacgccgacttcaccgcggaggacttccgccgcgaggcggccgtcgccgtcgcccgcgtccacgcggccggccgcctccccgtcgtcgacggcgggtcgaacatctacgtcgaggcgctcgtggccggcggcggcggcgcgttcctcgcggcgtacgactgcctcttcctgtggaccgacgtcgcgccggacctgctgcggtggtacacggcggcgcgcgtggacgacatggtgcggcgcgggctgggggcgaggcccgcgccgggttcgacgccggggcggactacacccgcggcgtgcgccgcgccatcgggctacccgagatgcacggatacctgctggcggagcgcgagggcggcgccggcgccgaggacgacgacgacctcctcgccggcatgctcgaggccgccgtgcgcgagatcaaggacaacacgttccgcctcaccgtgtcgcaggtggccaagatccggcgcctcagcgcgctgcccgggtgggacgtccggcgcgtggacgcgacggcggtggtggcgcgcatggcggagggcgcgccccacggcgagacgtggagggaggtggtgtgggagccgtgcgaggagatggtcagccgcttcctcgagacgcccgccgccgccgccgccgtcgttgccaacggcaaagtcgacgtgaacgtcggcgacgcggccgccggcgtgcctgaggctgccgccgccgccgtcgttgcggcgggtgtggtctaactctaagtaggatacgcggcgacggtgcatgtttgcatggtgggtggcggctcatgttgcggttttgggttggctttggcgtggctgggccaggtggcttgcaatatttcattatttatttatttttattttgagctgcagtgatatgagattttgagtgagaaaggagagggagggagacacaagtatctttgagcttgtttaagcttagtgttacaagagattattttgttatgttttcagaatatataaaatgctagcgcctctagtataatcggtagtatttgacaccgcacaaaatagtagagaatgctacgcagcgtcaaatattaccagttgagggaatacaaattctaaagtgtttacttgtcttttgatttgaagtttaaaaccaatcgaaattcttaactgtcttttgaaattcgaagtgttttctcccttattagggcctgttcggaacaaaaggataaaaaacacagaaatatgatagagcgtaaattggaaagctcagggactgtaaaacttgagctgtttggaacagaggaatgctaggggatagatacacaagcacacaactaatgtgaaggaaaatttcctttaggaggaaccttatttttctttgtttccttttaaagtatatgatttcaaaaaacaatatttggagggagagatgtccctccaaacaatttttaagaaaaaaatatgagcgtgttggagattaaacacggagttcaaacaaacaagatttggagggagagacgtccctccaaacattttttaagaaaaaattatgagcatgttggggattaaacacggaacctcagggttgaaatcatacatctcttgtcactgcactatcaagtacatctcaaagtacagagtttctcaatgctcttttctttgatccaaacaacatcataggaagattttccaaaggaaactaaacctccacaattcctttaaaattcctttgatccaaccatgccttggttactgcatatttgttttagtataaccttatattgcttgaaactaaacttcccttcttttcatactacctgacagattgttagttctaagagtatgcttatctaacatgcggattataagccatagacaattttaaaatttcgatcttaattttcgaattaatttagttttatttcttattttcagccttagtttttgaaatgctaagactagaagtataaatttcttactagttgctttggtcacgcgttgttggcttataaaccacagcacacaagaggaaattatttatttgtatttacaaatctgtaccttcaagtattcttagtttaccgcacggtggcaaagaaatggagaaaccaaacaaaactgaaccaaaatccatatcttttttattactttgttaaaacatggttgggattaccgcgcacccattgataaacccgatatggaaataacaacctgcttaatgattaatgaagggaatcagataatctgatgtagagaatttctatatcagaggaacgtcctcaccggatcgtcgtcaattctgcatccaacgggcaacatcgtttctaacctctccttgttcggccttagctcagaccaagtccagggaaacgctttataccgaatgtcctaagaaacggaaatatcgaacgtctcgtctaccctacggacgaaccctgtcactgcatcatacatgcttagctgtttcttttcattctttcctcctctctttaaatattttttcttctaaattacttatccgatctacgaaccggtcacaccgttgtattcgttgcaattaaatttttacaacaagatatcatatgattatattatatcaaaagaaaaatatgtgtttcaaactgttaaaataaaatgttccatacgtgatagtgatatatttcaatgtgcgtcttcagtgtgtttcataaaattcttaaaactacctgctactactctctctccacctcatctatgcacacatgcatgtattttagcaagcttcaaaataatttttctcttaaattatttatccaatccatgatccgatcacatcattatatttgttttaattaaatctttacaacaagatatcgcatgattatattttgttaaaagaaaaacacatgtttcaatccgttaatacttgttgtttcatacgtgacagcgacatgtttcaatgtgtatcttcactatgtttcataaaatatttaaatgtttcagttgctaattttttttgttttaccatatctctactataaaaatttaacttgtttttgccatgggtttctagtacgttgttcctttccatttcgcatttggacgcatgcgtttcaaacgttgtttccgattctgttccatgggagtagtcttccctcccgttaaattttttctctctattacggtagttaagttaaaagatgctcttccattgatttcctttttttttcctcttagttaagttaaaacatactacctaatgcatttacggtcatgcatgcgacataatggtctcgtttggttttataactctatacctacttaaaaacacataaggcttccgatcgttcgtttcgtccatcgtcgtcgtgtgagtccgagtccgtcttttttaaaaaaaaatccccgagcagatcagcctcctaacccctttgcccccaattcccaaaaatcacaaaatcactcaattgcaatcccaaatcaaaaccaagaatcctcacaaaatcaacatcccaaatcaaaaataaaatccaaatcctaaccctagccgtctccccgagctaccctcctcgtggtcgtcgtcgtcgtcgccgtcgtccgtcgtccaccgccgtcgccgccgtcgtcggcattgccgcctttcaccggcaccgccaccgttcccgagcccgccaccgctcccggccgcgtcgccacacctgggagggggagcagcagccgccgagcccacatgcggtcgccgtcggcgctaccactgccgtaagatccgccgcgggagggaggcgagaggggtcggagggagccgtcgccgccggatctatcctcggccgccaccaccgtggctggatccacccacggtcgtcgccgacgccaccgtcgccggatctgtcacgcgagggaggggagggggagcggcactgccggggagggaggagaggcgccgccggggaggggaggtgaagcggcgccgccggggaggggaagaggtgccaccactgagagagagggagagggagggaagggaaatgtttttaaggttagggtttgaatcattgaacttttatataggtcgtgatcaattaagaccgtccatcagatcgaacggctcagcttctccagcgttcctaggctgcccacactattgggccgcttgtaatctcctcagagaataagtttactttatgtccctaaagtcgtccccgaatatgttctcatgccgcccacactgtagcccgcctcatgggccacgtgcacgcacagaataagttcacttgaggtcccttaagttgaattgtttttatttcattatgaatagattttcttaaagagctcatatcatgtaaaactaaaccctaatcatctaatatttttatattttgtataattttagtttacccgttgcaacgcacgggcattttttctagtataacttaatgtttcacttgttggtcaactgtaacatttgaccgtccaattattttggggcatcggacatccgatgggtagcttcctccccaagtccacaaggaaaaatagcgtagcgagaaagacgaaggtgccactcattccctatggctaccagctgctcgatcgtcgcactccttgaacttgtccgggagcacgcgcgctaggcgtcggcagcgatgtcatatgcgtaggaggagcagagcacgttcttggcctcgttgtagccatcagctacgtagacgatgtctcgttgcttcccaaccgaagaagccccgggagtccgggatcactgtgttgtgtcgccaccacacgcctccacctcctctcccgtgaaatccatgtgccgccactcgcccatggtgaggttcgtcgcggccagcacgtacgcactccatcaccgccaccggtctcatcgcccccacgcacgggtgtggccaagacaaggaacacaacgtcctcagcttccctggtcgtcgtcggaacgtctccggctcacatgcgcgccaggcaccttggccatttcgtccgacaacccaggatgagcttcgccgcttctggctcccaccctccccatgcagggtttaaaatttctgactaaactttctgaaatttggggtctatcagatcccctgatatgaaattattcgcatggttttttggtttgttttcatttagccaaattttgttaaaatttccaattattttttcagactgaaatcaccaaaatttaggtcctctcggtatccctaatacaaatagcgaaaacagattttgaaccctgcccgcccaactagaagcggcgg

SEQ ID NO: 13017 - DNA, 13582 bp, Oryza sativa
tggcgcagcaggacctcctccatggtgaagactgtaaacttcggggacggcgtggtgaacacgggagagagaggtcgcgagagagagaggtggttttttttggcgggtggcaagcagggaggaagataaggaggggtggggtaaggtggatagggggtggcgcggggagacgtgattgggccagctgtgatctcccgggatttttccttcgctgctgggagtgggaggggaagatgcgaagctggtccggtgcaatggcgtgggggaaggaaaagcacagccacacgttgagctctaccgctgcaagcctgcaatgtcgtttgctgtggggagagctgtaaaatgggagcgaaaattcatggccacaagcaatgcgagtgttttcttttagctgtagggacatgcatgggatcaaagtcgagtgatagaatgagaaggactatgtggcaatgcctataagagacgaatgtctaaaatgaggggatgtcctctcgagagacaaaaagtcaaaaatacaagagccattgcactgcttatttaacactcgtaacaaagaaacacgagacacccatatggcaagaacaatatagtcttagctcttgaacaaacaagttaatagagtttcatagcaattgtgtaaagctaatcaggccgcgaaacaaaagtggcagagaaaaatattctcaaaataaaattcaaaagcaaatacatctatatgccctatttggcttcagggctttattgcagccgcaactacttctagaatccagaatactcaactctctatctagattataagaattagtaactatggaatttaaaaatgaactactaatcggaagctggaaaacatgggatctctatattcccatcaatcatcagcttccaagaacatttagctcttccaaacgtgactttacgagtccttgaaaacaattgcctcaaggtttcttaagtgttctcgtgaactctagatgatagagagagaaaggcttttttcttcctcctcgacccctctttctcctcagttcctatggccctgtcactggtgatgggaggtagaggggttgggtctccaccctccttgtaaatccacagtaatagtcagatctttcttttccagtttctttctttcgttacccctaagggttatactttgttccctctatttttaatgaaataacacagtctcgtgttgattcctttttaaaaaaatatagttagatcttttcattaggtcatgttatttgggtagctttattcttttggttcccagggaggtcatcggggctggtcatccttgccctggtttccacagagagtgcataggtgctcctcttggtggcattcttcatagtctacgggctagtttccaccaccgcgccagatctagtaaggtcaaggttgtgccagccatatcacctatctctagtgagctttgtacaagggcaaccgtcttttcctttgtcgttgacaacaatttgacaggtaactgagttttgagcaataccttagaagccttaacctctagtcagcggagggctcatttgggtaagctccttggtgccattttctgcagtatgtcatgcaatctttgtcctcattgtcaatcaatgttttggctatcatcctcgatgctcctgctccaatgtcggccaacttcttcggctttagtgatgtttatccaaggtgtgtggctgattgcttctatggaatgccaaggtcttaacctccatcgatgtgaggcctcaactgggtttgtgctaaggcaacatcttcagcaattcattgtgcaatcaccatcgtcaatcgtgtcgtccaactccaaatcttgctgtgggcagagaagatagaagcacctaattatttttccaattcttttaagtcctttgcttaaatttggttgtaatttttccatctttaaactactcttctaaaaaaaaggttgtactatattctaaggcctaaacccaactcaatctctctaattcattttgcgagaacactttaacctgtttcacttattttttggatgaaattgaaattatttggccgtgctctagtttcctaaaaaggtcgagcggagttgaagctatgctaaacaagctcttaaaaagggtcctccaaagaaggtccataaaaacggctctaaggcttttaatgggatgggcctggccctaatttgggcccaaagtggcccagtcttgtgtgcttgctgtactagtttacccgggagcaactcgtagatacaacttgcggtaggggccttccggtaatttgacgggattcactaattggaacttggtgttgggagtccccgtcgactcgcactcgacagtcgatcgccaacaagcccaaacccggagagagccggaggagatccgtcgtctcccgcatcctcaccggccgccggcgatggagaagggcaagggcctcgcccgccgctgggcggtggagctccacgacgcctcctcctctcctcctcccactcctccatccccgacccgcccggcttcaccagatccgcccccgacgcggtactacctcttcttcccccccccgtctttcgtccaactgctctattctcttccccctcccgcctggatcgcgggattgactcgtgtgctctcttggcctcccgcaggacgacgccgccggcgcgcggcagcggaaggattccgagaccgcgtggaaggcgcaggtgagctcgatctccccctctttccctgcgtgattgtacggtagatccggagttttagatttcttccatggctgtacgagaaattcggtgtggatcgacgaattctgtcgaatctaggacgcgtcagatcttgctgcctcgttatctccgcggagtgctcgaaatttcgcttgcaattgcatatgctggtatctaggttttaggtctgtgtgtgttgactatactgtctgtgctcgtggtgtgggcagaaagcgtgggaggtggcgcaggcgccgttcaagaacctgatgatgatgggtttcatgatgtggatggccgggagcaccgtccacctgtttagcataggtatcacgttctccgctctgtggcagcccatcagcgccctccgctctgttggcaaaggtacttcctcctgcctatatttggttggtgtcacttgctaatttagctcgagattaacagtgttagtgctaccgattcatactggcaagtcctgagctcctgatcaatgaatagtttagcctcttttatgcaatttcttttctggcgtccgcgtagtctggctgcttgtacctgggcttccatattgtggtctatcttttgttggtcaacctgatgtgtattcatgttaagaattcttaatgcctggtcacctgctgcttgtcacctagattgtctgtagagcgcaagtaatacctaggcatattatgctaaaaaattaatgtgggatgcttttcatactcctgaaatttttagatgtgtgttcatgctacatcatccctaaaattatagttgttaattttactatattgtttataacaaaatcatcttacgtttccaaaaaaaaaaaatcctttacctgaactgtagtaatagaccaacaaaagtatacgaaaataaaagagaattggacatatcaatgattaataacgttgcttgttttacagtggagctgattcgtaaaaatgaatatcactgtcaacctgaataaaaatatgcaaagatggctattctgttgcataaaatgctaatgattaactcgcatcagccttctatcttctaaaggcacatgatgattgaaccttcagttgcttgtatgtaacaatgaagtattattctggacttgtgactgatattgattggctacagtccacattcatgttgtccatattttagcagccatgtaccagaagttgtgacaacaaaaatgctcgtgacattcagtactgtagtctaggtgttgagtttttttccttaataaaccttctgtacttttgcagtttttgaaccattcaaggacccaagggtggatactctagcacctaagttggtctttattgctctcaacttggcagctatgggtttaggtgtatggaaggtaagttatagtaccatggtttagtcagaattttcatgtttctctgtaagcactttgggcacttagctgcttcttctacagctcaatacgttgggtcttcttccaacaaatgcatcagattgggtgttttcactggctcctgctcgggtatgttgctgataccacccaaattacttcttgaatttatctggtcacttttaggtttgttgtactgggaatgtgtgttactctctctgatcacgaaatacttgtccttttggacatacatccggtctttttttttaaaaaaaaaattgagtattggtatcttctaaaaatatttagattggatatgagagtcatgtgtcaatttgtttcataaagtactttataatatgattactttattggggttttcaagtctataacaatagaattattggtaaagttacaattaggaacccatgaaaatgttaaaaacgaccaagtatttgtgactggaggtagttcgtccttgcataattgatggtaactactgtgaaaactgggactcaatcaacttgctgctaccagttgcttgttctgttaattgcttcacctgttcatggcatctgcaacttcactataacctgcaaactgcccaaaaccttttgatatttgtccaatctcagtgaaacttgttttgtgagattgtttatttacctcctgattggcatgaaacttgggatatatacacagttagtttttgcccaacaaagataaataatacaaaatttgagattgaaacattttgaggaatttagaactgagaagtaccatagcttgaagactccccctaaaatattgtatggtacaattcatgatgtgtggcgactagtcacaacaggttcatgttcacctgtatgatatccacatctctctctctttttttttttgttctggctatgtcaattgcttcaacaaaatagccaaaagcccaaacttgaatttctgttagagacttggctcttttttcttttaatgtatgcacacatttactggtacaaattgtaaatattgcgaccaaaattttatcccttttgataaactttctcccttagccaccgatacttgatatttttccagtcaatatttctaactgaaagtctagaatgttagtttgccactatttacttttatgatctatatggattgataccatgtatatatatagcagtggttgctcgaactgattgagttttattctctgctggcaggaggttgaatatgctggtggagggatccccttgcactgaaacctttatgtgcttcagttagtacttattaaagttttaccacttggaagatggtgtctgtactaagcgaaaaattaccctgcagatgggacaagtctggtttttgtgaggatcatatttcagcacctgtactaaacttgcactatatcttgagacaagtaacttacaatttccttgaccccttttgtttaccctggttatttatacagagtcagttgattcttagtaaagctgaattatgttgttatgatgattgattgttgtcctgcagaggctcttgataccagccttcttttccttaaggcaatcttggtttgattatgagctgtgaggctcaagatggaatatgttggcctgttagtgctagggaccaatttgttgcccttatatacaacacctttacgttttgttctgaatagcgtcagagaatttgaactgcagaacattcagtgtgttgcgcttctgcagttgtcttgtgagactctctcttgctaccttgggttggttcacctcgcgccagttattggttcttgtggtcatcgtggtgcccgctggtagcggtggcagacgcccgcgctttccataccaatggagattggagaagacatagcaacgcagcgttgatcagggtgttgaagactcggatgacgatgctgctgcatccgccgccgaagtgcatccactacaacactgtcgtggtagatgagatcatgagattgcactcgagtagagtagccgaaggccggcgccgacccagaatgtaacggctggcgtcggcgagctaggatggagagcacctcagggattacgattttgtgaggagagggaggccatgagacgattgaggattagagcaaaaccaaatcgagaagcctcaccgccgtgactccgtcctgcagcaccgctccgcttcctcgccagttcgcgactgcaacgtaccttggcttagggttctgaatcctcatcccaatgccctcaccgctcagtccactctcttatgtctccacttcggcttcgcggtttgcgtccgatgttgacaagggtggaggccacgacgcctggccggccacgcgagctggatacttgcgtgcccaggaaaaattgactcattatttggggtggccacagcgcgccgagcctcggccgggggtcacttcgccccgctcaaaaacaatatcaattggagcctcgctgggcgggacgatggatcgggcggcggcgctgtcgattccaaaaggaggactacggtaccgcacgcacgcaccaacagttgcttgtaacaaagatcaacatatacgagaactgctatacatacgaggaaacctttttcgcgaacgtgcaaaataattgcacgttaatatattagaagaaaagagttatagttacacgacgcaatcagctagaccagcttatacaagggaagggagaaaaggcaaaataaaaggctgagctaagaaaactacggcggctaaacacaaactccaagcagcgggaaggggccaagctacgctagactcccaataaatccccaaaagtggtaatgccagctaaaaaccacagatggccctccgagtggatggactccagaaccacggagacagaagagagcgcagagtcgaaaaccctagagtttcgttccttccacagctaccaagagaccaagagcaccagggagtcaaagctagcacggagatgctctggtaagcaggccctggaggacggccaccagttctagaaccagttgccactaggggagagagggcagccatccaggaggcgacagcacacggagccagacctgccgagcaaacacacagttgaggatgtggttcgccgtctcaacgtacaatactgctaagtctcttatcttatgcacgtggcaaacatggagcctagcatgtttccatggcccagttatacgcatgccaaaaggcgactgacgaaatcgcatgtgatgataagaaacttgcagattttttaagtagttaagatcacgttttatttgaagtgtacaagtatggaaaaaaagtttaaaactaccaagaagggcattcgcttaacgtcattgactttttaacgcatgtcttttttttcgaacgtttaggccgttatcgacgttagaaggtgactcattctaaggacaaaacgagactaaaccttacagtgcacagttaattaggaaaaatgggacgaaaatcacaactacaacaaactcacaactaaccaacctaaactacaaggccgcaaaagcagaacagctaggttcactaagtaaatgttgttcaccacaagatttgcaaaaagaagcaaccgagaagacaagcaaaggctccctcacatgggcggagacatggcattatcgtcatcacacaggtacccacgcgatcgggcaactccaacttcatcaagaaacgctagggatcaggagagacttgcaaaccaacaagcttgcaactctacaatggagcgaaacatgacagttatactctgacttaagtcatcgttgccaagctcgtaaccgcgtagcagctccgactaccctaaaggacagcatacagaacctcttagaaccgaccatagctttgagtcatcgttaccaagctcgtcaacacgacgcagcagctccgaattcccaaaagccacccatagaagccaaagtggagcatagttgctatgggttagctccaagcacgacacgatagagaaaccaaaaggacgtctccaaggaggaatcgacgcccgctagcgtcgccattcacgcttttgcctaggcctccaccaacctaccactatgaagacaaccaactatcgatgttgcgcccgctctcaagtgtgcaagcaaactttagcattgcagcgtgctgagatgaccttctctcctgcatcatggccacacccaaccaccaggaactggaaccgccatcaccaccaacagagacaccggatgtccggatgtcccagaaccagtggcccatcacccctcgttgctgaccagcaaagcaaaagccctactgccaccgtcttccactggacccctcaatgccattgcctgcggaaccgcgtcgccaccactccgtcgaacgggccggcctgctgcagtcgcgccgtcgtcatcccgagggcattgtcgttgccctgtgagcaggagctgttgttgatgtccgcacgctaggagggggagccctctctaccgccaccaccatccgcttgccggccagtgggaggcccgtcacccacagtcggaaccaagggcacaggccccagatccagcgacttccctaggttgcaccggtgccatccagtggctcgagcggtgacggggcaggaggtggaggagcccgctacctcctattatcactgctgctagccacgccggccatccgacactcgcaggtgcgtcaactgctaccttggccaaaattgacgcggagacgccggatccaaccacgcaccggatctagatgtgacggcactataccagcgccccgcgccttcagcttgtcgtgctcctcaccgtctcccttgcgcaggaggcgagcctcgccaaggtttggccctactaccacaatcccatgctcgccgcctagagaaggcaacgtgctccgacggtggcgaggcggaggatgagggggagtgggtggtggcgggcggctagagtttcgtacatatgcatgatagattaaaatatgtgctaatttatagttgtgttatactagtaataacatatgtgcaaatgggatgtgttgtatgggcacataaaattggatgacctcgaagtgtgaatcgagcctagctaaagaattagatctaaaggttgcgcaacgtgcggatgtgaattagatctaaagaattaatagtactaattaatttcatgctacaccaaacttttctccacgtgtgaacattagtggacttgtggtgatctatgttacactgtgtcatgctcttcttcacggttaattaattcattaactgaacatctaatttgtcaagctggcggtggagatcgacggtttaaaaggagacacttttgttgtccttttgtcttgtggatgtggagaatgcgatgccatttctcgtcggttcatgcatgatacgccgtctttttagtttgtgcgctgggtatctgaagaaaaaaaagaagggatacaacacaatgcactccattcggttcacttcgcttgtaagttagtaattttttttcttcttttttttttggcctatataaacactacgagttcagtctccatttcgctgcagttgaagacttagtttgtagtttgtgcaggatgcagacggagaagaaggagtctgccggcgccgccggcgagaagccgccgagcttctgtgacaggctccagagagctttccacgcccgcccggcgttccggcctctccgccgcctcggcgtccgccacggccaggacgacgacggtggtggtggtgcgcctggaagtacagtagacatgcagcctgcgacgacgacgacgcacggcggcggcccaccgaggccggtgctgccaccggcggcaggccacgctccggcgcccgtcgtgctgccgccggcggtagtgaaaccggctgccaagcctgcgggcggcaacgctccggcgcctgtcgtgttgccgtcggcgccggctgcaaggccgccgccaccgtcgcgtcgccatgggcatgcacatgcgtcgacgaccgggagcgcacctgccgccgagaaggtggcggcaacgacgacgaggccgccaccggggattccggtgcccgtgccgccgccggctgctgctgctgccgctgatgtcaccaccgccgcggcggacgcgaaggagggcgatggtgacaaggagcagcaagggaaggggaagaccagggtgagctccagagtgcgcaaggccttctcctccaagtagagacacatcacaattcacacatccatggccaccgtagtgtgaagcagaagcaacccaataactaactactgaaaaatatgtaccttgaggactttgtgtgaacctaagtactctatccgttattgttttttaacgtatgacatcgctgaattttaatatatgtttgatcatccatcttatttaaaaatattatgtaattattatttctcttattatgacttgataaattaaatgatctttaagtctgacttaaataactttatatttttaaaaagttggaataataagaatggttaatgttttaaaagtacaacgtcatatattagaaaagaaggtagtatatttccataagctttgtaacactgctttatgcaaaatctgtgtgaagcagaagcaacatcgtttttttttgaacttttgcgattgattcatagcaataggtcagattttgttttctttttgcaaaagaagaggtgaaaatttttcatccgtcctaataaaaaataataggtcagcaacggtttgcacgttgctacgtgataactaaaatggactttcaactcctcagtcatatggctggggagattgataatcttccaactaacctgcatgaacgtattataactacaacgatgaaatgcatattaatagaggagaattaaaggtcttttaacttcaatttcacatcagctgagacttccgttttgcccttcaacgatcaaaattcatagaatgatgtggctagataaatgttgattgtgagagcacttcagccagttgcacttccattcactacaacaaaaaccttatatagaggctcttttgtagagacaattttcaaaatgcctttaatcaaaatgcttctaagttttgaagctctatagtttagagacactttttagaggcactttgaaaattgcctaaaatatttttactctagagacactttagagacatttttaggatactttgttaaatttatcttgtagagacatcctttcggcactttaaaatttgcctcatatgtaaaggcattttcttaaggcgttttaaacgatgtaaaggcatttttttttcaaatattaatatatatcaagtaattagatataagtaacacaaatcatatatttatatgtaattaaatgaggttgagatggttagtgtattgaagataaaaaatagtcaattcaagaggtcatgagttcaaggattggtaagggataatatttttcttttttttcatattgatttgctatagttgcctcaacatattaatgcctctacaaagtgcctctatttgcatagagacatcttacaaaatgactcttagtttgtagagacaatacaccaaaaggcacttatgagacactcttcaaaatgtatctataacactgtgaaggcattttataaatgtctctatagtattaggaaaatgtctctacaaggtatatttgttaaaatgtctctacaaggtatatttgttgtagtgattttggacggagctgaaaccatttggtttggttctagcttcacaagaggtaaagctagagttgagactgtgccaaacggacaaaaacctttgaagtaactattaattgggcgttcgttttgtttctcgaaaatcaggcgttgttttactaatcggaaaaaaagtttcatatgctagatcgaaaatgtttcaatctcttaaaatgttggaacacatttgaactacgactgaaacattttgatataacatatgaaacatccaatttcaccctaatagaacaccaacaatccatatcagtcaaggacatggatatgaaacaccatcaaaaccccattgcaatatttcctcaaaaatcgggtattgtttcacctctttgtaagaaaatgtatcagtacttgagaaaaaaaatcagcatttaaaacaatgaaacataaccgaatcacacttcaaacattctgctacagcatataaaacattgatttctaaccattgaaacatcaacaaactctgtgtacatcaacgattaaaatatgaaacattattaaaatatccactgcaatatttgatccaaacacgagtacactagctgaaacacacacaaaaaaaaaactggtttggactgcatctttctcctctccggcgaacacagggttgccgacaactacctctcggtgctcaccttcggtcttagcgggggccgtcagggtcacagaagaagaggacatggccatcaagaaatgtcgcggtgcgccagagatccaaggacgacgagaggaaggggtaggtgaaattgacaacattgcgagcagtggtgggttgttgatggcgcgtatccgatggaggaaggagggctcagtgatgacgcagcgaaagccggtgcaggcggtggcggtgcgggtgaggtcggcggtgaagagaaggcatgcggaatgagcgactgacaaggcactcgatatttcgttaggcatggggtgcccaagcctaatcgttttcgaaaaacttttagaccagcgggaacaaaggggaagtgcaaaggaataagtccactttgactcccttacgtacctagtggttgaatataattcataaccttaaaccgcaataccgaatatctcgacccctcaactattaaaagtggtgtaattttaactcccttggtgattttgaaggcagtttcattgacgtggctcctatgtggcggtgttggcgtgacgcttatataacattagaattaaaaaatacgtgggacccatttatcattcacaaaagaaatattgtgggacccattgacatggggatcccacatgtcagcctctctttctccttcctcctcccccctctctctctcccctttctctccctatccggtcgtctacggtgagagctgaagccccaggtggcaggcggcgggagggtgggcggtggaacggcggcggtagcggtggcggagcaagtcagggaactgcatcggcaggggaagtggtagtccaagcccgccaccggagcatgggccggtggccttggccaccaccttggtaaggttgaactcatgcccgggcaacgtggcagcgtcgtgcgggcgcacaacaacgttgcatggcaaagaagtatggcgcgcccagccatccacgttgtacagtgtgcggacgagaggtaggccaaccacgtagtcgtgttcggcttctccgccaccgccgctgcgggggtggcatggcctagcagtggcgtagggaagcgtttcgtgtcgcatgtgaaggcatgcgcgacaggtgcagtggcgtccacagtgagcgcatgcatctcgtcacaacggagaacgctaacaccccctcc

SEQ ID NO: 13018 - DNA, 12998 bp, Oryza sativa
cgcacaccccccgcggtatggtggttaccgcggtaaccgtgcggttaccgtgaaaaaccgcacaaatttcgtttccaaatttttgaattcaaaatccacggtatggacacggtaaccgcacggtttggtacggtaaccgcggtaagaggacggtaaccgcgatatgttggaactgaaataagaaaaataaaaaaaataatagaaaaaaactaaaatgtgagtattttagtttatgttggaactgaaataagaaaaatgaaaaaaataatagaaaaaaactaaaatgtgagtattttagttaattaagatgtggttatacaacagaaaaattcggcatgacctactctatattgtagagtccacagtataatgtccacgattacaattctagttcgaatgaaaggaaataaacaaggacatgcatagctacgcattccactgattatatgccatattttactcctctgtggacatgagcatcaagccatgtgaatgtagcaaccccgccttgtattccttccaactttgacctgtccatgatgatgttgtttgccactgagcgtacaattgagcataccactgaggctcttgccattcatacacccatgtagtagcaggataatcagaagcttggggacggttgtacacatacgttggatagccactttcaaagctagaggcactgaatgagctagagctatcctgttgtatgtcactgaattgttgctgttgtcggactcccggtgcaatggtagttcgttgagagcttggagcaccatgatcctggtcctgagtagcatgagtgaagtcgccctcacctgcaaatcaaaaaattgcaagaaaattatccagtactgaattggaagatgaaggttgaaattgcaactgaattatatcacaccagtgaattgaacggggctgtggtgatctgattgttgggtgtgacccctaggaggcacattagtagtgccttggcctccttgaccatcgtcgtcgtcgtcatctgtttcagttcttgagctactatcattggactcttggtactctgggcttccttgggtctcttcatcgctatcaacactagtcgatcgtggacccttgccctttacctttttagatggacgtgcttttggcggctttcgagtcttccttttcccaatatgagtgtcacctacattcgtatcagcccactcaacaatactagaagctcccgtggtccttcgcaggtcatccaagttgactaggtcagacacaagttaactaggcaggggagcgtcactctcagctgaatcttcatctagttcggggcaagcattagagcgagcattgtccatccaggcactgatatgattgttagtttcatagaatgagaggtccgctaatctttgaaggggatcatcgtcctccaccctaatttgggcatttgcttgctgaattcgaaggcgaaggttgtagttcacgtacactagcttgttgagcttcttgtgggtaagtctattacggaccttcgtatgtacgaatgcgaatgtgctccaattcctttcacatccactggaggagcaacattgaccaaccaaacgcaacgcaagcttcttcaaattcggcgtgtctaaggcaaacatagaccaccattgtgctgcaaaagccaagtaacatgtcatttcataattctgaatacatcaagatcaattagatatatcatagttccatgattagaaacataccaggtgaagttttcccatctatggccatccttcttgctagtgccctcccaaattcacccgtcttacgtcggtacatctcaacctccagcaaagcggcggcagccgtatcgatatccgtcatccactcgaatgcctgtcggaggtcttggaagacagtagcacttggagaatacgcgtagtgcgtcctagggttcaatgcggcagctacaaaacatggcacaggttaagtaagagttacataatatgccatgtggattatgttatgaccaatatttaccggcattgatgagagtctcattggttaggtcgtgcatccttctgttcacgatttccatgtatgcttcaaacttgtccctttgattcgcaaaaagactgtcgtactccattttgagcaactgatatctcaaaagtacctcactcaaattggggttcttgtcctcgtcagcaaaccgaaggaatgagtacataggttggacaaaattcactactgcctctaagttctcccaccaagacagactagatagacatgcatgtgcatatctaccttccaaagtcccactaaatttgctttgcatgaagacagaggaagccatccattgcatgaaaagatctcgcttcctaaggaaactctggagaaacatgtagtttgttccgaaccttgtagcattccacttaaccagttcaccacctatagctaagaccatcatagcatgcaacttgttatgattgtatagccatctgcaaattttcctagcactctcaatcaccatttcgtggtctggcattttcccaacctccttaagcatcaagttaactgtgtgtgccacacaaggttgccacacaattgtcttgtattcttgccgtagtagtctgcacgccttcttgtagttagagccattgtcagtgataatttgaacaacatgctccgagcctatttcgcgtaccaccttccttatctcctgcattggtagataacataataaaaattagtccatgcccctagcactgacgataacaggtgatgaagtaatttgttgcatgaaccatacataccttcagcacaaagttagcatcctggctttgccccggtcgcatcaatggacttgtggaaaaacattattccattgcagtatatcagaaaattgatgaccgacatactcgtcggacctgtccaagaatcacacattatagtaacaccgtactcatcccaatccttcttgaacctatcaaattgcttcttcacatccttctctgtagaatcaagatattttccatctatctcgttaccagttggagaaggtacactttcacctacaattgacgtatgaaataagtagtgcgcaatgagttagaaaaaaagaagttccttaatagatgcatacgtaccccacttttgtgtctcccgaacggcgctcacaaagtatggattatcggcgtttctaccaggaatgccggcggtaaagaagaaccttgcccatgactcaccaatggcttgcctagcttgcttccccttctttgtgaagaatcctgtgtcaatgcgtggctgcacaggggccttggcagatgctaggttgtaatctctcacagcaggtgactccctatgagacgtagcccttcgtagcatattggtaattgggttacttctacctttccgtgcctccggctgagcggatccactcccaccgccatgctcataagtgccaccacgctcctcaacatccctcctaaagttttcgtcttgtcgtgaggctacaatggctgcttccatttgttcctcctcgtcggcatcacctgttaggtcataatagttgacccttgctgcttcaacccttcttccgctatcactcttacgctggtcacctgcatcttttatcctgtccaactcacggcagaagaactcacggacatccggaggcactgaattgcaatatgtaacccccttccttcttgcagccaagtgttgctttaatcttgttgccccaccaccgcccctctttgtatggcaatacttacagcgccatccaggtgggatattctccccgtgctcccacacagggtccctactatctgacatctccaccctgtatcaaatgcatgagaaattatcactgctaattataaacatacctcccattatgcaataatacgacgtaattatatgtacactggtaagcatgcatccaaattcttccatactatgacgtatttaatttaacctatatgtacatagaccaaagcaatcaaatatacttcacatgcatggttttagccaagcacgggcaaccaaatgccgaaataaactcatattcccaatgtatttcacatgcatattggtaaaaatatgttctattgacctaaatcccaaaatatgtccatgcatatcacagtaaaaaataccataccacggttcaagccacggtaaccacggtagggtggacggttaccacggttttcacacgattaccgcacatacgtatatcgtctcatagattacgaagccgacggtaaccgtacaaaaccgcacggttaccgctcctaaccgcgcgaaaaccttcaaaacggagggattacctcttgcccgtcgacccaggcggttaccgtctcgtaccgcgcggttaccgccgcttaccgcgcgggaaccggcctcgccggcgcggaggcggcggatctggcgcgggcgcacgccgtcgccccttcggtcctgagcgcaactacgcgagagaggggaaaaacggtaggattcgccagagaaacgaagcagaggcttccaaagatattttcctcccattgtgggccttattgggcctcgtgaacagtgcatacttggcccattccatttaatcttttttcttttttataattcacaataggttttgcgctcaaatttgaatttacctgcatctttttgatgaaattgtttcaccataacaacatacaaaacaagcttttacatccatgattttttttgatttttttcgattatttttcaaatttttgaatttgagcaaaatttgcccaaaccctaccgccggttttcgttaccgaccccccacggtaagcccggtaaccgcggttgccgcgcggttaccggcgagaaagtgaaccctgtgtgcacacaagccatcaagttttcaacgggacgaagaaaacggtcggaagatgtaaaagtaaattaaatatattcaaatcatttccgttatttttttttctcgaatgcaaaatcattccaaatcatgacgatagagtcagaaatgataatggttttaccggaggccggagcatcagaaaatactatagacaaaatcattgaagtagagcctcaaaaacagcaagcaagtcttagttatatttatattgtaaaatactagtaacttgtcttagttatatttatattgtaaaatactagtaacttggtcatttgatgttatagatgttggtgtatttatcttatctgttatccataaacttggttagattgtcaaaacgctttcttcctctcgcgtcgccctcccaaggggtggctcgggaggcaacgagcttcggccgtcccctctcccccacctctctcctccacctcgccaccgcctgagcggccgcccggctggcggccacaaggaccgcgctcaggtgacctggggagccgccttgggcggcggcgacggtgaccgccagatccgcgccgctccgatcggatctggcggggtggcggctggcgaaggggaaagcgacggcggcagggatggcaacgacgacggggatagcaagccgcatcgggtgatggggaccgtcggcggcggggatggagatggcgcggggctggaggcggcggcgaggacggcaacagcgggccggatccggtcgtgctagaggcggatccccccccagggcgtatctggtgcggggcgagctcaagccggtggcggcattgcggagctcgcggcgacggcgtcggcgacaacggcgcggagctcacggccacggtggtgatagtggctggacggcggtgacagcaggtggctagccgacgagcagcagctgctggctgccgtggcaacggggggcactcgcagcgggagaggtcggtgcggcggcgacagcaggcgtggagctcgtggcgacggtggcgacagcaggtggctggccggcggcagcagcggcagttgtggcgaccgtggctgcggtgggaggaggcatggccatcttggacggctagccgggggcgtggtagacggccgtatttggccggcgcgacagcgattggaggaggggtcaaagaggcgcaaccgatggcagcggaggccggcacggcgcgagtggtgtggccggcagtgatggaggctggcttggcacgagaggcacggctgagcggctgttggtgtgagggtagtggtatattttttcttttttcctggttacgaccttctagggttgtaattttgtaatttttttctactctatcaatacaacttcacactgtcttgtgcgagtcgttcaaaaaaaataaacttggttagaaatttgactaaaatgactatatggaacatagggagtacctttcttacggatagaccagtatactcacgacaaaacagcgtaaagcctcagaacacacatatgtgtgtgtgtcccatatatatattgctcaatacaattcagagtgacatggtatacatagcttgcatgcgtagtagcccgggacttagcctagctaggtattgagtacactacggcaaaactgccaagaaccggagagagaaagatcaggaggctaaagagacagagagagtgagagagagaggtgcgtcgaatttgacggcggctcaggtagaaagagtggagcaagtggatcatatctctatggtctatggatccctcaatcttgatctggagtcgatgagcgagtcctgaatctcctcgagcgtcctccctttggtttcaggcacgaccatcaccacgaacaggatggtgatcaagctcgccgcggagaacatgaagaaggtccctgcatttgcacgcaccaatggcaaagggaaaagaaaacaaaatgttaagtgtatcaagaaagcagcgaggcaaaacattttacatttctataattcatagaataaatctcctcctggtaaacttgttggcataaatccaacggctcaattcgctgatttatccaggttgaatgaatctttcaaaaggtaaaatggatggttattttacatctttcaaaaggtaaaatggatggttatttgtccatttcgcttagttcttcagagatgaaggttattgtttttgactactggcattacagcattggaagaactacagtgctgtgttggtggaatttttacttacctgcagaactccagtccatgaggaagctgaacgagtaagaaatcgcgaaggaacctaaccaactaactagtgtcaccaagcttccaccgattgctttcatgtcaatcgagaatatctgcacgcaattcgtcatccagaaaatataaatcactctcctcctgaatcactacagattgatgaagaaccttgtaccatatataaccatccaaaaccaacactatataattttgcatacctcagacatgacaacccaagggacagggcccattccaatcgagtatgctccaatataaacctattacagaaacagcatcagaaagagtatcagcagtctgcagtgatgtttatctttcacaacatgctacatggtgtagactactaaatgttgcgattgaagtgacattagaatgtgtagtgcatacagtcctaaaaatttatgtactgcaactgaagggaaaggatgtacatggattatgtacttaccagtataccggtaagagccaattcaggaacccattctgagaatagcccttgtgcctagcagacatgaatcaattaccattatatacagaaacaaacagagatggtcctccttacaatttgagctgttaataacattgaatgatagctttttttggtagattttcaagggattgtcaactgtatcaagctgacttatgccagtcccgaaattttcaaattatacaattatcttttcatgtactttcctaggaaaaatgtactagttacctttaggtagaaggatattcctgtcagaaagcagcccaaaaatgttccggatgccgagacctaaataacgaaaagatctcacaaaaaattctatctagcatgcttttctttgtatgtatcagctcagctttgtagcatttataccattagaagaacccgtcttccactcttatccattagaatggctccgaacaatgtaataggaatctgaaaagatcagtgttataaacaaaatgggcttattagttaatttattaactagaagcagtgtatcaaacctgaataatgccaatcaagatggttccaagttttccagagaaacctgaagtgcgataaaatcacaaagttcatacagaactgtcagaggacaacaacagtgatcacaatatttacgtacctgcagaagtgaagatagagcttgcataaaagcctacaccatttatccctcctaattgctgaaatatcatcaagccaacacccacctgtgtatataagatccagcaattatgtctggttcagttcttttctaaaaaaagtttcacactatcagcctccaaattcagtggttgaagttttaatgcgattgtgattttgacatgaagtagttgaagacttgaagtgatttcttacagtgacagcgtatatattttttctgagaaacaaatcttgaaccctggcctttgggaacctatggagtgattcaatatactcctggagaaaatgatcagtctgagcaaagtccttcacattaaattctaacatatacaagcaattaggacagaattaaactttaatctcgacggcctcttcagaaacgtcagcatcctctccccgtagcatttgcaatgaggcatgaaattctttctcccttccaacgttagcctgtaatttaaatgcagtggaactcaatacaagaagtgcactatgaaatttattactgatgcttcataagttcatgtgtatgatcatgtaaccccttcaattaataaagcaagaaaatcatggggtaaatggtcccccactgacaaaattcagaacttaattttggtgttccatagagcgtttgacaaaggtagaactaagaagttcattaccagccatcttggtgactctggaatgaagagaagtcctgttaatagcaaaacacatggtactatacctgcacaaaagaaaatgtatttattaccatccagcatgaatgtgaagaataaacatgttatttctatggatatgaagacaaattacctactaacacaagattacgccatgcaaccagggcgccaattatgtatgtagctgaactcccagaacagatcagcaactgcgtgtgcagaaggtgcggagtggaaactattaggattcaataaaaatgcctgtcgatatccaattttcattttctgaaacctggtttgaagttgcaaggcctcccctgagattctttggtgctatttcagcgatgaacacaggcacctgccatatccagcaatatgacgaagaacataaatgtgataattagtcaaggtaaaaaaagttgaaaccgatacaagaggggaagacggacagtcagtgccgtattttgaatcaagagatgcataccacataagaaagaatcccagtactaaagcccaacaatatccttccaaagtagagcatgataacaccctgtacatcaaaactcaaatataagatacccacaagaaacagataaggaccaagtgcaagaatcatttcaccaaggaacaaaccttagccaaatgcaaagaaagccatccaaaaatgcaaatagtagctgatatccgcattgtctgcgacaaacgaaaaatatgacacacctggaacatcaatttacagcaaacagataaatcaacccaattgaaaaatgggactgctttaccattttacgtccaagaaaatctgctaagcgaccactagtgacagcaccaatcattgccccaatcgtcagtacagatccgaatagtgcaaactgcaaggttagaatgagtctatacatatcacagtactacatacgagaatattacagccggtgaaagttgagtacaagtagcacagcagagcgaaaaccatggaagagaaaatcactgacctgcgaaatggacagtccaacttcatccacaatccctgactgagtgggtgcagaataacccacctgcatatgaacatggctgagtaactaaatgatcacattcgacatagagaagggggaaaataatcaatcaatacattccagtggaccagggatatataagtactagtagcatatagttggaatgggaatattgtactctagctggaaaaggccatgagaacatgtgcacatttgctgagatacaaccaaatgtggtgacctgtccacttcacaaccctttgcacttcccattccttgaagctttgcaatttcttagttgaagctagcaaaatggtatgtaattagtcagctctaatcaactttccgttttttactgcagatactttggcattgtggccttccttgatttttacctctgcaaacttaccaactcgaatataccgtcaggcgtcagctgtcagatggcccaactgtattgccatttttgttctgctttacgcgtttcttgaactcatgggtctcactaattaagattctttacacttaaaaaggaaagtaattagaggagatatgtaaaaacagagtgagagcttttgcccagccagaatggaaagaattctctgcaatgaacacttgaattataagtacggtagaaatttctgggaggaaaccccgtcgtgttcgtattgatttaatttctgtttgaattactaattgctttcttgagttgaaaacccttccatagtgagagaaaggaggggaaggcgcttacgcaggtgccgaactcgaaggagccgcacacggcgacggcggtggagagcatcagcatcgacatggacccttcttctcttcctccgcgccgacccccgcaatcgccgcccggcatcattctggatcttctcctcatcgccccgcccctgcttgtgctgccggaggagcagcggcgccgtcacctcgccgcctccgcctccgccgccgccgcccgcggctccggccaccaccgcgccctccacatcctccgcggctctcactatccccattccccccggcgcaacacgcacgcacgcacgcgcgcactcgagagcagcagcgagcggcaatggcagcaaaactcgggaggcccaagattggcaaggagcgcgagcgtgtcgctcgggtcgggagctcgggatctctctctctccctctcggctcctctttgaggcagcgccgctatttatacgggcgagcgcgccagggcgggcctcactgacgcgtggggcccagcagctgacaccgcagaggcggcgcgttgagcgtagtggagttaggggggaagagaaatatctcccattgtttcgaagaaaacgagaaaaaagaatcaaaatatctccgatgatcgaggccgatcgcaagcacgcggtaattaattactaccctcgcatttctaattcattaaccttaatataaatatcaaaaatattaaaataaatatgaaaaatattataatgacttatattatgaaatggatatgaaatggatgaagtaattagttaatcaattagttaatgtgatctcattgtcgcgataacgctaaagaaaactctgggagatcgatagacgacgagacgagacgatagcgtgatcgatcgatcgatttttgcatctgactgatctctgcaatgcgagagcgacaggaaggagacgtagcttagcttgattgatttggattaattatgcaatggtgatgagctattgagctggaaccatggcagcattcaagcagcggtgtatagtgcatggacatgaatcctctgcggtactgtatttgcagtagcagtggctagtaggtggacccgattccacatgtcagcggttgttactacagctgatagtgtatacctacccatacacatgtgtgctatctgcagctagctatgcacactccaaagcacatatgctacttgatttttttttctagtataagaaaattgtaatggaagaataagaagaaattgtagcatagcatttgtaggcatatgatgatatgatgccaaggccagcacgatcggtcggcatggtggttcttgactcgtccgcaactactgtagcttagcaataccgcatacgcgcaattgcgaaaaacaaaacaaaacttagcctccggttttaaatctgtgttcttggccttttttccaactcaccatcagggatgtgctcttcgccttctttttcacctcatcttcctctttttccatgccttttaaaccataaaagttttctatagaaaagttgttttataaaatcatactccctccatttagtttaaggttataagacgttttgactttggtcaaagttaaacttattttagtttaaccaagtttgtaggaaaacgtagtgacattttcaacccaaaacaaatttattatgaaaatatattcaattattgatttgatgaaactaatttagtattataaatattactatatttgtctataattttagtcaaaattgaccaaagtcaacacatcttataatctgaaacgaagggagtattaatctatttttaagtttttaagactaatatttaattaatcaagtgttaatgaataacaccttttttgtgccggaaggtagaatttctgaactcggcctaaatacaatacataacaccgttagcttttttaactcgtttggttatttgtctttttagaaataatagctacccctacgtaaataggcaaacacaaggccgggcacgatctagtgatacactgatacttttctcattttacgcaactaaataattgaatgaatattattgatctgagggaaaagtaatgtatgtactcatggaattgaaatgtgtgtttgtgatgtgtttgaaatattaaacaaaaaatataacagtctttaagtacttttgaacggactttatatgtgattctcatatttttttccaatctaaatatttgaaaaaaaaacattgacagttaaatcttcaaaggtttattaaggtacgaataaaacatgttttcacggaataaccttataggttccacttggatgctactcaattctgacccgtc

SEQ ID NO: 13019 - DNA, 16800 bp, Oryza sativa
gatttggtctttttttgaggatatggtattttagtgtttattatggtgttttttaattgctttttgctttttattatatctatcggattttaatccaaagattaaaaatctgtgtgatacgataataaaaatctttcgaaagatgtataggtactccctaatttttttcccgttcggttagccctcagtgggtaaaaatccatgcaatccctacccgattttgctatccatctctcgcgatttttttatggcatttgacacttttttggcctccatgcaaccacttgcaatgcagcggcaattttgcaggtcgaacgttgcatgcagtgcagctcgccggccggctggcacatcgaccagtgttaccaagctaccccgcgcgcgcgcgatgatggagaagcacggtgtcaaggtggcctctgattggcgagctggccgccattagtacggccaacgctgttcggtgagcgacaccgcccctctcgtcatcgtcgtcgtgaaatatagagttacagtcctatataactaaaattacatttgtaaatttagttgatatgacatgtaaatgcactgtaattttgataaaaataatatttaagtaaatatatatttgtattttctttaaaatataaaattacagtcctatataactaaaattacatttgtaaattcagttgatatgacatgtaagtggacagtaattttgataaaaataatgtgtaagtaaatatatatttttattttctttaaaatataaaattacagtcctatataactaaaattacatttgtaaatttagttgatatgacatgtaagtgcgctgtaattttgataaaaataatgtgtaattaaatatgtatttgttatattctttgggaccacctatacatttgtcgacaaattttctcctaaaaatttgacatatataattatagtacaatcgtagtgtaattacactataacttgcatgtaactacagtgtaacttgtatgtaagttttacgtaattttgaatcgatagatctattacaagatttgttcttgtgaggaagaaaaaaatcacagcatacacatatatgaaaggatttgttcccaaggcctcaattttaccgaaataacatgttacggagagatttttgaaagttacatataagttatattatagttacagtgtaattgcatgtaagttacttacgattgtactgtaattacatctgtcaaatttttggaagaaaatttatcaacaaatatatagcaaaattgtattcttttgtagtccgttggatgtaaatctaagggtagaaaaaatctaggtgattttttttattggaaatcaccggacaaatggatagacacagtccctttcaggttctcttccatcaccaagacaccaacggaaatcaagaactcttccattgtctgtcttctcgcataaaaggttccacgtggtcgatgcctcagcgttgttctcctagggttcattagctcgctgctgcgccatgaagtacaggaaggggggcaacgcccccgccaccgagcccgacgacgacgccacgacgaaaggaggtcacgacgtgccgccgagcatcaaggtggacatcggtgagtaccatggaggaggtatcgggaacggggacggtggctcggcctcgctcttcgagccgcggccggaggagacaccggtgagccggaggaacgatcgcggcggcggcggcggcgggcgcgagccgccggagaagcggctcacgctgttcgctctccgcctcgccgtgctcgagaaggcggcgagcgggctcgggaagctagacttcgtgtgggcgacggtggtgctcctcggcggcttcgcgagcgcgctcagcaccaccgacttctggtgcgtcaccgtcatcctcgttggctccggggcgcgcgtcttcggccgcagccacgagctggagtggcagcaccgctctacgctcacctcctccaccgccggtggcgcgctgcgctccacctcccgccgcttgctccgcagcctcgggcactctcccgccgccaacccgaccgacgacggcggcgcccgtggcagtgcgaccgagacgcagttccagcaccagatcgtcgctcgcacgaagcagcgcgtttggcacgtgcccgacgtgtcgctactcccctacaccggcaggttgttcgtctccaagaacatcgggaggctcttcagctggctgcaggtgctctccgccttggcctgcgtcgcgctctcggtgatgcgcctatggcggcacgacttcggcggcgaccagcccaacaagcggccggcgctactgctgttctacacgttggcgttgatcgaggcgctgatcttcctgctcgagcaggcgtactgggtatggatgttctcccggcagaatctgatcaagacggtgagcgacgactgcaagctcggagagtactacggccccgactcgctcaagcgcttcttcttcgacgcctactcccgctgcatcacggggagcatcttcgacggcaccaagatggacctcgtcaccttcgccgaggagctcatcctgtcagagttcctcggcaatcagctcatcggcgtgcgcatcctgcagcagttcaccaccgagggctcatcggccaacgccggggaatccaatctcaacacgctgcgcaacgttggcacgaacgctcgctccatcgagcggctcgtggagatgatcaactggaagagccccggggaggaggaggtgcgccggtgcgcggccgaggtgttgtccaagctcgccgacaagagccggaacgcgctccgcgtgtccggcatccctggcgccatcgagtccgtcatgtccctgctctacaccgacgagagcgcgccggactccgcggcgccacacgacgtctcgccggcggcgcggagctacgatcaccagcagttcaaactgctcggcctgctcatcctcaagaggatcgccagggaccacgacaactgcggcaagattgggaacacccgcggcctcctctccaagatcatcgagctcacggacgcgtcgccggagctgctccacaacacgcgggcgccggagtcgccggttcgcatcgtgaggcgcgcgctcaaggtcgtcaagattctggtgtccgcgacgagcagcaccggcaagatgctccggcaggaagtcgccgataacgtgttcacggtgagcaacctgcgcggcgtcctgcagcacgggcagcagcacacggctctgcagaagctggccacggaaatactgtcgcacctggccatggacgccaagggcaagcaggtgatcgtgggcaccggtggggtggtcaagctgctgctgtcgatattcgtcaacggcgagaaggagctcggcgcggaggccggcgaggcgctggcgatgctggcgctggagagccaggcgagctgcgcggcgatcctcaaacaggatgacgtgctcgaccacctcatgtcggcgctggagggcgacggcgggccgcgtcgcctgaacgcggcgagggtgctgcgcaacctgtgcgcgtacgccggcgagaagcatcggcggcgcctctccacggtgaccaaagcgatgcctacggtatacatgtgtctaatatatttacacaagaacctttcttgagtcgtgagtcgtgacgtaattttgatttgattgttaattactatacactacatgttttgtatgatgacttgttgctgaaggtactgaaggccaccatgacggggagcgagaggaccctcgaggtgttcgtcggcctgacggtgcagatctgcaagttcatcgacggcgttcggttcgccggcgagctgtgcggcgccggcatcgacgagagaagctacgtggagcggctggcgagcatcctgcgggagcaccggtacccggacatcacggtgccccggatgcggcggttcgtggtgcagcaggccatctggctcatgacctcgtcctccgccgccgccgcctccgccgccgctggcgcagactacgtatcgcttctccgggaggccgggatggagcggctgctggagtccatcgccgacaccacgtcggagctggagtgctaccacgcgttctccggcagcgtgggcatcagcaagcaccgggagagcttctccgccgccgtggacgccgcactcgagctgctcggcggcgatggagctcgagctgaggcctgagctgcatgcaacggtcggaactctaaaatggcaaaggatttgtggtgccacgctggcacgctcctcccgcacgttctgtgcgtcttgatgattgcacaacacaaaagtcctattctttttttttcttaaaaacaaaaagaaatacactacacttatacgagtagaaatttttactatagctaaaaaatttgccactattacacaaggatgtatatatgcactatctgttcatgagattcactgaaataacatagtacatatttatagttttgtcgttgctttgctttgggggcatatttaggtcctatttgtttcagtttaagattattataatctagattattaaatcagattactctaaactggattataataagctggcataaaataagctacgagttgtttgtttctctggattattagaggcatctaagagtagtgggtcattagccactcaataatctgaaaaaaagctcctctagagaagattattggattatagtaatctggcttatagattataataatctagcataataatctacttgtttattttaacttgctcctaataatctagattataataattataagctgaatcaaacagggtcttagttttggaatttctaacacaaaaatctacaggacataagtcatagcatgataccccatggtaggtacgtaacccaggggttcatcagttgttgtgcgcaactccgtttgtaccggagcagcatgatttttgagttgtgtagagtatcattttgatcgagcaatcgatgcgttactagtgctacttaggaatgaaaagtgcattttctttcacatttacatcccctctgctatggatgtattcgagtattcaaatccagtcgcccaaatctcacacgaatttgacgaaaccctataaacatttcagtatttttttatgatcgccgtatgggccatgaggcccaacaacgggtgatgctgtaccagacggcccagcaactgcaatcatcacaagtcttcgacggctgcatccggcggcgacgacgcggcggcggcggctaaatcggagacccgcctcatcgcggcgcgagctgcagagtcgcaccaatggaagccgccggtggcgcaggcggagcaagcggcggcggcggagagtcgcagccgccgaagacgctggtggactgggcgctggagatcctcggcacggccgaccccgacgagaaggcccgcctgggggacctcgccgccacggagtggctgcgcggcgccatcccgctcccctacgacccgtcccgccccgcgcggccccctcccgaccgccccgcccggagcgccgccgtgcggctgctcccgccgtcgcgggcgcccaagctggggaagggcggcagcgcgcagagccggctggcgctgctgcactccctggcgcacaccgagagctgggccgtcgacctctcctgggacatcgtcgcccgcttcggcgcgccgctgcgcatgccgcgggagttcttcgacgacttcgcccgcgtcgcccaggacgagggccgccacttcgcggtgctctccgcgcggctgcgcgagctgggctcgcactacggcgcgctccccgcgcacgacgggctctgggactcggcgacgcgcacctcgcactccctcctcgcgcgcctcgccgtcgagcactgcgtccacgaggtgagcatactattaatgcacactattaattggattagcatatcattgccaaatcgactcactgatgattcgactgaggtgagggatgattgtagaattagagtagcatctcattgcaaatacggctttattactatcatgaatgcagtgctgggttacctatactactttagtgttgtaagagccaaaaacttgaaagctgagtgccttccatgaaattcaattgataaacagatcagtattttcatcatatttggttggtctcataattgtgtctcacaagaagttgtagatttgtgtttgggttaaataagcaaattgatatttttgttaaaaaaaagactgtatttgatacactgaaatgaataggcagactatagaaatttccatcatatgtttctcttaccttttgtatcagtaaactactaccattttactagctgtaagactgtaggtagtctatattttcttgcctctgatctagtataagtgtaaccgtataaagtacaaccgaatggcatcttcttatgatcgtaagttagataatgagctgtcactgccataaccgtagcccctggtatcatttgattggtcatgacttttgattcttgtgacagtcaatactttgaggcaactaaaatgaatttggacagatctagcatactgctttgcaccatttactgttgttttggctgtttgtgtaagatgttgatactcatagaaaatgaacgatacatttatccataagctagatgtaaacaaaatgctgactcacttgtgatatgcatgatgattttaatagacgcacaaagtgtatataagacgtcggtaattcaaaatggtatttgaaaccttgggctatgtatggggtcaaatgaccttccaaatcagtattttggaatgttaattttgtgtggaaggccttacacactaaatatatttgttcaatttgctgctctgctagtgttttttttccttgatgcgattggcgactactctctataattcgacccttaggagttatccagttttacagacctttaattttgaaatgcgatgtagtaataataatataatttatgtaacctatgtcaatatccctgacatgataacttcactgaacatttgtacaagtacatgactgatgaaggtccatttggaatacaggctaggggattagatgttctacctaccaccatatcaagattccgcgcaggtggggatgaacaaacagccaaattactagaagatgttatttatcctgaggagataacacactgcgcggctggtgttagatggttcagatacttgtgcctccggtcccgcaatggtgatccaactgcaagttcaattccgcaggctataacccaatgctctgaactcccacgagatggtaccggtgacatccacaaggtcgaagaggtggaaggtgatggaccgaaagccgagttagcacaagcctccaatggcgatgacaagacagtccaacaggtggaggatgaactggcaaaatgcaaactagtcgacattggagatgatgttgaagcagcggtcattcggactttccacagtgttgttagagagtatttccggggacccctgaagcctcccttcaatacggaggcgaggaaagccgctggcttcgagcctgcctggtatgaacccttggcagtgaaggaggtagagggacaagcagttgagtgagatgtttgatttctgccatgtactgtagcaggctagaacctacatggtgggcattacacttctgttgaacctcttcttccctgttcccttcttttagcagggaaaactgtactgaacttgtgatcatgttttgtttgccatacggaaaccgactggtctgtccgtggaccagccaaaccaaattaaagacagaaactttacatttcatcgcattagcttcgttgtaaatttcttcccccaacgcaatggaggattccttttcgtttagttgcagtaaagcacaatagaagtggtttccgcaattctgttgataggattatctagggctgtattgggaccaattgggcccgcaagaaacgagaagggaacataactgagacaccacatgtcagcgtcctctcttctcttctcttatttttctcttttctctcctctttcctttcgtctcctcccttcacttcttcagtaggctgggaggcctgcgggtggggcggcggcgggcaaagcaggcaggggacaacgcggtggtgggtggcaggcgaaaggcgaagcagacagggggcggggcgcatcacctgcggccgcgcgacaaccgaggcccgctccagcacggccgctccctctccacggaggccatccttgccgtgcaatccctcaagcgcatcacctcttttgaccgctccccagccgccgccgtgccctcgacttccctcggcgcctcctcaagagcgacctcctcgccgccatggctgagctccagcgtcaaggctgttggtccctcgccctctccccactccacgtcgcccgcatcgagccttggtactaccccaacccagctctctacgccacgttcgtgtcctcctcgccagtcactgaggatggcaccgccgccgccatggacgtgctcgtggaggcgttcctagaggaggagcgaggcggcgggttcgtggagggggaggaggacgtgtacaagctgatgcggcttgtgcgcacgctggtggcgaaggagagggcgcgcgcggcgtggagggtgtactagctggcgcgtgtggggactacagacagacttagatgtaaagctgagggacttcagatgaacttattccgaccgggaatgcctgggcccaatcggaccatatactccggcactgggcccaattgggcctgcaagaaacagcccgtcgtcacctgtggtggcttgcttttcttgccattggaagggtggaggaggaggggataagcgaggttgaaggagacgcacatccatcccggcggagaggatgctgctgctgcgcgccgccagggcgtcgccggcgatggccgccgtcgtcaggtgcaaacccaccaggctgaccccaatcgcgggcctctcctcctcgtcgggtgggggcaggaggaagaaggccgggcggcggggcgaggccaagcccccacccccacccccgccgcagctgcggggcggcgagacgaagaagaagaagaagccagacgcgaggacggcggcggaggcggcgcaagggttgcagaggcatgaggtcgagaggaggaagaagccgccgccgccgccgccgccgccgaagcaggagaaggcgaagcgcgtggtgcggtggaagtgcgcggccgggtgcggcgcgtgctgcaagctggacaagggccccgacttcccctcccccgaggagatcttcgccgagcaccccgaggacctcaaggtactcccaacgatgcaaaattctgcctaatctactactaccattctgcaacgtactacctccgtcccgtcccaaattataagcatttttcggcttcgataacgtctttactaacaatatctataaaaataaaacgttttaaataaaaagagttgtatattatgatagtttgtttagtgataaatctaggaacatcaattttacaggattgatcttttttatttttttctattaatagtcaaaattgaaaatgtttgacttgacactatccttatatttaaggacggagggagtatatactaaaacgatgtaaagaaaaatcgacgattacttgctgtttctataaattgcaatattgttatgacttatgaggtgatgcaagcttaatcaaccaacgctgatgaatgaatgaaatgatgcttcacgcctgcagctgtacaagagcatgatcggcgccgatggatggtgtatcaactacgacaagtccactcgcacctgcaacatctacgaaggtagtcacaaactcaacaggacgaatcctgtatgaccctggtgtgtaatgggccatttcacctgacactgttctggttgatgcgtcgcgaaacttgcgatcgtagagaggcctgtcttctgcagggtggaaccgaaggttttcgaggagtacttcggcgtgccaagccgacccagcacgtttgacagggaagcttgcaggtttgcttctcctgtcctgcctcgtgtatcgctgggttagttcgtcaaaggtggtgatttcgggtttgtttacttgttcgcagtgcttgtgtggataccatcaagatggtgtatggtgaggagtccgcggagctaactaactttaaacgtgtcataagggaagaaagtaaaaagcatgaagctagcctgaaccaagataaattgttggatacatagctcctggtaagaactctgtaagtctatagttctggcatggcccaaatcctgaattttgccgccctttacatctgtaaagttgactagtaacttgtaaatcatgtggttcctttagtgagtattgctaaccattcatcgtagagatatagaatctcatcgcatattgttttttcttagatatgcattccatatcttcaattgatttgaacattgtgatacgatgatagctcctttctatgatgtggtttaggcaagaaaaacaactgccaaacaccaaaatgtgtgaaaacagttcgtccaaaagattattatcgtagtgcctcactatgccaaacggggccttatatatggcagtgagccagtgaagataatcttgcaacttcataccatgttaagccttgtcatgacatgtttgctgatgtataggtttttgtttcaggtaaattcagaagacatcaatggcctataatgtaaaggtccatatatttatgtttcctgctgtttgatgtgcatcagtgcctcaaatggttaaacgtggaacacgcaccgagatgttgagggagttttacctgagatgttgctatcacggttcggaggaaatgaattgacacttgcaagttaagaaggcagtcggatatgctcaagtttataagcttgttgagtgagggttggtggtattattttttccccgttattgttaacaattgtttgctaaagcatagagcaatagttagcttggtttgaatgccttcatccaattctgatgatactgacctagctaatctcactcagatttgattctgaatgattaaatcccaacctaatcccattcacgatttggttttggtcttttgaggtgataaaatatgttccctgtatttttttccctttcctattacacttgcaatatgttccctgtatttgttttccttttttattccacttaagaaacatttctgctggagatataatcatataaatatcgctctcattctacccttacctttctaagtcatgcctagaggcgatggtcatattattatgctctctcgccattattgttctagtatgatcaaagattaaaggcttatttatcagcaagctctagtccatggctctgccccctcacattctagcagagctccaataaatcaataatctcaagcataacacagtaacacaccaagaaaagcagaaaaaggaattgaaatgccaacagaaaacagaagttagtatatatatagtaatatgaacacactgatacaaataatttgagaggataacgagcgttctacatacaaatcctcctcgagctgtcatgtgaacgattcttggatctcttcgagtgccttccctttagtttctggcactaaccttgccacgaacaacaccgtgaccaagctcgccgcagagaacagaaagaaggtacctgcgcacagaaagtaaaatatcctcagaacaatgagacaatcggccatagagatattacagcttggaacccaaccggaagcatatgttcatctttttcgaagctaaattcgactgttttatttacatatagtgcatctatcccatgagataccggtgaggtatgttttgctttctcttcctattgtcctaggtttgtaaggggtgaagatgccttacctgcagagttccaatccatgaggaaattgaatgagtaggaaattgcgaaggaaccaatccagctaaccagcgtcaccaagcttccagctattgcttttatttcaatggagaatatctgcggaaataaacaagggctcaggaacacaagttcctgacagacctccaagaatacgggagcataataggagtacaatattaacttgacggtgttcctttttcctacctcagacatgataacccaaggaacaggtcccattccaactgagtatgcagcgtaatatacctattgtaggaagcagtgtcagagcatgacatttcaaaaattcaaagatgcaatcatcagaaatattcgtctccaaatgtttgaaagaaacttatttgggaattggctgaaagttgtgaaatatttgaaagattttacattgaaagtacacaacactgtaaaagttaggtgtttatgaattctttaccgatatgccataaagagccaatgttggaaccagttgtgcatacactccttgtgcctgtaagaccatgaaacgcggatcaatcaaattggacggaaaagtaaatactctgctaagaatggtacaggtatacagggatagactccttgttccttaacctacatattatttaaattagtaaattaattaaggtttatcaaaactcttcagaattgttgatttgttcagtttcattttactgcaagttcatacttccacctggttatttaatgttgtctggagtgatgctgtcctgtcattgtttctccaaccaccaaatataagtcgtgcaacgaattgagtaatttgaaggtaagcaactctgaaaacagaagtgtatagttaattacttaccttgaagtagaacgataatccagtcagaaagcagcccagaaatgttccagacgcagagaccttaataacagaagaatctcacaatacataattgataattccagacccagagaatgataattgatctgtttcgttttattcaattggctcaggttttgtattgttcataccagtagaagggctcttcttccacttctatccatgagaagggcaccaaacaatgtgagtggaatctgaaacaattgcagttacagaaaatgttaggaatggaagcgggggtgggcaagcaggttttgttttgcccatttatcacaattctagttaatttttcttccaaattttgtactaccaagtaggaaatgaactactatgcagaggtttttatgtgggtagtgggattgcccacttgcatccctagaagatgttatgcccatttactttcattgacagaaaggacataaagccgacctgaaaaattccaatcaaggtggtcccaagctttccagaaaaccctggagttcaggaaaaaacaaattacagatagtccctctaatcagagaataacaaatatatccctccgttttttaatagatgatattattgacttttgaacatatgtttgatcattcgtcttattaaaaaattttatgcaaatgtacaagatataaatcatgcttaaagtactttgagtgataaaacaactcacaacaaaataaattataattacgtaaattttttaaataagacgaatggtcaaatgtgtgaaaaaaagttaacggcgtcatctattaaaaaacggaggtaactacttaggcatttgaatacctgcagaggaaaagatatagcttgtataaaatcccaaggcatttattcctcccagctgctgaaagaccatcaggccaacacccacctaagcatcatagtttgatgattattttatttctgaaaaacagcatttcgcatcatcaagttcagatcttttagggtaaaatgcaatgcctttcaacagcttgaaacttcttacaatgactgcaaacaaattctttctctgaaacaaatcttgaaccctggcctcaggtaagctacgaagtgattcgatatattcctgcataaaacaattgttataaacatcttcactacaaactactccctccgtcccctaatataagagattttgacattttgcttgcactgtttgaccatttgtcttattctaaagattttggaattattattaattttatttgtgacttactttattatccaaagaactttaagcacaacttttcgtgttttatatttgcacattttttttgaataagacgagtggtcaaacgttacaagaaaatagtgaatatcccttatattaaaggacggaggtagtactagaatgaatttagaatggaattaactctaatcccagcagcctcttcagatatgtcagcattctcccctctaagcttttgcagtgaagcattgaattctttgactctccctgtattggcctgccatgttattaaacaaaggacttcagttagagacatccactatgatagcttatgtcagggtttaactctttaacaaagatgctacatttcacattggactgttatatcatttgtcaatctgattaattcatgatctatttcaccgaagatgttatgttcccgtaggtgtcttccttttttttttcagtcatgcagtatataccttcggctatgggttgatttaacttattttcttacttaatgcaatgctacaaaattattttatgtattttctaaaatgaaataataagactaacaatatacgttgcattagtttgttccaaaaaaaacactaataatcatcaaaagttggattgataaaatcaatgtattttggcatccatattaaagaaaagggttatagttactatcttaccagccacctaggagattctggaataaacagaagcccaacaaggaggaaagcacaaggcactaatcctgggtaaacatgcagtattagtttcctttagcggatatcataagacagataatgcgtatatcttacctactagaaccaacgagcgccatgaaagaagtgccccaataatgtaagcagctgaacatcctgagcagatgaacaactgcatgcacagaagggccaatgctaatgtttaagaattattaaattaaataaacatcaataggctatccagttccagttctcctacctgatttgaagatgcaagaccccctcgaagatcctttggggctatttcagatatgaacacaggcacctgtgccattccatggtaatttaagtgcctgtaagattctaatgctatgttgacaagacacgaatgatacgttactacagaagatgtatgtgggaacataactgagaccgtaaattgtattactcagccaaaaggctatatatggattatgagattaaaccatacaaaatgagataacataaccacccttgatacttagatggtagtacactagtacccttgacacattacactagtacattaaactctatcttttcttttacagtatgaatagtcagatatgcattgagaaattagagatgctcaccacataggaaagaactccagtacaatagccgagcaagactcttccaagatagagcatcgtagcacccttcatctcattgaagacaacatttcaagctcatgaaaccacaaatgacagctaaagaagagaaatagttcgcagaggaacatacattggcaaaatatatggtaaaccaaccaacaatgccaataattgctgccaaccccatggtctgcagcagatgcaatggaagacatgtcacgagaacgaatgggaataacttaaactagtcatgaattcaatcacttcaccgttttgcgcccaagactgtctgcaaggcgaccgctagtcagagcgccaatcattgctccaattgtcaacacagacccaaatacgccgtactacaagattaacatgaatcgagacgattaaatttagaaaacaatggagaccattgagttgtaagatagtagcctcttgtacaacactaactgcagtaaacaaaaacttgaacttcaatgcgtattcaaatgctctcaattggtaatgcagaatgaaaaggtaaagaataagcataggcagatagcatgtatttttccctctgaccaaaataaatagcaattttgcaatgcggggactcatttgataaagatcgtgctacgaatcataacatattgggatgcttctttgaccaaatgaaatcaagcatgcacctggtaagctggagtactaagattacaacacaacaattaccccaattcctcaatgcacccacgtgaaaagattatatccatggctcaaggaaaaaagataatgcgtatgtgctaaccgacctctgaattggagagcccaaagtcgttcacgattccagcttgcgctggcgccgaataccccacctgaatttgtacattccatcaaagcacacacatgaacacaagcaatagccgcacgccttatgttttttcttgagatttagcgagctctcagtgcagcaacacaagaggcatcaagccatggggaggagtctgggagcgggatgcgtacgcaggtgccgaactcgaaggacccgcacacggccaccgcggtggcgaggaacaccatccacagggacccctcccccgcgccaccgtggggcgccgcccccgcctgcccctgggccgcggctgcgccaccccgagcagcggccggcggccgcagcgcgcagcaagcatcgcgccgccgtgccgcggcggaggcggaggcggcacagtgcacccggcgcgcggggcggcggtggttgcggtagagctcgaagggagaggaaggtgagtaggcggcggcggcggaacggcggaggacgagcggcggcgacggcggtgcggcggtggacagaggaaatgcggcagccatcatcgccggagcgatcgagccggttcacatatttttctgtgcctcatctgcttgcattttattgtgtttttttttcctttcatttgcgaaggggacacggtgtgcacacagggttcaccttaccgtttggggggggggggg

SEQ ID NO: 13020 - DNA, 17042 bp, Oryza sativa
cgacccctccttcgttctcgacacatccaccggctggcgacccctccttcgttctcgacacatccaccgcccccgacaacccctcctcccaaatcgcctacggcctcacggtacgcaacaccatggcggagtcggagaaggcgatgggttccccggccgcgacggagccggtgaagacgccggcccctcctgcaactgatggccccagcggtgaccttatgcagcggcagtataaggaggacgccgacgccacccatggcacacttgtcggcgacgacacggacgagtcgcgccgcctcttcctcgcggacgtggtggagcgactagacgcggtgtgcgctgaagagctcgagcacgcagatccttcggagcagagattaggaaggctggactctgctcgcggttgccaatggcgtcaccgcctgccgacgtcaccaccccagcgatgagcagctcagtgaacgacggggcctgagcggaggaggacccgagcactagttgaccctgactgacaatattgtcatgggtagattaaagaggcccagttgcacttgcacgcgatgattagtctcagttcttcaagtatgggttaatttgttcttgttatctggctctggtatgctattatcctgcaaatggaatgtttgacacaggtagctgggagctagaaatgcatgcagtcacaaggtcagattgatcgatgcagagaacatgggaagtgtaggcgagattgattgcgagtaacgagccgtgggcggcgcagttcttgggcgccgtgggggagcttgcctgcggcatcgacaccatcaaggtggagccagtgtggcatcgcgtccccaccaatctggcgtcctcgcggatcccgccgtccccgctagttctgggcttctggctgatggtggtgctgctactccttaattaccgtttgcctgcaggtcaagaggctcgaagcgaggattcgcgaggcgtgcgcggcctccgccgcagccggctgccgtcgctcagccccgctcgccgcctggccgtctggtccctacccgtcggcccagcctgcgagagagagagcaaagaggggtggaagggagagagaagaggggaaaagggaagttgacgtggcacgctaacatgtggggtccacatgggtcccacgttgattcagccgctacgtagatcaaaaccactgaaagatctcgtgtgatcggttctgtatagttaagggatcccgcatatctgattttgtggttcgaggatgttttttatcccaatgacaagttgagggaccttcagtgtacttttttccgcaatgctactgcaaggttgacgttctcaaatgggcttgggacaaaggaaggatttgggaagagaagtatgtatggccactagtccgctatttccctttccggccttgcccatttgcccatcagcccagcacaggtacaaatctcccaaacactgaagaagaatattggaggacccaatactttcggcttgtaagacaaatagtaagatatacatatatctatctattctattatattattaaaatagctttgaaaggagacaatacgttcgctgtgggggctagaaattcccatattaatcggagaaaaaggaaaaaaagaaaaggagagtccaagtagaaatacaatataaaaatagctgaaattcggaattaaaaataagcaatattgaaagaaattttcatataagaacccaacactgtataaatcaaaattcaaaataaaaataaaataaaatccaaaattagaaaaaaaaaaaaagaggagagtctaagtagaaatacaatttaaaaatagctaaaatttggaattaaaaataagcaatattgaaagaagttaccatataagaacccaatacgagattaatcaaaattcgaaataaaaataaataaaatccaaaattagaaaagaaaaggatagtccaagtaggaatacattttaaaatagctgaaattcggaattaaaaataaggaatattaaaagaagagtccatataagaacccaatacgagattaattaaaattggaaataaaaataaaaataaaatccgaaattagccaaaaagaaaataagagttcatgtaggaatacaatttaaaattagctgaaattcggaattaaaaatacaaatactgaaagaagaatccatataagaacccaatacgagattaattaaaaatcagaataaaaaataaaataatatccaaaattagaaaaattaaaagagagttcaattaggaatacaattttgaaacaactgaaattgaaaataaaaaataaaaatattaaaagaacacaatacgatattaattaaaattttaaaaaataaattctgttagggttacgggtaaggtataccctttacccttcgatacatgccgcgtatcggtatggtatacctgcgcgtatacggacgctctctgcacacattaagggaatccatcatgcagttcacagatggaaagagtcctactcagacaagactgggtcgtcagtgcatcgtgcagggttcgatgtctccaagttctacttgaaaaccgcttgacctgcgatataaaagggacccccctaggaggacctaagaggaggaatctgatggccaacatcaccaccacagcctacgaagtcggagcctgcggaagccagattgccgagaggtctagttggattaacccgatacgatctcgtcggtttcatcgagttccatctttccctttgtaacctgtgatttccatcatataatcccataccaactggattagggctattacctatcaaggggcctgaaccagtataatcttcgtcttctgtttgcttgatgttgtactacgtagacccttgtaccagcgtaccccaatactctctatatccggtctacgggtatcacccgtcgacagtggcgcgccaggtagggggactttgtgctcaaggttctactactatgtcatccagcctcgtcgacaacatcgtcaacaccaacctcaactacgggcttcctgcctcaacgatgctagcgtggactcaagtcggcgaaatcgtctttccggtttacaccacgatgccgatctcagctgggccatcgatgaccagaaacgagaacgcagtggctgtaacccaagacggctccacgtcgaaaggtcctcccgccgaagtggagaaaggaacatcgacgacatccgaactcgagaagaattctaatgcggccaaaccttgtcgttccgaccagaaacacaagccgacgagaataacttccgaagcgacagggtcctggtgccctattcacaaatccaggaaacatactttgcaagcctgctgggtttttctcaacgcccgcgctgagattcgcgcctgcaaggagcgtggaattcagcgtgtttctccaactcgtggtgtccattgtcctattcacaagacaaagaaccacgacctctcaagctgtaaagtttttctcagcgtcacaaagacgtcatctcccaaggtccagcagccaggcaagacccttagagacgaagacaaagaatgaggaacgacactgaccccaaatcgtttcgttggtgttatcgacatcggttcttccgaatcgtcaattctacatctactcgaggactacaactcctcgtcaacaagtacgccacgtgaggtattggctatcgacgggacaggcacatcggcacgcgctaacaccggggcggaaaatcaaacgtctacactggctcagcacatcaggaccctcaacgcaatactgagggagaccccttatgaccccgttctacacgatgacctcgcacaatggacggagcggttacgagagtcagtgaccaacctcagcaacgcgttcgaagaggctgccgctgcaacccacccggaatagcaaccaactgctggtgccaacggcgaaaaccccgaacagcaggaatcaccccatcgagccagccctccacctcgcggcatcagcaatctccgcgatcacctaaacggtcgccgagaagctcgtcgcacacgggaaaacgagaaccgttcccggcatcacgtttcttcacgacatcacgacaatgaagaacgaggaggccgctcgaacaaagaccgagaccgtgatcaccgccacaaccgtcatattcgcgacgatcgtgagcgacggacgccgggtgataccagtcgaggacgccgccatcatgacgaagacggcagagaacggcgccgagacaacaacggagggcgacgacagtattttcgagaacccggtcggcgttctcgtaatcctacaccggaaccaagcgacccatcgacgtcctcatcttcttcctcctcctcatcgtcagacaacccactgcccccagtgctgggtgtagggctttcggtcgttcgttgcacgatgtccgatggcctgagaggtttcggccgggagcaatagagaagtacgattggagcactgacccagaagaatttcttcaagtctactccacaatactctatgctgccggagcggacgacaacgcgttggcgaattatttgccaactgcgttaaaaggctctgcgcgttcatggttgatgcaccttccgccctactcgatttcttcgtgggcagacctatggcagcagttcgtcgccaacttccagggaacctacaaacgccacgcgatcgaagacgacttacacgcattgatatagagctcgggtgaatccttgagggaatatgtccggcgctttaatgagtgcagaaatacaataccgaaatcaccgacgcttttgtaattcgcgccttcaagtccagtgtcagagatcgctacactacccaggagttagcaacgagacgcatcacaactactcagagactgttcgggattgttgagcgatgcgcccacgttgacgatgcacttagacgcaagaacgacaagccgaagaccgggggcgagaagaaatcagccacggacacacctgagtcaagcaaaaagaaaaatcgcaagaacgcgaaaaggaaagctcaagcagaagtattcgcagcagaatatgctaaccctcccaagcgtccagacccacaaggtagtgacgcaaggaaagcatggtgtcccatacacaagtcgaacagacattctttggaagactgccttgttttcaaaaaaaacgctcgagaagcacatgacatcagaacaaggcaaacgagtacgcgtggtcgagaaggatacggagatgaccgctcaggagtcggacccagcgtatccaaactctgacctccacgtctcacacattttcgggggctctacagcatactcctccaagagagagtataagaaagtggagcgagaagtctgctcgacgtggcagggggctgcacccaagatgaagtggtttgaacagaagatacaattttcggaagatgaccatcccaagaccgccgttatcccaggacgctatccgatcgtggtcgaacccactattcggaatatcaaggtcgcgcgggttctcatcgacggtggcagctcaattaacctcctcttcgccagcacattggacgccatgggaataccacgaagcgagttgacacccaccgatcaacccttccatggaattactccccagtcttcgtccaaaccaatgggcaaaatcacgctgcatgtgactttcggccaagcaaacaacttccggacagagcaaatcacctttgatgtcgctgaattcgatacagcgtataacgccatcatcgggagaactgcacttgcgaagttcatggccgcatctcactacgcgtatcaagtgctcaagatgccagggccgaagggaacaatcaccatccaagggaacgcaaagctggcggtacaatgtgacaagcggagcctcgacatggtcgaacaaacgctaagtccacccgccacaaccgagccacccaagaaaatgagcaagacaaacaagacgccgaaaccggatggcgcaatcaagaccgttcctctctctagtgccaaccctgacaagaccgtcaagatcggggcatcactaaacgagaaataggaactcgcgctcatcaccttcctccgcgacaatgctgacgcgttcgcttggcagccgtctgacatgccgggggtccccagggaggtgatcgagcacgaactcatggtgcgacccgatgccaagccagtaaagcaaagactacagagatttgcaccagaccgaagacaagccatacgagaagagctcgacaaacttctcaaagctggctttatcagagaagtacttcagccagagtggctagccaacccagtcatggtgcggaaggccaacgggaaatggagaatgtgtgtcgacttcaccgacctcaacaaggcgtgccccaaggatcacttccctcttcctcgaatagaccaactagtggactcaacagccggttgtgagctgctgagcttcctcgacgcttactccggctaccaccaaatcagcatggcgagagaggacgaagagaagacagcattcatcacgtcgttcggggtattttgctacgttaagatgccatttggactcataaccgctgggaacactttccagcgcacggtccagggcgcacttagcgaccagctcggcaacaacgtcgaggcatacgtcgacgacattgttgtcaagaccaagaaaagcgactcattgattaacgacctacgggaaacgttcgacaacctccgacgatatcgcctcatgatcaatccagagaagtgcaccttcagagtaccgtcgggcaagctgctcggcttcctcgtctctggcagaggaatagaagcgaatcccgagaagatcaaggcaatcgagaacatgaagtcgcccacaagactcaaggatgtacagaagctaaccggatgcacggcagcactaagcagattcgtcgctaggatgggagaatgaggacaacccttcttcgctctctgaagaagcaagataaatttgtatggacacaggaagccgaagaggcatttattgcactcaagcgctacctatcaaatctccctgtactcgttgctccccaacctaatgaagaattattcctttatattgctgccacgccatactccgtcagcactgtaattgtcgtcgagagagagaaagtccaacgaccagtatactatgtcagcgaagctctccacgacgcaaagaccagatatccacatatccaaaaaactgctctacgcagtaatcatgacatcaagaaagctacgacattacttccaagcccacagagtcacagttgtctcctccttccccctcggtgaagtcgtgagaaacaaagacattgtcggccgcattgcgaaatgggtagtcgagctaagtcagtttgatgtccactttgtaccacgaacagccatcaagtcccaagtactcgccgattttgtagctgactggaccatgcctgataatcaatcaaacaaccagatcgacaacgtggataatggcgttcgacggtgcactcaacagccaaggagcaggggcaggattcatcttgacatctccttccatagatcaattcaagcacgcaatccacctcaacttcagggcgaccaataacacagccgagtacgaaggactactcgccgggataagagcagcagccgcacttggggtcaaacgactgatcgtgaaaggggactccgagctagtcgcgaaccaggtacacaaagattataaatgctctaaccccgagttatctaagtacctcgtagaagtcaggaagctggagaaaaggttcgatgggatcgaggtccgacacgtataccgcaaggacaacatcaagccagatgacctagcgcgacgtgcgtccaaacgagaaccactcgagcctggcacctttctggacatcccgacgaagccatcagtgaaagaggcaatcggcgagatcaacacagccgcccccgacatcagctcggaggccacagaggcggaacgcgccattgccaatatcgagaccacagacgattggcacaccccactgatcaaattcatcaacagcgaagagttgcccgaggacgacgcagaggctgagaaaataacccgtaaagcaaaaatctactgcacgatcggcaacgatctatacaagaaagcgccaaacggagtacttctcaaatatgtctcgtccgacgatggcagacacctcctcctcgatatacatgaacgcatctgtgggtcacatgccgccggtcgcacattggtcgggaaagcctttcgacaagggtttttctgaccaaccgccctcaaagacgcatgtgacatggtccagcaatgtgaagcctgtcaattccacagcaagcacacaaagctacctgcacaagcgctcaagaccatccctcttacttggccgttctcgtgctgggggctatatatactcgggccattcccacaaggacagggcggctacaagttcctattcgtggcgatcgacaaattcactaaatggaccgaagcggtacccacgggggaaatcaaggccgccaacgccatcaagttcatcaaggggatattttgcagatacggactaccgcatcgcatcattacagacaacggctcccagttcatcagtgccgacttccaggattactgcatcgggctgggagtcaaaatatgcttcgcttcggtttcccatcctcaaagcaacggacaagtcaagagggcaaacagcatagtactacaagggatcaagacccgtgtctacgacaggctcatgtcacatgacaacaaatgggtcgaagaactcccatcagtactatgggccatacacaccacaccgacaacgtccaacaaggaaacacccttcttcctcgtgtatggctccgaagccatgctccccagcgagctacgacatcagagtacacgagcacagaagtattccgatgaggaacaggaggagcagcgaaacgacgatgtgaatctactcgaggaacatcgcgaacgagttgccgttcgagcagccgcctaccaacaagcccttcgccgctaccacgagaagcgcattcgagcacgcatactttcgatcggcgactacgtcctccaaagggttcaaagccaagcagggcgaaacaagctctcacccaaataggaaggaccatacacgatcacacaagtcttgcgaccaggcgcattcaaaattgcagacagcgatggccacgagttggcaaactcatggaacattaaccaactacgtaaattctatgtatgatcaataccatccatacctgtaagacaacttacatcatcaataaagcctattttcaggcgcatattacaatcacattgttcatgcctgacgatccctcacccagatgacacctagcgttgaaacctatcctcatgtccctttacgccatgctgacaaggcctccgaggatcctaagggatcttcggctgggaacgcccagagccgataaggccttgtcggattctgtagagacaaaagaccatgttagacctgatcgtgtaagagttctccccgtgcgtattaagcaagccgcgtaatcggaaatgaactttccaacttcacggctgggtttaggatcagtgcttgttcaacagaggtaggtcaaaggtccaagagccttgtcctccgggaaccattctccgacgacaaggctgggggctagggagagtgtacaactcaaacgactgcccaaagtcaagaactgaggaggcactcttacacactacatccagagtaagaaggactcgttacgatagatctcttttctatttcataagatactttttacaattccgcacaagtccaaaattatattacatttttccctaagatgtctgtcacagggtacaaaggctaccaggaaggccaacgccagtccatcgactggaaaacttcctccgcaagcggcgccatcgacttcgccaggtgttctatctccgccagagtcctccgagaacgagcgaatgtgaagaaactcgaggtgcagctgcggacgatgatctcgtatgcaagccaacacatgccctccggcatatcggctcgaccgacggcattcctgcttcaaggcttcgtcaatgcgcttgccgacgccttcgagctgagtacatgccccattcagccacgagatgtagccggccgccgattcctcgggatctccacggggcacccggagctccctacaaacatgggccatggacgtgcagcaactctttagataagagtcgaaccacacctcgcgacccctgagtgcctccacggcctagtcttttttcacctccaccatcgccctcttgagttccgcgacttcacacttcgtcttccaatattggatgcgacggtcttggtcggcaagtctactctcgaggtctgctcttccattccgagaacacaaaaaccaagttactccgggaagaaaaatgaaggagatgaaaacaaagatcaccaacttaaggaggtcatcgccacgcccgtttccacgggtgagtcttgtcccatatcatcctgcgacataggcgtttggagggtaatcgccggggcgaccaccggtaacttgggctgcccacgctgctggacatcctcgacatcgacatccctacaaacgacaaccaaaagtactcaggaccagggtgccaacagagatcaaggcagcgattgcacgaataaaggcagttgaagccgacaactgttatacaaagtgtagtcgattacaaatgatctgaggccctactcttcaaaaagcgggagaacagactctcccagttcaccaacctcctccatcacgcccttacgagcgtcgttggcagccccccggtccaaggtctgctgaagatcgagtttggggtgcgccagtcggacacacgctaggacgtgacaggcccgtgtaaatcccgtttgacgcctcctccacgaccctggccgcatgcttggagggtatcgcctccatcgccgtagccagttccgcaagtgaggacgtcagcgagaactcgtcggggttcgctgggatggttgtcgtgacgccacactgcccggcgagctgatgaagaccggtgtaggtgacccgcagcgacccacggatctccgacaggttgttctcgagttccgacatccggtcctcgagtccccgccgttgccactcattaccggccaccagctccctcatcttctggaggtcctcgcgaacctccgccaggtcgcgttccagtttgtcggcatgcttgtttgccgacgacgccgccgccgtcttcgcctcctcgatctcacgactcacgccgcgagcgccagcctcgaggatgcgtttcatctcagcttggagctcccccaggtgaggacattggcagatggcccacgagtaggtctgagggcactggacggaccgcttggcatcgcttcatggctctttggcgcgacaacaacatcggttgaggttgccgcaggagacgctccggaggccccttcggacttgtcctgcgccgctctcgcctgcgccgcccttgcctgcgccgacctgcagaagatcctcaaatcaagccgccagaagaaaaacgaggagaggatctcgacttccgcttacttacttctcgcctagcgtcaccagcttcctccgctgcggaggtggcgaagacgcgtccacggcctgggtaaatcaagcgcgagttgaggtgacatctcttgaatacgagattaacaagccaagggacttaccggtggggaggatgctctccggcgcctaccgagaacggaggtgaatgtccttcccgttttcgggacacggctgccactagtcgtggcagcagcggcgatggccacgttaggcgtctcccgagcgacgctctccttcagtgaggccgtcgcctggtggtccgcgagcagtccaataacgtcagtcagagggagagcctacaccgcatgaaatcattttccgacccgggaagcaaaaatagtgaggttaccgagtacactcacgttgattgcggcttcacgctcgatcgcctccttatcataaagaggcatggggacgtcgcttgccgttgtcaggccgctgatcattaattggccgacgcggcgctccacggtggcgtcactcaagcctgcagatcaagaacagaattcgataaattagggagaacatgcacagaaggggatcaaattaaacacaagaaaaataccccgaggagaaacccgggtcgcgtcctccggccaagagtagtcaaaggctgggtgggcgagagcctggagcagctggatccgcctactaatgaagtcggtagcgacttcataccccgacaaacctcgcgctcagaggtcatcaatggcatcgatgaacgactgaagagcaggggtcaaggcgggttttgcggtccaagatgggattttgtctggttgttcctcaggaacgacaaagatcggatctgaatcctctatctgaagatagaaccaccttgcccgccatctgctacgagaagaagggcactggaaggggatatatcgcgacttcaggccatctcgaagtcggaaacccacacatccagataccctagtagattccatccaacgcaactcgtagtagaagcgaaagaggtcgagaaacggctctaccccaatgtaggcctcacaaagatgtgaaaagatgctgaggaaggcaatggaattggggttcaaatggagcagagaaaggccgtagaaattcaagaccaagagaagaaactcagaaggcggaggaagaaagccacagagaatatagtcctcgatcgcaactatacggcccaggacaggttcaggttcagtacctcctggttccctctccatggctccgcggccggggagggcgccatcctcctgtagcttcttaagcgacgcgctggtggaggtagacatgccgagatccatcgccgccggagatcgccggagaaggggctgagatgaacaatctagggctttgcaggagcggaggagacaaggaacgcctggaggctggagagcttttttcacaacgggcggacttcaaaatggatcctcaaaatcctcttaaacagacgcatttccgacggtgcgaatttcaaggaaaggagagagagattaccgccgaaaatttctaggtccgttacgcgcggcagtttttcagacttcagtttaaattcactcatgaccgttgggcttcacatagtgttgtcgattgcgtcctatctctacggttcgcacaccgagaacgacaacagcctcaacaccagaagtcgcgattggttacacgagtccatttaagcagaagtcgggggctactgtcagggttatgggtaaggtataccctttacccttcaatacatgtcgcgtatcggtatggtatacctgcgcgtatacggacgctctctgcatacattaagggaatccatcatggagttcaacagatggaaagagtcctactcgggcaagactgggtcgtcagtgcatcatgcagggtccgatgtctccaagttttacttggaaaccgcttgacctgcgatataaaagggaccccctgggaggacctaagaggaggaatctgatagccaacatcatcaccatagcctacgaagtcggagcctgcggaagccagattgccgagaggtctagtcggattaacccgatacgatctcgtcggtttcatcgagttccatctttccctttgtaacctgtgatttccatcatataatctcataccaactggattagggctattacctatcaaggggcctgaaccagtataatcttcgtcttctgtttgcttgatgtcgtactacgtagacccttgtaccagcgtaccccaatactctctatatccggtctacgggtatcacccatcgacaaattctaaattagaaaaagaaaaataagaattcaattaggaatacaatttataaataactaaaatttgtgataaaaataaagactattgaaagaaaagaccatctaaaatacatgacgagataaattaagtatccggcctataaaggagtagagtggtggcgattgatacgacatataaaaacgttaataaaacaccaaataaaggagggacgacaggcatgccatgaagcaaacgagcaaggcagttgtcgagacttctagaaagtaaaaaaaaaccctattgataatcatattcgatttttaaaatctcaatgataataaaaaggagaagtagcgggcgggatgtatagaagtatagttgcagagccgccgacggttgacgggacttctagaaaataaaaaataaattccaacgatagttatgttcaatttttagaatcacaatgacaataaagagtagacggcagacggaccgtagaggagaatagtggcatcgtttggtgagacttctaaaattataaaaaaatgaaacccaacaagacaataaactctaaaaactacaaggtccaaatttttaaaggtttggaacttctaaaaaataatgttcgattttaaaatctcaatgacaataaagaagggagacagcgggcgagccgtagagaagtacaatggcaaagccgctgatggtttggcgggacttctagaaagtaaaaatgaatccaaatgataattatgttcgatttttaaaatctcaatgacaataaagagaagagacagtggacaggccatagaggagtataatggcaacgtttgacgggacatctagaaattataaaaacgaaacacaacgtgacaataaactctaaaaactataagatccaatttttaaaggaaggagatgacatgaggggtagcaactggtctgacttttaaaacactatataattagaaacacagggatgataaggtttggtctttcaaaaacttaagacaacgagatagctatttaataaattttaaataaaatcatactaaaatatatatgattttatttggatgttagccgtgtaattgcgcgggtcacccagctagtttaaactattctaaaactaactggagcagcattttttccctctcgtcttgttaagatttgggttttccggctaattcgcgcgcgacttttcaggataagtacttctctcctctttagtatccctcttacccaccttttccccctccatcccattccatatctccatgtggttgggctcttttctcctctaagagcaggtacaatagcaggctataagccagttgcaagcctgcaaacatattttaagtagataaataaggagagagaatggcagcgagctacagattcgtagccagctgtagcacggactccaagacacattgtgtgtatggcaggtgggaccaggtattaatagcgtagtatgtaactattgtatgaatgagctattagattggctatagatgaattggagcttgtagtaggctatactattaaacttgctctaaggctgtattcgttattcctttcccaaccagaacagtacgcatggaaaatgaagcgatccattagcacatgattaattaagtattagctaatttttttcaaaaatggattaatttgattttttttaagcaactttcgtataaaaactttttgcaaaaaaaagcaccgtttagcagtttgaaaagcgtgcgcgcgaaaaaaaagagggagatgggttgggaaaagaggtgtagatgttcttaccctatgtttcctaactcatctccctcgttttccacgctcatgcttttcaaactgctaaatggtatgtattttcaaaaagtttcgatacaaaagttgcttaaaaaatcatattaattcatttttttaaaaatagctaatatttaattaatcacgtgctaatggaccattccgttttctgtgcgtagtgttctggttgggaatgagctccaacgaacacagcctaaaggctgtctctaggctctattcactttatcctcacaagtaagagattgaaggggactgaggggattaatttcacacctcaattggtataaaattattcctctccctaaatcccgctcaattcctttatgagtgggaacaagacctaacggtggtgtttctctgctgcccttctggctcggacaacaacagtgctaccactgcctccttggccacgacctcggcagcccaatggtggtcggtgctcgccgtcgcgtctctcttggcccaatttttcctttttcatgaagataccctgaagccatcaagagagatgggctaggccggttacacgtgggctcacttacatgtgctttctatggtatggtttggtttgtggcctaaataggccttactaaattttgtcagtgcaaaattttggcaagtttttgcatgactacttttggtaaggtaaagttgtgtttggattggagccaaaacagcctaagttcactattgaaatggcctattttcttaggcatgccaaaatttggcttcaaaccaaatagacactaaacactattgaaattaccaaatattggtaagcctaatttaggcctcaaaccaaaccagccctatgtatttttattttatttttctaactagatgtcatctacatatgtgaaagcagcaagctttctcaaaactaataagccacgtcatgtgaataataattgccttaggatgagagtaggaataaatttagaccgttggatccatttatgtgtataccaatcacacatcaggagagttccagatgaataggtcatgtgcatcgatcagtgcatatacagatagtttcagatggtagtcagagcaaaactagtatcaactaaaaccacctccaatactgtcatgggatctgatttaaacggtttttttcttttcaaagatgcgggaggggacggtggtgaaaaattctggtatagtggtttaggatgtctattaaactcgatataaaatgagaaatagcaactggatttattctttttagcattccgcaatagagaatagccgaaagtattgggtcatcgaatccaataatattttgcagtgtttgagagattgtacgcacatgggcaaggccgaaaagtattgggcctacgtgctatattttcagatggaataagttcacttcgtgaccctcaactaaccttaaaccacaaaaccagatatctcgactccaaactcctaaaact

SEQ ID NO: 13021 - DNA, 26596 bp, Oryza sativa
atctcttactcgaccctgtccaagtttagacacgacgacaatatactgtatatggcatgtgcaggactatatttacacattgatcgttttctcgacaaaacaaatataatgtgattatctgcacttggctctgtatgtaagtcctactatctccaactcgttttccgtccgcacgcttcacaaactgctaaacggcgtattttttaaaaaaagtttctatacgaaagttgtttacaaaataatattgatccattttttaaaaaataaatagataatacttaattaatcacgtgctaatgaatcgttccgttttccgtgcccaaaagatcagcctatcaagcccgcagtctgcgtccatcagatttcaactttgcaaggcccaccaacccggccacaggcagaccgcactcctgctgccctgcggccatatcttctttctcggcccatgacctgcacctacgttcggtccacagaaaaattggaggttagcccacgtacgaaccgaccgaagcgcgcaccggcggcatcggcgcgcgaagaccgtgcgcgatcagctccacgccacgatccacgggacgggagcgcgcgcgtcgccgtcgccccttcttcctggacccgttcctcggtcgccgcgcgtcccgttccacctctcgacgtacgcacggccaccgcacggcgccgcgctgaacaggccctttttcttttcgtttttaacaagggaaacaaggcgttcaatgctacttcaatgtgtgtgtgcccggccgggacagcgatgtggccgagtggcctgccgctcggaaaaaaattctctgcggcagtgccgcacaggaccgcctgtgcaacaccacgcgcgcgagtgacccgtgtctgatctcttgctgcagcagcccgagacaatcttcagatccgagcctatctcctacacccatatctaaacaatttaccagaacgttccgtgattatcaaagcacgattaatccttaaatgtttcgtgatttctatgttaacaacatgtaatttctgatcccttttcaaactatgatttttatgtcatcaaattgtaatttccaaaccctttcactactagaaaaaaacattgttgcaaacggccgaaaacgatcttttcagatggaagccggtccgcctataggcaaaggcatgtgaaaatcaccgaacaaaataaatgatagttatgaaaaaattcaaataagatgagtggttaaatagggaaaatatgtcgtgatgacgtggacgaatctcatacgactattttttgatttaatggtagtttctaaatttccactaaatatgtagtgtccaaaagttaagggtgttatttattaaaaataaaagtatcttatatcaaaagaaccctgttaaaatcgatgagtctggctcggctcgaaagaacgtgctgtcgatggatatggctcggcgagattggctcggcgacgaagatggtcttagactgcagttggtgattggaccaccaatcgcttgcttgcttgcacgccaacgccaatgcgctggcacctggcatgggtatgcatcttgcgcgcccacgtacgctccatcatctctggattcatttccttctctctttttcttttcctgcttgcttctgtggttggaggaccatatactagtcgattcctcgcaacagataagaccccgtttcgtcgttactgtatttttggatttcctcttccatgcaattccatcgttcttccacgatcccatcgacatggatacataaatccgcgagatgccgagatattcttctgcgccaagcgcgcaggttattccaaccatgtcgctatcttccattcgtctccacgtccagaaacgcaccaatctcatgagccattttctcctccctgagttgaccgttccagttagtttaacaccttaacttccattagctgatagtaatatactagtagtactcactccgtcgcaaaaaaaaaaaaaagacaaaccctaatttccgtgtccaacgtttgactgtccgtcttattaaaaaaattataaaaaaaattaaaaagataagtcacgcataaaatattaatcatgttttatcatctaacaacaatgaaagtactaattataaaaaaattatataagatagacagtgaaacgttggcatgaaaatttagggcttgtctttttttttttttttggacggagggagtacgtagtagtagcttctatcatcaacgacaaatctcccgttgtcttgtcttctcttcgcaccctaagatttccacgtcgtcgatgccttttcgttgttcgcgtcgggttcaccagctaggtggttcgccatgaagtacaggaagggggtcgccggcgagtccaacgatgacgacggctcgacgaaacgaggtcgtgacgctacaccgagcatccaggtggagatcgctgagtaccatggaggcggcggcggcggaggaggtcttggcaacgggggcggtggctcggcgtcgttcttcgagccgtggcgggaggccacgccgggaagcgggagcggacacgggagctcgggcaggggcggcggcgggcgcgagccgccggagaagcggctcacgctgttctccctccgcctcgccgtgctcgagaaggcggcgagcgggctcgggatgctcgacttcatgtgggcgacggtggtgctcctcggcggcttcgccagcgcgctcaaaatcaccgacttctggtgcgtcaccgtcatcctcgtcggcgagggcgcgcgcgtcttcggccgcagccacgagctggagtggcagcaccactccacgctcacctccaccgccggcagcgcgctgcgctccagctcacggctcttccgccgcctcgtgcacgcgctcgacgacccggccgccgccaccgtcaccggcggcgctcgcggccaggacgcgcgcgacagggcggcgcagttccagcgacagatcgtcgccttcatgaagcagcgcgcctggcacgcacccgacgtgtcgctgctcccttacaccggctgggtcttcgtctccaagaagatcgggaggctcctcaactggctgcaggtgctctccgccttcacctgcgtcgcgctctccgtgatgcggctatggcggcatgatttcggcgacgagcccaacaagcggccggcgctgctgctcttctacacgttggcgttgatcgaggcgctcctcttcctgctcgagaaggcgtactggacatggaagatctccgtgcggaagctgctcgagcaggtgagccgcgagtgcgagctcggtgcgtatggccacgtctcgctcacgcgcttcttctacgacgcctactcgcgctgcatcaacgggagcatcttcgacggcatcaagatggacctcgtcaccttcgccgaggagctcatcctgtccgagttcctagacgagcagctcatcggcgtgcgcatcctgcagcagttcgccgacgccaagggctccgcgcgcgacacgctgcgcaaggtcggcacgagcgcgcgctccatcgagcggctcgtcgagatgctcaactggaagcggcccgaggaggaggaggtgcgctggtgcgcggcccaggtggtgtccaagctcgccggcaagcgccagaacgcgctccgcgtgtcgggcatccccggcgccatcgagtccgtcatgtccctgctctacgccggctggagcgcgcccgtgtcggcgacgccgcacgacgtctcgccggcggcgcggaggagctacgaccacccgcagttcaaccttctcggcctgctcatcctcaagaggctcgccagggaccacgacaactgcggcaagatcggcaacacgcgtggcctcctcgccaagatcatcgagttcacgcacgcgtcgccggctctgctccgcaacacgctggcgccggagtcgcaggtgcgcgccgtgaagctcgcgctgaaggtcgtcaagattctggtgtccacgacgggcagcaccggcaagatgctccggcggggggtcgccgagaacgtgttcacggtgagcagcctgcgcgtcgtcctgcagcacgggcagcagcacagggctctgcagaagctggccacggacatcctgtcgggcctggccatggacgacaagggcaagcaggtgatcgtgggcaccggcggggtggtcaagcagctcctatcgatattcgtggatgccgagacagagctcggcggcgaggccggcgaggcgctggcgatgctggcgctggagagcgaggcgagctgcgcggcgatcctcaaacgggacgacgtgctcgaccacctcgtgtcggcgctcgagggcgacggcggggcgcgtcgtctgaacgcggcgagggtgctgcgcaacctgtgcgcgtacgccggcgagaagcatcgaccgcgcctctccgcggtgatcaaagcgatgcctgtggtatgcgtcttatccttacaagatgaaaatgttagttatcacactctgcttctacttgacgcctcccgcgtgaccgcgtcccagacaattacgttttggatatcgatgcattgtttttaaatctgacttaattacattgcgaaaataattaagatttttcatattactatctccaattctccattctaaaaagggatttttgtagaagctttgttgagtcgtgagaccgtgtcaccgtgatgacttttttgctgacatgcacaattggtttgatggtttaggtactgaaggccaccatgaccggcagcgacaagatcctcgaggtgtccgtcggcctgacgacgcagatctgcaagttcatcgacggcgatcggttcgccgacgagctgcgcggcgccggcatcgacgagagagcctacgtggagcggctggcgagcatcctgcgggagcacaggtacccggtgatcagggtgccacggatgcggcggttcatcgtgcagcaggtcatctggctcatgacctcgtcctcctccgccgatggcggcggcggcggcggcggcggcgcgaactacgtatcgcttctccgggaggccgggatggagcggctgctggagtccatcgccgacaccacgtcggagctggagtgctaccacgtgttctccggcagcgtgggcatcagcaagcaccgggagagcttctcggctgccgtcgacgccgcgctggagctgctcggcggcgatggccggagctcgagctgagtgatgagaaattgcccgggatctgctgtctttattcctgcactaacacagatcctttttcttcttgtttattttttttaaaaaaatatttttcttagtaaaagatagcttatcctaaacgtgatgcctctcgtaggtgattcagttcataattttgtacagaacgaaccaatgaacgacagcagctgagcagcaagtacactggtctgacctttcacttttgtaggagtatgaacttatacaatgtactacctcaatttgttacagttgtaactattatacaagatataaacaccatctgatagtaagattcattgagatacattggttaaatacagagtcattcactcattgccgtctacttttctttgaatgcatgtttcaagtttggaacgccaaaataatcacatgatattgaatcgtttcgctggtactcattcatcatcgaaaaaatccaacgtcccacatcatttctgtggaattcaacgtttctgaccgcctccacatcgcctcctcccatccggccagatcgccgtaattttccatcccctctcgcacagcgcccgaatctcctctccctccctctcaatcgacgccatcgatcgatctccgtggcctcgtggtcgtgttgaggcggccatgctgcccataggtgccaccgacaaatcgccgtcctgccgcctaagcacagtccctattggactctcgttgcgccggtgatccgatgggggcttgtgcttgccagttgccacgcggatcaatgagttcgagcaatgtgctcatgtgcggaatgagaggagagaccccattcttggagttcgctcatgtttatatagaggttgacataaggagaaatctctcttttgccccttggttacacaatcctagcaaggtttttttttaaaaaaaaaatacaagcatattccatgggtatattctccaagtatattctttcgacattttccgtagggcttaaagcctattatcgacaaccttgagaaaaggtatttttccatagggtttatagcatatttcccgacacccttggagataaggatgcctatgcgccaacaactccctcatcagtgatgtccctagagtctacgggtgcgatgttgatgctatatggtgtcagccttgatctctggggagtaggggaggtgggggaggggggggttctttttggtgatcttcaaggcgagtgacgttgactaaactgttgatccgattctatgtagttggcgtagtaaagtcttgctgctcttgtcttggcattgtcttaacatggaaattacagatgttatatcttacccatgtcttgatgttctacccaacttgtcgagctttgctcatcttgtcgggcttcaccaaacattttagcctttcacttcatgttggccttcacccattttcagtcaatgcctaacatgttaggttttgacgaacatatccagcttcaccgatcaagttgactttctcccattttcggccttcgtccaatatgccgggcttcgctgatcatgcgggcttttgcccatgttcgatcttcatcgatcatgtcgtatttgcacatggtctcttcgtcgaacatcttgggcttcaccgatcatgttgcttcacccatgttcggtgattgctcaacttgttggtcttcactaatcaagtcagcatttgccaatgtttggtctttgtctaacctgttgggcttcgccaatattcagtcttcgccccaacttgttgggcttcgccgaacattttagatggtctctactatctaagtcaaagactccttagtcttctcaatgttgaaaaagaaggtttcgaacacatgtctcacttcgttaatcacgttgatcttttcccatgtttggtcttaattgaacatttccggcatcatcgagcatgtcaccttcgctaaacatatcgggattcggtgccaataatgtcactttgcccatgtttggtttttacccaacttattgggctttgctgaacattttaggcttcattggtcatgtcggccttcacccatgttcggttttcaccaaacatttaggatggtatctaactatctaagtgaagattcccttggtcttttccatgttggagaagagagttttgaatatatgtctcacttcgtcgatcatgtcgaccatcgtcaatgtttggtctaagctaaacatttcgggcatcaccgatcatgtctccttcgccaatattctctcttcgccaatcatgcatgtcgcttcacttatgtttggtcttagccgaatatttcgggtttcgccgatcatgtcacttcacccatattcggtcttcacctatgtccgctctttgctgcacatttcgggttttgtcgatcatgtcggccattgcgaatgtttggtcattgctcaacttatcgggcttcgccgaacaaattaggcttcgccaatcatgttggccttcactcatgttcgctcttcgccgaacatctcggccttcaccaatgtttggtctttgcagaacttgccgtgcttcgccgaacattttagactttgccaatcatgtcggccttcgcccatgttcaggttgacgtggcagctcatgctaatggtgctgtcgtcggtggtgcttctcatcatcccggcgttcatgtacggctgcatcattgttggctttgctcgtcggttcaggtagcagtacacccacaccagtgccatcaccgagcatgccgtgttgtttgtgcatacggtgtactcaattgtggtggagtagatcaccatggctcaattctcagcggtgctagaagagtcggcatggctcgggctcaagcaggggcttgccaagggcgttagcatcaacagcaatggcatcacctttaccatctttgctttcaacatttcgggattcactgattatgtcggcctttgccaatgtttggtcttcgcccaagttgtcgggcttcgccgatgtttgctcttctgcctaacatgttgggcttcgccgaacatttcagaattcactgatcatgtcggccttcgcccatgcccgttctttgacaaatatttcgggcttttccaattatatatgtcagcctatgccaatggtcggtcttcgccaaacattttggactttgttgatcatgtcaattcgcctatgttcagtcttcgccaagtattttgggcttcgtcgaacatttcggatggtctctaactatcaagtcaaagactccctttgtcaaatatcacaacaaagcatcgtggacaaaacgattatagctcagctataaacttttatatttgtcaatttaattatttagtggtgattacattcggtactaaaataaatttaaatgacatcaatatttatatatagctaaaatggtaaaaagaataccacttttacattaacgattctcaaatggatttgctaaaaaatgtcgacatttttttttgcttgggaactgtcgatttgtgatttgtatttcgtcagatcaacatcaagatttgtgcaaacaaatagtaaaaaattgaaggcacgcggaagaatggggaaccaaccaagaagaagtgatgttgtgatcaaggggaacatatcgtacacaagcttctcgtgcacactccgatccatacacaccaactagcaaatatcacagaaaattctataaaaaagttacacatacttttaatagtattacatctacgtgtgaaatcttatcttcaaattcattataatttagccgtaactagaagaaaaaattctgacagatttttacacttaaaactatcggatttttcacttctttttattacggctaaaatataatgaatttgaatacgatactttgcatatatgtgtaataccactaattaggagtaaatgttcaaatttttcgtagaattttatgtgacattttttagttggtgtgcacggagtgtacacgggaagcttgtgtgcataaaatatgttcccgtgatcaagtatgtatttaggtacatgctccttttacatagtagttacagtaaaattatagtaaattatagtatagttagatttgaatgttttttaacaaaacactatcgaaagttatatggctaatcgaacggaattgctaaagcaatatcgacggttctttcggctgatctgtgtcggtttcactggccatccgacgacagattgaaatatatctttacaatcttcaataaaataaattaaatctcaaattaatttctaaattcttgaacaaatttaaattttaagtgtataaagagtttataagctatatacagccattctacaatccgatggaggaagctgtctttagctatatggataactaaggcaaaattacaaatggctagagtcgtttttttttaatttcattaagtacgaattaccccattgaactatcacgacaatatgaattacccccctaactataaaaccgcacatttgacaccctaaactattaaaaccggacaaatttcccccttggcacaatccatagttgttttgatcctacatggcatacacgtgacgccaacgtggcaatctaattagaaaaaataataaagtaacaatgggcccacttgtcatatactcctacctcacccctctctctctttttttcttttctctgccgctgggggcgcggcgggcacggcgaggaggacgtgcggtggctggagggcattgcggaggcgtcgcacggtggtcgccacgtctacggcgggtgcggaggcagacttttgcagcgatgagggacaccacggtgacacaccattcctccctttcccctctccttctcttccaactccctcccctttcctgcagtgcggcggcagcggaggcagtccaggcggagaagaagaaggcggcggtggtggtggttcggatggagaaggaggtggcgacaatggtggttcagacagagaaggcggtagcgacagcggtggtttagacggataaaaccgtggcggggagagtggggagggcccgaccattgctgtcaccttcacccgagctctctgccactagggggcacagcagtcgcggcgaggaggaaggggaatgggcaagaaggcaaccgcgtgaaggggaatcgatgcctccgccgccaccagctgctcagtccgccaccacctccgcaatcggcctcctgagctcgtgcgcgtgcgagagagagagagagagcgtgcgccggagttgtgtcgtgcgccaggtcccgcctccgcctgcatcgcggccacctggtatgcctccgcctatggcaccggccgcctgagcgagctcggcctcaacactgtcacatcctgatttttgtttcaggatttataaattatttaataaattaataatagaatttatattaaatgatctttaatttacaagtgaagttaaatgtgggaaataaaatttcctaaatataaagcatggatggatttaatttttattaaattctccatgattaagtcaactctctgaaatattctcggatttttcggagctcaattcttaaatgatacaaagaacagttcagtaattatttgatcaataatgatctaattatatttgttaagagcttttcttgtttaaaaatccttaaattataaattgttgtttaaaaggaattattagaaatgatcttaaaagcctaaaagagaagatctaattttaatttgttaaatctcaatataaaattgggctagataaaattttgttaaatactttgcttaattctataattcctagatttttctgggatttatttgagctaaggaagtatttttaataaatggaattgcatttaagaaataatttaaattgaaaaaggtttttaaaagtcttcttttggctttgggccgaaagccggcccaaaaccctctctctctctttccctcggcccagtccggcccaatccgccgagccgccgctctcctctctctctcagccgctgacaggtggggcccgtttgtcaggcctgtcttcctcctcgcgccgccgccgccgcccgaaaccctagcgcaagccgccgccgtctccttccaaattcggtcgatcctttccttctccggccgaattgattgaggggaaacgatctccgggatctcctccaccttttcccctttggaaacatcggctaaatcggcttggaaagtgtttgattcgaggtcgaatcggatcggctattctctctccgagcccgatctttccttctcgtcgccggtcgccgtgggccttcgccgccaccttccaacccctatataaggatccccgagctctcctctacccgctgcctccctcgccttcgcctctcgccgtcggaagcgctctagcgccgtgagacctcgcgccgccgtcgtcgccgccgctccagccgtccttcgccgccgttccggtcgtcgccgtcgctcggggaggccgccatcgtggtcgccaagtcgccgccgtcctcgtccgccccttcgccgtcgccgaagatcgccggagcaccgtcgccgccgtcgacccgatctccgccgccgcttcttcctcgtcgccggcgccgtccgttgctcttccgccgtggttttggtcaccggtgagttcgccgcgtcgccctctacccgttggtgccctccgttcgtgccgaagcgccgccgttcgccggtgagcgtgcgccgtccgagccgccgagccgccgccgccggtggtgacgtcatcgctgacgtcatcgggaccgtccgtcgcgagccggtcgtggaccgtccgatctcggccgtccgttttggatagggttgatctcggccgtccgttcccgtgaaccgccgccgtgcgcccggtccaccgcaaaccctagccgctgacgcaataatcctccttttccttttcaaaaataattcattattgcgtcataattcaattaaaatccatataagtgttttaatccgatttaatctttaaaaattcataactaattcattgtaactcagtttaatgtggttcaagttgcaaaagttgtataaaataaagatctacatattaaaattgtccataaattgaattaaatttatttaattctttttaaatgggctttaattatatttaatcttgtaaaattcataataaattcatttgaagtcagaatgaggccgttcaagtctcataattcatctaaaatcatgatctacatgtttgtttactttttatgtattgtttatttggtttttattagtctttttcttcgttttacgtgttagcttgtcgtttccgtcgttgcgaaggttcgcgagtgcgccggaagtattcaagaagattaattgaagaccgattattgcaaggcaagtcacacagatcctaaacacaatcctttgagcatgttgatcctatatttaaattctctatttatttcaactgtgcatttattttcgaatgtcactgggtggtgtgaatctattcctttgttatggcctgtttgcattgattactttattccttgataccttgggttattataacttgactagttgagctatatatattggttcagctagatattagatatgattgcttagccatgcttagaaacattagcacacaattgggataactaatgtttcactatcacttatggttatatttaatggtagctcacgatggtcaatcgtgattggttaattaattacttgccaactaaaacttgataatggtgggttgtgagcacatggttttgagagtcgtgctcatgacaattaaggaccggttcgcgagctactattgtgaaacattaatcgtgccaaccacaagccagcgtgggcaacggctttaccttttgtatagcatggttcattgcggagcaccagactgagaagtggcggagataagcccacgggggtcgctggggagtccatgccttgttttataagggggtgattatgatccaggaatggtgcgctgcggtggattgtgttatgcaaggggtactgtcacagcccctttccgaggtaccgtggtggtactgaggcacatggtgacatgatgtggggctgtgtcttgtgggtacagtggtacacctctggccagagtaaaactattcgaatagccgtgcccgcggttatgggcgagttgagtaatgtttttcgtgattagtctcacacctctcataattagttattgatgttttactggtaataatttgcttagctcctggtttggagttagatctgtacagccgggtatggttgttcaggatggttgggcctgtgcagcatgggtgtgctgttcagtgttgattaaaatttctgattaactactccactgttttatttctcttaaatgttttgctaaatgctgcttttgcaaatgagcctatattatgccatcctttggtatccttgtgcacttgcatatttgctgtgtggcttgctgagtatgtcatatgctcaccttgcaataatcaatcaacctcagtcgaagaaaaaggatccagaaggagaaaacgtttggcttataccccagttgagctgcctgtgggagtggagccggagcttcgctagattttattttccgctgcagttttcttcttagtgaggactaagtgcctcataagtaagtatttatcgttttagttaatttgatgaatctgtatattaaattgtcagtttatgtacctcggctgattcctggaccaggattttatgcacaaataagttcggaaattactagtgaatttccgggcgtgacaaacactcgccacccaggcgaactctgcctctgctgccgaccgcctggtccgccttcgcctctacagtcacttgcccgagcgcgtgcagggggggaggagagagagacccgagagggagagtcatgacaggtgggcctaggatttttttgtttgattagattggcacgttggcatcacgtgtacaagctcaagtcaaaaccgctcaaaacagtgtcgagggaggtaattcatccagtattaaaagtttaggatgtgtaatgtctggttttcgggttcaagagggtaattcgaacaaccgcgccatagttcaggggggtacttcgtacttttcctttcattaaatcccacttattattgtataagctacatggaaccatatgtattttatcatgtgacacataaacctaggtattatgaccctaaagtttcacaaaacaacaccgttaaccattttaacatagtctgctatctcttccctttccatgcctttgattcatcccggattgtgttgatgtgcacatgaacaaaagtgcacattcctatccgctcttcattcaggcccggtccgcccatctgctgctaggtctaagaatggaatttaagacgtgattctagaactcaaaagtgtagtagataatatagttttgtgatgcgttaggaccttaatacccaggattatgtgacacttaccaaaattcatgtggttcatgaaacttagaccataggtgaggttcaataaactttactctctctctctctctctctcttttaatctcagctgactcatacgctgtcggattcatggacagtgcactacatacagggagtcatagaaggtatagtagagatactggtggatttgctccatcttatctgtaattaagatacacacatgcatattaatttattacacatacatgcaaacgttacacgattttacccacgtactagtatatagtactcactctatttcataatataaaattttttagcattgttcatattcatatatgttaatgaatctagaaatacattaacatctatataaatgtaaacaatgctaaaaagtcttatattataaaacggagaaagtatatgtgtacgtatgtgcatatgcttgctgtatatctaatcaaacagctgggaggggtttgcgaggaagaagttggtgacgaggtctttgatgtcggcgccgaaggtgtacccgtccctgccaccgagatagatcacctccagcatcctcgtcaggttcaccaccagccgcgccgccgggagcagatgatcagcccgaccacccatctccacgcactcccggttgatcgtcctccacgcgcgctccgccatcgcggcaaccgccgccacggcctcctccccgcccacgccgcgctccgccatgtagcactccaccgtgctcgccatgtccctgccgctcctcccggtcctgtaggaggcgacgtcgttgaggaagcgggctagctccccgctggcgcgggccagggcggggacggcagccgcccacccgaacgcctccgcggtcgccgcgccgtcgccgtcgcgcacgcccaacagcaccaccggggccagctccgggaagccggaggacatgacagacacgtccagatgctcggcgaagctgggcatgtatttgtcgctcgaccattgggcctcacggaggtagtattccgacaactgcttgtactgtagcatgtatatataagacataaattatggtaggtgcaggagaaacaatcaaattaaattgtgtggatgaatatgatgatcgaacgtgcacgttgaatatgatgtgtcttcattttctgtgtaccaggattttaccccagttttggcgtaagacatgcggtacttctcggttggctccaagcaatcctctaactcttcaaagttgttcagtaactttatgtagaaggcatgaagatattcgggtagaatagagaccgcgctcttatcccatctacatacatacaaggataaactaatttagtgctctttgattaaataacaactagaccatcattaacttttatataagtacatcttttgttcttaaaaaaaattacaaattacctctgtatagctttgttgagcttgtggcactcctctaaggtggcgtgggcgtcgtaagtatcgtccatcaaagacatgagtccaaaaactttggtgaacatgatacgtgcgcgagagtactcctcctcgtggtatatgccgcacgtccagaagtagttctccacgatacggtctctagcataacttagcttcacgctattgtacaggtctttccaccagctgcgcatacatacatttgaactcatccaaaagctggtttgaactaattggtgaatttggcaattgaacatgcacttattagtcataatagattgacatagccaattggtgactactggagtacatccgttcgtagagcaaagctccggtactttttactagtagtatattaccatcaatagtattaagggtatatcagtaatttactaatacagtgattagaggtaactttatcatttatgttttttcttgggctagatcgatatgtggtcatccattgcattgggatcgctcatattccatcgaaaagtaaaaaagaaggaaaaaaattagtcactggtaaatgacaattttatccacatattgatgtccatccacatttccagtaccgcgatggtagtataaatagatctaaaccttcgatcaaatgaaatcaacgatttagattattttctattaccagtagaaagcatcgtagtggggctcctattcatattatatatatgtcgttttaactttttctttaatggagtatcaaactttcttaagtttaaatttatagaaaaatataaaaatattttttaaaaacaaacatataattaaaatacatcaaataccatttttaatggaaccgagggtatagtagatgttgttaattttttatatgatttataaaacttaagtaaatttgacaagtaaaataagacaaaacgacttataataaaaaaagactaaataaatagggagcaggtaagttaaagagtcaaagagggaaaaaaaagtgaggagaaacttacatggtgagggccttgagctccctgaggtggagagacctgacgagctcaaagtccagtttggctagctccagcgccacgccgtcgaaagctggttcgtgctcgtactcggcgatgtagcgtatcgtctctagctgcttgggcgcccgtggcagagggatgtcgaaggcgcgggagacctgctcggccatcgacgacttcagcttgccttccacggactgaattaggtggtgcctcgcgaacgcgatcgcgtcatccagcgcctcctcgccaggcatggccatgtgagccgcgttgtacaggcttagcaggcccctcgtgtcactgcttaggctcgctctgaaactgcctctattgtctctgaacttgtcgaatacatcttttttatttttttttcatgcgcggatagttcgtatcagtacaagaacccatatgtcctagttaacatatatatattgtgttctggagatacgtatgttggttaaaacatatgttaacccatatgtgaagaagtaaactctttaatattgtacctgcagttaccccaaagccgtgctggcgaagtagacggaatcggagggaagtaatgtggaggccgtcgtcggcggcggcggaagggcagtcctgttcctggcggtgtacgcggcgtaacatcgccgcgatctcgcgacggaagtggctgtctatgccgaggcgttcgagcgtgtcgactagcatcaccatgttggcgacactgctgccgctgctgctcgtggcctccaacagcttgcggcgaacttgctcctttagctgttccgctcgttctctcgtgcagtactgatcatcctctgatgatctcagctgcttgcttaataagtagtacgtcgttttaagttttggtttgtaacgttccaccgaccatgttagcttattcaaaagattataaaattattatttattttgtttgtgatttgttttattataaaaatacttataatttatcatttttttatatttacactaattttttaaataaaacaaatggttaaacattgcaagtaaaaagttaaaatgatatttaatttgagatggagggagtaatatgttgtcaaattactaattataagcctatgtattatgtatataaggaaataagtagagtaataatataattgtatatatgtgtactcatgttgtgtttaatcttcatgcctgtgaatcggaaggggtgtaggtgatgaagaagtcgccccacacggatggtgcaaaagcttggccggtggtagcagtggtaacctcgctcacagacatgttgccgatgagcgttttgtcagttacaaaacttgtcgacttttgcttgctaggtacttggatggtctaactacatctctcacggtctctatttatagacaaacaaccctctccttgtacagctattgaatcacctagctagcgaaccctagcgtatctatgcatgttgggtttgcagttctatgttaaaaagattataattactaattttatagcaagggatataagtacaaccttttttttttgttgcactacatttttgaagaatgctgcgatagcttgggctccctcacttcaccttaaatatacggattatctctggtgttggtctactagaaaaacgattttttatggtgttggtctatgattttcgctagtggaaaaatgccaaaaccgccagcaagatcgtaacgagggggtgaggggcaccgaccgccagtgaaaatggatcttcgctggcggccacgttataccgtccgccagcgaagatatgttcattttgtctggtggtcacttagatgcgccgccagcaaaaatggataattttcgctggcggttgggttaaatagttcggtagcgaagatacaattatttttgttggctgctcacttaagcaaccgccagccaaaatcgattttcgctggcgttcttaaaaaaaatccgcacataaaaaaaataaccgcccgcccatacccttatccacctaccaccaaaaataaccgcccgcccatacccttatccacctaccaccatagaataaaaatatttccaccaaattccagcaccctcctctcctcctcccctcctcccaggcggcgacggcggggttctcgggtggcggcggcggctccggcagctgtgcgtggtggcgacggcgacgggaggcggtcgtcggggggtgcggcgacagcaatgagaggagccgtcgggggggtcgactgcgacggggggcgtggcgagctccttctcctccccctccccctcccacgatggcttggtgctgcgacggtcacgacgacggctcgttgctacggggcgcagcgagctcctccccctcccctccccccctcttcctctcccagatctagccggaggggagggggcgacggcgaccgcggcggtgacggcaggcaggcggtggcggatctgacgacagggtcggcagcacgagagcaaccatgacgacgacgaccatgaccacggcgacaacgacgacgatgctgcgcgcgggccgggagcacgtatctggcggcttcttccctcccctccttctccctctcccagaggggaggtggcagcggcggccgtggcggcgacggcaggtgggcggcggtggcggatctgaccgcggcggcgacgatgacgccgctatcggcggctcgatgcgtgggcggcggatgtgatattcatgtttgctttgttgaatgcttgttgaaaatgtggtgaaaattgatgtattgttctctggatgtggatttgagtatggatctgatgccgatttgaattgattttgaatatggattgaaaaaaatgcagctgctcaggaggtcgattgctattttttttattggaaaaaaatcttttcactggcggtcctcttaaggatccgcctgcgaaaatagattttcgcaagtggttctcttaagggtccaccagcgaaaatctattttcgttggcggtcctcttaagagtccacctgcgaaaatagatttcacaagcggttctcttaagggtccgccagcgaaaatctattttcgtaagcggtcctcttaagcgtcccgcctgtgaaaaatcctattttcgcaagcggatcgcaaccgccagcgaaaatcttagatcttcactggcctttgccttgtggcggctccaaataccgccagcgaaaacctaaaatgaccgccacgaaaaatagttttcctagtaggcgcaatgtcagttatagaactatcttcccatataattggtatccactaagagatatcctctcttactataaagttataacccactaactgctaaagcttaacatgcaaagatgacacatcatcatccactaacaagatgacacatcataatctactaacaatcattaaagttaaacaccatacaaacatgctatattatctataaatttataatttatttaattttagagcttttaaaatgtaagcatgttaaatcatcatcgcacataattcacataatattttaatatatatctttattattttttataatatgctatgtatatgtatagttcatcctcactgactacttagttaatgttatttctcttttctcttagtgcttaaatgattaatctatgatccaaattttctttctcattttcttctctcaataattcatattatcatctcaattatttttattctttagatgattaatctacggtccaaactatctcaatactcttcttctttcatacagtcatatcaccttacttttatatttgaatcatcattctacatgctgttcaaatttaaattatcataaaccacgttaacttacgtaatctcatgttgtatatctattttacacattatttttacttattatcatactcaactgcaacgcgggatttcacctagtttacttctataaacacgcaagaaacataaccgtttgaatcgagaagcttctaatcgatctaattcaatcatttattagtcgtgaagaaagagcactgcaaattaaagaacatatatgctcgtgatatgtgttgcagcctgacgagacgcctggcctgaaactgctagaaaggaaccaaactgcaggcacacgagattagaaagtagaaactgatcagtgcggatattgtggcgaacccaaaacgaaaccaattgggatagccgcgcgattaaacatttgggatatataaccggtttttcttaggttgctcttaagttatatcatttactacatcggcttactgtcggttagctcacgggaataatttttctaatgataaaaatgaatttttcaaacggtttctgacacaaaggctagctccaaagtctgctagtgccacatatctgcttttccttttggctaacttgagcgggcacaggacattgtgtgttcttttcctcataatggaatggaataagaatatgcacgcttcacgatctcacaaacagtatgatctttgctaaaactttttatagaagaaattatatatgagtttcttagaaaactattttataagaaattaattgacttttatgaaataattatcataaatcaatcagttttttcacccaatcaattatccttccaaaaccttatcttagtgccattaccaagagctgtaaatatataaattttacaatgtaagatataaaatttaatgtgcaaatacatgttaaaagttgattttttttatgaaaatgtaccgtcataaatatagctttggtatgaccgaaacaaatctcatatgtacatacccaccaaattaatgtaaatagcttgcactaccccacaaaaataaattgttattaatagtgagttaagatttttctttattttagactgcttacacatctacatggttgatgctaaattaactcataaaactcaacatgcaagtgtgacacatcatcacccattagcaattattatatagagtattataaatcatatttaagtgtgtcacatcatcgtccactttattatctagggtattttaaatatgatacaaatatgacatatcatttgcaattttgttgtttttttaacttaatatgtaagcaatgttaaatcattatcactacatcattttcacattatttaaatatacttaatgtcccacattatttgtcagaaggatttgagcgtgatttccttatactatctatacaggtgatgctcactaactcataaaactcaacatgcaagtgtaccacatcatcgtccactagcaattattatctaaagtattttaaatatcatgttaacatgacatatcatttactattttgatgtatatttagagcttaacatgtaggtaatatcaaatcattatcgccacatcattttcatattatttaaatatatttaatgttcccacgtaagtcgtcagaaggacttgagtgtgatttccttatcttcaaagaacctatagtacacttgtaccctgataccatcttgttttcaaacaaccttagtacaatggtataaattatctgcagtatcatgagtcgtgtcatgagtcatgatcgtttgcgtacatggacagatgacgaccgtgatatctcatattccctccttcccataaaaaatcaacctagcatatgatgtgatacatcttgtatgtttagattcgaaatactagaatgagtatcacatgtggtattagattggtttttttataggacggggaagtatatttttgtgttccaatataattattgtttgataccaggaggcacagggtagttgttcttggacatgctgacatgcatattcaaggtcaactctctcggatgatgctcaattgcgccaaattttgcagaatgcgtctgtggaaatttctatattatatatcatggggaaaaaaagtacatttgacatgtctaaacttttttttaaaaaaaatcaatctaaccttttaaaaccggatacgactcttcaccctcttcgctgaactctaaactaaaacggggcaatttcataatgcttagcaaggatcattgaatctatccatacttatattaattaactagcactattgaagaaactatctttggtcgatcagccaaatttcacaataatcccgatcggccaaatttcacaatagtctcggttctaataaaaaccgggaataaaaaacatctttagcctcggtttaaaagctcaggggtacttttgatctttagtcccggttgataataccaaccgggaaaaaagatcggcatatgcggagatcgaggcgtgcgcgcggatcggatcgaggaggcatacgcacgcagtttctatctcctgctccctcgttctatctcctcctcctctcctcgctcaccctatctcttcctctccttctcctcccccctccccctcctccccacttctctggcaggcggcggcggtggcggccaggcggccgggtcggagggcagcacgactggcggcggccagccacacggagggcggcgctcggcgcctggcggaaggcggcagcctgcgcagtggcggccggttgtgcctctaccggattttggttgttttttttttgagaatttatgattcggatctgagatgtatttgatttgtgtgtgatgaattttgtagaacttgtgatgtaatttttttaagattttgtaatatatttggagatgatcgatttgagaatttggaggtgatgatcgatttaggattttacgattcggggataattgatttgggatttcacgatttggggataggggatggagtgaaattaatatattaaaaacaatgaagaaaagaaaaaaaaataaaggagtaaccgaacttagcctggctaaaatacctataattatgagttatgtgtcacgtgttaaaatacctatagttttgtgcgtttggagaatgataggtggggtttaatgaaatttaatctaagacaatactcaatttatttagcatatgattatacagtagacatatgtgtagcaattccctaagaaatatatagtctatactaagtatgcataacctaactttaccctacatgtggcaataatgcctccaccgagctgaccacgtcagggatggaggccttcctactcaaacgcttccaaggtcatcacacttcacacaccattgccgttgcacactcatatcacagtgacggaagacacatctaattaaatactcacgaagttcagctgcacatacctgtcgctcaatcattgtgtcctcaacgatagatgcatggctacacgatatttacggttcagggtttcatagtaaaaattatccgtgcattcagtagttatatatgggtttatggctgggttgggctttgggcatttgatggctgaactgattgtcattctaggccttcggctggtttgcctatccaagtccctcacagtgcttttgctctctctaatatagcaatagagtcaacaattggtgataggaaaaatacgtactatgtttctggaccggctacaaggtagaacccttgcagagttagcccccatattttttgagttaatcctaataagagcgaggaaagcaatgcactgtattgcaagctttggagcttgtttagttctcaactttttctttaaacttctaacttttgcatcacattaaaacttttctacacatataaacttccaacttttttcttcaaacttccaattttagtcaaacttccaattttggtgtggaactaaatacaaccaaagggatggcttctctagtcaagtaattttggactacttgtttcaataagatttggttgacggattgatcttggaacgaggggtttcagcagtatagttagccatatagcccgaggccggacggcccggcccaaggcacatgaatttggcccggcctaggtacgacatggctcgactggggtcgggcccatgctggcccagcccggcccgatagctaggtcgtgcctgggctactggtatggtgaaaaaaatagttgagggatccaacatagacttacttcagtcgaaagagggatataaaatagacttattcagccatataagactcagcccaaagaaataagggaggcaaaataaaagtattttatagggaagcacgatgagcactcatgccttcgggccatgagtaggcccggcccagcccgacgtgtagctcaggtcgtgccgactcgattgatcttggtctaggcccggtcgtgtcttggtcgtgccaggctgggcagcctatttgaccatttatattcagcagtgtataaatgaaagcttacgaagacaggatcctatacgagtaagttggcttatgacgtttatttcctttaatccatcaagtttgcctcgagccatatgaccaactatactgttgaatttgcaatgcagtgcaatgtagaagtgttctacattaaaaattttctatgtgggtagcggttaacagttgctattggactttagatcgtcttgtcaaacggggcctaccgcatccggctgtgatcaagttgatgagaccattaaacaaattcttgtgtgtcttttgttttctttcgagaagtataaagtttaatttttatgaagttgggcttagtttcagctgcaccttagccttttacaacacattttttttccagaatggtggagtaaagttattaagggtgttccaaagagctacggaaggggttcaaatctttgatcggttctgtaatctgggacatttgaaaactgattgcgttttcaatggtctaatcctaatatggtggtggttttgcaggctgtggctaatcagaatagtagtttactagtttatggtatttagcaggatcccatggctccatgagtttatttgtaagttgcttgggtttattggtcaggcctcgcttatgtgtgacacttattggaaatgttctttttggtggagcggttcaattccttgacctctccttgtttgtaaatatttcaatagtcttggaataaagcgtagttatccttcgttttttagaaaagaaaatagcgactgttttagaactgacagttgataatcaatgataatagcactactgattaattaccaagattatgattattattatcggttcggtagtagtcggtctgccaaaccaagtctcgctttctggagtggccaaatgctgctctcttcctcccttcatcgatgtcacacttcaggagtgccaggctcgctcaaatcaaataagagaacttgatgagccgagaatactagtataatgcagcatacgggctacaggaatgtagcaatgctaggaaaaagtaccccgaaggtctctcaatttgtcatcgggataaaaaaacgtcatcgaatcacaaaaccagatatgcggggtcccttaactatacaaaatcggtcacccaagttccttcactggttttgacccctgttttggtccacgtgacgactaagtcagcgttaaacccacgtgtgccccacatgtcagcgtgccacgtcaacttccccttttccctcttctctctctgcttctctgcttcctccctccctctcgctctctgctctcgcagggcatgggaatgccggcgctagggcgcccacggcggcgcgtgcccccggaggatgatgcggcccgggtcgtcgtcgccggcggcattagcagcggcggggaacggg

SEQ ID NO: 13022 - DNA, 5165 bp, Oryza sativa
cgcgtcgagggctacaaatttgatataaagtttgtcttcattagaattcacatgaaaaagttatgaattatttttaaatataaagtctttataccatcctatttgactcaaatgatattcaaatccaagtttagggacggattaacacagtcgaacaaatttgaagatctgaacggtcgatttgcgagttttagaatcgggatgacacagcggtacaccggtgatggactttactctatacttttttccttgatatataattggttgggtatgtgtgcggtggtggtgggtagtgggtacctataaatagagaccaggaggtagttcaattatccatacatcaggtcgatccgcaactcctgtaactaacacagaacgtgcagcggtgcagcatgtctgggagcaaggtaataagtgttctcgatacggagatgctcgctgttaacggtggcactggcacaccgcaagagactgcctctgccacggccgctgcccaaacttttgccccgtccgtgtggggcgacttcttcgccacctacactcctcccaactccaaggcatgctgattaattaaatatatgcttgattaaagaagtttgacaacatattaattacttcagctacatagcttttatatttatgtatacgcgaaattctcatgcatacagaggtcagaggagtggacgagaggaagagcggaagggctgaaggtgcaagttcgcagcaagctgttgaaggccaagagcagcagcagtgcggcagacatggtgatgctagtcgacacgctcgaacgccttggcatagacaaccacttccgtcacgagatcgcggcgatgttacaccgcgtacaccgcgagcagcaggggtgcactgccggctccgacgacgacgatgacctccacattacttcccttcagttccgtctacttcgcaagcacggcttcagggtatctgcaggtacaataacatactctccactttttttaatatataacaccattcatttgatcatttatcttatctaaaaaaattcatataattatcatttattttattgtaacttgatttatcatcaaatgttttttaagcctgatttaatttttttatttgcacaataattttaaataaaatgaatagttaaacgtttataaaaaggttaaccgtgttatatattaaaaaacggaggtagtatcaactctccggaatatgaaggttcctagctaaacacctgaacaaatatatgcagatctgaaaaggtatatcgtctaagtacatagctgggtcgatttttaaatctgtacatatatagatgcaagatatatcccatacatatatgtatacatatacatacacacatatgtgtgtgtatgtatgtatgtatgtatgtatgtatgtatgtatgtatgtatgtatatatgtatgtatgtatgtatgtagtaattgagaattttgaggaagcatctatgttaacaaaataatctagatcatgtcctaatacatatgtagattaattagattttgcaaaatatattaacctagaaatccagaatcaataaatatggggccgtaacagctccatcgtttgctggctgtgttcgtttcactatgttcccaactcctctccctctccctcgtgtttcatacgtacgcttttcaaactgctaaacggtgcggtttttgcataaaaaatttatatataaaagttgcttaaaaaaatattattgatcctttttttaaaaaaaatagttaatacttaattaatcacgcgctaatagaccactccgtttttcgtgtggagggaatgagttcccatcccaaaggaacaaacgcagcaatattctcttagcaaccgcggccaaaatttaaaataggaaacctaattttatatttgattttgataattttttattatagtttattttccaaaattgtttttaaatcattaaaatacaaatataaatgttttatctataaattcgtttcagctgcatcgttcatttttttcacggcttatcagtatttccgcaaacatgactgtaattttaaaagtcaaaattaagagttagagacttgggaaatatcatgcatggactcttctttcaatctaatccactccaattaagaaataaattcgaaattaataattataaagaagtgcccattccagagtgtcaatttagcattttattaatttaattctgaaattaataattagccagttgaaactgattttgaactcttttttaatctaatataaatgcaaggccgaacaataaattattccattatagaagaaatacttagttacaatttgcatgatgttgcaattcattaaaaataaaattacatgtagaaatattcaaacttggattaaaagaaaatataatataaaattgtggttaagaaaagaaaaattgcatatagcacatgccactgcaattttcggctccggaacgtgcagtcttaactactaggtgaccggaaattttcaggcacctgaaatatagcaatcctatagtaatatacatgagttcttcactaatacaaaatatttactgctgtaatagctgtattcgacaagtttatagatagcaagggcagtttcagagcaagcctaagcagtgacacgaggggcctgttaagcctgtacaacgcggctcacatggccatgcctggcgaggaggggctggacgacgcgatcgcgttcgcgaggcaccaccttcggtccatacaaggtaagctgaggttgccgatggccgagcaggtctcccgtgcccttgacatccctctaccgcgggcgcccaggcggctagagacggtgcgctacatcgccgagtacgagcacgagccagcttttgacggcgtggcgctggagctcgccaaactggactttgagctcgtcaggtctcttcacctcagggagctcaaggccctcaccctgtaagtctcttcacttctttgcctcttgactcttcagcccacatgctccctacttaatgtttcctctcattatacagaaataatttttctatacaagacactcacggatcgtaactggtcgagtctgcaaaaatcaacctctattttcgcatacaactcgttaagaggaccacatgcaaaaatcaattttcacagatgggccttttaagaatccgcacgcaaaaataagcctattttttaggtgaacctttcaaggggccacacacaaatatacattttcacaggcgggcctattaaggatccgcctaaagtctaagttacatcctcgtatccctcttaaacacttcaaaatatttcattcttatccactcatctctctcactccttctctccgcattactttctctccactctcacacctcctatcagacacgcggccagcggcaggtggcgggcagatccacctccgtcgggcccacgatggcccaatctgtcgccgccagacccgtgacgaccggatccataggcggcgggtaaaacggccaatggcgggaggtagcacccggacaaattctgaacgcctccttttctcaaagatttctgttgactcggaaggaattttgacgtgggatagatccattggaaggtggtctcgttagctttccatacatatgtggaacgtcgaagttagagtctgaatacaacctgggcgacaaatttagtgtgtggactgcttctggagcccgaagaagacttgaacttgatatgagttggacctccatcttatcttgaacgtccatgataacattgtccattctcctagtatctctccaagtgttccatggttctctccacagttactaatcataattaaatcattaggtagcaatctatcattaagagtacataaaaaaagtacttagaaacgaactcacctgtaaatttaattatcgggtacaagctccagtgaccttgcaaaaaaacaacttgaggatagcctatgcatccaaaggagtgatgtcctcattaatatagataaactataatggaggctccaaattaagtacaactttgtatttattaataattataaattttgcaattgttttctcaagactaaactgaaactaagaatcgaatccatgaataccattctgtatcaattatcaaaattattatagactaaatttcacattgggtcacatattttgaccacggcttcataatagactaatgttaaacccatgtattcacttaacaccacacgtctttacaaagttttcactttgtactggattgagcatatcaaaaaaagaacttcatataatttacacagggttataaaaatgaaatacattgtacgttttcttcattaatccttttagtgtgaactagttgtatatttaatttattcatgtgcccctcggtatagattaatttctgccggttctaaatatgttcacattactattttagtgtgatttgttaaaaaaccaatttgattgtattttctaaaataatggtttgaactgctgatatcttccttatgcttaaccctagtccaaagtgccagagatatgtggtgttaagtgaaaaaagtaattctaaaaaagtgaaaaaagttattttggctcctgtaaattatgaaactttagtcaaaatagattgtccattgtgaaattaactcattattatattattaggagtacactagcaagtagctcaaattaaagatcatgaaagtggattatatataatgatgttaatgctaattttaaaatgtaaaagcatgcatacaatttaagctctgttcttaaagaaacaaataaacaaaccgtgaaaattcgcacgggttactgactagttcatgtacagtacaagcaattgtccagatactacctgcatgaagctcagtggttaagcgacaagtacgtgccaagcttcgcggagcacctgaatgtggctaccatgtcaacgggccgggccggcgctggccccggcggtgcggatgggcgtgaaccaccgcgacggcgcggcgaccgtggaggcatattcggctgggtgtccgcgcgccgtccccgacctgctccgcgcaagcgcccaggtgggccggccgtctcctaacgacatcgcctgctacaagacggggaagaagaacaagaaggacgtggagagcctggtgtgtacgtcgcggagcacggcggtggcggggcaaggttggaaat

SEQ ID NO: 13023 - DNA, 2018 bp, Oryza sativa
gaggatgtcaagtctcaaatgagtttgaaaaaaagattcatgtgattaagaatactaacaagccgtcttacattcattattgcctcggcctgcttttctctgaacctgatgcagccatgcagtacaacgcgtgaatgctgtcaccgtgtacacttcaaaatacagtgcatcgcgtcatgtggtcctgtcatacagtcatactcctatgcaaaatgaacaaagtcaccaattatcaaatcttggaaatcctagcagaatactagtactagtacagtacattgaataatccctccgtgaaaaatgagaaatgtaacagtaggtcagcctgaagtactgtataatttattttcgttttgcaagctgcagtccgtattccgtaagaagtaacaaagctcttgggcagcaattgctagccaagattcttgggaagatataactgcagaatgcaagtccacttgtgaagtcatgaggttgcagcaaaaccgaatgcgttagctgacggcagttcgattagctgctggatgacggtttactgaacatcaggtttcaagcattctgttatacagttacctgttatcaaaagaaggagaacatccgagttacagtttacctgcatagcatcattagcatatatcagatgcataccagatagaactagttaacagatagcagaaaactgacctccctgctcgggttcgaagttgttcttggtaacaatgaagttgttcttgtaacaatgaaggcaatgtacacgagtgggcctgaataataccaaaggctcagctaatcagctttccttctccgagcacactgcgttcaaagcctcaaatggcccaacaactagtgggctggtagtgcaggccgcatgtgcaggatgacgtttcccactgctcatgacggcccaatgactgagcaatttcaacgttggaataagttcacttgagttccctttatttgtcgccagtctaattttcatccttgaaccgcaaaaccgtatacgacccatccccaacttacaaaaatcagtcaaacgagatccctcggcggttttaatagcggttttggctgacgcgacccctacttggccatttttggccattttgactcggtctccatcccacgtggcgctggtgtggcgctgacgtggcaattatatctcggtaaaataataaaaatcatgggcccacatgtcagccccaaaaaatattttaaaaatggtgggtcccacatgtcagctacacaaaataaatatggtgggcccacgtgggccccacatgtcgttgaccgaatccaatatcttcttcctcctctctccggctctccccatctctctgctccctcctctcgtcgggcggcgtccagcacggcggcagcaggcggcgcgacaatggacagcgcatggccggcggcgggcgacggcgcgcgcgaggcacgtggggacgatgtaggcgtcgatggcgacgttgggccgcgcgaggaggcgacggagcaagtggaacttcttgtcctcaccaccaccaccaccaccaccagaagcagcagagccgccatggcgcttgcggagctcagacgaggggagggcatcggcgcggccgtccccggccgcggcggcgaggaagtagaggcggcggcgccggggggggggaacgggagggcgcggtggagggggaggacgacgggaggagggccgcggcggccgagggacggggagaggcacgtggcttcgatccctcttctcccgccggcgcccatcggggagaagggcggcggactgctaggcgagcgtgcgcaagagagagatggccgccgccgccccaggcgcctcgcgcgccgtcggccgtgcgttgtccatcgccgcgagggaggaggcgagctcgtcggggcggccggcgggagaggaggcagcgcaagccggccgacgggagggagggagaggagcggtggtgcgcgggcgtcggcggccggcgggagaggagcggcagcgcactgggactagcgcggggggggggggggagcgg

SEQ ID NO: 13024 - DNA, 14557 bp, Oryza sativa
tgtgggtcccatcttttttattattattttatgtgactgacatgtgggtcccacagattttattatttttctagatcggattgccacgtaagcaccacgtcagtaccacatcaaatgaagaccgagtcaaaatggacacgtaggcgttacgtcagccaaaaccacccttaaaatcgtcaaggtacctcgtttgtccggttttcgtaagttggggacgggtcgtaccggttttgcagttcagggacgaaaatcagactgggcgacaaatagagggacctaaaatgaacttattccttcaacgtttgtgtgctgacagagtgacgagcctcgattttctaaaaaagaaaaggttacaggcctcgaacaagatgctgttaccaaagttagccacgaatttggactagaaaatagctaaacatgacggcttgatcgaagattacgcaaagttttagttcgactttcgaacttataatagttcaaaataatcatctgctgtcatcatctactcaataaaaaccgaaatcctctgtcaccatcaaaacatagcaaaaatcaaatgccattaaaaagtgccaaatgacagttgacagcccaaaataaaaaagaagaaaaaaaaaggaacactattatattccagatttccagctgcaatatcaagctaccaaatggatccccaaaaaaattgcaatccattccatgaactgagcccaccatgcaccacacaacccccgctcctccacgcttctcgggctcccgtagaccgggtccacccgccaatccccccacacgtcgatatctccagcacccaccgcacccactctcctcctcactccgctcccctcctctcctcctcccttctcgcggaggccgccgcaaccaaaaaaaaaaaagtctaaccctagatccaggccccgcgtctccggcgatctcccggccatggcgactcgccgggccctctcctccctcgtccgcgccgcctccaggctccggggggcctcgcccgccccgcgcccgcgcgggccgctccaccgaccgtcgccatcggggtacctcttcaaccgcgccgccgcgtacgccacggccgccgcggcgaaggaggcggcgcctcccgcgcccgcgacggggaaggccacgggtggaggtaagatcaccgacgagttcaccggcgccggcgccgtcgggcaggtgtgccaggtcatcggcgccgtcgtcgacgtgcggtttgacgaggggctgcctcccatcctcacggcgctcgaggtgctcgaccacaacatccgcctcgtgctcgaggtggcgcagcaccttggcgagaacatggtgcgcaccatcgctatggacgggactgaggggcttgtccgcggtcagcgcgtcctcaacaccggctccccaatcactgtaatgcccccccgcccgtcttctcatccttgtttgcgatcgtacatttcatttcgtgttgtctccgaccagatctgacgaaatgtggatctactgctgtcagatttgatctaggtgtacagttctgagtggcgagcgatcgcccttccatttcgttcattttatcggtagactgttggctgctttgtggtggtctgttcgtgctagtgaagaaattgactttttttcccctataaagtgctgccttttggtttgtggtggtcatctagagtctattagaattcattatgttcaccagtgttgcatttccgtattggcgtattgtgaggttaacatgcattggttggtataacttttccactgtttgcttgaatgaaaattgtcgtcatagtctaggaatccattccagtttttgtttatttaatacccttgccaattgtttagcataaaatgggcattactgaattcagagaactgctgatgcattcgtgtaaattctgattataattagagttgctgaaccttgtatctgtagcattgtcttggaagttgaaactaatcatatataatgtgttctactatgtttttgacttggaagttattcttctttgtaggttcctgttggcagggccacgcttggacgtatcatgaatgttattggtgagccaattgatgagaagggtgacataagtaagttactatatgttccatgtcttcattattcatagttatttaagaatttgtgtgtccagttcttatttatgttttgttattgatgctgacttctattgtagcaacgaaccacttccttcccatccatcgtgaggcgcctgcttttgttgagcaagccacagaacagcaaattcttgttactggaattaaggtataattgtcccacccttctctgatcctgtggttatctgaagtatttgaatggtaaatagttgcaaccatgatttagagtcctaattgctgtacattggtttaattttataggttgtggatctgcttgcgccctaccaaagaggtggaaagatcggtctttttggtggtgcaggagtcggcaaaactgtccttattatggagttgatcaacaatgttgctaaggcccatggtatgcatctatacatagtctcatgtgtgatattgttcaaatttcagtcacttgttctatttgactgatgatgatttgtttgccaggtggtttctctgggtttgctggtgttggtgaacgtacccgtgaaggtaatgatctttacagggaaatgattgaaagtggtgtcatcaagctaggtgacaaacaggtaattttagttgatatcttattttctgtgggacgcacacatgtgcaagctacttatatatcaattttggttgcagagtgaaagcaagtgtgctcttgtctacgggcaaatgaatgagcccccgggtgctcgtgctcgtgttgggttgaccggtttgactgttgccgaacatttccgtgatgccgaaggacaagatgtgcttttgttcattgacaacattttccgtttcactcaggtaatttatgcaagacatctcttcttttggtatttctactctgcataaaaaagaattactagtagtatacgtagcgtaggtgtttctactaagtcccattgttatggttttgattaatcttgaatcttgatgtcaggcgaactctgaggtgtctgctcttcttggacgtattccatctgctgtgggatatcaaccaactcttgctactgatcttggaggacttcaagagcgaattacaactacaaagaagggttccattacatctgtccaagctatttatgtgcctgctgatgacttgacggatcctgctcctgctactacttttgcacatcttgatgctactactgtgttgtcacgacaggtttgtccaactgacctaatacatcgtgttaataatgtcctcattatgacttgaatttgctatctgtgcagatctctgagcttggtatttaccctgctgtcgatcctctggactccacatccagaatgctctccccccatgttttgggtgaggatcactacaacactgctcgtggtgtccaaaaggttcttcagaactacaagaatcttcaggatattattgcaattttgggtatggacgagctcagtgaagatgacaagttgaccgtcgctcgcgcaaggaagatccagcgtttcttgagccagcccttccatgtggctgaagttttcacgggtgctcctgggaagtacgtggagctgaaggagagcgtcaacagtttccaggtcagaattgaatatgcatagtagtttttggagttcagtaccactacggttacagtattttgcaatttttggggttataattgatgaatcagtatgtgcctgcaagaatacactagttttaccagacagtacaatccatctacacttttttaatcctttgttcagtaacacattttgctagatctgtagttgtagacacgcgatattacagaacttcattatgcttattagtaatgtatattcatgtttgcttgtgtgctctttgctaaagtttctgttgatgtgcagggtgttttggatgggaaatatgatgaccttcccgagcagtcattctatatggtgggaggcattgaggaagtcattgctaaagctgagaagatcgccaaggagtcggcttcataagatctcttcattgttaagttctgtacaagttaaatttttggattctggtttctatatgcccgttctgtagccaggacgtgattacaagcaggggtgacatcttctgatgagcgatgtttttttgtcttccttttctccttttacccctaataaggaaccgcagtgacattgtattgtgctgcacaaaagtactcggaacttcgaaagcatgtgtcctttataatgcagatccatgaagcataggatcattgagttcttgtttttagttggtaattctttctttattatttccatatccatgctttggttgtggctattcgcttctccggcggaagaatttgcaatcagaatgattgtgcttaattgtaaaattgattttaggatttttcattatagtcaacttctcaaccttagcttttaaaccgtaatacagatacaaaatttttacctataaattatttttaattgtttcattaactctttttactgccccactatgtacttctactagtttggttctcactactcaccactcagcataatctgcaacagctttatgagttgtttagcctaggcccatatcagtaaaactttccatctccagcccaattcaaaataaaaggcccaagagtgactagcccggcccagtatatctatcagcctgtgccgcccaaatccggtgatccaaaatcgtttccccctctccctcccattttcaagttgtttcgaacaattctcttcaatccctcatcatttcccccaaaatcgcgcggccgtctccggccaaatccacgccgccgccgccgccgccgccgccgccgccgaggacgacgcagcggtgccctcgtttcggcctcccgtatcgccctccgtcgagccgagccaccgagactggtgagtgaactcgaggccgtaggcgttactgctggttgatcgtgccaaccctaattctgacgccgatcaatctctccccgtttgattcccctgcaggctgcgtggtatcgtcctcacgaggagcggcaatccgaaggagcgcctcctcccgatgaagaccatatgcggatccctcatgcacgagctccaggtgcgcctcgctgtcgactgatctgctgttgccgcgatggcggtgacaggttttgttggtctctcgctgattcagatcgctcgtggttgcaggtcatctgggacgaggtcggggagcccgaggccgcgagggacaggatgctgctggagctcgagcaggagtgcctggaggtgtacaggaggaaggtggaccaggcgaaccgctcccgcgcccagctgcggcaggcgatcgctcaatatgaagctgaactcgccgccatctgctccgccattggcgagacgacggtccacgtcaggcaggtctgtcacttttgcttctgttttctgtcgtttaagagcttatgttttgatggttgatacgatttactgtgttatggtactataatggtttggggcgcatcagaatttagccgtttctccgattcaaaaacactacccacaattgtattgtgatattatcgaattattattaggctatgaattcatatgttcttcgtatactacctttcgcctgtattcaagcatggtaacttcatcattttccgttagcatattttccgaactggtaaccagtgtgtgttttgcaaaaactttttgcataaaaatttattctaaaaaacaaataaacccaatttttgagtttataataattaattcttaattaatcatgcactaatgacttatattgttgtgcatgccacggagttgccacacccaatagccggaaggagcacaaccctctagattatatcccatctagtactggttgctatatcttgagacggaggtagtatatgattacagtcacagatgggctcatttaatgtgtattatttagttatccaacttgaaaggtagaagtatgctgtagcgaaataggatctaccagtaaggcagtaattagttctttgtttttgattgttttatcagtctaatcagaaagcatgtggattacgggatgagctcggtgcaatattcccatacctagaagagatgaagaggaagaaggttgaaagatggaaccagtttcttgatgtcgtaggaaggataaagaagatctcatctgagataaggccagcaaattttgacccttttaaagtgtctgtggatcaatctgatctatcattaagaaagcttgaagagttaagggtggagctgaagtcccttgaaaaggagaaggttcttcttgaagcttttagctctatgtattatttgaattccttttcaatttctattttctaatgtattctgattcagttattaaatttctgaattctgatagggtgagagggtaaagcaagttatggaatatttgaagactttacattctttatgtgtagtacttggtgtcgacttcaagaaaacaatatctgaaatacaccctagtcttgatgaagctgaagggccaaggaatataagcaacactacaattgagatgctagcatgggcgattcagagacttcgtgaaacaaaaatgcagaggatgcagaaggtctgcatcttactatttcaattcagggaatggccaaatggtatatatctgctttcaactaactgtattagctctgccagcttcaagatcttgcatctaccttgctagaactatggaatctaatggatacgccatttgaagagcagcaggcataccagaatataacatgtaatattgctgcttcagaggctgaattaacagaacagaacaccctttccattgagttcctcaactatgtgagttaatgatcttttggagaacttgctttcgtgagtcttgtggttgtcattttctgttttctactgagataatgatactagagtcagaggacatgatattctttgatccaggtggaagctgaggtattaaggcttgaacagcacaaagcaagcaaaatgaaggagcttgttctcaagaagaaaacagaactagaagaacatcgacgacgggcacatttagttggagaggaaggttatgcaactcagttcacaattgaggccattgaagcaggtaatatgttatggaatgattccctgggtgtgttcgcttttcctagatcccaaccggatccctctgcacggaaaatggagtggttcattagcgcgtgattaattaagtattagctattttttttaaaaaaatggattaatttgattttttaagcaactttcatatagaacctttttttttgcaaaaaacgtaccgtttagcagtttgaaaaacttgcgcgcggaaaacgagagagagaggagttgggaaaaggggcatccgaacacacccttagatttctgtgcaagttcttgaaggtagtttcagttaattgatcctcctacctcctttgctcatgcattccgttgagaggatgtgtcatgtgtgttaagctgttaatgctgtttatttagtaaaatgttttattgcccaaaatatgtcttcactctttccatttcaggggctattgatccctctttgttgctcgagcaaattgaggcttatatttcaacagtgaaagaggaagcttttagcaggaaggacattctcgagcgagttgagaagtggctaaatgcacgtgaggaagaggcttggttggaagattacaacaaagtactgtcctatcagaacaatttatatgaaaagattttttttccgcacctgctgctgattgcggtgtccgcatgacatgatcaggatgacaaccggtataatgctgggagaggtgcacacattatgcttaagagggctgaaaaagcgcgtgttctggttagcaagattccaggtgacaatcaattattaaacacaatgttatgctttcattcttaatttcttatcatttctgctcctgatttgctgctattgtgttgtggacaggaatggtagatgttcttgaaacaaaaaccagagcttgggaaactgaaagaggcaatgagttcacatatgatggcgtatatttctctattcatgccgtttattttatgtattatttacaaagccagttttgagaattgccaaaactcgtgtcgtacaatgtttgcaggtccgacttatattgatgcttgaagaatacatggttgttcgtcaagagaaagagcaggaaaggaagaggcaaagggtactagctgtatcctaatttgtgtgcttttgttaccatcttcttacgtggtaacgtgggtgagatctgaaatctgagtaattgtaggatcaaaagaagcttcaagatcaacgcaaagctgagcaggaggcactttatggatcaaagccaagctcttcaaaatctcacagcactaagaaggtacccagaaactccacacctggagttcaacctcctaaatcagagatacttcattcaaagactattcgtgcaaccaagaaaacggaagatatcaacactccttcccctggtaacttcgacttaaatatatctgaagcaatatttctaaatttttacttagtatgtagtacgatctgactatctctgatctcaaaaataaactcaggtcataaaggtttagacactgttggtctccctatcaggaagttatttccatcttccaactcgagcactcttcttgagatggagacaccccggaagcccttctctcagattacacctggaaacatatcctcagctcctgtgcgtccaatctccactggtggtactgaagagaacaggactcccaagacatttgcaccagttcctacgactccgatgacagtgagccctcatatgcaaatggcagtgacgcctgttcttaccgcaaaagctgtttctgtactctcttatgacgaaccggagctgacttcacaagaggacaccgagtactcatttgaagagaagcgtcttgcagtctatcttgccgcacaagtggcttgactgtcaaggatgctgatacatccgttgtgtagctgaaagtctgaacctttgatagcatttctcatgttacagagacttgtgtaggtcgacagcagtcggccttattcataaccatactttacgttttcatcccattgttaaagtagttaccttgttactgctggcacttgtcacctgatgatgtgaaccattacctttcttcgctatgttgatggttatcattaggtggctgagacaatgaattgaactggcaggtgcagccgtgcaggtgatgtggtttgttatttggaaaagaggtttttaccgttgtggtaagaaagctaagatgcggccggtgaactagagtttcacaaagcaaccaggtaacttcccttggagttcagtcaataatcatttcaagtaaatgaaaggcaggccagttcctggtgatgcactgatgctgatatttgcatcgcgttcagatgacacacttcatgtctgaaagcaataggaaagctagacagataatttatggctataatacaagcagctgtcaatttgttcatatcgtaattcacctggattttcctgcaaaagaggtcagggatccgggacattggtttgcaagtcagaatactataaacctgaaattccgtataggccaaaagttgagctaaaatttgtcttcgagttaaaggcttaaatgagtactctttgctaacctctttcattttctgcgcatatatttcttaaattgttaaatactgtattttttaaaaaaattctaaaaaaacatatcaatctattttttttaaaaaaattaactaacattagaaaaatcatattaattatttttttagaaatatattaactaacattgaattaatcatgtgttaatcccctgcttcgttttatgtgccgggaagagttccctgcgcacctttggatggaaataaacgcaagcttagctgttaaaacttccctgaaatttcactctaaaaaatacttccctgaaattcctttgttcatcctcaaataaacaatacattgttcaatgttatagagattctcagaaagaagtatttgaacaatgctagtttctttagcagttctgctatgggaggctctcaattttggaaagggctgcatcattgcaagacttgggttgaaagacttgtggagaaacatgttcataagggaaatcatgtatttttctggaaagatgtgtggtgtggtgatattcctctcaaaattaggttccctgacctttttgagatcagctaccagtaaggggctcttgtgagtgaagtgttcaatgggagagactgggatctagaatttagaagaaatctgaactctcaaagagaaactgaacttgcccaattgaagcaactcattcaggggttttgtttggatgaaggagatgaccaaattgtctggcctcataataagaaaaaaagttttttctactaaatctatgtataggatcttgacttttgggggtataagggatgcagacttatgggagatttggaaatgcaagctccctctcaagatcaagcatttcctttttctggttgggaaagggaggttaccttgtgctgaacaactagttaagaggtactggaaggggggtgataaattctgtaaattgtgtggtaatgttgaaactaccagccatgttctcttctgttgccctttggcagtttttgcttggtgtgttatcaaagaggccctgaatattcagtttcatcctgccaatttctgggattgggttaggatttgggataaaaagaaagaacatagactctggattttcctgttagggtgtatctgttgggctctctggataattaggaatgattgggtgtttgaaaataatttggtttcctctcctctgcaaactgtttacaaagctttgtcttttgcacagaaatggggcattctgctaggaaaggaggaacaagcagtgctgggtgattggtgtgaggcgatcctgaagaagcttaatcatcttagaatcagagatttacctgcatccctgtagttccaattttagccagtgggtgcggttttgatgttgatggctgtctgatgtttttgctgtgccgaatgtctgtaagctagaatttccaaccagtttagtttcctttaagatgtaaaagactctgtttggtgttttgggctttctccaaaagctgggtcaatatatttgatctgatttcaaaaaaaaaaaaataaacaatacattttgttcgtgactaacatggagcatatactaataaacaagcagataccacacaataattccttatttccaagtgcagaaacatcatttaaaggcacatcgttgactaacctcaagtcaactatccctgaacagatcacacttctgttccaaatgacggtgcagcatctatatattttttttaccaaacagctttcacaaagctaacatgcgtagaaaagtcactggtcgtttgccatctggttgcagtgatctaacaccacacaaaaccacattagggttcgtcgctcgagaacgtgatttgtgattccacagtccacacggccacacagcgtgtgctagctcagcctgaattattcattattcctttcacgccatcgccgtcacttcactcctgcaggttctgggcagcttcgccggcgatgttcttgagccaaaggatcaatgtcagctaagggtgtgcttagttcacgttaaaattgaaagtttggttgaaattgaaacgatgtgatggaaaaattaaaagtttatgtgtatagaaaagttttgatgcgatagaaaagttgaaagtttgaagaaaaaatttggaactaaactcggcctaatactacgaaaagttcgtcctgtttcccaggtcaacctgcacttatccttttctcaaactgatgatcaaatcaaactaagtactgtttatttcgcaagaagacccgctctgtcagttcattggttcaggcttcttctggatctcccaggcgccataaactagttttacgcttaattagtgaagactttgcttggtagaactggtcatattggatcgactgatctcatttttatacccagtcgattaattatttatccaggttgatagtttggtaggtttcagcgaacttacacggggttttacctcatcttggtaggtagatgatgatcccgtgtcagtgatgcactaattaattggatatgcgctaattgagcaaggcaactttgggaggacaggtggccatggttgaaaagcaaaaaaaaaacatcttgtgttcactgtctctctctagctattagtagatcagtaaagtaacaaaggaaagggcatctagctttaaccggaaatggttaagaacactgaacacggagtagacacctcaaagcaccaaccaagctgttgttgatagagcagtacactgggcgccaccactgcacacacatatatccatcacctaacactctctccatcttagcgactaacagattgtaaactagtggcagcagcagtaggtaaatgggctaatggcagcagcgagcactggaagtctggacacacgtttaaattgtggagtaaaaggccagcgttgagatgtcgactgaccagccgaactcttgatgatagagcagtccacagaaaatgacctccaactccaataaaaacaagagatagaaggtagagtactcctactctcccagcccaacagaagactaatcaaagatgaaatgtcgacgaccggactcgtgccggccaaacaaaattggaacgttctgaactaaaaacattactaaaaacaaaagtggaactgatcagctagcttgtgtccctatggagcgcaacccaggacatcatgctaaaccaaaatgagtcggatcacatcgtctggaagctctcgaatcatggagaatactcggcctcttcggcatacaaggctcagtgtctaggaacagtcggcaccaacttcaatcccctaatttggaaatcttgggcccctgcaaaatgcaaattttatgcgtggcttgtgattcaaaatagagtctggacttccgatcgactagctgcaagaggatggccaaatagtggagtgtgcccctatgccgtatgacgaacgagacggcatgccaccttttagcttcctgtagatacaccagaaggatctggagactgacggccaactgggtggcttatcagcaattggatccgagcaattgggagccatgccaaagcgtacacgaatggtgggaaatgctagccaacaaaagggaagtgtccaagaaagggctgcgatccttaatcctactcatagactgggaaatttggaaagaaaggaaccaaaggatcttcgagcacaaggaaacggcggcccccaatcttatggcaaaaataaaggaagaggcaagaacctggatgatggcaggcgcaagacgacttggagaattcctaccaacttaatcatagcgcttatgtaattttgtacagctcttttttttgtccttaggggttgtatatttttacgcctatatctaatgaaatagcacggtctcgtgctgattcctttcaaaaaaaaacattactaagagtatatattgacacaatgtttaacaaatgataccggttagtgcttcggtactctctccgtttcaaaaattaactaacctaatgcatatattttttaatttagttcagattcatagtaataaaatatatcacattctatactaatttgttatttttaaaggactgggagtgaaaacggtcggaattcggaaatgataagaatcgttagcatctcttcaaaaatgatgctcaattgcatggtaattgatcatatttatcagctaaactactcactgccgacattaatacgatacagaaagaaattagaaaaataaaatttatatatagaaaaaaaagatacggtcaaaaacggtaccccttataaaaaaggagctcggtcgatcaggaatttccatgatcgttttcatccctcagtggttatcgcctagatttgcatacgcaccacaccactcggtgtacgtagtttatacatgtgcaatttacttgcacgaataggtgcagggggtgtaagtgggttagccacgaactcccttatagatcaaagtaaatgggtttacagcttattttagtctataagtggattttgtgggttagccccttacattacgtgcagccccccagcggccctcgcgagctgggtggagaaggataaagccacctctcggaatggtaatggaacggaaccactttctccgactccaacccaagccacggcaaacccaaaagccaccaccgcgttcgcggctcagccagctctcgccgccacggcaattcaccgcacccgcccgcgctatcatcccacgccacacacacgcgcttacggacgaacacacccgcgccacacgatccatcgccaacccaacaaaccactctcccggtggtctcctctcctctcgcttcccatcaccgtcaccttcccccacacgcgttcccaagcccgcgcgcctcctatataatccgcgg

SEQ ID NO: 13025 - DNA, 628 bp, Oryza sativa
caactaacataaaagggttgaatatggaattgaatattacttcaaagtctaatccgttgggatacgacagcagaaaatgataaaaagatgttgagtaatgctttcattgaaactgctgactttaggactctaattgaaactgatgacaggaccattgttgttggtagacgagggacaggtaaaagtgctttatttattcagctaaatgagcattggaagaaagacaaaaaaatattaatcctgagtttctcaccagacgattctcaaattattggtttcagatcaatgttgaaaccatttacaggatcatttaatttagcaagggcagcaacaagactattatggcgatacgctatgctaatggagatagcatcatatatatcatctcattacaaattgtcatctcaaatatcatcagaaacattgttgaatgaacatttgaaaaaatggaattctgcacaaggtgacattttaaaaagtgtaggcttgtcgcaaaggagtatttagatgaaaataacccagaagaatcaattggtgatcttcaattcaatttgaatatctcagaaatagaaaataatatagtatcacttcttgaacgctcagacaggaaagttgtcatattaatgga

SEQ ID NO: 13026 - DNA, 16138 bp, Oryza sativa
  unsure (1)..(16138): unsure at all n locations
cagcgagcgctcacggaggccgacattggagaccatccaagaggagaactacatgtcgacaaactaaaattatcaagaaatagccagcagctcacctttttttaattttctcttttatgtgcgatattgtttctattatcttttctgagatctgaattggaaaagatatgtaatgaaacagagaaagatgttcagtcaatttttgtaaagaaatcaagaacacgtagatcaggattgtctttttttaaaaaaatgattgggtgcaagcacaagcgagttatccattttactgcttatttgcatgcatcccaaattggaacactgtataaaagcttttgagaaaaatgaatggactgtgaatataattgagcatcacaataaaagatttattttttatttttatcttttgctcttcaatcttgatttgattttttagtggtacgatagatagagtttgtaccatttctgtctattttaaatatttttaatgatgatttactaaaatctgatcccaacatttgaaaagagtgcaatattgcactttaaagtgtggcaatagttctcatgtgcaagaaaaagaaaaaaaacacacaataatgtttcttacagaagtactgttcgtctatctctgttatgtaaatttataaaccaaacatcagttttgattagagttcttttttaagaaaatatatattcatgattattgaaacgaaactaagttttatataaaaaaaactatattgtactaaattaattagagtcttagaccactttattttagttattattaagtttatttcaaaaataaataattcacggtagtagttcgctcaataatatataatcgaatagggccgagaagatggcatattgtactgtcgggaaagagaaaatgaaacctaccgatcgttgctcgttgcttacaagtttagtacgaactacgaaaaggacattcgaaaaacggtgtgaatacttcaaataacagcctagtaggaaactgtgttgttttttcagcttaggaagaaaagcatcgatgtgtcgatttcgcagactttctttccaacgtaaaaacaacttctttgtcctatatatattttttattttttattgtaattattgaactgctgccgcgttttcgtttaccctatacctagaccaggtgattataaaattcagacaattcgatcagcagtacggagtaacataaaagccatttgctgtctaatttgatatatgaatgagcatttctttgtagaaaaaaaatgtagtgcgcctgaaaacagggcaaggaggtgaagattgatcgatgaaagcaaaggaggggtgatcaaacaggtacctgaagcaacgcagacagatggttttctctcggcggacagaatgtctcgtgtacaaggcgaagaaaagcattcttgtccgcacgaaataggcaaaaaaaaccccggcattaatcagcacgaaatcggcaagcaaaccgcgcgatggtcaacccccaccctcgtgctgatccggggtcgtcgtagcagctacgctacgtgcataccttggctcttctacgttttaccgctgaggcgcaaaaacgtgtcgcgaaattttcacgctgcgccgaaccgtgtttcgactcggagtcggcggctagtcagccgcgctcgtgcacggccaggccacggggcgagttggatttcgtctaggtacgtgcgtggcccgtgtgccggtctgcgtggctatgcgcctatgcggtacgcatcgctgcacgggccgcgtgcagcaggtttcgagtcagaagcctgcacgcgcgtcgcggacgagcagtacgcacgccgacgacgcgcggggattatcccgtgcgtgcgtagcgtagggtgcgcacgatttcgcggcctccatccgcagcagatgaacgggccgggggcactcgcgctggcagatttgcggggagcgcgtcgcgcgcggttttgtgaattttttttatttatacttttttttattaaaatatttacaaaaataatttgttgttttgaaaatttacaaatctaatcgcctgccgccctttccacagggcggcaagggacctaaatgtaaattttccagcataacttgttagctctatgattttacaatttaaaattatattatataaagtcagatgaaataaaactttatatcaaaagtgtagagctcaaggagatctacaattttgtagttaataactttttcatttaagatgtccaaatattcgttacaaaatataaaacacattttaaaaaatctcagatctacatttcaaacgacattggatggagataaactttatataaaagttgtagatcttgatgagatctataactttgtagtttatcacttttccatttaaaatcatttggagtatcgaataagcattattagtttttaagcaattaaaaccggtgggaagggtttgaacacaaataaaaattttgtatttaggtcccttgccgcccttggagagggcgatttttaaaaatcacccttctagagggcggcaggcaattagatttgtaaattttcgaaacaaaaaattatttttgtaaatatttttataaaaaaatgtataaataaaaaaaattcgcggttttgttaggctctcggcccgtgatttttgcgcgggccgtacgtgcggttgtcgtgtctgctttgcaacgaaactcgttaggaataaattcatcggtggttccttaactttgtcgacgaatctgatttccgtcctttaaccgaaaaattaaaccaaatacaacagatcccccaactatcaaaaccggagcagatgagattcctcggcggtttagatggcggttttggctgacgtaaatcctacgtggctaatttgaatcggtcttcatctaacatggcattgacatgacgcttacgtggcaattcgatatggaaaaataataaaacccatgggacccacatgtaagttttacacacaaaataataaaaaatagtggaagccatatgggccccacatatcatcctctttctcccctttatctctatcctctctctcaatctctctgatgggagaggagcagggtgcgtacgtgctcagtctattcttgccaccgacctgctttgtcggccgcccgtcccactcaaccggccggagatagagaggacagagataagaggagagtagtgaggatgatatgtggggctcacgtgggtcacactattttttattattttgtgtgtgaaactaacatgtgggtctcatgggttttattatttttccagattgaattgccacgtaagtaccacgtcaatgctacgtcagatgaagaccgagttaaattagccatgtaggcgccacgtcagtgaaaacctccgagggatctcatctgcaccggtcttaatagctgagggacctgttgtatctagtttttcggttgaagaatgaaaattggatttattgacaagttaaagaaactcgtatgaacttattctaacacgttacagccggtgcagcggccacctcggtgtgacggcccagggcgtttcgggctttcggccccgttagctatctggaagactggaactggaacatgttacgtcaactgcacagttgatagcggctgctcgaggctcgcggacccgtcagtttaattaatcatccgtctgatttgggaatggagaagatactctgacgggatgagatgacaaccgatcgatttttaagggattggatgctccgactaccgtccacgccatagaatctcgcccaccacataatgttacccaacttattgatagatgcttcttctgaaatggattattaatttggaagtttttattttctgtacgtagataatgggattgtcctaaataggagtatttctttaagctcaacaggataatccgattcttgtgctaggcattatgagagtttgtagctctgttaaattcagaaagagaactggttagatagtatagctattgtgttggacatctttatggggaaataaaagtctcttccaaactctgtttgcttggatattgtaaaaaaaaatccattccagcaaaaaattgtgtgtaaacaacgaatatgagcagaactgctcagattcacagcctgaaatttattccttttcaacgaagaaagtatgtagaatatatggtggtgcggaaagacacttggcataacaatcttctctactatgttatagccaatcgcgttaggatgctagtggacgataacattacataactaatggttgttttatactatctttgttttaaaatgtagctacctactatacgattggatacaacctatactacgaatctgaacagggcgcatatctggtttcataatattagaaggcatccaatcaattatactatataactacattttgaaatagaggtagttctatgctatacttcaaatgctagcacctcaagagattagaaagttgcttcgtcagtttgtctcccttgggccatttggtatgctccacagtctacgcgagtaggggtgtaagtggctaaccagcaaaacccacttataggctaaaataagccacaaacccgcttattttgatctataagggcacccacaatggttatctatatgctctctacaagagatccatgtcagcatatttttctacttagaagctattcaatgaagagagagagcaaagctatctactaacttatagatagtctatagagaaaaacgaggcaatgcataagagagatatagataccaatgtagacatactattaaagtgatttactattaatcgagtctattgctgagatgtacatgttttatatagagtgcaccttactttaccattaattgcgggtgctctaagtgggtttgcggctaagcacacttccacccctacacacgaggctttgcatgacgacactagcttgcaactgatcgcgtgagataagatcactgcaaagatgacaagacggctctgctttggctggcgggaaactacaagtcagaggacatccgaccaatgctttggaacttttgaagcagatcagatgcgcgcagatggcgaacgggctccatctgtccgtgacgagtcccgtgtcgctgtccccgtgcgttgtcgccgtgcctccgccctcgcggttccttggtccaaaacatacaggactcggcagtgcggccaatgttgcactctcctgtgccatcctctcccagagtcccagctcgatctgtaatctagactctagagtgtgcactcaccttgccgtttggccattatcggtacaacttgctgattataaaccataatattattattgatacataaaaaaatttataggtgaaacttttatgtatatattcttaaggattaagcatatgtttggtttttaatgaatgaggtgggtcgggttgtgtcaaatccatatttaggatgttgagttggagcagtcccagaaaaataatagtattcttcaaagatctgcgccagcttcacacttaaaaaaatggtggaacaatccactttctctttctcactgacacgtgagccacaccctcccatctaaccctcccatctataaaaaacaagtaggactactcaatccctagtatcaaacggataatgggatcatcctattctaaaagaaaatcaggatcagtacgtacaggacgcttagataaacgaaaatcagggtttatctttttttttatggagggagtacgcttcaatgcggcaacaggatcagtacgtacaggacgctgatcgatctgatctgtgcatgcatcaatgcatgcttctgacttctgagggctcgcctaggcctcagcctcaccaagtttgatccgatccttgcattggaacgataagctcatgcatggtgtccggccgccctcgatctccctgtcgacagcaaacatgtggaggctaaactactacggagtactcctgttcttcttgtaataaacaaacaccgttactttttaatgatgtttgaccatttattctactgaaaagataactattagtttttttcgttacgatatgtcactactagaaaaagcatttttctcaacgtaggggtattattttcgtagtcggacatgacctttgaagccaaacgaccgcctacaaaaatataaatcggggtgaagttagctgtccgcctgcgaaaatagaccacttaagtggcgcctgcgaaaatcattttcgcaggcggaccacttaagcaacgcctgcgaaaatcaattttcgcaggcgcatgttaggtggtccgcttgcaaaaatcgtacctacctgcttatcctctactgccccatacttatcctatcctcacctatcctgtccaccactcatttgcctccccacctctctctctctctctctctcacttagaaaaaatctcctctccacccccacctccgccgccgggctttcttcccacctccgccgcggttggctccatcctcggctccccacctccgccgccggcgacgacgacgaccgcgacgcccctccgcgcgccagcgacaacgacgaccgcgacgccggctcccctcctctccccacgtccgcgcgccgccggccggctccctcctctccaacgtgcatgcgctgtcggctccccacctccgccgccgggcggctccctcctcggngacgacgacgaccgcgacgccggctctacgcgctgatggctcccctcgggcacgacgacgaccttcgcgccgccggctcccctcctctccccacgtgcggcgngggtgactccctcctcgggtccccacctccgctgccggcgacgacgacgaccgcgacgccgcctccgtgcgccggcgacgatgacaaccgcgacgccggctcccctcctcttcccacgttcgcgcgccgccgggtggctccctcctctccaatgttcacgcgccgtcggctccctacctccgccaccggccgggtccctcctcggcgactacgacgaccgcgcgccgccagctcccctccctctccccatgtccgcgcgccggcagctccctcctctcccacgtccacgacgagcgacgacgacgacgacggcgccgacgcagcagctcggctcctccctggccggcggcttccgtggtgaggccggcggcagcgcccgtgtttttttttattttttttgagatgattttcgcaggcgggccacaggtccgcttgcaaaaatggtctattttcacagtcgatgtgatagcggcggtcctcctccccgcctgcgaaaatggttttgggccgcctgcgaaaatcctttttctagtagtgtgtttcacaattaaagaaacttttaccatatgtactttaatttttaataaaatgaatggtcagaagagttaacggtaccatttattaaaagatggatatagtactatcttaaatgggggatgtctttcagctgatacaaattgaagtttggatacgtggaacttgcacaataactatgcgaatgattctgttgtaaaaaatattccagtacgttttaggctagatcaagtactacgttaggttaaactggtttttctctaaccaacacaagtttcataaaattaaagtttgtattaaaaaaactgtacaaatgattctctttttgaaaaatatttttgtaagctttttttttcttctctctctatctctaaactatcatatagccacttggccagcaaagctagctgtaagttatactatccacatgttattcagagatgatataccagatatacattttcttcccttttacccattttctttttttctttgacttgtttatttatcctttctatatataattgagcgtgtataaagttttcttttatatgaaaaagcaatagagttataatggtgaagtcattgacacaaaacactatatgctattatttgaatcctgttgcctacaattatatacacacaagtgccctttcattaaaaatataggtcatgtttagtggagcttaaaattctgagaattagctagttgatagccagcttatgagaatctaaaaaagctgggtttccagcttctggcttctattttgttttctggattctacaaatacaacttctcataattttgaccaaaagctatactgtttggggcagcttctgattctgggagaagttgcagcagctagaagctccccaaacaggcccatagtagggttcaccaatttaccctagattcttcgtatatggagctttgtgttaaagagtcatgttatatgtgtacatatgtgatgatgatccgtgtgtgtatatatatcttccatataatcggaaaaaataagttttatgttacctactcccccgttccaaaatataatcattttttatttcaacacagtcttcaagatgctacttaatttgaccaacaacatctataaaaataatatgttttcaataaaatgttttacatattattatagtttgtttaatgataaatctagtaacatcaattttacatgatttgattttttaaaaatattttactattaatagtcaaagttaaaaagatttgtcttaccactattctaaaaatgattatatcttgggaaggagggagtaagagctaacacctctttttttccttgggctgcatgcataaaagaataataaacttaaggtatagttaggaactgaggacttcgtgattatatatgtgcgtggaaaactctcctcgatctgcatgtataaaaataagataaaacagaaatctaccatatacgtaacacacatttacgtgctcgcgaagagcaccgattgtttttggtgcgagtgtgcgttgaaagagaaatgattcacgatgatttaaatatttgttttcgcgctattgattggacatccgcaaggtacttattgttgtccacgtggtcgataatcacgctcagcacagtggcagagctggacagaaaatcaaagggggacagctggcttttggcagtttaaaaaattagcaatttctctttttttttcatgcattggtaatacataaaagcgaatagtttgcaaaagtcgacgacaaagatcagctacagacgtcagattttaaaatttaggattagtgggtacatcaagttcatagtgacgtacggagtaattgacatctcaaattggctctctcttgttctaaaaaatcatcaggatagaactttgaagctagagagcacactttatcaatgttgaatgaactgaataaatcacttggatccaaagatgtacacaaagtgagaagctctgttgtttgttcactgaatctgctatgatatatgggggtaataaaaaaatttgtttttattgggaggggccatggcccctgccagccccccctcagttccaccactgactcagcatgaactgcatactccctccgtaatcataaagaaagttgtttagaataatatttaagtcaaacattgatataaatcataaataactcttgtcagggttatggataccacatacctaatagtagttgactaaatctcggcaggacccaccacataccatgtcttatatggaagcaacctgcagatataggaggagttccggataaggaaagacaaccagtgttctacatggaaacgacaaggactactcggattgtattcatattggtttccctagttctacttggacaaggggacacctatgggtataaatacaaggccccctaggaggagaggggacaataaacactcaccatagacgacacggaacaatagatcaagacagaagatcaacatacaagccaacatacgccaagacaagacgctggatatcgacatcagagatatgcctggatcggccctatccagtacctacagaggccggccgtagggatttagcgctgtctctgatatcgtcgggcacgaactcgaggaggaagactacccgttgttgactacgagttagaccttcagaccgccatatcgacaacagttagataggctatcccaaatattgtactggtgtaattatggtgaataagagcaataccggtttcggccaacaggatgtagggttattacctgacaattcaggggcccgaacctgtataaaaatctctgtctccatctcttttacctcagtctcgtatataccctagtaccaacgatccccatactatgcaaataccggaatcgcgacatcaaacgtcgacatctcttaagtattgagtttaaaaatgtaaaaaatatatgaatagacttgtcttgaaaaatactttcataaaagtatacatatatcacttttcaataaatatttttatgaaaataagaagttaaagttgtattttggagaccatgtcgctgtcctaattaaacgacttataaaacatggtagttgatacgtactcatcaactatagagaaatgcgacatgcatttgtgtagactaattatttggataataagattgtcgaaagtaaatcaggaaattaatgtcactgatgtaacactgatgtaacttgagttggcctagatacagattaattattaatgtatcggatgttttttttaatatgtaggagatggttttatgttttttttataaatttaatcaaactaaaaaacgttttatttaagacaaactttgtttaatttatgttgaaaattgtgttgcggttttttctataaatttattcaaacttgaaaacgttcaacgtggagataaaccttaaatattttacattttattttaaaatggagagagagtagcctacaaacaatatgatagattaaatgcgcatgattctcgcaaaggaaaactgttgtttattgaaaaacaatgctccgatccagtacactcacgtggaaaattcggcaagaacagtggcactgaggcagtgttacaactaacgtgttgcatgcatgcaagacaaccaccggcctattaaccgtccggagcagggaccggccggccgggcggaagcatatgaatttgaagaatatgtacaaattcaaacttaaaaattactatatttgtttcgacaggtttttaatagtatttggccgtatttgagataacttaagattctgaaaaataactgatgagaatcttaaaaaaatggtttcccagcttctagtttttgattcattttttaaactctacaattacatattcttaaaatctaggagaaaaatattgtttggaggagtttctaaccggagaagctgcagtgtcagaaactctcctaaacaagccctttaattaattaactatcttggcaactcctaaaattttaaattatggcttaattttttatatgataaattggcaagcgattaaacaaatccaataattcgacgacgccggtatttcaaacactgttgcaagtgtgggcacagtgcgccgctattcacacagagatgcctctttccctatatatatatatcgaccgaacgcaaagaagcagctgaactagcaagtaaacctgcggtgtttccaacacaacaaacgctacaacccttgtaggtttcagaggaaaacacacgacacgagccggaggcaacaaggcgctcaggtccatggagcctcacgtcctcctcgtgtccttccctatgcagggccacgtcaacccgctcctccgcctcggccgccgcctcgccgccacgggcctcctcgtcaccttcaccaccgtccgcctcgccgccggcggcggccgcctccgcgacgtgccggaggacggcgcgtgcgccgacgtcgggctcggccgcctgcgcttcgagtacctgcgcgacgacgacgacgacggcgacgagcggtgccagcagctggcgcccaacgacgtgctgtcgcacgtcacggccgtggggccatcggcgctcgccgagttcatcgacggccaggccgacgccggccggccggtgacgttcgtcgtgaacaacatcttcgtgccgtgggcgctcgacgtcgccgccgggatgggcatcccgtgcgccatgctgtggatccagccgtgctccgtgctgtcgatatactaccacttttacgagtcgcccgaggcgttccctaccgccgccgaccccgacgtgccggtcgagctccccggcttgccggtgatggccatggtcgagctgcctttcatggttcgtcccgagtacgcgcagtgcctgtggggcgacacgctccgggcgcaggtcggggcgatcaagaggacggtgtcctgggtgctcgtcaactcgttctacgagctcgagcgctcggccgtcgacgcgctccgcgcgcacacgacggtcaagctcgcgcccatcggccctctcctggagcatggccatgacaacggcggcggcgacgacggcgcgccggcgccggcgctaggggccgaggacaacgaccgctgcgtggcgtggctcgacgcgcagccgccgcgctccgtggtgtacgtggcgttcggcagcctcgtgaacatcggccgcgacgagacggcggcggtggcggaggggctcgtcgccaccggcaggccgttcctgtgggtggtgcgcgacgacagccgcgacctcgtgccggaggccgtcctcgcggcgtgccgcggcgacaaggccggcaagatcacggcgtggtgcccgcaggggcgcgtgctcgcccacggcgccgtcggctgcttcgtgacgcactgcgggtggaactccatcatggaggcgctcgccgcgggcgtgccggtggtcgggtacccgtggtggtccgaccagttcgcgaacgccaagttcttggtggaggactacaaggtcggcgtccggctaccggcgccggtgaccggcggcgagctccgagcgtgcgtcgaccgcgtgatgagcgggccggaggcggcggtgatccggaagagggcgatgcattggaagcgagaagcggcggcggcggttgccgacggcggttcgtcggatcggagcctccaggattttgtcgaccatgtacgacgttccaaaggaccggaggagctagctcgattagctcaagacatccagattatgaatgggccggtcaatccggtcctagtttaataaatctagcacagcccatgtacggtcatgtgggggctatgacgctatgtagtgtgttaatctatctactccattaagttgctgtcgagtctaatccttgttatcataggattccaaggcttacataaaaaaacggtgtaaaaaatgtaagtttgaagtttgaacactccaagtcaaacacgattacatcgtattatacgaattcaatttcgtaaatcacaacagatcatataaaaattgggaggtcgctgtaccacaagatcgcgtccggtgagatgacaccaagcagattttgagacctatcgatatcagaacttgtaccttattggtaccgctagatatccgacaggtactaactgatgcccattggtacccgctaatacctatcgatactaagaagatactcaatacgagacttgggtacccccatcagtatcaattgttacctcaatactagcgcgaggcttcttgatggcacgacgaaggagcgtgtatcccttcactggcaagcctccttctctcccccccttcttcggcaactcataatgtcagagaggacaaagcttgagacaaaacaaaccatggcagaaagaataaggagacgatgtgtagcctacctctgatcttcttgctgatgtcaatgtagatacacacacagtgtgcaggacgatgacgcaccggtaggatgcggagagctccttgagaagcgccgcgagtgggatatggcttgcatcatagtccattcgaagctattggtgctaggtgctagctggaccatattcggggacacaaccaacttcaccacgcggagcaagtcacggaactagatatagttggccaaaaagcctgaaacccgatggcccggcccacggcatggagatttggcccaacccaagcgcggcacggcccgcctattgggtcgtgcctgggcctcttccttggcacgacgtgctggccttgcatggcccggtccaataagagggaggcaaaatagacttattccaaccatataagcgtaactcaaagagatgagggatgcaaaatagacttgcttgaaccatataagacacggtccaaagagatagggtgggggggggggcaaatagacttattacaaggtggagcatagtgagcttgtcgtgccttcagaccgacccggcacgtttcgagtcttattgagccgtgccttagccgttggtgtagcccgtggcccgtgggcgggcacaacacgactaggcgtgtcggttggacagtgcctgctagactgatctcaggccgtgcctggtcatgcctgggccgagcggtacatttgaccatctatagaattagatctccgcatcgcggagctgctcacaagggttgtggtgccgctggaagagagctctaccttgagctcgagcctaggagagaggaggagggatgtatgagagaagagggcgagcagctaggtataggtagctcgtgcagtggtgcaagagttcaagctcaagttttcgctgttagatccggcaacaatataggatggtttggactcaacatcaataggaggttaaacgacgtgcacggtacaaccatccgcccatgcacctcttcctcctccgatgccactctagatccctagctcccgcccatccggttgccgacgtccacctccaaaggcagtggggcagcaacggcggctgcaagccccggctctagctccgactcggtgtcctgctctaccttcgccaacatgtgcgcgtctatgctgcgcgtgcgaacgatcgacacaatgggtaaggggagtgggtgatcccgtgccgatgccgtggacgggataccgtcccctaatattcaggataatttttttgaaataatatggacttaacagttataaaacatatatgataaactagcccatgcgaatatgcacagcgcctttatatagtacttgaatatataatgtgatgtataacaggagttacgtataatttgacacggttacatgctgaacatggagtacaaattgatgatcagggtccatctggatcgtgcagacgcggacgccgatactaattatttctcgagaacttgaacgctgcgagagagcaaattgtcctacttcttgcacaccaccccgacgccgtcgaggccggtggagcacttgacgtcgaccagctcctcggaggcaacggcaacggcgccggcatcgccggcgcgcccgaaccgagcgacggcgcagtcagcggcgaaaagacccgacgaggtgaactgcttctcgcctcccatgacgggcatcttcgcggacacgtcgagccggttcacgtagctgctcctgtacgtctggcccagcacgccatggacgtcgtcggtgagggcgtagaacttgaacgccaggtcgaggtgggcgaggcagtcatcgtcggtgaccccgtacctgtggatcctcgagtcctccttggtgatgggcaccacgttcgcggtgatcttgaacacgccgtcgagctcgacgaggacgccgttggccgccttggtccgcgtcacggacaggccggaacccgactcccacctggcgtgcgcgacgcgctgcagctgcacggtctcgccgtcgaagacgacggcgaggcggtcggagtcgtcgtcccacacggccgtcctgcgcgcgccgacgtagaggcggtggccgccggagaactgcacggcgatcgcctgcacccaggtcgggtccctcttgaggcccgggacgtggttgccgatgaagtggccgttgatgtgcaggtttgcgtcggagagcaggcagaagtcgcggtctcggcggccgtggaagtagaacgtgttgccgtcgccgccgatgaaccgcgggtcctggcacaccgcgcccggcaggttgcagtctgcaacgcacgtacgcgacacgtacgacacgacacaaaaccattaatcaaccgtgcatgaacactagctagctggttaacgtgcacagatatgcacttaccgcatacggtcttgcaggtggcgcagtccatgtggcaggatttggggcacctgctggggcagtacgccggcgaggtgcacgtggggtacctcgtcgtgttcgtgcagtagaccacgtcgctggccggtggaggaggcgatgacaccggtgggg

SEQ ID NO: 13027 - DNA, 548 bp, Oryza sativa
cccctttcccgttgagtttcgtcgccggaattcgcatcccttcgcgctccggtaagttcaacctctaccgccgccttcggccatgaatgcgggtcgccgtggttcatctccctctctctaatctctctctctcttccttccttagggcaccccgaagcccgtccgccggttgccgtcgtcctcccgtggcttgccgtcgccgttcgccgtcgtcttcctccgcgccggccaccctcggtgaggcttcctctcccatctattcccctccctctccttccaagccgccgtttagcgccgccgccttcgcgtcgcctttgcgccgtcgcctccgccgccggttgctgtcgccggcaacgcgttcgcgcgcgcgcgccgtcgccatcgccgtggccggtgggccggccttgagccaagccgagccgggtcgccgccgcccatccgatcaaccccgagggtgatctgggccgtcggtcccgtggaccggcggtggaccacccgcgtggtcccggtccacggtgaaccgtttccccccttgagtcgctgccgag

SEQ ID NO: 13028 - DNA, 551 bp, Oryza sativa
aggactgaaagtttttaaatagcttttgcgggttttaggctcaataaggcttgacaaaaacttttaagaaatcagaagctaagtatgaaacattgggcacagcataaattcatcagtattgtacaaattgtgcctccatcatcatcatcatcatcatcagaatcattgtcattacattacatcaatcagtatcagttttctcatcatcagagtcatcaagaccagtcagtcgaagatcggtgtcctgaaatctctccactacatcaactgctatcttgtcagcaaccttctgtgcatcattgataagatcgagaacagcttcttcgcttgtcccgtctgcaaagccgtcaatggcatcaatgtcgatttttgggtaaagggacttggtcattgctaacgccagactcgctcccatacttccagcttctttgatattcttgaaatatgtatccggagcaactctcagcttgtcgaagatttcggaagcatcaagtgtactcgggccattgttattgatgaacatcgcttggacgagtggggtagcaacatta

SEQ ID NO: 13029 - DNA, 559 bp, Oryza sativa
ctcggtgaggcctctgggctccggacaaattttggaaaatgttcaaccctgccgattcagtgctcagaggagttgcttgctgggatacagccggaattgccctgccatgttgcatccttcccctgcaagtacttaggtctacccctttccatcttcaggttgaagaaagaagacttgcagccattcgttgacagcatagcccggcggcttccagcttggaaatccaaccaaatgtcgttgataggtcatgtaacaatggttcagtttgtactcagtgcaatcccaatctacctgctgattactatcgatgcacccaagtgggtgatcaaaggaatcgacaagatccgacgcgggattctctggcaggcaaggcgcaagccaatggaggttgctgccgggtcgcttggtcgagggtctgtgctcctaagaactatggcggtttagacttgccaaatctggagttgatgggtattgcacttcgctccagatggacttggctacaacggacttcactaagtaaaccatggcaaggcctagacatcccggggtcgcaaaagga

SEQ ID NO: 13030 - DNA, 501 bp, Oryza sativa
cattcagatctttgtgaaatgaatggggtgttgacgaagggtggaaaacgatatttcatgacgttgattgatgatgctactagattttgctatgtgtacttgttgaaaacgaaagacaaggctctagactattttaaaatttataaggcagaagttgaaaattaacttgatagaaagataaaaacacttaggtctgatcatggtggagagtatttctcaaacgagtttgacttattctatgaggaacatggcattatacatgagaggacgcctccatattctcccgagtctaatgggattgctgaaaggaagaaccgcacactgactgacttggtgaatgccatgttggacatcgcggagctacctaaagcatggtggggggaggcattgttgacctcgaatcatgtgttaaacagagttcctaatagaaataacgacaaaacaccatatgagatatggattgggagaaaaccatcactttgttattcgcgcacatggggg

SEQ ID NO: 13031 - DNA, 596 bp, Oryza sativa
ttgtcctcgtcccacacgggaaccctttcccttcttccacaacagtttaagatcttcgaccagtggtcttaggtacacatcgatgtcattaccaggttgcttggggcttgaataataatcggcatcattatgtacttcctcttcatgcatagccaggggggaggttgtagatacacatcgtaatgggccaagtgctatggccgctgctcatctctccaaaaggattcatgccatccgtactcaaaccaaaccgtatgtttcgtgcgtcctttccaaattctttaaattttctatcgatgtttcgccactgcgaaccatcggcggggtgtctcagcatcccgtcctgttgacgctcttcagcgtgccatcgcatcattctagcattccccttgttcctgaacaaacgccttagccgtggtcttataaggaaataccacatcaccttagcaggaattctcttctttgttagctgcgtcaacttctcctggatcgtctcgtctaatcttgtatcgtagtgctttgcaaatagggcatgcttctaggttctcgtactcctccccgcgatataggatacaatcattcggacaagggtgaat

SEQ ID NO: 13032 - DNA, 7877 bp, Oryza sativa
cgatatactgaagtagagggagtaatcttacttcgttttcagttactttttttcttgtgacgtcgaccggagtatggaaactatatatatggacaacaaaaacgaaggttcagaaaattattatacctcccaggtgctgacagacaccacatttcttgcaagggtcgaactaaccatacaaagcaataatcgtgctagaaatgttctttccgatcgaccagacgagcaagcttagaattgatcatgcataactttattccgtatggaacaataatgttccaggcgtccacacaatacttcagctggttccgaacccaacatctaaattaaccgtgcagtaataagcagcagttaactggaaataatttattcgtgtaacatgtaacagcactgtactggtaacatgtagagtaccttggtgcttaatttattcgtgtgctggccgatttcacacgttaattgcgtggcatcgcgcggagcagcatggtttccacggtgagtccagggccgaaggccatgagcatcccccactcaaggccttcccccgccgtcgccatccctcgctcctccgacctccttcgcatctcctccatcgccaagaagatggtggtgctacgcgtgttgccgtactgcctcatcacctccctcgtcaccgccagcttcccctctccgaggcccagcctctcctccacgccgtccactaccgcccttccgccggcgtgcaacaaccagaacgcctcgtcgtagctggtgaccgtcgtgcctaccccgcggaacgcgctctcgaccacgccgccgatggcgttggagacgtggagcggcaggtcgcggtgcagggtgatcaccaccccttcctgctgcaccttcaccaccacagcgtcgtccgtgccgggtatcacgtcctgcgacgcccggaccagctggaacacggggcgctcgccggtggacgacgggtggcggcagcaacccaccacggcggcgccagcggcgtcgccgaacactgcctgggcaacgaggttgccaacgtgggactcagagggcccacggatgatcagcgacatcacctcggatgtcaccacgagcaccctggcgtcccggttgctctcggcgatgtccttggccacgcgcagcgccgtggtgccgccgaagcagccggactggtagagcatgacgcgcttggtcgacagcgggaggccgaggagcttgatgagcgtgacgtcagcgctgggcaggcaaccggtgctggtggtggcgaacacgacgtgcgtgatgctcgacgccggcttcccccagttaccgatggcgttgcacgccgcctctgcgccgagccgaggtatgccctcctcagcaacctgctgccgtacgttgagcgaggtggacatgtacgccgtcaccgacgggttggccctcagccactcgtcggagatgtacatgtgccgcttctccgtcgttgtcttcttgcctacattgcaatgcaatcacattattactatataattacttgggcaccatgaaaatctagcttatctctctcatatatatgtgtgtgtgtgtgtgtttgatgattttatggcagttaagtttatggatcgatcgtgacagatacagaatggtagtttcgcatgcacttacagatgtttgcaaacttggcttttagatcgaccaagtgattgctattggtaatctcaaagtaataatcagggaatgacttctgctcatacacatgcaccggcacagccgtgccgattcccaagattgttggcttgttgctctcccgccggcacgaggattgttgctcaattcatgtgtcaactccggtgcccccgaggatcccatcaggcagtattggagtggacggcaactactctaagaggaaatgatgtagctatagctttgagatctctggctaccaaagctcggtcttatataggcattctttgatgatgacgggctactgtatatcttttttacaactagctaggacctcgatgctacaagaaaccatctataattaaatcgttttgattaagacgctttagagcaagtttaatactatagctaactactaactctaaattatctatatttaatttaatagccaatttatccaatagttacctataacatatagtacacaattaatacctagtcccacgtgtcatacatatatttatcttagagcacatgttgcacagctggctgtaacccactacttttctctctcatcatttatcttctcaaaatatgtttatagctggcttatagtctgctattgtacctgctgttatatattccccctccatctaaaaaatttgttagaaatattatttcagtcgctaaaacaaaaaaaaataaattaattaacttactatgtggccatattcttttctgattaattaagatttagattttatctcgactttcgttagcacgttttttaaattattaaacggtgtgttatgtgcgaagactttttatatagaagttgttttaaaagaattaaatatatcaatttgtcaagtttgtaatagttaaaacttaattaatcgtgggctaattgctttctattttgcctatactaattgcatacgcgtcaatcaaccgatccgacacaaaatataaaatcttaacaaaaacgaaaacaacccgataaagaaataaagtaaagactatctccgataagtaaagactagtatctccgataagtaaagactaactccaataccacgcgcgccgctgcatgcgcccaccatatatacaggtctcagctcttccatgcaactagcaaactagtaccaaatccattgtctaatcacatcctgcacatggctcagagagtatctccaccaagcaagagctcgagtaccaaaactctgcacagcaagcttctttatcacagctacaaccacatcgagactgcatatgcatcatctttctttttaacgacccgtacgaaactgtgcgaagttatattgatagagcagaaaaaaattataagattacaaccctgtaaggtcgtaaccaggaaaaaggaaaaaaatataccaccacccacacaccgatatcgccaacacaccagcccagaagaaggctagcatcggaccggctgtcactaagcatgactgaccgccactagaccaataaagggacacagaggagatcgccccctaggggatgccaaaatgacgtcttcaagaagaaaggcgacggaaaaaccgccgccgccgtccgtcgggactcaaaggagctaagactgggctttcgcctggcaatcacccttaaggggtgagatagcacgacaacgccctcaggagggggatgacatcgttgtcggtccggccaaggccggactaggttttcactcgccgctcaccacctgcgaatccacgtctgacacaccgatgctccaccaccacacaagctctgccgacatgtgggacccctacactggcgtcccccgccggctagccttcgggcaccgaagaccgcaccacacctaccgccagctcctcctcacacctaggtagccttctccactgtcagccgcgcctctcgtgctaagccggcctcctccaccggacgcgcctatcgcgccaatctggccttcctccatcggccgcgcctctcacgccaagccggcctcgatctccgccgcccgcgcctctcgcgccgagccgggctccgctgccatcggctgcgcctctctgtgccaagccggtctccgacctctccactaaacgatgccacgctggctgttgacggtcgttatcgatcaattttgatcgttaatattaccaaaatagaggagaactagtgatgcttgcaatgcatatacatgtaagaataataatattccactagtattaggtttactaaccttttgcagagaataacaatgaagtcagacgaattggacgatgtcgatgatcagacgataaatcaactcagacgataaatcaatcggacgatgtcgacgatcagacttatgtatgaatgggccaagaactcagaattgacacgatgaattgggccaaaattcacaagtctacgaagtgaagcaacggaggaggccactagcaaaaacttgggctggttggtccggcccctggttcggccgaaccagtgggtttgacctaacctcccgtggcgctgatggatgcagggttttgatggacagctgggattgatcaccaatgacggttgcaggatattaccgaccattccaaccatcataaccgtcattacctgcctataaaaggagttgccattcttacatcacacacacacctcaagcaagagctctctcatattctctcaagttagtttagtgttattaagctagtggaatagaaatagagtagaaatcgggagtccgaaagcctttggaagagttcgggaatggctctagtatctttccttttctcttttgtaagctttgtactattattagaatactcttctttatacatttatgatattgaaatactttccaagtatattaatgcctactttaaattatgttcatgttatactgaatatgttgctagcttatatgggagatgctttggtgcgggtataatgtttgcttacgcaattactctatgtcatgacgatgatattagagtagtatctggtagtttagacgtcgcgtctggattacgggatattattatttggagttatatgctgcggatgagaggtgggccactgatggtgatagctcagtacgggtattcctccgcgcgcgtatataatcctaagttaattccctggggagggtactcctccgtatttagccccggttgtatggtcatgacgggctgtcgtaaggaactcggcagtcaggggcggcttctctccacatgatcttcccacgggataaaataaatacgatacccttggaaaactctcgggtgaaatgctacaatggtatatccgtgcgcttgcggatgaactctgtaaccataatataccaggagtaattctgcgccattgctgggaattatatttctagtaatatcattaagaaatactaacaagcttttctggcgctgttgccagggaagattcataatagagattacctgacctaatactttctaattacctttgtataatcatttccctttgcaagctaaccttggttgtttttacttttgttgtgaaagcagggtagtacatgactgatttcaacttgccggaaaatttcaaagaaaatccagaagctttcttccagagcgtcaggccgtgagccactgctctgcagaaaactctactgacaaagaaaccagccgtaccagcgccaccgactttcaagactatagctgacaagactctccatgagttcgctgctccctctgctgagaatgtggccattggaccacagatcaacatgggagacatggatttcgacttgaagtccagcctcatcactatggcgtaggctagcccgttctgcggcaagcctaacgaggatgccaatgctcatctacagcagttcctggagaactgtaacacgtacgccataaagggcgtcagtccagacaccgtcaggctaaggctgttcccggtttccctcctcaggagagcgaagcagtggttctacgctaaccgtgctgctgtcaacacctgggacaagtgttctacggtattcctctcgaagttcttcccgatgggcaaaaccaagagttcttccagcagacaagggacgaggccattcctgaagcatgggaacgacttcaagagtatgtggccgcctgtcctcatcatgggattgacaactggctaatcatgcagaacttctacaatggactcccatgtcccgcgatcacctggacgtggcagctggaggagctatcttctctaaattggttcgaggagccgctgatttaatagagaagatggtctccaatatgggttggagcgaggaacgactccagacccgtcagcgaggcatgcacaccgtcaaggagacggaattacttgctgccaagctggaccttctcatgaagcgattggacgaccacgacaaacggcctcaaggcaccatcaaggccttggactcacacgttacgtgtgaggtctgcggcaacatgggtcattctgggaatgattgcccagaaacctatgaggaggcgatgtacatgggcaacaacaacaacggttaccatccacaaggcggtcaagggtggaactagccacgcccgtattatctaggaggtaataacaacggtaacttttctaaccaatcctccttgaaggatctagtttttgcgcaagctaaaactaccgatgctctaagtaaaaagctcactgccaatgacaagatctgtcacaccctaaaaatcccaaatttataaattcttgtttaagtggaatttttagaaatgatttaaaagcctagaagaaaagatctaattttaagtaataaattccaatataaaagtgggctagataaaattttattaaatacttctcttgattctatagttcctagatttttctgggatttatttgagccaagaaagtatttttaataaatggaattgcatttcatgaataatttaaaaggaaaaaggttttaaaatccttcttttgaatttgggtcgaaagtcagcccaagtctctcattcttcccggcctgtgcgcgctggcctagtccgccctctctccctcctctctcccgctgacaggtggggggggggggtcgtctgcctcctcccgccgccaggcgcgccctagccgcgcgcaagccgccaccgccccttccaaattcggttgcatctttcccgatccgatcaaattgataggggggaaatgatcccttcgatctcctctatcttttctcctatagaaactttatctaattttgcttggaaatcatcggattcgagctcgattcggatttgatttctctcctctaaccctaaaccttccatcgccgacgccgaacgtcttgggcctagccgctgccccctagcccctataaaatgacccccgagacctccttcgtccgccgccaccttcgccttagccctccaccgctggtagagctctagccgcgttagcccgtgcgccgccgcaagtccagccgtgcgctgctgctgctctggtcgtcatcgtcgctcgggaaggtcgctgtcgtgttcaccaagtcgtcgctgtcctcgtcccgttctccgtttccgccgaagatcgccggagcatcgccgtcgccgtcgacccgaatgtcttcgccgcttcgacctcgctgccgtcgccgtcggttgccgtctgtcgtcgttcgagccctcggtgagttcgccgtgtcgccctctacccgtaggtgtggtccgtttgcgccgccgcgccgtcattcgccggcgagcacgaggtgtcgagccaccgccggtgatgacgtcttcgtcgacatcagctccacatcagccgtagacccgtggtagatccgatcgatctcggccgtccgttttgtttagattagatcttagccgttcgttccataggccgcttccgtgcaacctgtccaccgtgaacccgagcccactgacactataaatccttttttcttttcaaaaataattcgttattgcgtcataatccaattaaaatctatataaatgatttaatccggtttaatatttaaaacttcataactaattcatcttagctcggatttagttggttcaagtctctaaatttttctaaaattgggatctacatgttaaaaatatccacatgtgctgtttatgattgtttatgtactgttttggtgattttgctcttttatgtttagattccgacgttcccggagagtccgattttgcaggagaagattttgaagagttctaaggccagcaaggcaagtcacacacacctca

SEQ ID NO: 13033 - DNA, 2480 bp, Oryza sativa
ctattcgaatagccgtgcccgcgggttatgggcgagttgagcaatgtttttcgtgattagtcccacacctctcacaataattatggatgttatacctgataataatttgcttagctcctggtttggagattagatctgtacagccgggtatggttgttcaggatggttgggcctgtgcagcatgggtgtgctgttcagtgttgattaaaattcctgattaattactccactgttttacttctcttaaatgttttgctaaatgctgcttttgcaaatgagccaatattatgccatcctttggtatccttgtgcacttgcatatttgctgtgtggcttgctgagtatgtcatatgctcaccttgcaataatcaatcaacctcagttgaagaaaaaggatccagaaggagaagacgtttggcttatatcccagttgagctgcctgtgggagtggagccggagcttcgctagattttatttttccgctgcagttttcttcttgatgaggactaagtgcctcttaagtaagtacttatcgttttagttaatttgatgaatctgtatattaaattgtcagtttgtgtacctcggctgattcctggacgaggattttatgcacaaataagtttggaaattacttgtgaatttccgggcgtgacaagttggtatcagagccatctcgactgtaggataagccaaatggtcaaaccttaaggacaaattttccgaaaacatgatttgtgaaaattttcctttcttccttctctagaattctctataaatcattttatcatcctctcccctcctgctttcaacttgagtagttctaaaactagttgttgaaactagaagatgttaatgaggtctacttatggaggtcagtcaagtggatcgagaaagaaccgaagtgccaagtggtcaagatggaatgaagtttggatcctaccttagaacctatgccgccaaactatccttgaagaatagttagtagggtagaacgtttgttgcttgcttgtgtgtaggtatggttgcattcccgtcattggtgtggttcaatgatgagtgtgtaactatactaggttgcttgcttaatcaacttgaacaatataatggtctacacacaccagatcagtggtaacatggttaaggtcttaactttagcgtaacccctctccttctatcttctctaatctgcaacggatggtgaacactcgcgccaataaaagtggaaataataacaatgaagggaacccaactcttgctcaagttctggctcaacagactcagttaatgaacatgatgatacggatggagatggacgaagtcgggggtcgatggacatctctaggacaaatgaaggctacacgagctgcggcccggtagtcgagatgtcatggcacagggccggtgtcctgctgctcggggctcagtcctgcctacctgtcccgggggtcccggctgtaggtggggttgggtcggtactcttgtctatggctaggatgggttggaagctatgtcacgtcttccgtccatataccgtggtggtatgtggcacgtggttacacgtgaggaagaggtgtcttgtgggtaaagatgtacaccctctgatcagagtataatctattcgaatagccgcgccctcggttatgggcaagccgagcaatgtacccaagttagtgttttaattcttaaaacatgcttaacaactaaaatgtggaatggttggcctgggttagcttgggacgagctgggacccagggtcgggttgctagttcggtctgaatcatcgtaggccttgggttaaggcaggttcgtgtgggttcacggccttgattaataatattgtatagctctagaatcgtgtttacaaaatagctttgagcaattaagtgtcttttaatgctgtttactgcaaaccctaaccctttatattataacccccttgtactcccttgcatttattctgcacttgtgggtgtgtcttgttgagtacggtggttgtactcagtcttgctcaatttttcccaaacccagaagaggagcccctggaagatgaaggctttggtgtctagctcgtgcctgccgtcaagcgcctatggtcgtcgccctagtcttctgctgtttcccgtttgtctttgtgtgtgctgggccttcgccgcccatgtaataaattaactatttacgcttccgcttgataaactctgaaatgtatcaacttttggtgtaccttgcctcctgggacaaggaataatacacgcacgtaagaaacgcccgttgggttaattccggtcgtgacaggtcatgcaacaaatcataaaattatacatcttagtgaatcacaaattgaaaaaaaaaaaaagatgccggcagcggctgccgcctgccgccgctcgccactgggcccgtgcgcggcccagccggccgcctgctgcgtgggaagggaggagggggaggagagggcaggggatgggtggggaagggga

SEQ ID NO: 13034 - DNA, 1362 bp, Oryza sativa
cgcagacatggtggcgaggacgagcagtcgtgcgggaagcactccccaaaaacctgatcacccgcctacccggtgcagatctcaggcgaaggtgtgattccgaaggccctgctccttccgatctctcgtgcgtgcaagcgattagaagcgagaaagcgagagcagcacaggcacggaggaggaggaactaacacccgggaaagaagcaagcgaatcgttctgatcggactcgcggcctccttatctatcaggagagaggcagtcggcagtcgtgggaacgtgggatcgtgaacgtgccgttgcggaggcagttgtgggaacgtgggttcatggttgcaaaagtgtagcgccacgccacgcctagccctcggcctcggcccggcgcgcgcgcgcgtgtggctttccgacccccacctcaaccagtcaacagggggcctccaataactccctatttaggttaagatattcctcgcttaaatcctgaggtggtattattatccttaacacttattatgggcctttgagatttaataggataaattgggcctagcccaattattctaacaatccccaccaaatttcaaggctcataagaaatgttctcaaggttgtgcctatttgatataccagggttttggtggagactgttaagttgaacttccacctaggaaatgagctacatcagaccacaactgaacaatggactatgccttgaattgtcagttttgtgtgattaggtttcactcagacccttgactggtactggactgccgttcgcatcccctctgtttggagcatataagtcaaactccaggcctttcatgagtatctagagatcgcccaaacctcatagactgtgactagcagtcgaactcatataggtgtgttccttctgagatgttctgcaggtcaatatctctgcttggaaaagccactcggatcacattaaggcatgagtcatcctaccatgtaggaaagaaaagaagtacatcatgaaaataagcccttttcaagggtctcttctctcagtcacacaatagtttgttttgccatccaaattcatgggatctccgatcacaatggacaggtttccactattgtgcaaccttaggtgggtatcaagcccatttccctcgatgcactgtctatcacattacgtggtagccccttgataaactgatctgccagatttctagccgtttggacatagtccaatgctacactccggagtttttctgctttctgacagatttcagtcttctcttgatatgcctagatgacttatgttgtcctttgaactgttcactttaataatcactgtttgactatcacagttcattaggatagctggccctggttttt

SEQ ID NO: 13035 - DNA, 22857 bp, Oryza sativa
  unsure (1)..(22857): unsure at all n locations
atcataaggagtaggagttggcttgcagtcactatatccaaagcaactcaaaatcttgtccacatagtgggattgcacaagtgtaatcccactctcatctcctctttgtagtttgatgttaagaataacatcagcctctcccaaatccttcatttcaaaactcttggacagatagtccttgacctcctcaatcacattgaggctggtcccaaagatcaatatgccatcgacatataagcacaagatcactccttctcccccactatagcgatagtacacacatttgtcagcttcgttcacaacaaagcctgcagatgtaagcgtggtgtcaaacttctcatgccattgcttaggtgcttgcttgaggccatacaaggatttcaacagtttacacaccattccctcctaaccttctagtacatacctgtctggttgatccatatagatctcctcctccagctctccgtttaggaaagctgtcttaacgtccatctgatgaacgagaagaccataagaggctgccagaacaagtagttctcgaatcgtggtcaagcgagcaactggtgagtatgtgtcaaaaaagtcctcgccttccttttgggtataacccttggccacaagccttgtcttgtacttttcaattgtaccatcaggcctaagctttttcttgaaaacccatttgcatcctacgggcttgcacccatatggacgctcaacgacttcccaagtaccattagacatgatcgagtccatttcactgcgtactgcttccttccagtagtcagcgtcaggagatgaatatgcctcttctatggttcttggggtgtcatccacgaggtatacaatgtagtcatctccaaaggattttgcaaccctttgtctcttactcttgcgagtatctacaatgttgtcctcctcaggattttcctcaggcgtttgatcattgtgttctatcggtgcaaagtgctcatggggcatgacagtttcttgactagaggtgctaggtgtatgtttcatgggaaattcattctcaaagaatgtagcatctctggactcaaaaattgtaccaatatgcatgtcgggtactccagagtttactattaagaatctataacctacactgtgaatagcataaccaaggaacacacaatcaacagtgtttggtccaagtttctgctttttggctataggtacatttaccttggccaaacagccccatgttcgcaggtatgagagatttaatttcttcctttcccattcctcgaatggtgttacttccttatgcttcattggaattttattcaggacatgacacacagtcaaaactgcctcaccccaccattccttggaaagccctacagtgtctaacatggcattcaccatctcagttagagtacggttctttctttcgaccaccccatttgattggggtgaatagggaggcgtcctctcatgaataattccaaacttttcgcaaaaggatgcaaactcattggaaaaatactccccacctctatcagacctcaaccgtttgattttcctttcaagttagttttctacctcagctttatagatcttaaagtaatgcaatgcttcatcctttgttttcaatagatacacataacaaaatgtagtgcaatcatctatcagtgtcatgaaatatttctttccccctttagtcaacacgccgttcatttcgcacaaatcagaatgaacaagttctagaggtgccaaattcctcgcctcagatgtcttgtgaggcttgcgaggttgtttcgattgaacacaagtatggcacttggaacctttgaccaaagtgaattttggaattaaactcatgttagctaagcgcgtcatacaaccgaaattcacatgacagagtcgcgaatgccacacattagactcatctttctcgctaatatggttcacaacattatgattattacacatgtcattcaaagaaaagcggaacaagcctccgctgtcataaccttttccaacaaaagtcccatatttagatacgacacatttattggactcaaacacaagtctaaaaccttctctacacaatagagagccactaacaagattcttctttattgaagggacatgctgcacgttcttcagctgcacggtctttcccgaagtaaacttcagatcgaccgtaccaacaccatgaacaaccgcaagcgaaccgtttcccattaacaaggaggaacctctcccgacctgataagaagaaaacagagaaatgtcagcacatacatgaatattagcaccagtatccacccaccaatcaggtgagtgaaaaatagagagaactgtaggtaatattttaccgtacaccgatgttcctccgccctcgctaatgaccatgttggcagacttcctgtctttgcgctcaggacagtccttggcccaatgcccatacttaccatacacaaagcagtctccctttgcctttcccttgcctttcttcttaaagttggttgcagccttgggtttgacatcagacttgactttcttgttgttgtgggatgcatgagggttcttcttctgtaccatattggcactagaacctccctcaacctttttgccccggacgtcctttgccctcgccttctcctcaacacccaaagagccaataagatcagaaacactgaactcttgtctcttgtgctttagagaagtggcaaagtccgaccaagaaggtggcagtttggcaataatgccacccgccacaaacttgtccggcaactcacagttgttgttctcaagttccttagccagcatctgaatctcatgagcttgttctactacagaacggtcatcgaccatcttgtagtcatagaactgctccatgacatacagctcactgccggtgtcagaaactccgaacttggcctcaagtgcatcccacatgtccttcctagaaggcatgtgcatatacacgtccactatgttgtcagcgagtacactgatcaatgctccacagaacaggcaatccgaagcctcgaaattagcctcctcctcaggagaaagaggtggttcacttcgtttgccccgtgaaacatagaagcattgcatcgctgtcaaccacaatagtacacgtgctttccatctcttatagttagaaccatcaaaagcatgtggtttcagtgcagcagcaaagccaactaccgaaaataacctatcaggtttttggattgttagaaatatggtcataaatcggcatattttaatccaaaatgttaagacaataatcatggcataaacagtgtagggtgatctagtgacaacatgtaacataaccagtagcatactaatggcatcatgcgcattatgaatatcaggaacaagaacatagcagtaacgcagtagcatgctagagacatcatgaatatcaggaacaggaacatagcagtaaagcgctaacaacgggaacaggaacaggagaaggatataccccgagaatggccctccactggattgcgaggcagaattgactccgttggtgttgttgttcgcggcacaggctccagctcctggcgcaccacctccagctccagctcctggtggcgcaccacctccgccatctcctccagcagcagcagcggcgccggctccaggcgcagacatggtgggcgaggacgagcagtcgtgcgggaagcactccccaaaaacctgatcacccgcctacccggtgcagatctcaggcgaaggtgtggttccggaggccctgctccttccgatctctcgtgcgcgcaagcgatcagaagcgaggaggcgagagcagcacaggcgcggaggaggaggaactaacacccgggaaagaagcaagcgaacgggaaagaagcaagcgaatcgttctgatcagactcgcggcctccttatctatcaggagagaggcaatcggcattcgtgggaacgtgggatcgtggacgcgccgttgcggaggcagtcgtggtaacgtgggttcgtggttgcaaaagagtagcgacatgacgtgacgcacgcccgcccggcccggcccagcgcgcgcgcgtgtggctttccaacccccacctcaaccagtcaacagggggcctccaataactccctatttaggttgagatattcctcgcttaaatcctgaggtggtattattatccttaacacttattatgggtctttgagatttaataggataaattgggcctagcccaattattctaaaaatggctaaggatgcaagcgggacgggcaagcgggttttttacccgcttatctcacttttagtttatttttcttctaaaatttatactactatgtgggaaatgaactagctatcaagcgggttttttcgggtagcgggactattcacttgcatcctaacccatggctagatccagtgagcttgatggtgatggccatggcatggggagggacggtgggtgtagagattgaagggaaaggtgaccaactccactgaagcagctcgatgacggggagcttgtggtcaccgacagccgaagaggggtggagatggcgtcacgccctgtgggagcttgcagctggagaaggagaagaggcagtgacgatagtgtaaggagaggcataggcgtgaagaaaatgagggatttagggaatgagaagggaaggagagggagaaggagaggggaaggaggttaaaggtattttagttgatttgataataaaataatgctattatagggattgatattaaaaaattggctaaaaacgaaaatgtattaggacggagggtccattgatctttgatcatgcctaagaaggaattttttttttttgacttagagataagctcgtaaataatttgaatgcgcaacggatagtgcaacagatagctcctttatactaaaatataagcacttccaacacccatgtactagtattttattctattaatcacttttccgtactaatatctaatatcatttctcctcaatttttatctcttctaccacctccgtcctataatataaggatttttagaattagacgtgggtattaaaaaagtgggtagaattaaatgaaagaagattgtgtgttgtcgaatgacaattgcgtttgtcaagaaacttggttcactcttgattgaaaagtaaaacaatgtgtattgatattgcattttgttggtatgccacattatatatcccttggggtttatttatagtcttagtataaactcatgcactctaaggctaataaatacagagaaatttacatgtatactcttgtgatatagatatatataaaggtagttgtagataatttagccatggacttctcagtgggccataacatgggcctaatttgacgaatcagcccctacaggcatagagttctctacttctgatggcaaaggcgcttggctcagtggcgaatgcttccatcttcacccaatcggtatttcactctggtgctttgctttggacagtggcttgtttcggcagactcggttgaaggcccctgtaacatgctttcaacattgtaattggttgagaagtggaggtatgtgaaaagattgaatggcggagggctataattggttaggagtagaatgttggtcgagaaattgttatattttaggacaaaccttgagagttaaagttattatgtttttagacagagggagtaataattaatctataaatcattaatatattttaaaatagatggagtagtatgcatgcgacgttgggtcatcttttctatattcatccttgaatctaatgacaagtctgtgaacatactgaaacatatactcctgacatatatataccagtactacgaatctaaacaagtatgtctagattcgtagtattagaatatatcacatatatgtcacattcgatattaggggcctgcttatatcccctgccaaaattttacaccctgtcatatcgaatgtttggacatatgcatggagtaataaatataaacgaaaaaataactaattacacagattgcgtgtaaattgtgaaacaaatcttttaagtctaattgcaccatgatttagcaatatggtgctgcagtaaacatttgctaacgacgattaattaggcttaatatattcatctcgcgatttatagacggattttgtaatttatttttttattagactatatttaatactccaaatgtgtatccatatatccgatgtgacataccaaaatattacaccctgaatctaaacacagcctagcctaggttagttttctacataaggaaggtagtattctgttgagatgatagctatatattttaaatacgagggaataagaaaataaataaatagtaactgttaaatagtgttagaaaatgcagttaggagctactttatgacacggacagagacgcggcagggaccacgcctcactctcgcttgctgatgaagcgcttttaattccattaagacggacaacagaccatagtacggaataagagtccatatttattacactctccgtcacattattactatctacatcttaacatataagagattttaaatgaataacatatatttgagtactacaaattttgatttacctctgttcagatttaaactattaggatgtgtttcatccatccaaatcacatatattttataataaagggagtagtaagttcgaagtatatatatatgaactgctcgtaagtactattgtaggatattatctttgtaacttaatatagaatgggaacgcattctaatataataagtattacaaatctacaaccttcgtccagaagcgctgtaatactggacagatatttgtctagattcattttcaaaagttggcttattttggatggagggagtacatagggattgtgtagactcatgattagaatgtgtcttatctcgtactgaattgttatattttaatacggaagtcatatttaacatgttaggtaagctgattagatcacaataatattattggacatgactacacagcgaccggtctctgatttgcctaaagcagcgatcactccatcctagatttaaatctccttttagcttaaaaagtactatagtgcatgtttttttacctctttaatcacttgtatattttaaatcacatattatttttaagatctaatctatttgcatcattgtactctacttaaaatatgtgacaaaacgagatccatgttgaatatattaaaacattttattattttaaaagtaatttatttacattgtagaagtaacttagctatgtaatagaagtaactctatatagcattaaaagtaattacattatgagtgagttccaataagaaactacgtggagtaaattcaaaagtgtagagaagattttcatgtaaatacatttatgaaagtaaatttaataaagcctgaaagtaatttacataaatcataaaagtaacttagcataaaataaaagtaagttgttacgatattaaaagtaaatttgtcataggaataaaaaatataaatctatttagaaattaaatttaatcagcaaaaattatggaattgagtaaaaacaatcaactcaaagcattacgaaattatgagaagtaatttaatcaaatctaaaagtagtttttatataagataaaagtaacttacctatataataaaagtaatttacaatataaatgttttttcatcataatattatcatgtaagatcttgttataaagatttaattgcaacggacacaatggtgtaatcggattatatatcggataagtaatttaagagaaaattttataagaagaaaaaaaatatgcacaacctaatagcaaaaactacttgcatgcatgtctgtaacgctactagtacttctcacgtaattgtccgcgtcgctcgttaagtctaaatcgagatgcctctcgaaatagattttgcgtaaattattccctcctccgttctaaaatattttaatacagaagtagtatttagcgtgttaggtaagctgcttaaaaaaattatgtagttataatttattttggtatgagttgttttatcacttaaggtatttaaaatttttgaataagacgaatgatcaaacataaacatgtgttcaaaagtcaatggtgtcatcgattaaaaaccagagagagtagatttcaggacagagggagtattaaattagacacgtgtttgttatcattttttttgaaacagttgacggtaagatttctaccggatatattagaagaaaagagtttttacctaaagggggagagagttcacaaggcaacacctccaaggaggaaacagcacccgcatacatcgatgtcaccgatcctgtaagaccagacaaggatttcacccaagactgtcgccgatcctgtaagaccaggcaagaatttcacctaagactaccttaaaacgtgtagaaccttcaagaaacaagagcaaaagtgttgagtgttatcgttgcccaactcatcggctgacccgatgcagcagctccgactccgccttaacacgaaagctcaagcaccgtagagaaaagcacaccgctccaaactcggcactaagacagatccacacagtcacagggctcttatgcctcgccagtgctttgttatcattttgtaccatgtcttttgggcctacggtgtacattactacatgtggagcgattagcagcagccatttcgtagttagaatagaagaacacactcttgaggctatcagcaaccagctccactgctagctccaggccggtcatggcggcggctggtcacgatgtgcagctcccccacgtcgccatcttcccgttcatggccaggggccacaccgtcccgatgacccacctcgcctgccttctccgccgccgcggcctcgccaccgtcaccttcttcagcaccccgggcaacgcgccgttcgtccggggacagctcgacgacgacgtggccgtcgtggagcttcccttcccggaccatgtcgtcgcccgcggcgccgcggagtgcgtcgaggccctcgactccctgttcccccttccggcgttcgtcgaggcggtgtcggcgctccggccggggctggaggtgtcgctcgccgccgctcggccccgcgtcggcctcctcgtcgccgacgcgttcctgcactgggcgcacgcctccgccgccgcgctcggcgtcccgacggtggcgttcctcggcgggaacatgttcgcgacgatcatgcgcgacgtgatcctccgcgacaacccggccgccgcgctgctgtctggcggcggcggcgccgaggcggcgacgttcgccgtgccggagttcccgcacgtccacctcacgctcgccgacatcccggtccccttcaaccgcccgtccccggagggtccgatcatggagctgaacgccaagctatggaaggccatcgccggcagcaacggcctcatcgtcaacaccttcgacgccatggaaggccgctacgtcgagcactggaaccgtgaccaccgcgccggccccagggcgtggcccataggcccgctctgcctcgcccatggcggcaccggcaccggcaccggcgccgtcgagccctcatggatgaagtggctggacgagaaggcggccgccgggagagccgtgctgtacgtggcgctcggcaccgccatggccatcccggacgcgcagctcagggaggtcgccggcgggctggaagccgccgcggccgcgggcgtctacttcctgtgggccgtgcgccccagcgacgccgacctcggcgccggcttcgaggagcgcgtggaggggcgaggcatggtggtgcgggagtgggtggaccaatggcggatcctgcagcacggctgcgtgaggggcttcctcagccactgcgggtggaactcggcggtggagggcgtcgccgccggcgtgccgctggcggcgtggccgatgggcgccgagcagccgctcaacgcgatgctcgtcgtcgacgagctgcgcgtcggggtcagggtgccggtgccgacggcgatggcgacgggcgggcacggggtggtcgggagcgaggtgatcgcgcgcgtggcgagggagctgatgatgatggccggggaggggaagggcggcggcggcggcgaggaggcgaggaacgtcgccgcgctggcgtccaaggcgcgagaagcggtcgccgagggcgggtcgtcgtggaaggcgctggaggagatggttgccacgctctgccgccctgttgaaggagatacaccgaaacccacaaaataagtttatttgtttctacgtttgaccgtcatcttataatctatctatctatctatctatctatctatctatctatctatctattattattattattattattattattattattattattattattattatatactaaaagtccattaaactttctacaaacgctctcaagccaccacgtggcgctcctacaaacgctcctagatcggcaagtggcgctttaacatcctatcctattattatatactaaaagtccattaaacttcctataaacgctctcaagccaccacgtggcgctcctacaaacgctcctagatcggtacgtgggcgctttaacatcctatcctatcctatcctattatcctattattatatactaaaagtccattaaacttcctacaaacactctcaagccaccacgtggcgctcctacaaacgctcctagatcggcacgtggcgctttaacatccaaccatcggttttcatttaatctggtgaacccattatttttaaccattggatctttattttaagaaaaaacaaatcaatctatctaaaaaatcccacgttactcggccgtgtcccctgaacctgtacgtctgtacgtccgatgtacgtacatatcctctctatgtccttttctttttccttgttatatatttagattagatgaaaaactttagttcatgttaaccatatgttttaagttgtaaaaatatatgttattttaagttttattctaaatagtgcatctcatcgaaatatccataaaaaaatattaataattaacattatagactatatgattgtatatcacaattaaattggacttataattaaaaaaacaatttaaattttgagtagcattttaaaaatttactcactccctatcgtgtaatactgatatatccaaatgacattattaaatttatcaagaatgtatttttcatatattatatgttgctgtattcatatatttttttttggaaaattaacaaccatatatattttttacaccatgtggatgtccttttatctcttaggcttcattcggtctatctcattggatgaacttatctaggatacgcgaaacaaagcatgccatcagcgtaagattaattaagtatcaaatattacatatcacatgcttatctaagaaaatatatatagaaaaatgattctatacacccaggagtatgtactgtgtatatataagggtcatcctatatataaaaaaacaaatctagctacttatttaaacataacccgtggatatattattttcaaccattattttatatctattcgagtaatccttcattatgtacgtacgcaagagatgtcataaaggaaaaaaaagaatgtgtacaagatcagctccatcgagtagttttttttttctttctttgcggctctgagattttcctcaaattgtgcatatgagtagcgaccacccttggcaagtttgtcaaagaattcatgcggccgcaacaccgcttcacgccatctcgctaaattttttgaaattattttttactaatgatggataaggcaatcacgtttccttaaaaaaagcaatcacgagcgcatatataaacgtgtgctcacccatcatataaatacacatacacacacctaccctaagagaaaaaatatttgtctccaaaaaagaggaaaaagtatgtgcttagtatttgctagaaaaaacatatacacatgtcatcgaaaatgtcgcatagaaccacattatatctttttaattatgtcattctcatctatataatgttaataattaggacaaataattttgacaatatagattattcaatcgtatattacccatgaacatacataggtaaatcagatgtataataaaagaaaaaacaaaacaaaaaatatattagcttatatatttgtgaacgatggtgagagatcagattatatataaccgggacaattcgtaccgttcttattgtttaagggtgtaatcagacattttccttaaaagtcttccacataaggatttataataaaaaattaatcaacactaaacttcctacaaacactcctaagcctccacgtggcatcctataaatgctcctaagccgccacgtggcactctaataaattagagaaattcttaaaaggacacaacgtataatcattaatttttattaaattttgtagaccattatttgtaaccattagatttattagaaaaaacatatacgtacgtctgctcacccccccctccccccaaattctttcacccctttttttacctattttttatcctattttcatgcttttagaaaagcaaaaattgtatgccaaacaattaggaaatgcagcatctaaattataatgctaatatttgatctgcttatgtctttagatattttacattttaaaactcatgtcctcttttattcaactgtaaagagagaaatgtcacattaattggggatacattttctgacttttgcgtgtcatttaagcaattttaaaactataaaaattaatgatatatatttttgtcatcgtatataacttgataataattaaattagatctaataaaagtaaataaaagtaaaatgaacagatctatgagtaatattaaaaaaaataccccccccaaacattgtaacacagtaaaaaatacgcatcttataaatactcctaagatattatgacgttctcttaaatcggagataatacactcttaagatattacgtcgttctcttaaataagagaaaatcgtaaaaattctgacaagaaaacaaaacattcgaccatcagcttcgacttaaacatctgacataattttagtttgttagattaatcatttagaaaaagaacatccgaaatgtcccttcctccctgctcgcgtacagcatgcgccattcttttctctctattttttaaatctccttagcaactgaaattaaaattatctatatgtaaaaaagacacaaatggacctccatctattacttatatcctgtcaggtgtctaacgactttctactaacttaattaatttctcttaacatacctatgagggctatgtacctatataaattgaccttgatacttttaaaatgatctttttaggagataaataaatattcataagaaagatgatcatagcatcccaattacacatatgatctatgaagtcactaatcataataggtattcatctagcaatatagacaataggttaaaaataaatgtgtggccagttgaacatcataccgataaacatatgggttgcacctaggaatcttaacattgaaacaaccttgaggcctatacaattaatcaagtcaattccatataggaattaaaaaccatatcctttttttctaatttttggtaaaatttgctacaatatattgtaaagtcttgacgtagaacaatctagaaatgtgtatttgttataagacactccactttagtgatgatttgctaaacacactataaccattacttcaatatttcatgatagaaaaatttagaacgtatgcctttacaccatgccatgttatacgcacttatattttcgtcccaaaatgcaaagattgaatcatttcaaggatgactcgtagaatgaaaatctccaaaaagaaacaaaaaatggacatgaaataaattggaaattgagcaaatgttgctagatttaaaacccactgtaaatagaaaaattcaaacattttacgagttctgtttgaatgaaaaaatatataaaaattaaaatacaatcaatcaaaaaattgatattattggatatttttgggttgtaagatatcctactggggagttaaatatccttaattttctaataggaaccacctcctttgtttcgacacaatattttctcatcaattcgaaaccgcatgttctgaagtaattttattttagaacttaaatgttacaagggtaattataagaaaataatcagcgctcaaatcacacaaaatacatttcagtttataatataataaaaaatattttaataaacaacacccacacataaatattcataataaaatttcactcattatataagaaggtgcccgcgcatgtgcgcgggctatctttctagtttataaaaacaattaaaaataagtcacatataaagtattattcatgttatgtcgttcaataataataaaaatactaatcataaaaacatttaaataagacggatggttaaactttgaacataaaaacctagtaatgaattttttttttatgtttgctggttggaactcaatgtttcgtgcagtgattgttagtattgcagtcatttttttctggatgttgcatatttgtaaaacatttcataaaatggattgaaatattttgaccaagtgaggaaacaattttatataagtgatgaaacaacactcaatttttttagacatatattttgacatcaaaatataatcgtgtgagatcttgttatgaagatttaattgcaatgaatgcaaatgtgtgattggattctagattggataagtaattacaagaaaaaaaatcaatgtaagttattttaacatatttgtgttacaagtaaaagaagcaacctatgagttaagaatagataagaaaaaaaggccacgtggccactttggactggcaacttgtagcattatcgttatttattagtataaacacagaataatctgcaagcacataaatattattgtagctttcatccaagagtattatagtgtatcatatccacatggaacctagtcttctaactaggttgtccaaggacactagataaatggtaggtgagggtagagaggaattcttatgtgttacttatcttagtttaagttaagataaaactctatcaactagttcgggcaccggattacccttggtttgttaaggagactccggcctatagctctatgatatacccgaacgtgaaggattacgaaagacggacgggattgtcaccaccttccgcctacctctacaactcatggagcacacaacaaacaaagttaacttctaggctagacaccacgtctatgctatatattaccctaatctctgtaccacgcttaagattatggtactcaacctaagcagagcgatgaacccacaacgatgagaatatatcttacttaaatatgaaaagtaaatatcatcaagaaataacaaaacacttactcgtattaaggcaaacgtctgtagaggtacaagctaggataagagtgccaacagacccaacacttccccaggagaagagtgctgatagccctagcaattctctagacttcctctatctccctactctaggcactagctaagtagagcttcacttttagaatgaatcatatgatcttctatcttggtgtgtcttgagaatgagagtgtcaaagtgacttgagagagagtggagatgctaagagaatattctccctctatctcctctcaagcctccacctctcctcaaaccatcattcgatggtggtttcctgccttaagccttgcgccactgacttaaggattatgataaccgtcgccacgtgaagctgggcaagaggggagccaccccaggttcggcttgcgccgcctttcacctgggtcgctgcctagtgggcacccaagttggtttggggtgtatggatgaagttgaggcagttctcctcctggtgtggactatttgatccctgttctctcctctatttggttggagttgtgctttctcttaatttgcacaagtaatcacctgcatacaaatattcatcaacacttgtggaagtggttagtaataaaactgtaacatcctgaaaattcccaacaataaaaatcactaaaatttcgaactttttaaaactttttgcatcatgctggatgttatggttgcttttatttgccaagctataaattgtcacaatggaaaattaaactaaagttatacagctaagtaataatcataataataagatattattatgaaccctataaatatttacgcacgagaaaacaaagccagacaaagggaaggttaattaccaatttaatttatagatcaaatattaaatacttgaaccatgaaatataaacacttaggaaatgataatcattcaaataaatggaactctatctatagagtagttttactgggaaaaattaattagatattatataatttgaattgaatcacaaatgctaaattatagaaatccatgtggtggtaaaaccaatccaaaaagataaaccaatatatgtgaaaacatataaataccaaaatcccaaatatagggaattataaaaatctaggatatatattaaatattggacaatattaaattttgggaaaattcacatttgagcacttaatagggtcacccaaatgcttaggagtaaatacaaattaaaataaagattaggtggatagaaataaataaaatattatcgcgaccatatttggatcaattaaatttaagtacgatggaataagaattaatcctaattaaaactcaaataaattatataaaaataaaatatgagtaatattaatctagggtgaattcattagttgagataacacaaatattgagtaaacttcatttatgcaagatttagaaattatagaatcaaatttatatggaaaataaactgaaatcgggataaataggaaaatacactgttcattatggcgtaggtgttcgatgtggtccctagccttccccctcctctcccacctctgcccctagccgccccgagccgcgccatcgccgcctgccgcgcgcgcctcgcaccccgagccgtcgcgccgctgtcccgacggcccgcgcgcccacgcgccccgtcaccgcccatcccgtcaccgcgcgtcgccgcctcgcgccccgagccgccgtgcgccgtcgccatcgtcgcctgccgccgcgccaccgtcgccatcgccatctcattgccgcggccgcgccgtcgccgtcgcgtcccgccccgcgccgcgcgtgcatcccatcgccgcctcgcgccgtgcgacaccactgccgcgccgtcgccatcgaagtcccgtcgccgcgcgcgtnccatcccgctgccgcgccgcgcgccgtntcgtcgcctcgcgccgcgagcccgccgtctcgcgccccgtgccgcgctgatccctcgagccccgtgccgccgctgctaccgcgccgcgccgcccgttccatcgccctcgcgcagtcgccggtcggccgtcgcgtcggcggatcccgttcctcgcgcaccgcgccttgccgcgccgcgtggtggtcacatcgccgcgtcgagccccacncggcgccaccccaccnacnccatnagacccccgcccctcttccctcttccccattatctctttccccctcccttatataatccccccctaatnccactctttccttccatcctcacctcctctcctctacccactccaccacgccgccgagtcatcgcatagagccgccgcgccgccactttcggagccgccgcgccgtcgccccggagccgccgcgccgtgcgtcgccgccttgcgccgccgtcgccgtcgtcgccgccaccgccgccgccggtgagccgtctttccccctcccccccttcacctcgcgcccaccgccgtcgccgcccgcggaggcaaagaaccgagagagaaagagagaaaccgagggagggagaagccgaggaagagagaaaggagccgggagggagaaaagaaaaggaaaagagagaaaaagagaaaaagaaaagggaaaagagaaaagaaaagaaaaaggaaagggagaaaaaggaaaaggaaataaataggaaattagagggagtttgaggaagtttagaaaatttaaaataattagaatttaattatagattaattatagtcgtagaattgcaaaatttaatataaattatggattattcttggtaatttctataagaaatcaattcgcggtagtaaattagatgtaattaataactagacaaatagatgaattattatagattatttttgggtaatccctataagtaatcgattcacggtagaaattcggatttaattactagggattttagccgtgtattatatttaatcatttagtcataaactaaattaaatcgtataatatttctagaatttcgtccgatatttagctcatgatagaaatttctaacctattatatggatataatgctcgggaagattaaattaaaacttatgacaacgaaataattatacccgcaaaatagcttaaatcgaaattgggttgccgtagttcgcagatagtaaagttaataaaaaggaataaacccggggtcccacttgtcagttggtacaaggctgtggatatgtcttggattaaaaataaatcgtttatgaacagtagcttttcgcaatttctcggattaattcaaatttgaatctttacactagcataacttattcattttaactcggatttgagtgaaacttgaacctaaattcatctaaattcataagctttccaatgatatataattcactatttaaaaaaatatatttataattataaattaattaataccaaatgattagataatagttaacctaaatagtgtgccaatgaataaaaatggatattgtacagtagcataattatctttaacatgtcttgtcactgtagcaactaaataaattagttataatcaatccttcaaattaatgggtgtataggaaaatattagtgccatttactagtctatgtccaaatataactaaatccatgacttataaattgtttacataaagtttagcctcatattttgtaactaaaatatcaacacacatagatgaatctttaacttgtttaggagagtaatcacaaagctagttgtatttggaccacttaaaaatttgtcgatacaatgtcatgtgaagtagaatatatgtatatagtgggtcgatatccattagttaaccaaacagagccatcttaaaatcaacatgtattgtatagcttacagtaaacagcaactactcaaatatatgatccaataataagatattgttgcttacacatatactatacatcccattatagtggtacggtatagtattaatttgcgtgttgcatatattaaattaggagggagtgtatgacaaacatgtatattagataaatactagttataaatcttgaccttatataattataattatagttcaactgtaaattaggattattcattgtaaaattatgtgatgggataatctgtagccataatatgattagcctaaacaactttaacatatagagcatggataattattaaccttttataatttattgtgacaagtaaaatatgttcataattaaagtaaagcttccatcaataaaataaataatacaaatgattcactgtaattatttgaatgatcctaaatccatctaacaacagaacctctagtatataaccgtcctatttagatagatgcatgcttagccataatccttccataagctatttgatagactaaaccaccgattagccaaatatatatgtatcccataaatgctatgttggttaactcctaaataggccacgttgacaatagaaagattaagaaaccttagcccctagcatgattgggatccattagcaaacacgaatagtacattttgttgcgcatatttgattgttgtttgaatattggtttttctcgcgtattatagaccttgtgtatcggttagtcgtgaggcaacgtctgcaacttccaggaggtgaaggttgatcaagattatatcaataataaggattatcctgagcaaggcaagtcatcactattccttgaacatgttgatcctaattgcgagattgttttgtttacaaataaaatttcatgcaatgatgaacatcctacttgtgattatgccatgccttgattattgtttacccttaaaatccttgtaaccatgattacgtataagtccctagtcaattatgacaattgcttagaaatgtcattctagaatcatgcatactcatatttatcaaatgctatatgcttgggcaattacctttgggaaggtaattgagatgcggcatgtggagacatgagcgccacattgccatgatgttgatgacatgatttgtgaaaggagaaataaaattaaacaactgttttcgactggggcggacggaggatttgggtggtatctggaaaaggctagtaccgtccccggtcaattaaggaccgagccatgaagttaagcatgaaacgacccccgtacaaccgtacttctcgaatgggtatagacctagcggattagatagccgagcggaggcagtatccctgcatagatggttcacccctgagtgaggcaggtgcgctacaatgggacagccgttgaggtagggccgagaggcgtgccctacatcggtgtcgccattggtaggactgccatgagtgtgtgagagagagaacttaacttgaactataatttaatatgtgtgtgagacttctctttcccgggagcgccagaactcctctcactgctagaaacatggacgcctagagtgcatgaggatttaagttcatggagcgggtactgccaatgcgaggttatcgaaaagctttgccgtgacgcgtctcatgtgttgggacgaggctcatgtgttgggcagtcgcggagtgcgggtaaagtgtacatccactacagtgtgagtaaaccaaatctattcgaatagccgtgctcgcggttaatgagcaccgggacatgtattacacttggctagactctaaattcttaacttgtgtgggatgggatattgcatggtgatttttatgctgatggagccacttcctgagaggaagggaaggtggacgtcctcagaaaaccatgacgactcaatggcgggaagctatccttgggatcacaatggatggtggacagaaccgttgttgtttaatgtgaacactggaactaaaatttgatcagtctatgataggtcttaggcttgtgaaaatatttgcaaaacgcagctttatgcaaaagaacctaaaaccattccttgaataccctctatcatatgcattgttgttgtggtggcttgctgagtacggttggtactcacccttgctatttatatatcttttaggagagtgttgaagagaagcccttgtcggtacgcttgcgtatcccacgagatgatcagagtgcggtcttgttctaggtctcgttccccagtcgactgcctgtggcatgttaaccgggcccttatattattttgtcttccgctgttgttctctgatagttgttggcctaactggccctaatgtaagtgtttaactcttttagcctaaattcattcgtgatatgttgtgatccaactatgtatgtgtgtaccaactactgatccagggattggtacggataaacacagaagatttccgatttccaaaatcgggggtctacaaaaaccctatcgctagatttggtgatagacattagtaagttttatgttggaattgatggtcaaatttggtcgttaaggagcgtcaaaatgcatgcagagcaaacgagcaacttttggccgagaagttagcagtgagagcaaagctagcaaaggctaagagcgcaagcatctgattcttctctatttatcggagatccaatgcgtggcactctccaaaaagagtgccttattctttggtttgtgccaagtatttgctcgtggctttgttttttttagaccgactcagtgcagtttctaggtgacagggattgatgaatgatgtgagggatagttgttgcacaataacagaacaaattaaaggaataatttaggagaagattgaagcttagtcttctaacattcttttttattcaagctttctttcttgttatttcgttcttctgtttcaaggcttggagtctgttaactcctctatgtgtggatacagtggctggcataggcggatctataaggtggtccgagtggtcaaaaaagtgatgatcaaccctattatatatatcccgaaccaatccttagtggtatgatgcaatgttttacaacatactactaaaagagaaagagcatggtagttgtaggggatcttaccatgacaacacacacctccggggagcattcagaggtatctcgttgacggagggagttcacccagcactgataaggtcgccaaatgtgcaccgaaaattgctttcccctttcttttttgaagggaaaaagagttgtattgattaagtaacactatcgcaatcttgctgcaaaatctgttgatcacaaaacaatgcttgatcacgccaaaccgcttaatgagccatccgtttagcatattgagcaagttcaagcgtctcagatctaagagcacaaggcagtgtttggcatctacatctggttgcaatcatgtcgactttcgttaggcagaagcgttggccggtttgacgacataaccacgacgaggtggtataatgccgagagaagatcttcatgcacacaatctggatgaagggggggcagcgatgaataaggagcccattgaagattagtgtcgaaacatgaattcggcaataataaaaggggtagcgcacgagacctaaaagtggatgcatgcggagacaaaggatttaga

SEQ ID NO: 13036 - DNA, 5933 bp, Oryza sativa
tttgtctcatgcccctaggccctgtaatccccaaacatgagtagggtattacctcttatcgaaagggcctgaacctgctaaatcctttgtctccgcatccatctacttttaggtctcgcgcgctaccccttttattattgccgaattcatgtttcgacattggcgtgccaggcaggggtacgccgagttatctatcaagaagtgcgatggaacttatctcaggaatcaccggcaccattgttgctccaagatccaatcctgacagggagattgatctcggcgaactcgatagatttaatcttcgatgtcgtcagcttttcctttccaatctgttatttattggattaattctaatcactgcttaatgctattcttctttttattctctattgcttgatgccggcgcaaagtgctcaattgggcatggtaagccgcagctacgcaaggcgaagccgtccactcgtagcgaatccaagtcgtgggcaggcaggacaagcacgaaagttcacgtgacgagatcgctggagatgtacaggacgtgtcaattcaatcgccatgcatggattaattaatccagccatacacgcattcaatattgctggatacgtacagggcaaattgatccatatatagtcattatctctctacttgctaataacaggctaacgatatactttgttgcttgttttgcatatattcgggagctgtacgtggttgtttgcaggacatcgatcaagatctaacagccatctgctgccgagaatacgggcaatatgtacatccataactctacacatgacgtatctcaaaaaaaaaaaaaactctacacatgacgagctatggatcgcttgatcagtcctagcaacacagtgcaacaccaatgactaattttctccgtctcggagtcagtccgatagaggagatcaatctcggcaagttcaacaattcaatctccgacttcgccgggttttttccctttcaacttattgttgtttattagattgatctttaaatttcagattaatctcttggtattttctgttgtttatatgtaatcccacggcgctactgttgccaactagtgtcctcgcctgcacggttggttggtcacaccaccgttgttaggcatccacgtcttcaccgccggcctgcctttgccacagccgattggtgtcttcgcctacatgattggttggttaattaaaccacagttgttgggcgtccacgttttcaccgccggcctgcctccaccgccgccgactagtgtttccacctgcacggctggcctattatgccaccgttgttaggtgtctacgtcctcaccgccggcctgcctccgtcgccgccgactggtgtcctcgcggcgtcaacgacttcaccgtcggcccgccttcgtcaccgccgactagtgtcctcgcctatacggttggttggtcacaccaccgttcatgggcgtccacgtcttcaccgaccggccttcctccatcgccgccgattggtgcccttgcctatacggttggctggtcacaccaccgtccatgggcgtccacgtcttcaccgaccggcttgccttcgccgccgccgactggtgtctctgcctacacggctggcctattatgccgccgttggtgggcatcttcgctttcaccatcgaccgcttcgtcaccgccgactggtgtcttcattgttattgatggacgactttgttcccacattggccacctctgccatcaccaaggggaatattacgaagctaagtcatcattgattttttttatatgatattttccttttcctctgcctccctacatcaactggttcgccgttgactagtgagtcgggggctacatatgttatatcatattttttaacaattttcataatatttatcttgattgcttgcgatataatctgagtacaaaagtgcctatcgagttatggagttctatcttcctatgctttccgtttggtttgtcgatggatggttgccttcgggccgattcctagcacccgggggctcgttggatggaccgagtaaaggtgctaagtattactcaaaaaaattcaaaagcatagagataagataatttattttctgctcttaacaattgcaaaagtacccgagtagtaaactctgatccgtgaaactttgttccattaatgacgaactcatgtcactcgtatgcatgcttgggaagtgcctagaccgactcccggtgcttggggactatgactagtcgggcagagtgtttaaacgtaaggagttatccgctcggggaaattaaaattgacaagaggagaaatatatatttataaatatttgaaaatacttgaatctttctcaagtactgtatttacatcagatactactcatcatatatgtttgttctgcaggatccagatccagatatgcatcaaagggattcatggctttaagcttatctcctatgttacagaaatggatcagttagaacatcaccaccggcttgccgttgtcgccgccgactggtgtcctcgcctatacggttgggtgatcacaccgccgttgttgggcgtcgttttcttcaccgaccggccacctcatccgccgtcgactggtgttttcgcctatacggttggttggtcacaccaccgttgttaggcgtctacgtcttcaccgactgagccttcgccgccgccgactggtgtctccgcctgcacggctggcctattatgccgccgtttgttgggcgtctacgtcttcaccgaccggcttgccttcgccgccgtcgatcggtgtctccgcctgcacggctggcctattatgccgccgttgttgagcgtctacgtcttcaccgaccggcttgccttcgccgccactgactggtgtctccgcctgcacggctggcctattatgccgccgttgttgggtgtctacgtcttcaccaaccgaccgcctcgtccgccgacgactggtgtttccgcctgcacggctggcctattatgccgccgttgctaggcgtctacgtcttcaccgaccggccgcctcgtcctccgctaactggtatttccgcctgcatggctagcctattatgccgccgttgttgggcgtctacctcttcaccgaccggtagcctcgtccgccgccgactagtatttccgcctacacggctggcctgttatgatgccaactgatgctatcttcttcacggctggctacgtcgcaatcactgctaataggtgtcatcatcttcaacgcaagctgtctacgtctgctgctgactagtttcttcacgtccaaggctgcatgattctgccagtgttgattggccttatcttcttcatcgccggtcgtctcgtctgctgctgactagtgcccttgcctctatagctggtttataccgctacaactattgatggacgccatcgtgttcattgttggccgccttatctgacgccgactggtttgtcgcctccacggctgcgcgtcttcgttactattgatgggcatcatcatcatcaccagcttgccttcgccgccgccgattggtgtctccgtcttgatggctggcctattatgctgtcgctgatggactcctttgttttcaccgtctggtttttgccatcgccgactggtgtttctatcttcacgactatgcgtcttcgccaccggtttgcttatgttgccttcgactcgtgttcacttcatcatgactatgcaactttgtcatcatggtggagcgacttcatttttattatcttcggcaccggcaaactctattgccgctacttcgcaagttttgctacttcaccaaccatgacgtctacaagagcttcaacatctcggcatgcgtcaccaaatatgacaccgtgttattttattacaacaagtggtgttccaatcttcaatatttctactcggacatcttcgacatgcatcttcactcaagcaatgactactcgacgacaagaagctacaattctcgactctatgttaagttgtttcccaactaaccaaagggtcgggggctacacaaatacaagactctcaaaattcgacaagttttttgtcaagatgcatcaatcaatcaatcaacaagtcaactctgggagttattatcttcgtctgcgcttcagagccggtcaagattaagtttacatgtctgggagtttggagtcatcaaccaatcaactcagatcagattcaatgagttgaacaacagcatatactttcctctaagtgaagcatctgcaacagatatagcaccaagttctactgccatcttcataaatcaagaggcgttgcatcaatcttcgtcacacaaatgccaacattaagaaaatacttgagcatggatttcttctcaacagtttgatggattgttgttactgacatcatcaccagcacatctacttcatcggccttgatgtctccgtcgttgctaaggggtgaccacgtcctcgccgtcggttgctttttgtcatcaccgactttcatcgccgacttgttatttcgttttcacggttggcctactacgcaactaccgatagaggatttcattgttatcatcggctgctacaccactattgactggatcactgacatcgtcatcttcatcaacatcctgtcaagcctcttcaacatagcccactctacttctattgatgggcaacttcgtcatcatatttgatcatctctattgctgccaatcgtcattaccatcggttgcatttgtcatcgtcgactatttcttgcattttcatgattggaggattttgccatcgtcgttgatgcgcttctacgtcgtcatcgttggcttgttttcatcgccaccgactgatattctcgccttcacggctggcttattatgtcgccgctaatgggcgttttcatcttcttcaccagctgtctcgtctgtctccgactgattattttgtcaccatggctacaaaactctgtcgctattgctgggtgccttcatctttactgctggttgatctaactgctgccaaccggtttcttcgcttccataccgattgcatcagctatcactgatggacaatttcaagtactccaaaaagataagctatatgctcaggggcttacgagctcaagcacaaggatcataccttcaagttggattttgttctagatacaggcaacatgcactcgtagtcctgagattattttctatgctcgaagactggaccaatcattatttcccgtaagggctatcaaacgaatacttgcgccagttgggattcaatttttatatctattttggagtatcccataagggataatcactcagatcagaagctattcatatgagctacacttggtctatatcacccggaagatttattactcgggagcatgctacatgcgtcatcctttaaagggtgtcgaaggcatattttttggcctaggccaaatatgtctgcagcccatattttcaggtgtggcctgtcacgttcttttagggacttaggcactttttgcttaggccaaagtgcgcgtgatcaagtgcccaataccttaaaatccttttataccgcagttactcaactttttaggagttggtacaatacatcttaaaaggtgtcaaacagtaaagctttatatagctaccccgttgacttttttttataagtcaaggtgctttttgggtttttaagcaattgattggatacaatatcattgcttttttgccacaaaagtgtgcatatttattgaccaatattttggattaggctgattatatatttggtcattttccaggcggttggtaaatcctttatgagtttatttactcggattttacaccacatatgccgtatatttccgggtgtggtgaaaccatgtgtcttttagggacttaagcacatatgttaaagcagtgtgcgcatggcgtatgcccaatactttggaaatttctttatttcaccgcata

SEQ ID NO: 13037 - DNA, 2601 bp, Oryza sativa
gtcatgttgagtacatgaaagatgttgtgaaagccaatgaagtgctttcttgccccaaatgtcgtaaaagcaaaggtgtcatggtagattgtgaaaattgtgctaatttggaaaaagaaatttcttatttgaaaaattctttgcaaagattttctgatggtaaaaagaacctcaacatgattttagatcaatttaaggtttgcacacataaccgtggtttagattttaatccttatgctcatcatactagacatcctcctgttgtgttaggtgttggtgctagaagtggtgaaattttggttaaacctgaagataagaacattgtgtttaaatctgctggcatcatctctaccttgagtgcatcatcttcaaaatccaatgttgtgcatgtaaaaccttcatttgttgcttgtgttgctaagccatctgagtctaccaatgtttctaatgatcgtgaaaagtatacttgcttgttttgtgggaaagatggggcatattgttggtttttgtttcagattggctcataaacagaaaaaagagagagagattgcttttgcaaaatcaaagtggcaaaaatctggttgtccctcaaggaagccggtcagaccgctgtgggtcccatggtcagaccggcgaccggtcagaccaactactgagcggtggtcagaccgggcaccggtcagaccggcggtatagcagcggtcagaccagcagtaccacctcggtcagaccggactcggagaaaattttctgaaaattctcaacctatttttgcacgtggatatatgcctattggatcttctggtcatgtgtctcaatattggattcctaaatttttattatcatctaaccccagtactgaggcttcgacttctgctggtgtgtatcctttggtggcaaggaaggagaacgtgtggatcgtgaattctggttgttcgcggcacatgattggtgataaaaattggttctcctccgtcaaaaaggcatccaagactgaatcgattatctttggtgatgcttctactagtgccgttctcgctacaggtttggtaaaggtaaatgagaaatttgaattgaagaacgtagctttagttgaggacttaaagtataatttactttcagtttcataaattgttgatgaagattttgaggttcactttaggaaaactggaagcaaagtttttgattcttgtggtgattctgtgttgaatatttctcgctatggaagagtgtttaaagctgattttgataatcctatttcacctgtgataacatgtttggttgctaagtttgataaagatgtgatgttttggcattgtagacttggacatgttggttttgatcatctcactaggttaagtggtttggatcttgttcgtggtttgcctaaacttaagaaagatcttgatttggtttgtacactgtgtcgtcatgctaagatggttgcttcttcacatgctcctgttgttttttgtgatgacggatgcacagggacagctattacatatggacactgttggtctagctagagtgcaatctgttggaggaaagtggtatgtgttggttattgttgacaatttttctcgatattcttgggttttctttatggcaactaaggacgaaacttttcaaatactttcgtgatttgtttcttcgattggatcttgaatttcctgggtctttgaaaagaattcgaagtgataatggtggtgaatttaaatatgcttcatttgaacaattttgcaacgaaagaggttaattaactaatttggcaataaaacagcaaaagttaaacaataggagcaataatgaacaaagacctgcacaacagcaatagttgtcacatggtatgcaccgtgcacagcaaaatagggggaattgcaggggacaaaggagagaaaaacctaacaagagatgaaagaaaacttcttggacaacaaatattagctcgtcaatctagcagcaattatgttccaactcgtcatcccttcaatgagaatgaatcttataaaaatagctccctccatatccctatcgatcccttaaatcatcatatggctctattggacaacaaaagcatatagcagagtatatcaacgaaacagagcagaacacaagggatgaggaggcaagaagtataataatagaaagaatatatgcagagagaagtaaagagcaattactattgtcctcgtcagatggaggaagcagtacacggtggtggtgctgacaaccctagcaaagttaacccgttcaccctcaccgccaatagccagacaggagcgaccaatcgctgccaggagaacctcgcagcgaagatagaactccatggcaccagattaagtctcaactttgatctctagtagcacgccactatatcaaagagttgcgcaccggatcggccacctcgccatcggccggttcaccaaatcaagcacacttcactggatcgaccccctcgctgtcgtgctagagcaactcgaaaggcaggaggcggtgacgtatgtgtaacaagagggagattgagaggagaggaggatgggaagaaagatggcggccgtcgtaaggcgctgtggaaaggcaggactcttgatttctctc

SEQ ID NO: 13038 - DNA, 789 bp, Oryza sativa
aaaaatctatttggggtttattcgacggtcagtcgggaatttgtcaggtgatatgcactaagtcgtgtctaggttgatgggggcaatttcatgcgtatcattatagctatgcatttattttatgcattaatttattgattagccagttgcatcagtatcctcatttgagttcatgaaaaatgttctatgcataaaaatcatcatgctcgagtatttatttgagtcatttgttgctttgtttaatttggatttgagcatgaattggttcctatcccttgtctactttagatgtcagtcctattcctcgatcgcaagcgccgctccgagcttcagagtcgccgcccttagctttattgccttcttagtctgtttgcttgctagttttctgtttaggtttgttgcttgtgggttagtcggcggtcgatatcatgtgtcagtggtatgactgcctcaattaggagttgcgtgcctctttttcagtgttttaatcaagattaagataattgcacttaaattcataagcaagattagtttctgagcccctgttttcttccttttctcatatttctacctatccccttcagatggagacaaggaatggttcacgcgactccaacaatgccagtggcagcgaagagccgatcgatggagcacgtgccaacggtgcatctgacaacaatccgtccccaccgcctaagaacccaacaattgctcaggtgttggacaatcagactcagatgatgacaatgatgatgcaacagatgcagcaacagtaccatcaggtgttgc

SEQ ID NO: 13039 - DNA, 560 bp, Oryza sativa
aggcacacctgaatatctggcacctgaatggctaacatcacagatcactgaaaaaagttgacgtctacagctttggagttgttctcttggaaataatatgtggaaggaaaaatatcgatatttcacagccagaggaaagcgttcagctcatcaatttattgcgagagaaggctaaagacaatgaattgaatgatataattgataagaaaagtactgatatggtctcacaccaccaggaggaagtgattaaaatgttgaagctcgcaatgtggtgcttgcaaaatgagagcagcagaaggccttcgatgtcgatggttgtcaaggtattggaaggcgcagtgagcgtggaaaattgcctggattacagctttgtcaatgcaaattcagtgatatctactcaagacaactcatccacatattcagctccactttctgcatcgattctatctggtccaagatgaaataggcggctactgagcacaaaaaaatccaccgatctatgcacatcatattttgaaactactttggtaatctatcatatttcttcttgtgagaagtat

SEQ ID NO: 13040 - DNA, 966 bp, Oryza sativa
cgggcagcgcacagaccggcggcggcggacgaaggcgatgtcgagcgcagggagcggcagcgcgtgcgggacagatggaaggatggaggagaggagctcctcactgtgagcacggcggccggcgcgaaggatgaagacggcggcgatgaccggcgacgcggaggcacggacgggcggcggcgacaccctaggagaagatggagaggcgttaggagaggagacgacgaccacggcggcttgaattgccggccggagatggaggggagggaaaaactcaccggctcgcgaggggagaggcgctccggtgggattccggcgacgcgaggcggcggccgggaaagctcttgcggcggcgaagctaacggcggcggcgatttggcgcggcggcgactctagcggcggcggctcacggccgaaggcggcggcaagcggcggagctcgggtgtgacggcgcgggcgcggtagggggcgtgggagaggacggcaaatgggggaaacgagggaggggactcgggggagggtttttatgggcgagagaggggcggacgtggccggggagatggccgaaaccgccggcgacatggggaggagagagagagacggtgaggtgggattcaaaatgaatcccgcccacttcgtgcatgcgcgcgggcgggaagggcggaggagtggggcggcgacgtgggcgcgcggcacgggcggagtggggcgtggagaacggcgggaaacggcggcggcggcatgggcggtttcgacggcagcagttggagctccagctccaacggctggaggtgggagacgaccgacaggtggggcccacctgtcggcatcccagagagaggagggaggggcgcatgggccggcccaacaagaggaaggccgagcgggagagggatgggccgacggcccaagaaaggaaaaggagggaaaagaaaaaaaagaaaaagaagaaaggatttttcctgg

SEQ ID NO: 13041 - DNA, 887 bp, Oryza sativa
ccaccaaaaagggatatcgagttccggattgacttggtacctggaactgcaccgatccacaagaggccttacagaatgggagccaacgagttggcggaagtcaagaagcaagtcgatgaacagttacagaagggatacatccgcccgagcacatcgccttgggtgctccggttatctttgtggagaagaaagacaaaaccaagaggatgtgcgttgactaccgcgcactcaatgaggtcaccatcaagaacaaatatcctttgccaaggattgatgatctgtttgatcagttgaaaggagctactgtgttctctaagatagacctgcgatcagactatcaccagttgaggatccgcgaggaggatattccaaagacagcattcatcactcggtacgggttgttcgaatgcacagttatgtctttcggactcactaatgcacctgccttcttcatgaatttgatgaacaaggtgtttatggaatttctagacaagtttgtcgtggttttcatcgatgacatacttatctactccaagtccgaggaagaacatgagcagcatcttcggctggtacttgaaaagttaaaagagcaccagctatatgccaagttcagcaagtgcgacttctggcttaaggaagttcagtttctcggtcacatcgtgaatgctcaaggagtagctgtggatccagcaaatgtggagtcagttaccaaatggaccccaccaaggacagtcactcaagttcggagtttcttaacgacttgcgggctattaccgcctgttcattgagaacttctctaaaattgctaagccaatgacacagctattgaagaaggaagaaaaatttatctggtctgctgaatgcaataggagttttgaaaaactcaa

SEQ ID NO: 13042 - DNA, 542 bp, Oryza sativa
aatctgaaagaaacctttgcgagcatccgtgctttcaggatgaaactaaacccaaaaaaatgccctttcggagtactgtcaggaaagctgcttggatttatggtgtctcacagaggcatacaggccaacccggagaaagtcaacgccatcctcaacatgaagccgccgtgttcctagaaacacgttcaaaagctgactgaatgcatgtcggtgctcagtcggtttgtctcacgactcggcgagcgggggatgcccttcttcaaactgttaaagaaaacagacaatttctagtggggacccgaagcacagaaagcctttgaagatttcaagaaacttctcactactccaccagttttggcctcaccacacccacaagagccgctattactatacgtatcggccacttctcaggttgtgagcgcggtcctggttgtcgagcgtgaagaagaaggccatgttcagaaagtccagtgaccgatctacttcgttagtgaggtgttggccgattccaagacgagatatcctcaagttcagaagctgtt

SEQ ID NO: 13043 - DNA, 586 bp, Oryza sativa
aaccgaatccatgccctatttacagttgttaggaaggattaatttattatccgagatccgtatagtacttgtagaatgattcataatgacagtgcaatatatgacaatacctatctatcacttcgaaaatatgtgcgaaagttttctccggtttatccattgattcgtagacatagattttggatttctcaaggttgaaaagaataaggacccagtggaatctgcaatttgcattagatgatacatgtgtgtgtgtctatatatatatatatatatatatatagagagagagagaggaaggaacaaaattgaagttatgattgtaggaactcacgatgtgttgtagggaagtagtatgaacatcttataatgctgctgcaccgggaaatggaggatattgtcctcggtttgtttctcatagttttgtagcatcagcgtgttcactttgcgggggtccatgaatcctgtattgaatttgttgtgccgacggcacaactgaatctctattctacaacgggtacaaggaatttgtataagctacgttcaaaggaggaacaaaattgaactataaacaatacttacaaag

SEQ ID NO: 13044 - DNA, 894 bp, Oryza sativa
agtcgaaaaaaacaatacttcctccgacacagaatataggcagtttttaggtgggcacgaatattaagaaagtagatcgagatgattggaggagggttgtgattggtggagaggagaaagtaggtgaaaagaatgtttgtgattggttgagaagagagggtatttggagaaataacttcattttaggacaagttattgcgctagaaatagctacattttggaactgaggtagtaccgcagcattcagatacccagtacgtggacagtagtagtcagtagtaccacgaaatggcactagtggttaaaatgacccggaccctacctgactgttgcacggctgtgcgcctcccaaacaacctcacagtttcaataacagcacgcaaatctggataggcgggtccaacacaatcatcattgtactaacctttacatgtatcagcaatgaaaataggaacagtacgatagtacctgcaaaatataaccaactagctgtacagtagcggacactcagtcacgcagtagcacggaacataggcaaggacaaagcaccaagcgggccgtcgagcagagagataagataaataaagctacgattgttgattggcttgtggtgagtatgttaccgtcggggaaaagaggccgggggagcccccgaggaacgcggtggggctgagtccgtgcggcaccgggaacggtgagggcggaccgggggcggaggcggcggggtagcccatggcgccgacgaggagctgggtgaaagagccctggaaggccggggagggcgcgtcggggaagagcgaggcggcgagagtgagcgcgccggggctggactcggcggagaagagggaaccggccgcggatcgcgggggcagcgagagcgtggggagcagcggc

SEQ ID NO: 13045 - DNA, 1054 bp, Oryza sativa
ccatgtttctttgcacaggggaactttgaaatgtcccatcaacaagccttggcacaagtaacagcagaagcagtccattctccgtacagtatgattaatcaatcagatttctcactcccgttctcgtcgacaacgacttcagtgttggcatcacaacatgtcaactcttctgccaatgtgtcatcaccacgagaaataccaactctgccatcccacacagataatagcaccattgaatcaactgaggtttcacatggattccaaactactgccctcactgaggataaacctgctgatgatggctacaactggcggaagtatggccagaaggcagttaagggtggggagtatccaaggagctattataaatgtacccatttaagctgtccagttaagaagaaagtggagcgctcatctgacggacagattactcaaatactttatagaggccagcataaccaccaacgaccaccaaaaagaaggtccaaagatggtggcgctttactaaatgaagcagatgtttcccctgagaaggaagatgcatcaactagatcagaacagggctcccaagattattctggaaaattcaaggcatcaaatgatggtggtccttcatcatccaggaggggagataggggtgagcaaatatcgggctcaagtgatagcaattcgagctcggtacccgaagaagtgaaggttgagggtagagctactagtgatggaaatgcgaacaaaaggtggtctacaaaacatttttgttttacttggacattttctgagcttcaatatataaatgctagtttctattggacagacatgtgccagctccagctcaaagaatcattgtgcaaacaactagtgaggttgatcttttggatgatggctaccgatggcgcaagtatggtcaaaaagtagtaaaagggaatcctcacccaaggtaattctgttttttaaattgcacttacttgttcccgatgttctgccatgttttttcattatattggagcagctctgaatagctcaatgcaatcactttatttttttttggtacaga

SEQ ID NO: 13046 - DNA, 992 bp, Oryza sativa
tatttctttgtggtaatactgccatttcctggcggtctgtaaagcaaaccctggttgcaacgtcaaccaaccactcagaaataattgctctatatgaggccacacgagaatgtgtgtggcttaggcggatgatcggtcacatccagaagtcatgtggcctaaacattgataacacccccaccattatctatgaggataacgctgcttgtgttgcacaaatacatatgggctatgtgaaaagcaatttcacaaagcatattgttcccaaattcttttatccccacgagctccagaagagcggggaaataaatgtcctgcaaactaagtcatgtgaaaatctcgcagatttatttacgaagtctctgccagcctcaagtttccacagatgtgttcgtggcattggcatgagacgacttagtgaattgcaaggatcagggggagcaaagaatagcccatgattgtgatcctgaagaatcacaaacaagtcgtgaagacttgatcaactgttgtactctttttcccttggtgagtttttttccccattgggtttttctcacgcaaggtttttaacgaggcaacaggtgcaacacaatattcaaagtgccatgtactcttttctcctaccattttttcccactgggtttttgggaggagtttttgatgaggcatgcgcataattcaaactcgtctaagggggagtgttatgaaatctatcttattgtagacgaattaaattatgaatgggaaacttactacagaagaaagcttacgctgtaagctggaagccagcttacggcgcaagccagcttacaggagaagccagcttacagaggaagcccgcttacggcgtaagccggcttacgacgtaagccagaaggtccaaggcttacgacgtaagcctccaccctcctctgcctaaaaatagggcccagaaggtccaaggcgaggacaaccgatcttcggtctcctacttcttctcttgtagcttgtac

SEQ ID NO: 13047 - DNA, 680 bp, Oryza sativa
cccagcgcgggataatcattaatggtgcaaaacaatagaactcgtagtgtgaagttctcctgaccatatgcatcccaagtttccacaccctctttccacagaatctcaaggtcatcgataacaggctccaagaacacatcgatgtaattgccgggttgtctcggaccttggattaacaagcacaacataatatatttccttttgaagcacaaccatggtgggaggttaaagttcgcaatgagaactggccaagtgctgtgagaactgctcatgtctctgaaaggattcatgccatccgtacacaaacatatcctcatgtttctgggggtcggcagcaaagtctttgtgctttcgttcgatattcctccattgaatcgaatccgcagggtgtcttagcaaaccgtcattccttctctctgtggcatgccaacgtactaactttgcttcattggtgttggcaaatattctcttgaaacgatcaatgattggtagataccacacgaccttcgccggaccaccctgctttgacttctttccctcccccgcgctcttctttcgcttgtatcgagaagccttgcaaacaggacaagcatctaagtccgcgtattgcttgtggtacaatatgcaatcgtttggacacgcgtgaattctccggacctctaaccctaggggacacagaa

SEQ ID NO: 13048 - DNA, 2636 bp, Oryza sativa
caggggagtggggctgtgggggcaggtagtggggctccagttctccaccagcacaagggtccaaggcacgctgagtcagacccacttgggcggggcggggcgcggcgcggcggttttggttgctgcccgacacgcgaatccacgaatgcatcccatccatccccaccagcacacggaaaagcagggttgaggtaggggtaggacagaagcggcaaccacgcgacgtgcggacgcggcgcggcgcggcacgcccacccaaaaattccccgagccgtgccgtccaacaccactcatccgatccgacagcccgcgggagcccgaccggccgcggagacacagaaccggccccgcgcacacccccaggccccaggaccttggaacttcctcctcattcactccccgtcgcaccatgctctccgttaaccatagtccctctaaccacggttagttgctctccgagtcactctccaccgatcccagggttcttctacctctgcctgtctatatagctccctccccggcttctcatccgccgttccctccccctcgctctccctgctccggtatagctagttgagctctgatcgatcaggttgcatgagacggagaagctgagtgaggctagggtggttggttgtgatcatcaccatgagctgcaacgggtgccgggttctgcggaaggggtgcagtgacggctgcgtgatgcggccatgcctgcagtggatcgacgccgccgacgcgcagggccacgccaccgtcttcgtcgccaagttcttcggccgcgccggactcttttccttcatctccgctgtccccgaggcgcagcgacctggtatgtagaatacaatccatcacggctctgcacgtgtaccgtacatattcctgtacgaagcagctgaccatatgtcgttggttgcgcgcagcgttgttccagtcgctgctgtacgaagcagcggggcgaaccatcaatccggtgcacggcgcggtgggcctcctctggacggggaactggcccctctgccaggccgctgtcgagaccgtgctgcgtggaggcgccatcggccctctgccggagctcggcggggcctgcggcggcgctggcggggacctctacggcgccgccaagcgcaacggcggctggtctaccttctccactgcgaagcgggtgaggaaggccgaggtacctgaagccccgtcgtgcgacctaggcctgtgcctcagccccggctctccgccggcggtgggggagaggaaaccagcactgcggccggggacgccgtcaatgagctccgatgagtccggcaccacaaccggaggcgaaagggatcctgtgctgctcaacctttttgtctgaggccggtcgtcaagctagctaatactaatccttgcttgacctccgtctactggatcccggcggcgaagcagtagtaattttttctcgccggcgagcctagtttattggcatttttttttctttccctttcttttaggagtactagtctacgagtcttggtttttgccgtgtacgtagaaaagaaattaccggccggcctggacgccccgtttgcgtgggcgagcaactttttaccctttttgttcgtttaaattatataaataatccttcattaagctatatagacataggttgcgttcgttcattggagacagcggagattgttactcgttttccgcgcgcacgcttttcaaattactaaacggtgtgttttttataaaaattttctatagaaaagttgttttaaaaattatattaattcatttttgaagtttaaaatagttaatacttaattaatcatgagctaataacttaactcgttttgcgtatctttcccatcctctctccctcgaacacacccatactcatcttgtattgatccctatgacttgttatgagaacgattggagctgcaggcacagagtctagatttccaaatgaaagggctcttctacagaagttttggagaaaaataaattgttctcttccttcatgtcaatgttcttctcacggggtgtgttttgctggtgaaagagtgcaagtcgtataggcggatttgggggtagggagcaaaggcgccgcgtcatggggctacggagttgacgaggtattgccgcctcgaggataggagggcgctgagggtgagagagaaagagagaggagagcccacacagtggccgacacggatgctccaaaagtcctcatagttgtaccgcttgtacgatggacaagaccgggcacgtcacacgatgcagcacacacgaccatgctgtggctacaagttctacgcacgctctagtgtaccgtggggtgaagttttactctctccatccataatataaaaaattttagatgaatgtgacacattctaactaatacaataaatctggacaaattatatatcatatatgtcaaaatttattgaactaagatgtatcgtatccatccaaaatcccatatattattggacggggagagtattttcgaaaaaactggcttttgttttttacacctttgcatggcaatttcagtgcagttgttaattctattttcaaattatgtcatgtacaagttgctcatagtgctgattccttagcctaagggatatactccctccatttac

SEQ ID NO: 13049 - DNA, 10411 bp, Oryza sativa
gaccactctttcatgacttgattaacaaccaactaagaatctccacgaactattagatgctgaattcccaaagatatcgcgatccttaatccgtgatgaagcacctcatattccgccatgttatgggacgcagaaaaatatatccacaatacgtaactcagcctttctccagtcggggaaatcaggacaacacctgctccggtgcctaaaagcctctttgactcgtcaaaatgcatggtccaatactccatcttttctatcggcatgtcttcttggaactcggtccactcggcgacgaagtctgctaaggtttggaacttgatcaaagttcgtggtttgaaagatagatccaaagacatcaactctaaggcccactttgcaatccgtccatttgcctctcgattatgaagtatgtccccgagtggaaaacgacgtgaccaccgtgaccgagtgaccttgaaaatagtgagataatttcctaacggtaattaaaacaccacataacaatttttgcacctgaggatatcttgtcttggagtcgaccaaaacctcgctgacgaagtaaattggttgttggactttttaaacatggccatcatcttcacgctcgacaaccaggaccatgctcacaacctgagatgttgtcgacacatataacaacagcggctcttgtggatgcggtgaagataagaccggtggagtagtgagaagtttcttgaagtcttcaaaggctttttgtgattcgggtccccactggaaattgtcagctttctttggcaacttgaaaaagagcatcccccactctccgagtcgtgaaacgaaccagctgagtgccaccatgcatccagttaacttttgaacgtcattctgggaactcggcggtttcatgttgaggatggcgttgattttctccgagttggcctgtatgcccctatgggacgccataaagccaagcaacttccctgacgttactccgaagatgcactttttagggtttaatttcatcttgaagaagcagatgctcgcaaaggtttcttctagatccgcgatcaaatcatccctctgcttggtcttgacgactacatcatcaacataagcttcaacgttacgaccaatctgagttgaaaagcatctctggatcatgcgttgataagttgctcctgcgttctttaatccaaaaggcatggtgatgtagcagtaggccccgaagggcgtgatgaatgaagtcttcaagtagttggactcctttaaatggatctgatgatatcctgagtagcaatccaaaaagctgagtagctcgcagccggccgttgagtcaactacctggtcaatgcgaggtaacccgaagggatctttgggacaagatttgttgaggtcggtgtaatcaacacacatacgccattgtcccgtcttcttcagaaccaggaccagattggccagccagtcgggatgtaggacttctttgatgaagcctgttgctaacagcttggtcagttcctccttgatcgcatccttcctatcctgtgcgaagcagcggagtcgttgctttatgggtttagcgtcttccttaacatgtaaagagtgctcaatcacctctctaggaataccaggcatatcagatggtttccacggaaagatatctttattattttgaagaaaggtgatgagcgcgctttcctatttacaatctaactcggcgcctattacaacagttttagtgggatcagagggatctagaggaattttcttagtcttggcatcgccctctccgttctttggcatcttggttgcaggcacttctccttcggttgctgtggatgcagccagtcggatttcctctcgagcgagcgtaatctcgcgggtctgggccatctcgcagctttccttgtggcaagtcctggcatcttcatcatcatgtaggtatagtgcgggacggccaagaacttggctaacaccgggcgttcgagtatagcatggtacgctgtctcaaaatcaacaacttcgaagcaaatgttctttgtgcgaaagttctcccaagtgccgaaagtaaccggcaaagtgatctggtcaagtggagtagaagatagcccggggatgactccgtgaaagggcgcattactcggcttcagttctgtgcgagggatctgcatgtcgtccagagtcttggcaaaaaggatattgagtgcgctgccaccatcgatgagggatcgtcggagcttgacgttacgaaccactaggtctagtaccatggggtaccgccccgggtggaccactcagtcaggatgatctaagcggtcaaacttgatagctgtctctgaccaccgaagatattgtggcgtatcgggctgaacggcgttgatctcccgctcggttagcttttgctttcgcttacattcataagccaggggtccgccaaagatatggttgagttccttgcgtgagtcttggaaaccagtaggggcatcatcttcatcatccttcttcttcgacgtgctttgaactccgtcagtcggtttgcttgagttcttggcgtattgctctgcgaactatttgtagacgaagcaatccttggccgcgtgatttgaattcggatgatgtgggcattgggagtgcatgatcttgtcgaaagtgttgacgcgcgaacgctgtcgggaggatggtgtagtagttgccacaagttcttcgggcttacgcttgcgatctttgtaattggtacttccactcccccttgtcgtcggcgtatctttctttggcttccaggtggtgcctgactgcttggatgcggtgacgacgtcttcagcttttgcgtactcattggccttttcaaacatctgcttgacagtcctgggaggcttgccgactaagagttcatgacgaatgcccttggtgaaggcggcaatgatgacgtcgtcggtgatatcagagatcttgttatgttgctcggaaaaacgtcggatgtaatctcagagggattctccagacttctggacaacgttgtaaagatttaactgagtaccagggcgttcaaaagtgccctggaagttggcgatgaagtggtcgcgaagctccgcccaagatccgattgtgccacgggatagcccatgaagccaggaccgagcagagtctgctagggccacaggcagataatttgccatggctttgctgtctcctcctgttgtgcggatcgcgagcctatagacagtgagctaagactcaggatttgtcgtgccatcatacttctcgattccagtcggtttgaagccggtcggccaatccactcgacgcaggtcacttgtgaaggcagcatctccatccacatcgtcatcgtaatgatccagtgaatggtgggggatgtagcctcttgccgtgcggcgctggttgatagtttcgcaaagatcgacgggacgactgcgacgtggggagcgaggctgttcggctcgacgctccctgtgtcggtcaggaggcgagtggacatatcgttcgccatgatccctactcctgcggctagatccggcgccgacgacgctgaggcttggttggtgatagtcttgagatcgaagaggcggaactcggctgccagtcggcgtacggacacttgcagagttcaccgggactgaagcgacgatcatggtcttgatctgatttaagatgttgacgacgtgattggcctgattgagtgcatcttccttaaggagagtgtcgagaagggtgatcgctgcaaccgcgttctgctggggggtgcgaaaaaccgccgtcccttcgacgtcttgttgcccaataagttctcgtgctcgtcgcccggcctccaaggcgcgctgtcgccggtcctcagcctccttcgtagcccgttcgtgctcttgttgctcacgctgtagccgttctcgctcttgtgcttgacgctcctcctccagtcggcgacgttcggcttcttgtcgcacatgctgttcttctgcttctcgggcttgacgctgttcttccgtgtcattgtcggccatgaaaacgccgaagaagagaggcgcgtagttatcttcgtggccttcgtcgaagttgtcgaggttgcggtagtcgtagtggtagtcgaagtagtcgtactctacaatctccgttggtcgagaatcgacaccgggggagctgaggaagccatacaattcttccgtcgaaaccgtcccgagacgttggagtatgacgccgacttccctggagctaggctggatcgaagccgaggctggatctggcctaggcctacgggaagaagacgcccttgtggtgaagactgtggccaagtcgtcggggagactcatcaggattgagggataggccccattgtcttgatcaggtcgtgttgaagtagattggatctcgtccgactggtttgaagccgactcggttgagatgatcttggagtagatctcggccgagttcgggataccgaacggggcggagacctggcctccccccgactggttcggatccgagtcgaggagagaaatcttgccgaagtcgttggtgatgaagtcgaggctgccaaaccggaacgcctgcccgggagggaagacgaagtcgtcgatgccggagacgaaacccatcgcactagtcggcgaagaacttgacactaccctacctggcgcgccaactgtcgaaacaagatttcggcaatactaaaagggggtggctatcaagctggaaaagtggatgggtttaaagacaaaaaattttatacaggttcaggccttcttaataagaagtaataccctactcctgtccagggattgatccgtcgagtgatctaggagaaaaatcgtgccccaagagacacccggacccctccttatataggagaaggggtccgtattacaaagtacagcccatactcctaacggaataggtagttacagataagatacaatcgtaaccgactaggatcccgggtatttccttgacataaaagtttggaatttaacccgagtccctttaaagatattctatctatacatggcaccccatacccagtcggatatacatgccgtgtaggtatggggtatccataatctccacagatagagtcctgagaaggcaattgtatctatcaattaggatattttatgtaatttccttagagatatatttgggcaaaagtctgccgcaaagacttatggtatcttagagtttgttagagataagagtcgtatccgataaggacatagtttgtaattctcgggtataaatagaccctgaaccccatgtaatcaatgaacacacatgttcaatacaatctcggcgcatcgccaccctttttactttcgttttgtttcgacgagttcttgctttcgggttgagctgtatcggtttcgatctttaacaagaggtaaaacttgttatgacggcttgcgttctcgggattagtgcttccatctttacgacactctaatcttgtttatgtaattcatcgagttatcatatatcctgcataatctctggcaatatcgttatctggcctacaatcggctaacatctatcggtagaaggcagccgattaggttaaatagtgacgttggcttggattatataggatatctaccactctatgaaacttctaatggcttgattgtctagatatttgtcacgcccggaaattcactagtaatttcaaacttatttgtgcataaaatcctcgtctaggaatcagccgaggtacacaaactgataatttaatatacaaatccatcataataataacgttacatacatacaaaagaaaagaaaacagcagcggaataacggtctagcgatggcttcagctccactcccacaagcagctcaactggggtataagccaaacgtcttctccttctggatcctttttcttcaactgaggttgattgattattgcaagaatgagcatatgacatactcaacaagccacacagcaaatatgcaagtgcacaaggataccaaaggatggcataatatagtctcatttgcgaaagcagcatttagtaaagatttaagagtagtgaaacagtagagtaattaatcagaaattttaatcaacactgaacagcacacccatgctgctcaggcccaaccaaacctgaacaaccaaccccggtcgtacagatcaaacctccaaaccaggaatttaccattccaaaccaggagtcaaatttattatcacattattatcattaatgagtagtgtgggactaatcacgaaaaacattgctcaacccgcccatgaccgcgggcacggctattcgaatagttttactctggccagaggtataccactatacccacaagacacgattccacacatgttgccatgcctcgaagtaccaccacggcactgcaaagggggaaatcatgacaatacccttcgcacaacacaactcaccacagtgcaccattcctgaatcataatcaacccctctataaatataaccagaggcatggactccctagcgatccccacggacttctcaccgcttctcagtctggtgccccgtaatgaatcatgctatacaaaaggtaaagccgttgcccacgctggcttgtggttggcacggttaatgtctcacaacagtagctcgcgaaccggtccttaattgccataagcacgaccttcaaaaccatgtgctgacaacccaccattaattatattttaattaccaattaattatcataacacgattaaccatcgtgagctaccattaaatataaccataaataataatgtagtatatatgattcatcccattagtgagctaatgtttctaagcatggctaagcaattatatatataacatttagctgaaccaaaccaatacataaggttcaagctaatcaatttattacccaaggtatcaaggaatagggcattcaatgcaaattggccataacaaaggaataggttcacaccacccggtgacattcgaaaataaatgtacagttgaaataaatagagaatttaaatataggatcaacatgctcaaaggattgtgtttaggatctgtgtgacttgccttgcaataatcgatcttcaattaatcttcttgaacacttccgacgcactcacgaaccttcgcaacgacggaaacgacaaagctagcacgcaaaacgaagaaaaagactaataaaaaccaaataaacagtacaaaaacaagcataaacagtatatgtggatatttttaacatgtagatcttgattttagaaaaatttagcaactagaaccagtcgaatccgagttacgacgatttagttatgaagttccgaagtttaatcgattttcatctaataaagaaaacctagaaaaagggatttatgacgtcatcgctgacatcatcatcgccggccatggcacggttgacacgaccaccggcaaaagagggctcggttgggctatccgaggacacctacgcgtagaggacgacgacgcgaactcaccggtgcaaagaacaacgaaggacgacgacgaacgacggccggcgacgaggttcaacggcggctcgactcgggtccccgacggcgacgctccggcggtcttcggcggctgcgaaggggcggacgggattcctctcctcctcacgaacccgactgtgacgacggacggcagcggcgacgatactagcggcagcgcgacgcgaccggaggatcgccggcgacggcggcggctaaaacaacgcggcggcaactctacgggcgacggctcggttgggacttggggtaaacggaagaggacgactaggggatgctttatatcggcatgggtggaggagatcggctcaggaacggatggatttggtgaaagaagagtcgggcttatcccgagttcacccgaataaaaacggccaaaattcgtgagatagataacgaatttgatgggggtttcttcgggattaggtggaggagatagagaggaatccgtttttgcaatcaattttggaagggaagcaacggatgcaccggatttgatggaggaggaggcgactgcacaggttggctcggctctgtctggagctggaagacgacactgtagcagtagggaggccaactagactttttgggctgggccggaagggagcaacaaaggacttccaatttaataaattaatcaatgagatgagctttgaattgttaaaaatacttccaatgctcaaataatttcaagaaaaatcctgaaaatacttggacactcaaagtatttaacaaaattaaaatcagatcattaaatgattaatttaatatttaaataattgctgaactgctctttgtatgattaaaattaagagttgagctccgaaaaatccgagaaaattccagagagtataattaaccatggagaatttaataaaaattaaatccatccattctttatatttaggaaattttatttcccacatttaacttcacttgtaaattaataaacatttaatataaattctaataataatttattaaataatttataaatcctgaaacgaaaatcaggatgtgacaatattgtccttcttttcatacttatagctgtatcagttgagtttgatcttatgagtcatgattagaatctcaatctctagcctgcttcttggtagccgattagggtagtatcagggtttcagccgatcttacctgattgaactacaatacttgttttatatgcttcgttgatatgttaaatctgccctttatgctaagatcttatagcatttaaatatattaggctttcgtttgatatattctgcttgctttaatatcttaatatagagtggtatcggagtattagccgatacatgctaaatctacctgattggctatgctatgaacctatatagtcccattattaatatatatttcgatctaagtgatttatactgtctcggcatggcgaccgatctatcccaatcacttgatttaagtatatatcgatataaggagtatatattgttaatatctacagccaatcgagtagatttggttccttcttgtttactcatgactgtcgatcgatacatatatgacatcggctcaaaaataaatgatatgtcatcggccaagggtcgatcggctgtcatttatgaatttaaccgcggtttctttgtctttgttcttgttgattgcaggatcaaatcaactggcacgcttgcatacccgaaggcgagttttggacctgcactggagttaagcagatctcccaggcctcgtgttttacgtcaacacgcttttggcatgcccggtgggactgattagaagtcagagttttcctcatggatgagaagccgccagcatcgttgtcttcggctggtgaacccggctctgttaaagctaagatccagaagctaggtctatctgaagtcgaagaaggcaacatcgtgaatatcactccggacaagttgacacctgatcagcagaaggatcttgaagcaatgatgcaacaagcacgtaacctattcttgaactcattcatgcaaacccgcaaggggacagttgtgcagaaatatgaagtaaaggtagttgctgatgtccctgggaccggttcttctaaggatagagaagtgaaacaagctccaagtgatgtggctcaaccgagtgataagggtgctgcagatggttctcaaggaaatcaaggtgttggctctaatcaggatggcaatatggcgcagttacagtttaacaactttcaggatcaggttgactatgccgtgcaccatgctttgatcaatcaatctggaatattggtcaatactttgtcaaacatggtgaagacaatggttgatggttcaatggctgaatatcaggctataggactggtttatctaccaggaggggtgttccccaattatcggccgttagtcactgataatcagccagctgttcaaccaatttctctgaatgcaccatcagctcagccgacggcaccattatcggctccttcacctgctgcaccatcatcggcaccgggccaattagttaatccccggttgctggtgagagaacaaccacagcatagtggacaaaatgtaaatcggctaacgcaagatcaggttgcggctaagttcttacctcctcaacctactgttgatccaacccagcagcagccgattcagcaaacaccaccaaggcagcaggttgcgcagtcgattcaacaaacacccgcagtccaacaagttgtgcaaccaattcagcagacgccaccaagacggcagattttgcaaccagttcagcaaacgccatcaaggcaacaggtcattcaaccgattcaacagcaaggcttgatgaatgcatcggctgggtttgcaacacctggcagtcagccagggcagcatgctgcgaattaagttgtcccagagcacttggttcatcatgtacagccagatcaaacggtgatccctcaagttgttcctgaacatttgg

SEQ ID NO: 13050 - DNA, 2288 bp, Oryza sativa
aaccagtcatcacaattcaacagacaagtctagagattttttcatcaacatcgtgcatcggtttggagtacctaatcggatcatcactgataatggcactcagttcactggcggagtatttaaagatttctgtgaagacttcggcatcaaaatttgttatgcctccgtagcgcatcccatgagcaatggacaagtcgaacgtgccaatggtatggtacttcaaggaattaaagcacgagttttcgaccaactgcatccgtacgctggcaaatgggtagatcagctgccgtctgtactttggtctctgtgcactacacccagtcgggctacgggccagtcaccgttctttctagtctatggtacggaagcaatgttgccaagtgaggtagaattcgaatctttacgatttcgtaacttcaaagaggagcgctagggagaagaccgagtggatgatctcaaccgactggaggaagcccgtgaagcagccttaattcagtcggctcggtatttacaagggatgcgatgttatcacaaccgcaatgttcgatcgcgggctttctcagttgaagacctggttttaaggaaaattcaaactacacgagatcggcacaagttatctcccttatgggaaggaccgttcataatttttgaagttactcggccaggttcttacagactcaagcgtgaagacgatactcatgttgacaactcttggaatattgagtatcttcgtcgtttttatgcttaggcattacttttgtatcttcctctttgactgctaacatcaagttgttccttgagttaccagtcgggggctactataataataatggagtgtgattattatcaattcaattttcttacttgatttatcattgccttgtttgatcttttggcttagtcaatgaggactgaaagtttttaacaacttttgcgagttctaggctcaataaggtttgacgaaaacttttaagaaatcaggagctgagtttaaattatcaagcacagcataaattcatcagtattgtacaaattgtgcctccatcatcataagttaatactatacaatgtaaatcagactcagttttttcatcatcagaattaccagacccagtcggcccgagattgttgtcctgaaacctctcaactacatcagcagtaatcttgtctgcagccttttgtgcatcattgatgagatcaagggcatgttcttcacttgtcccatctgcaaagtcgtcgacagcatcaatatcgatcttcgggtacaaggacttggtcattgccaatgccaggctagcccctatgcatcccgctttcttgatgttcttaaaatatgtatctggagcagctcttagcttgtcgaagatttcaacagcatcaaaagaactcggaccattattattgaaaaacatggcttggatgagtggtgtggcggcgttggcaacttcatctccggctccttcaagcttcttaattttgttgaccaagacgtcgaattgagcttgagatttgattttgcgatctgcgcaaatggttcacatcaacgactatgcaagaagacaagaatggtttgaagtttcagcaacaagtacattcgacatctttcagagccgagtccctttgtttggtcaattcgcccttgtctttttctagagctttgattcgcttttctagctcggatatcttggtagcttgcactgtattattttccattgatcaattacatatggatagcggctttgagtaagataggcaggactgaaggttggcgttggtacctttttagggagggctgcttgcttgagcctctgcttccgggatgtcttcatttcgttctgtacccgactgatttctagtcgggggctcctgatcagtactgacttcagcttcggccgactggtttccagtcgaggttcattgctggcctgtacattgtcggttgctggttgattactactcaggcgatctttggcagtcggcccggtttctgtcgtaggactagtctccgcgccagttggttcagagtcttttccagaaggatcgatgtcataaggcttcctgcaaatttgagatatgctattaacaatacttcaatagtgaatgattagcgatacaagagaaaatgctaagtgacatgtacctggatgacttcctgattttcggtatgggacgactggatgttttcttcttcgggttagcttgtcttggctgttttccagtcacccctttgctgccagccttttcaacatcgtcaccctcatcgtcactcagaactaatttcctcttac

SEQ ID NO: 13051 - DNA, 5665 bp, Oryza sativa
cggtggttgcacggaaaattttgtggaagctgtaaagttctaaaaaaatggattgaagtgaatttgtgacccctagctttcgctggtgtggttttgcattgtagctgagggtggggaaagtggcaaaggttttggcgggaaagacaaatcacctcgacttaatgtcgtaccccaagtcgtattgtccgaatcggctgtatcacctaacccagtctgactcggacttagctgatctcaatcgtatccgatccggactcccgccgattcttgctctgtttccgcgacaatcctcgtcttagattccgtttcgatctaatcttcttttccaatgctgatattaccaaatttggttgttaacaaaaggcgagcaagtgccaccctcactgatcaatctagctcgcccaagaatccaccaaagtattcaacgagatcatcccaccggcaacattttaggagacatcaacaagggagtatccactcattctcgtattgcaaatttttgtgagcattactcgtttgtgtcttctcttgaacctttaagggtggaagaatcttttgggaggccgattgggtgaaggccaatccagaagaacttgaccatttcaccccgaatggaagtgggacttttgtggagcgaccttcgcaaaacctgattggccttaaatggatctttcccaaccagccagaccaaggccgggtcgtaataaagaacaaggccaggttagtggcgcaagggttcacccaaatcgaaggattagatttcggtgaaacttttgcaccggtagctagacttgagttgattcgcatattgcttgcttttgctagtaacctcaattttaagctatatcaaatggatgtcaaaagcgccttcctcaacgggcctatcaacgagttggtatacgtggagcaaccaccgggcttcgaggatccgaactatcccaaccacgtgtacaagctccacaaggcactctacgggcttaagcaagcccctagagcttggtatgagtgtcttcacaattttcttgtgaaaaacggctttgagatcgggaaagccgattcaactctttttactaaaagagacatgataatgatacttttgtctaccaaacatatgtcgataacattatatttggttctactaacaagtcttttagtgaagagtttagtaggatgatgaccatacgatttgagatgtccatgatgggtgaattgaagttcttcctcgaccttcaaatcaagcaactcaaggaaggaaccttcatttgccaaacaaagtatttgaaggacatgctcaagaagtttgggatggaaaatgccaagccaatccacactcccatgccatcaaatggccacctcgacctcaacgagcaaggtaaagacgtcgaccaaaaggtataccgttccatcattggctcacttctttacctttgtgcatctaggcccgatattatgcttagtgtgtgcatgtgtgcaagatttcaagccgctccgaaggagtgtcaccttgtggccgtgaagagaattcttagatatttagtgcacacacctaaccatggtctttggtatcctaagggagcgaggcttgatctcattggctataccgatgcggattatgccgggtgcaaagtggatagtaaaagcatatcgggtacttgccaattcttgggtaggtctgttgtttcttggtcttccaagaagcaaaactctgtcgccctatccaccacggaagcggaatatgtttcggcgggggagttgttgtgctcaacttctttgggtgaagcaaaccttgagagactatggcctcaatgtatccaaaatcccactcctatgtgacaatgagagcgccattaagatagccaacaaccccgtccaacactcccgaaccaaacatatcgatattcgccaccatttcttgagagatcattccacaagaggcgacatagatatccaacatgtgagaaccgataaacaattggcggatatcttcaccaagcctctagatgaagctaggttttgtgagttgagaagtgaactaaatatcttggattctcggaatgtggcttgatctattgcatgcatgtttgcttggtagaataggtttgcatactactttgtgacaaaatggtcattcaactcatggatggacactagtcacttttgtggagaacttgaatctatgtgtattgggatctcatttttcaacaaattttggtcgtagcacaacttgaaatagattcacacattccctctctcgagggtgaattatcttgtctcatggtaattccctctcttttgatccctcggattgtccatttgacttgtggctattgttttgtgtgattgattgtgtgctagtcacaagttcaagtggaccctctagagctcgaccatccctcctttcctaatcctatcaaaaatctttgtgaaatgtgtttttgaaaaaaatttcccggtgcttgtcccctacaaaattcctttcaaatgtttgcaaaatagtttcatcaaaattcccggcgaaatccccttgcaaaactgtgttttccaggaattttcggactttccgaaaaattttcggaccttccgaaaatttcccatcctgtcgctcttctattcatgctattccaggatttttcggactttccgaaaaattttcggatatatccgaaaatcatcaaaaccgtgtgcttcccctctagatccgttcggacttatccgaaaattttcggaaatgtccgaaaatttcggggctcatatattttgacccgtggactcctctctctctctctcttcctcactttttcccaacgggtttgactccctcctccactccgcaccggcgaccccattctccggcgacctcccgcggctcccctcctctccaacattgtgggagcgcgtttggggcacttattgggacttgcgttgtcgatcatcaccgcgttcttcaagtgttcttcgtgttcttgaggtatccgccctaaaatcaaatcctttgattcctcaagttttatcttgtgattccctttggtggagatgttcccctagtgccctaggacctgcagattcattttcccaagtttttgttggcggatttgtgctgcatccggatgataaggttcggccggatttttccggaaaatccgaaaattgtttccggatatatccgaaaattcctggccgacccctatcacctcggttttgcacgattcttgccttcacttacttggtccttgcttctttggcttccattcactgattcattgtctatatcttgtttgaaggatgcctccacgcaagcaaacctcccacaagtccaagcaccaaagggaccgctctcccaccccatcctctcatgatgatttggacagtgattggtccgggagagaggatgcggttcctcaggttgcgcgtgtggcttgggccgacactctccctcctcggcggtccactcaagctcttggtggtggtggtgatggtgagggctcctctcatcaaccgcaaacaccaccgcaccaacccaatgtccccacaggtccttttcgcattcatacacccaagagggatccggcggtgattcgccaagtgtatgattggaagcggaagactgaggttgttgctcctcgccgggatgaggatccgcgcccccttcgccgcaccgccacggattcgcggttttggactctctttcaacaagactttgatgagtctgtgatcaagtccaaagctcatcccaccgttcccatgcaatggatcaactaggaggagctgcaggcgcatgatgatccggtgctaaactttgtgattgcaaattgtgagctcatgggaattcgctctttcgtgactttgcagcagaattggtgcagcgaagtcatcgctcaattatatgccaccgttttctttgatccttattgtgccatgcattggatgacccaaggctcttactattatgtctcctgtccgcgatttgttgagatttggggttttgacgtctgttccttgctaaaccttcctgatatgcatgatcttcccattcctgccaacactaatctcctccctctttacactccaaatgatcctaatgtggtgttgggtaaagtcgacggtctcaaaccgtactttgcctgcttgaaccggatgttttgccggtcctttgtgcctaaggatggtgatgccagcagcattaaccacctctccaggaccgtacttctcaggttcaatcccctcctcatcgctttcatgttttgcactttgtgtgggaggagatccgcatggcctccattcagtacaagaaggggttggtctatgctcctcacattatgcggatgatcgagactgtcactcagcttcagtttcatcatgatgtgactcattcccagcttcacttgcgccttgttaaggcagtaaccccgacaaataaattcttcaaacacccgaacggaaatattattgaaggatttgggattgtacaagatgtacctgtctgctttgaagacaaggaggcagtcttggatttccacgtctttgtgaaagtgcgactaggcccctagtgattttggtgattaattacaatgcgattagagaggattaaaatttttattcacgtaaatgtgaaggttgttatgtcctcaatgagttaaagtaatgcatttcccacccaatgcattgacatgatgtgatgcggcaaatgagcaaatgctatattgtaccttttcttttccttgagttaataggaaagccgcactattaagagggatgatgcattgacatacgaggagtgatcaaagtgctcaaaatcaatttttaaaagtgtttctccttagtttggtgtgttctggaatttttttggagttttccgaaattcattttcggactttccgaaaatacacagagccagtttttcgcttctggaaattttcggatatgtccaaaaggcattttcggactttccgaaaatgactgagaaggcaaatatggttctgcatattttcagacttgtccaaaactgattttcggattttttgaaaaacatcaatagagtcttttcgcttctgtaaattgtcggagttttccgaaaggaattttcggacttttcgaaaatgtccagaagggtgtttttggttctggaaatattcggacttgtccgaaaagttttcggaatgtccgaaatatcttcagttaactttactgtcggtgccgagctggaattttcggacatgtctgaaagagaattttcggacatgtccaaaaatctttcggaatatctgaaaatcacaattattgtgcataacgggcataatttaggctgtggctataaatagccccctcccctcacttgtgagggctgctggtcacattggagattcttgtgctcttggcttgctcttgttgagattcacttttgagccttgctttcttgtttcccctctcacccgtgttcgattcggatttggtgtgtgtgagagttgtggattcgagtttgtgtgagtgcttgttgttgacttcgtgaagatttgtgagcacttgcatcatctccaggagttcattgcttcatttgttactcttggaggctgaggactcctaggcggctaggtgtcgctcccgagccaccgatctacttgtgattggccgggagaagtttgtgatggtcagatctcacctccgaaag

SEQ ID NO: 13052 - DNA, 6051 bp, Oryza sativa
atgctttcttgcacaatgacagagaagcccctatcataatcagtgacaagctttctgaagacgagactcaacgtcttctgtctatgttagaaaagcatcgtgttgttcttggctattcccttcaagacctcagagggattaatcctgcactttgcactcattgtatccctattgaccttgagagtactccctccagggaacctcaacacgactcaataatgcgatacgagaggttgtaaagaaagaggtcctgaaactcctgcatgccgggattatttaccccataccatacagtgagtgggttagcccagtccaggttgtgccaaagaagggaggaatgatggtcgttgcaaatgctcaaaatgaacttattctgcaacgaaccataactggatggaggatgtgcatagaacaaggctacgaaaaaggatcattttccgctacccttctttgatgaaatgttggaacggctggcaaatcattcctttttctgtttccttgatgggtattgcaggtatcatcaaattcccatccatacggaggaccaaagtaagactacgttcatatgtccgtacgacacatatgcttatcgtaggatgtctttcggactgtgcaacgctcttgcatcttttcaaacgtgcatgatgtctattttctcgaatatgatcgaggacattatggaagtcttcatggatgacttctctatctatggaaggaccttcggtcattgtctgcaaacgctcgacctctgaccaacctgttagccaaagatggtcccattgagttcgatgacgcgtgcctaaaatactttgaaattctcaaaaaggcactcatctctgctccaatcattcaacctcctgattggactctgcccttcgagattatgtgtgatacaagcgatttcactgttggcgcggtcttgggccaaaccaaagacaaaaaacatcatgcaatctgctatgctagcaaaactttaaccagagctcagttgaattatgcaactaccgagaaagagctgctcgcgattgtttttgctatcgataagtttagatcttacttgatgggacgtaagtgataatttacactgatcatgctgctctaaaatacttgctcactaagaaggatgctaaaccacgcctcttaagatggattttgctgctccaagaatttgacttagaaattaaggataaaaagggagtagaaaattctgtagcagatcatttttctaggctgcacatcactgacatgcaggaataactgataaatgatttcttgagagacgacatgctgatgacggtacgtgactccaacccgtggatggaaacatagtgaactacatggtatcaaaatacataccaccgggagaaaatcaaaggaagttgaaatacgatagccgccgtaacatatgggatgagccatacctatatagggtctgctccgttggtttactaagaagatgtgtgccgactgaacagggacttaagattatagaacgatgccatgcctcaccttatggtggccattatggcgcattccgcacccaagccaagatttggcaatgcggtttcttctggccaacgatgtatgaagattcaaaagaattcgtcagaagatgtccaagttgtcagaggcaaggaggaatcactgctcgtgatgcaatgcccctcacatacaacctgcaagtcgagatattcgatgtttggggtattgacctttttctaagtcatgtaactgcgagttgcaagtttattctggtggcagtcgactatgtctccaagtgggttgaggctatgttgtgcagcgctgcggatgcgaagcataccaagaagatgttgatagagatcatcttcccaaggtttggtaccccaaggatggtcataagtgacggaggttcgcacttcattgacaaaaccttttgagacctcctacgagacatgggagtgaagcacaacgtggccacaccttaccatccacagaccagcagtcaagcagaaacgtcaaataaacaaatcacgaatattgtgcaaaagacggtcaacaaaatgggaacaggataaaaggagaaattgccagactcattgtgggcataccggacagcatacaagacacccattggaatttctccctatcagattgtctacgggaagtcatgccaactccctgtagaacttgaggacagagcatattaggccatcaggaactggaatatggactttgaaggagtaggagaatggaggatgatgcaaattgctgaacttgaagaatggagagagaaggcatatcacaacactaagatatacaaagagaggatgaagcgctggcatgataagaggataaaaatcaagaaattcaagcaatgagacaaactgctgatgttcaactcgagggttaagcttttcggccacggaaaattgcgcagtaaatgggaaggaccgttcgacgttatcgacacctcttcgcacggggcaatcacactctgcgacgactcaaataacatatttaaggtaaacagttaacgtttaaaaatttttcatgagcctaatgaatctttagatgaagaagtggatattattgaattaatcgattatgaaccataatgatctcatctaaagcatgcttaatttcctgtaaaattgtcatttctgagcttagaataagtttgcttgagcgtgtgaaaattttggtagccagctgagcccactagggttcggccgaacccctggttccattctccttcaaagtccatattccattctcctgctcccaccagggtagcacccaatcggccccaagtttgaatagcttcctctccgcgctcgtttgagtttgtttagatgcgcattcggaggtagaacttttggatcagcaccataagacccttcttcctcctctcctccatctttgcaactcttctctccatcctagctcaattccttgatttacaccctcaactcaccaatggctggcaaatccctgatgccatacattggctcctcctcaaactccacctacaaccttgaaggagaaacaccggcgaatcaagtcatcccagtggaaaactacacaatggaagggggcattcaccccttgctacggtgcccagctccccagcaaatatggagccggccggcaaactcactggttcggccaaaccaggggttcggtcgaacccgtctcggccccgttcggctccccgttcggcagcacgatccctctcccctcgtcatgtcaccaagaccaaaatccgggggtattagcctgcacgacgaacaacgacgggtgaactcagcctattaaagcgagacgtcttttccaagacgatgacaaggccactccgcctcctgctgagcggtatgtgggcaccctctacaccaaggcaggggatgaggagctccacaactacatcacacccaccgccactccatccacccccaaggaggattggttttgcattcggagagtgcgaactcccggcggtaggtatggtaaaggcttgctccggccgttgacggcatcggagaaggaggggcagcggaatcccgttgccctccacctatgacggtgaagcgtcatttgacgccccctccaattgtaagggcgcttggccaatttcaagaggaagaagtgaagtcgccggaaccctcggtccataagctagcggcacaagtgaagaagctccgcaaggagaacattgagcttagggaccgtaacgcagaactaggggtagagcttgctgagcttaggaataattttgatactcttagtcgcggttcatgcgctagatcaagcgtgcattcgtagagatggggaaggagaataagtatgatgctaattaaatgtctcctttctcatgaataaatgtaattggtgcttggtcatttattttccaatcatgtaagcacttgctataaataatgtgactcattggtgttaaccccaatgtttgccaagatttgtttttgttttgtttaataaagatcaggttttgaataagtgtgggggagatatcctagcttctgacgtgcacatactctgaaatttgctgaatatctaaacacctgaggtacactgaactctgcagggaattgcagaggaattgggtaccaaggtggttgggctgaacccaaccagtgctagtcccaatccctctcaattttcctaggtaagcaggtgagcacgtctattatctgtatatctccaccatggtatagtactagagctgtgaattcagaaattaattagttcaagcataattaaaaagataaaatttccaactaatgaaattcttcctatgattaatcttgtatatttattattcttagctgaacttgtacttgtgaacgaacatccatgtttagggaacgttatgcatcaaagtaattgttatatgtgagatggttaaagatgaaggaagttcttcaactgttgtcattacttatgggaatttgtttttcaaaataaaattttgttttaaagagctcattcctccaattgactttattttatacctaccaaggccatatgcaagtatatcaatgataaactttattatgcatatgactgcttgacattatattgagctttgtcaaatctatgtgactcatgttagatatcttttatactctcatgatcaaggggtcatttccatatatataattaagctaagcttctacactggaagttggcttcccacaaaaattccattaaaatatacacctattttaaactatgttttcttctcctagaaaatccttggaaaaaggaaagaaaatgagaaaaggagggaaaggcatggctataaaaaagagagagaaataaagcttgctctcaaaacattgagcatgatgaaaaaaaaatatgcatatagccatgccacttccacattcatgcaagaaaaaaaaatggaggaggtataggaaaaaaaaggagacacatttctttattccatcattccacaaaatatttcacttttcctttttccaccacatataaagacccttgatctaggagtatgactgataatcttcttgagtccatatatttggctttgcaatatatatgatgcatgtatgtcacacttttacccctaccaagctccatatatcagccttagaataggggtaagtttggcacatttttgccttggtgaggatccacaagaaaaaaaattatttacttgagtgacaagggataaggtcaatatgaggaaaagagttagtttgtgaaaattcataaaaatcccatgagtctgaccggagaagcaagaaggactggagtcgagatcattccatttattaattacccaagatggcaagtaaccactgttaaagttcacaggtgtaggtatggttctgaataatttatatactcgaattatatcttggagaaatttattctacactaacttttactccgggacgagtaaagagctaagtgtagggggttttgttggcagttattcaatgccaattctataccgccaacatctgcataaagtccagacaataaaacatccaacatagagtgataggtgttaaatctcacatatttcacaagtgttggtgtatatttgtatgcaagtgataaactctaaagttgggaggaaaatcatactaaagtgagagaaaatatgtatccatacaaggatggtttttgaacttcatcaaaataccatagaatcaacacaaaactccgagaaatggatagagaagaaccaggagaggagatgggccgaaggccaggccggaagggcccatgtcacgtcctgataaattcatcccgaaataaaaatcattctctaaaaggaataatagaattaattaaaattcgaaaagaaattggttaacactaaaatatgtacaagaaaaattcgaatgtggcccggagaatttttgttaaattctccttggtctaaaatgagccctcaaattttacttgaattttcagagcaccggaaatatttattaagcaacaaaaacaattatcaaagtttattaaaaaaaacggtggttgtactcattcttgctctatctttccccccttcagtaagag

SEQ ID NO: 13053 - DNA, 1074 bp, Oryza sativa
gtgcaaccacccgccgccgccgtttccgctactccggccgccgctagccgccgctagggtcaccgccgcaccgcgccgtcgccgccgtcgggttcgcgaggctaagctccaccccggccgccccttccccgttgagtttcgtcgccgaaattcgcatcccctcgcgctccggtgagttcaacccctaccgccgccttcggccatgaacgccggtcgccgtggttcatctccctccctctaatctctctcttctccttgtttagggcaccccgaatcctgtccgccggtggccgtcgtcctcccgtggctcaccgttgccgttcgccatcgtcttcctccgcgccggccaccctcggtgaggcatcctctcccttctattcccctccctctccctcctagccgtcgctttagcgccgccgcccgttagccgtcgctttagcaccaccgcccgtcggcgccgcctttgcgccgccgtctccgccgcgcgttgccgtcgccggcaacgcgtgtgcgcgcgccgtcgccatggccgtggctgcttggccggtcttgagccgagccgggtcgccaccgcccgtccgatcggccccgagggcgatctgggccgtcggtcccgtggaccggcggtggaccacccgcgtggtcccggtccacggtgaaccgccccttcctccctctcccaagccgctgaccggtgggccccgcttgctggcgccacgccccgccttgatgacgtcagccctgggatttattgcgcaataaatgatttaaggtttttcttttatagtaataaacacagtgaatcttctaaaattcataactaattcatccgagctccgtttaagcccattcaagtctcagtaaatcaagaaaaatgagtagaatccattaaaaatacttttgttccctgtttcagtagtcttatagcctgtttgcattgtttgctttgtatgtagatagattccggttcctccgacgctccggtgtactttgaaatagtcgccgaggttcctccagcagcagagcaaggcaagtcatgcttgttacttgaacatgttgatcctatattgcaaa

SEQ ID NO: 13054 - DNA, 566 bp, Oryza sativa
ctgcagccttgccgcccttcctcctcgccggaatggagctcgcgccgtcgctctctctctccgccgtcgctgccgagctccggtccgccaccgtcgtcgccccggaccacctcccacctcggcgccgcctccttcggcttcgccgcatcctcgccgacctcgtccacccctccgtttcgctcgtcgaccgccggagcgccgccgtcccggtcgacccgagccgcgccgccgccttcctccgctccggccgccttttcgtcatcgccgtcgacctagggtgagctgtggaccgccgcctcgtttccccctttccctcccttctctcggccgctgctccgccgtgcctatggccgccgccggcgaccgtaggggcgcgcgcgcgccgcctcccgccggccgcgccgccgtggccgccttcgggcgcaccgagcggctgccgcgtggggcctggccgtcagccgcccgcgccctcgggtgcggctgatgcgtggggcccacggcgccggccggtgcgagcccgggtgcgcccggtccaccgtggaccgtgaggctgccgcgtgggcccc

SEQ ID NO: 13055 - DNA, 1068 bp, Oryza sativa
catcggtgacgggctccaaagaaggcccgattgagatggcctgaatgcccgtcaccgatgactcttatcggtgtcgggcttctatttttgctcgttagagattagtgtgcgctcgttagagatgacttttttttggcccgattgagatatactttgcacactatatatactccagcagtccgttgtctgtagttatcccactgttcactattttggtgggaggttgaagggggcgaatttatgtaatttttttgcaaacaaaaataggaaaatcataaaagtaagtaaaagggtactactaatttcctattaatttagtagtacttatgttatgagatgttaactaatattttgttcattgttcagcgatggatcgaagttagatgtacacgactggcttgaggcgtcagtacaaagagtatagagatggcgtattaagttttatgaaagccgcagtggaggataggataagaagaaacgataagtacatgtgttgtccatgtagcgattgcaggaatgagatttggttggacgatgaaaaggaagtacacacacacttgatacgccggggattcatgaagagatacacatgctgggtgaagcatggagagcaagatctgggtactgatggtgtagctgcggacggaagtggtgcagacaatcatgaagaaggagatgaagaagagcatgacatgtttgtcccatctccattgggcggtgaaatggttgatgtggaccctgatatgctgcaagacatgttacgtgacgttgatgacgtagctatgaacgagacagattcaatgaagttcagcaggttggtcagtgactcggagactcctctatacgcaggatgcaagccaaagcacaccaaattatcagcaacattagacctaatgaagttgaaggctagtagtggatggtcagacaagagtttcacagaacttttgggaatactgaaggacatgcttcctcaggagaacacattgcccgagacgacatatgaagcaaaacagggtttgtgtcccctagggttagagggtcggagaattcacgggtgtccaaacgatt

SEQ ID NO: 13056 - DNA, 1574 bp, Oryza sativa
cctctagccgacgcatccaggcaagggtgggcgtgatggagtttggatgggccctgcgacggcctatgcggcttctggattcacctaggcatgagaggggactgcccgctaccttgcgaggagtgggggtgaaacctgaggtgtggtgtgcttggttagagggggttatacgaagggtcctgtcacggcctctttccggtatgtcgtggtggcatgtcggcgcacggaaacgtgtcgtggggctgtgtcttgtgggtacagttgtacacctctgatcagagtaaaactattcgaatagccgagcccgcggttatgggcggtcaaccagattcaccgtgattagtctcaccctagtgtaatcttttgaatttggatagtttaggtggatggttgggcctgtcgcaacgtggtatagcgttggacagtggatgattaatattaattaattattataactgtttaaatctttcaacttctgtttataaatgctcgctttatgcaaatgaaccactctagctcttctttgataattccctgcatcatacccctattccggtatgacttgctgagtacagtgggtagtactcagtcttgctctatttttcccaaccccagagcacgagtatgtgtcagatgaaggtttctccgaggagtaggcttcgtccgtgtagtcgaggatgcctgtggagtggtgttcccgctgcagttctagtcaaggcttagctcctgttgtcttccgttttcccgctgcatttatgtaagacttttatgatgtttgtaagacgtggatctgaatgtcaacattgtcgtttgtgtaccccggccggtcctggatggggattttaatgcacattctgcttggaattctattcgggaatttctgggcatgacagtgtccttctggtattttttacaaaaaatcagaagagaagggttcagagattaaggaaccgggaacgttttcaggaggttgaacaggaaatcagtcatcggctaaagaaaacaaagccaaggcaggagtggcgtgttaaaaatcaggttcctgcagccgatgaagccacgaccgatgaagcaaagagattggccaaaggaaaaagtgttgtaactgcatcggttaacatggttttcatgttgcctaccgagtttggggtcaagcaagccgatgtcgatgatgttgaagaagaatcggctaaattgattttgtcaccagaacaagcagtcttcgagaagccagagggtacagagaatcggcatctcaagccattgtatataaatggtttatgtcaatgggaagttgatgtccaaaataatggtcgatggtggggctacagtgaatttgatgccttatgctatattcagaaagttgggcagaaacgctcaggatctcatcaagacaaatatggtgcttaaggattttggtggcaatccatcagagaccaaaggagttttgaatgtggagctgacagtcggcaacaaaaccatccctacaacgttctttgtcatcaatgggaagggttcctacagcttgttgcttggaacggattggattcatgccaattgttgtattccttcaa

SEQ ID NO: 13057 - DNA, 727 bp, Oryza sativa
  unsure (1)..(727): unsure at all n locations
agcaattcagagagcaccggcgtcggctatgaatcctatcattaagccatcgccatttagaggttgggaaattgatatgatcggcatgattaatccaccatcgagtaaaggtattggtggcgaccgattattttaccaagtgggtaaggcaattcctttgaagaaggttgattctggggatgctatacaatttgttcaagagcatataatttatcgatttggtattcctcaaaccattacaactgatcagggttcaattttcgtgtccgatgagtttgttaagtaaattcgggatagcaaattcagcaagtggtcgccgaattgggaaggaccgttccaaatctatcgagttgtgtccaagggagcttacatgttgcaaggactcgatggagaagtttatggacgagcactaaatgacaagtacttgaagaaatattacccaagtgtttgggttaatgcatgatcggctgatacttgccgatacatgacgtctccgcggaaccttgtcccgagcacccggaggtctccccctctttctaggatgggggggtaagagcagagtcagtatccttctgggttacctctactctttccggcacatttactgcaggtatatgcgaccttgtcactcccttgtaatcagtgaaggcatctggcaacttatttgtaatattttgcanatttatgattctctgaacttccagttcagcttcactagtgcgtggat

SEQ ID NO: 13058 - DNA, 2134 bp, Oryza sativa
aagtgcatcagtggcgcgtccaatcgcaacgcaccgtagtgcgtataaagtgcacagacagacgacgacgcatatgtgtatagtgggggtggccgatcgaaaagcgtgtgcgtgagcgtgcatggattcgttaattggtgggagtatgcccgttgcacgatcgcccaaatcaacgacctaactacctgtgtcgatcgtcagccgatcaggcctattccatgtcgtcctgacaaccttttttttactattgcagttgggcggcttttcatatcaacttaaacttaaaaagagtttttaccattcttgaaaagatatctagtaccatataccatgaggcaccaactatcatccgtttgtaagaggtagaatcaaaacgcttaaataatgctcgcattttttttagataatggaatataatatcccggtctttgctcaaaagagctacagcccattattacaatctagcactcaaaacaagtgtagtccaaaaataatagcaactagcgtatcaagataaaaataaccaacaaaacatatggagaacatattattgaagtctatttgtgagtctttatccataattggcaaaaagctgtataaccatcgactcaagctttctgcatgcaacttttaaaagctcaattatggaacttttaaatgcaacttcatcagacctttgtaactgtgcccaaaaccgaaacccgtatgtcgccctgaaaattgcctgcatatatgaaacagatggtgatttatcaaaaaccatgtcattactgcacaaccacagagcccaacatctcgcaaaagctcccagcaatataagtttacttttcttcttatccacccttaacagccacccatgaaaaataggagaaacgctagtagtaatatataagtcaaaagaaaactgaactgctctccatatgaattttgcataatggcaatcaataaaaagatagttaattgtctcatttttcatacataaacaatatcttaagcagctattccagttttgtcttgctaaattatctttcattaacaccatccctttaagcaagtaccacataaagattttaatcttaagcagcatcttaagcttccaaattatcttattcctctcaatatatccattattaatcaaagctagatacattgaccttacacataaccgactattctgattataattccatgagacacaatcagaaaattgattcaactggatatgtataatagacgcacataaatcatgacaaaatacaagattctgaccaactaaagctctcctgaaagatacattaagtggaacagaacccatgacggtagcaattgaagaattcttccttcttacgggagcatataaataaggatacttatctttaaaggccagaattacttaaccatttatcttcccaaaatcttgtttgttgcccattattcactatccaagaacccatattcaagaaagtattattagctttcataagacctaaccagaaatgggaaataatgcgcgtatgcagtaccgactagccgagactaacgacgactcctcgcaggttcacagtctccctctcctaatcgcgctagcccaaacaactcccacgcgcggtttgcaccatgtcgggcccgtgccacactgccctgcggcccctgcccaagctcttgtaccgatcgagtagctagccatagttgcaatcgagctttgaagaagtttgatgacaaaggatcaaaaatatttgaggtaagtttttgggtggtgacaagcccttgtctatattatacaaacctcatctcagttccaatagggatcagttatctattccattatctgaaaaaatagggatcaacaccaggagtttatcggtgtacaaaatcgtcagcaaacttatgtgtttatgtgtgtaagagaggtcactagttaatatatgttattatttggataagagggatcacctaagattacaaacttatgtgtatgatagagaattagagataaccggtatgcacttactcatcgttagttaatgatagtcgttcatatgcgtaaaagagaccatcaacttaacaaatttcacctacaacaaaacactccattatacatttatactcctatgtgtatacataatacaaactg

SEQ ID NO: 13059 - DNA, 3312 bp, Oryza sativa
ccttgcacttgttcctgaaatattattgacgtggctgatgaatgctgtgtgttattggagtctgatttgttgtggggcttcattaaaggattttcatgagtagagctgggagaatagccttggctgacgggatgatgagggtgaagtgtgcctcgtcgctgtgttgacagaatgagggagggagattttggaccttttggtattttatgctcgctttactcatatttagccaaagtccatatataggagaggcccacaaccaaaggtcctaaatttatgggaacatactaatgaaggaaataaagcaacaaaataaagaaatagctaattaggaaacatttctctaaaacttgtaggcgtattgtggtggctggcagtagagccagcaattttaccctgtggggtccattatcattgcttgatattttagtggggccatttatgcaaaattcagtggatttacatggaaaaattagtacccataagggtgttagtgaaaaagctgtggggtcagctgatcccacagtttgtacatggctccgccactggctggtgcacttgtagccctgtgttggtgggctgtaggtgcgcctccacatgatatatcccctctctgaaagcagcttgtcctcatactgaattggggaagcacttgatgaagttgttttgagatccttgacgtattggcagctagagagttcagccaatggacaaagggctcgagaggatcacgggcatgacggggctttgagcaatttgatgagggtatctggcaaacttgttgacactccagtgggagtgagggaattgcagccttctctccatggaagggtttcagtacccacgtgaaagatatgtctaggactctcttgtgtacttcaatataattgggccttgaacttcctatatactacctctgtcctaaaatatacttcctccgtttcacaatgtaagtcattctagcatttcccacattcatattgatgttaatgaatctagatagatatatgtctagatctattaacataaatatgaatgtggaaaatgctagaatgacttacattgtagaacggatgatgtagtagattttgcccatgcaactacatgggcaaaatcccttatagtttggaattgaggcagtagtactttcttgctttattaatctttagctaagtctgtatataggagaggcccacaagcagaggaaatatatgaataaaatcaggaaatttttaatcaggacatttcctatacttggggccttacttataccatagaaagttgactatatttgaaaattgttccaaattattttttccagtcagaaatatagatcaaaagttcctgaaaaaactaggttaaactagactggaattaacctatgaagctttaaagaactttcttgaactacttgaacgaaaaccctcaatatgaaaccatagattaaagctagaactgagcaaacacaaggaacatcgagaaaaaaaaaaaacgtgttgcattaggcgactaattctcaatgttttttttctatacatatttgggggaaaaaatacttcaaatccaactcaagattctccaaatgtagtttaatttggatgttgtctagttgtactaaacaaaatcaggtgtggactttttttttaatgcataagtgggacttagcaaaaccaggttatggactaaccttggcataattgtggctgtagccacctctgaacaagctttgatcctatccgctttagctggtcattatatatgatttagaaggttaactgacatgcacttgagctttttctgttttatgactctgtacatgtttgtcatattatgatttgtcctttattaagttaccctgttgaagaacatttaagttcgggatggctctttttggacaggtttacagctgttttgaaatgatatttatctaaagttttaactatttagtcatcaggtccatttggtgctattgatatctccctttatctctggcaatctatctaaactgattacttgccgcttatctacttctttttaactttgtaggagttactacaaatgcacgtaccaaggatgtgatgtgaagaagcatattgagagatcctcacaagacccaaaggctgtgataactacatatgaaggcaagcacagccatgacgtgccagcagccaggaacagtagccattcttccgctaatgccaacgtatcgtcttccagcaatttacctcacaaggacagggggcaacggtcgtcgtgcagagatggtttgcggaatgcatcttcagtttcttccttacagttaaaagaagagagtggatagcatgaaattttggtagtgtttagctgggtaaattgttctgttcttcagtccaatctgggtgtgctgcttccaagcgccgctgagcagcgtgtattggctttgtaggttggttcttgcattggtttagttagggcttaggggctcgtttggtatgcgggaatatgctcatattcctctggaaatcgaaccgtttcatgtgaaactaaaattcatgccttccaaacagggccttagcaagaggaaacccagcatagcatccttccaatatctcgcacgttgtgcttccaatggctgtaaatgatataggtcctgcccgatagagaattatgggcgacagaggtttctttggcgcaactgtaaatgcttggcatgtaagtctcatctgatggctgctgactccacctccaagttcttgcggcttatttcatcatccttggcccgaagacggcttttaaaaccgtcaaaacgggcccgcacggttcgctccgtcgaacagtgagccgcaagaatctagatgaaagataggagcgggcgaaaagagcaaaaggttaattgcgaaacgtaaaaaaaagggaagaggaaaatgaagaaggaagaaaaggcatacccgaaccgccaaacttttaatggtggaacacccctcgtcgaactcattaagttcggtgaatatgctcggggtgccggtgggcaagacaagattgcttactccctccacaaagggaataaggtccgcccgggtctcgaagtcaccaggggcgaagtggggcgtcgcaagggaatactccgaggtagatgcttcggtggccgcacacttccccttcgtcttgaccagcggcgaaattgctggctcgcacgcagggctcccgaaaaccctcgccgcagccgacacgatccgatcgacggaggcggaagccccggtggcggcgctaccgcctgccccagcaaccccgagcggagcaaggggagcagtcgaaaagtccaaactacggcca

SEQ ID NO: 13060 - DNA, 3568 bp, Oryza sativa
tccgaggtagatgcttcggtggccgcacacttccccttcgtcttgaccagcggcgaaattgctggctcgcacgcagggctcccgaaaaccctcgccgcagccgacacgatccgatcgacggaggcggaagccccggtggcggcgctaccgcctgccccagcaaccccgagcggagcaaggggagcagtcgaaaagtccaaactacggccagcaggtgaagtcggagtctcgtcagaagactcgtcgtcgctaaaaacgcgagcgatgtcgacgagtcccttcttttttgagatcttcttgaccagacctcctttcgccgccttgcccgacgagaacgcaactagggccttcgccccttccaaatcctttcgtcgaaggggggagctgttcgactccaccccggtctcgttgtgacgtggacttggggtaggagtgtagccgggggtgtcgacgcggtcttcgatcacctcgttcgcagccttatcagccacagcctccacctcctcttcttcctctccttcgtccttgccgtcacgttcttcggcatcatcctcgtcgtcggcgtcggagtccaacgaagcaggaacccttcgcttcctgggggcaagcttcacttatccacgcatcgctttcgcgaaggtcctgcatcgtcgtcggctttttggggattcgcccggggaggcagttcgccgttgtaaacccggttcgcccgcccagccgcttgtcgtgttagcagctggctatactcgacgaccgaaacgtcaccgatcatcctgcgggcttcggcttcagcctggtcgagggtcgatactgcaaaagtaaagggtgtagctgcgttaaaggtcagacaaggcaaaataacaaagcacaggagtgtatagcaaaaggcggtcttactgttcgtcccctcaggaagaaccaagttcggcaaaccgtcagcctcttcgcattgctcgactgtgacttgccatgactgggagaggggaaagatgcgaagcaaacagaactcctccaccaagtcagggcttttgccgagtcagaaccacctgcgaaggggatggtgtgatagaaccacctcgccatccaatggcggtcccacttcgacatggcagcgttcaccggccagagatcggaccgctcgaggcgaacgttaaagttcatgctcccgaacactgtcttcttcgttccagccggggtaatcaccatcttcgagttcacggtggcgaaaaatatggcaccgaagagctcagcgctgggctcaaacccggaagtccggcatgcccagtcaaagatggagatccgaactagcggcgatgggctcaactgcggaagctccacctggaaaaggcgaaggatatccggcaacaacacgttgcacggaaaccgtagccccacctcaaaaaagacggcaaacaccaccgtccgattgtcgacaggcttcggcaccacggctttccccggggcgaaagcctgccccttaaccaacgccccagagctgaccaacttcgccagttcgacgtcgtccatgagagaaacccccaaaaaggcggtgctgtcatcatcaacccgaccgggatccggtccttttgccgaagctaggtttggcttgcgaggggccatggcgaacggcgtgtatgcggtggcgaaggaagagaatgggcgaaacacctaaggggtcaagaaatgctgtggaagagaggaacggaagaagagagcgcacgcggtaaaaatggcaagtgtaccggtgaaaaggaaagaggggtgggaatatatagctcacccaggcgaccgttcgtctactcaccagtaataaagcgccacgtgtcgcaagggtaggcgaaacggtaaattcccaccgtctgagcggcacagtaaaaagcctacgatgggaaggcccaatactgttccgttcggcccaggaaaataaaatatataaccaccaatcgcacgaggcgaagcgcggcaaaataataccagccgcacaagtaacaaacttcattcgcaggaataatgtaggtttcggcaggagcatcggtcgaaagggggcgccgcataccagaccacatggtttgcatggtctcggccgaagctccaatctcacccgtgcccatgaggggcttgttggcggatggcatgaggcccttcgaccaagtctgcccaaacccgtggcgaaggctatggagcaagaacgacgtgaggcgaagagtagtacgagtgccttgccgggccagaggcgtctcaggcgaagggtgcaaggcgaagactatccgccgaaggaagacgacttcgccatgacaagttcgctcccgcgagggccgaagaagcctttccggcccatcaagcctaggggctatagggccggcgatcgcctgacggcccatcaggggcctatgagcccctataacattatgtacccctgtaaatgtccctttcgtaagggtaatcatgtaaattcccctgtacaacctaaaccctagtagtaggatcctgtaatggggctataaatagtcccctagggccatgtaatggggggatcgaaaagaaaagaatttagaaatttaatacacttcgtttccttccaaccactgttgagtaaccacgtctttcgacgtacgcagttgtcatttcgacaacataggtcatcacaagatctgatcccccctcacaagtgtcgaaacggcaaaagaagatgtagcttcaggccgtgcacaacattgtctcagcaggtgatagcgttccaagatacttgtcacagccaatatcttttggaccagaacatgccgaaggagttctattcctgcaccaggacccgttggtcgtttcagcagaaatagccggttttgaagtccggcgcatcctgatcgatggaggaagttcggctgatgttatgtttgctggaacatatgccaagatgggtttgccaaccctggcactgtctcaagcaccgacttcactcagtggtttcagcggcgaagcagtgcaagttctgggacaagccctcatcaaggttgctttcggctcacaagaaaacagaagagaagaagagatactgtaacaccctgaaaattcgaccgacaaaatcaaaactctaaaaatacggattttcaaaaactttttaaattaaatgcatcatgccgatcttattcgcctattttatttggatttaatttcgaagttcattaatcgtgagtaaagaatagttaattaggaataaaccctaaaaacaaattgataaaataaatataatttaaaataaagattaggtgtggatagaaataaaatattatcgcgaccatatttggatcaattgaatttaaatgcgatggaataagaattaaccctaattaaaaattcaaataaattatataaataaaatatgagtaatattaatctagagtaaatccattggttggaatgacacaaatattgagtaaacttcatttatacaagatttaggatttatagaatcaaatttaaataataaataggctaaaatcgggttaaataagaaaagtcactattcattgccccctaggtgttcgatcgcgccctagcccctcctctgcca

SEQ ID NO: 13061 - DNA, 1337 bp, Oryza sativa
catggcaatcgaccaggtcgagctgggcgaaaacccggacgactggcgaacgcccttcgtcaaatatctcaaagagggatggctgccagatgatgaagcaaaggcgaaacagttgcaaatcagatctacaaagtacagcttagtctctgggcaattgaaccgaaccgggatgctgtagcccatgcttcgctgtgtctccttttccgagggtgaagaaatgataagggaaatacaccaaggaatgtgtggagcacaccaagcagcaagaactgtcgcatcaaaagtatttcgccagggcatatattggccaaccgtactaaaagtatgtgttgagcaaatcaagaagtgcgaaagctgtcagaaacatggtcgaagccaagctgcacctcagtacgacttgcagccaatcgcgcccatctgtgtcgcgaccgagaaaatttgcattttcccgaacgctagtgtattaatccccgtcctaggaaaagccggggtacaccacacaaacatgatacaaaaggcacatctttattatgtcgataatatttacattattacaaaggcacataaggcctgacaatcaaaaataaacagcagcggactagcgggcctacggctccatcttcacaggcgctcaattggggtataagccaggactccacctaagacttcttctccaaagcttctcttactgaagggggaggtgtgtgtccaattccaccataagccaaccattccatactgtccaaatgatatgagaattcccaaagtctaaagttataaaaccacctaatgttgcataattaatcagcgaagcatctacctaaattcatactagtggaaccatgaatagggtacccactagttggggttttgtttatcctagggtgaacaaggtaataataacaatagcaataataataaggtcataacaaaggtaaataggcatggctaaataaaacagtgataacgcgggaatttaaataaagcgataatgcattaatttaaatcaaaataattttataaactgggattcaatatgctcaaggatgatgtgacttgccttgctcgctttcccaaactttggcttcaacctccacgtagagcggatcttccaaagctgcagcgtctacacgaccaacggaaaggaaaaaggcttttactctaataaactccatataacaagcaggaacaaagcacaaaaatgggttcttgacttcttaagggaaaattagagacttgaacggtccaattccgagttcaaatggccaagatatggccatttgaagtttatatgctctttaaatggatatttgcgaatttcttcatttaaattttaa

SEQ ID NO: 13062 - DNA, 2655 bp, Oryza sativa
ttaccagaagaatccaatgtcgcttgcgaaattattaaattgccagttacatactacagttgtacgcgtctagtatttgagtataagtacggtacacgcttactgttgattgtaggcacacataatgaagtccttgtcttgacgggcaaataagcagtccttgatataacccatcatgtttgctcgatcgtttttcagcgttgtctcattgacgacagctggatcgagtaaggcaacatggggtgctttacgatggacatgcttccaggttaacctacaagcaagacaatagtcagggtaagcttaatttgtggacagtcactaccatatcgcgtaccaagaaatacttacaaggagtagcacttaaggaggttggtgtcgatcgctcgcaccctgtggaggtcccatagatctttgaagtctacggcgatgaaggcagtaggcctaaggaacggctgaccatcgtgctggcccaacatggaggtctctctattcttcctccttgcgttggacttctccatgtagtacacgtgcaactccttgcatgcagggcccatcttgaataaggcatcgtttccaaccaatggcattttagggtttagggtttagggtttagaggctttggaggagctactagcgccttaccaagatcaagcttctttggggctaatggcacatttatttttcctctccccgttccagcaggcttttctgcgtgtgtcaagcttgggtggagaagatttcgccctcttgctccttttggcaggaggggggaggtgcggcttgctgtcaacctccataccgtcgtccccaaaattagtatcatactgtaattggagatcttcatctctttgttcaacggcaggagggagagatacaacagtttgatggggatgcgtcggcggcggacgagaacttggcgctagccttggagttatattgatctcaatgctgtgcttgggccatcgaataaaggtcccacatgcagccccaagggtcaaaatctcatcattaggtgggtgtgggatagtgtagccaacccaatcgggcttcactaagtccacctgaactttggcattgccggcttgcagctgcgccccatgcactcgagtctccgaggtaggcttgaatacttgaccctctgcggcaggaattgcaaatcctggtgtcaccctaacgactagggtacacgatgtgggttccggcgatagattcattagtgtccttagtatatgttgcaatgtattgtggtgctaatacaatatatgcgttattaagttgtttttaccgttatgtggtccaccgcggcggggccttcaggctgttctgccggagcctcagttgatgcgcagctgctacgcctctacgtggggctcacttgtactatgggaccgggagtggcatcggtcgacctatccctgatgcgtgcctctatccaagcctccatacctaacagctcggcagtgagctcttctgtaagctcttctttaagctcctcccgaagttgggccttaatgcatgcagctttctacgccttggaaagcttgtgcttcttgtactgccatgcgtattggggaaacccaaacttccatggaacattggagccaatgccccttgtttgtccacggtgttcttcgtttcccaacgctttcgtgaggatgtcatcctcgcgtttttgtgagccgacctcttgggaggcctgtctctcagcattcagttcgacctggggtacagttaggacatgttagacgaagaatacaatacaacataatgaaacctattctatgtgttcaacttacaattttctggtacaccacttgatcttcgggatttaggaacgaaagaattccgtcactattcttcttcacccttgcccttgcccaattccttgcctgctggaccgggatatcagcaagcacttgcggggtgttagattccgctgcagcttcatcctccttgtcccattctgcctgtttccccgcgtagcctccggtgccaagccggtgcgggtgaaggttccttgcctgcagatcacggtaggcctggctttttgcccgagactctttcgttgatttggcggcatggaactcatcccacatgggttgggtgatgaatggatatttcccaaatggttctggctgggcggggttgagaacgtactccgtgaccagcattgtcttgaaattttttcaacaattccccatcttgcggatagcctgccgcttgagtcctgcctcggcctctgtagggtatcggaagctttccttgaactgcctccaagcctcttctttttcttcttgagggaccagatcgatgtggtcctatagaatagtgaagattcgcctccctagggctctgcatatcgtagggaactttttgacagctttcgtcggagccgtcggatatccaacatcgtccacctctgttatggtgtaaacttccttaggaaccttattctgggtcctaggagtccggctcgatgtagtctcagtagtggtcgtcgacatcggttcgcgttgctgcgacatgtcctatggcactgttgtatggggagaaagtactttttaaacacaaaattgcatctacacacattctctgattgtttgatatacctctatctcatacctgcgttcgcctcgtcgacggaaccatagc

SEQ ID NO: 13063 - DNA, 1050 bp, Oryza sativa
gtaatcgatacaaaactcaatgccttcctcggtcgtgtaaccttcaatgatgctcccctctggttttgctctgttccgaacgtaggacttcagaattcccatgtacctctcgaatggccacatttctctcataaaagttggcccacatatttttgtgtgcttcactaggtgaacagtgagatgaaccatgatatcaaagaaagccagtggaaaatacatctccaagtgacacaggctactgacaatatcggcctgcaacccatctaggtcttctggatctataatcttctgaccgattgcattgaagaaggcacaaagccgttggatcgtgtgacggacttgtggtggtagaatgccacttatagcaactggcaagatctgtgtgattaccacgtggcaatcgtgagacttcattccaaccagcttaagatcctccaatttaacgtacttacttattctcgcgcaatagcccgaaggaactttaatatctgccagacatgatagcattgcgatcttctcatccttcgacaatgtgtggcaagctggtgggaggtacgctcttcctgtcttctcatctgtaacaggctgaagttcactgcgaatgttcatctcctgtagatcgagacgcgcattcaacctgtcctttgtcttgccaggcatattcaacaatagccccagcaagctatcgcacacattcttctctacgtgcatcagatcaatgcaatgacggacctcaagatcttcccaataaggtagccgccaaaatatggattttttcttccacatcctcttcttgtcctccttgctacgttttcttttcttcccaaactcattagtaatgtccttcaccatgttgtgtacctgatctccggacaaatccgcaggggcagacccaagttctttcttaccattgaaaattttcttctttcttctaaaggcgtgccgtagggggagccatctcctatgacccatgtaaaccatctttcttgatttcttcagccacctactgcgtgtatgttccatacagtcagagcatgccttctttccttt

SEQ ID NO: 13064 - DNA, 2889 bp, Oryza sativa
acgatcatcattttgctcaactgaatgtaccatcctttgatgcaagtatgcgatagcatggtgctttctatccttggtttgcccaagaacagctcccacagtaaaatcactagcattgcacatgatttcaaacggcagcgaccaatcagggggttggatgattggtgctgagatgagtgattccttaaagattttaaaggattttagacacttatcatcaaagtcaaacagagcatccttagctagcaaggcagttaggggtctagcgattttagagaaatcctttatgaaacgtctataaaaccccgcatgacccaagaagctacggactcccttgacattgacaggaggtgggagctatcgaattacttcgatttttgctctgtccacctcaactcccctttcgaagatttgacgtctcaggactattccttcacgaaccatgaagtggcacttttcccaattaagtaccaagtcctttttcctgacatccttgtaggaccctaagttctccagacaatgatcgaaagttttaccatagactgaaaaattgtccatgaagacttccatggtatcctcaatcatgtcggagaaaatagacgtcatgcatctttgatcatcgagatggatggggatttggtgataaccaaaatacccatcaaggaaacaaaagaaggaatggttcgctagccgctcaagcatttcatcaatgaaaggcagcggaaagtgatcttctaagtagccttgttgagtttcctatagtcaatacacatcctccatcccgtgacggttcgttgtgggatcaactcgttgtttgagttttcaacgaccgtcatgcctcccttcttaggcactacctgaacagggctaacccactcactatatggcacgggatagataatcccggcatataggagtttcaagacttcctttttgatgacctcccttatcgcattgtttagcctcctctgaggttccctagatggtgtacaagacgggtcgaagggaacgcgatgagtgcaaagggtcggactgatgccttttaagtcttggagggaatagctaaaagcaacacgatgcttttctaaaacagcgataagtcgggtcgtctccctctcagagagtttgtcacttataatgactggagactctgcatcactgttcagaaatgcatagcataggcctgaaggtaagggctttagctcaattggggctcatgacggctgatccatttttggcagatcaatcgtttctccagattcatccaccccttcattgaattcctcgatggattcatcgagattagactctggggcctcgaatggagaaatagccatcacttcctcaattggctcaggaacaggaagaggctccgtcaaagaattggttgattgcaatacagggacggaggtgacgatttttcctactttcaggttgaggacaccggtttcgggcacatttaagagtttctctatgggatgtcctatgagtatgtcaaaatcagagatatcaaacagatggaaatctaagatgacctcaacgctattgtaccgtatgggcacttcagagataatccctaaaccttcggtagtaggatttgtggagatttggaaggttttgatggttggtaccaacggtctgtcccctaaccaaggataccttttcttgaacttatctgcctgcctggcagaaaagctgaacttccactgaaaactccgaaggataaggcaagcattgtacactccactcagtgtgaactcattcaaccttggcaagcattaaatagaattgccactaggatgtaataatgggaatacatctacgtgcatgaatccagataacactacaacgtactaacatcactacgactattgtgtaaccaatatcaacatggctgttagcccaaaaccgggagacgttggcccaaccgggagaaaaccttgctacaccccaaaaagcttactcaagaggtgaggggctccccccacttttaagttggttcaactccccctagattagcaatgtgggactattcccaaaaatctcccccgtcacacattggtgccccttagccctgaccggccccacacacaggcacatacgggcctcacacccgcggtccactgaccggccccacacacgggcacgtacgggcctcacacccgcggtccactgggctttgggcttacaccgccctgagtgtgcacaagcactagagattgtgggtttggctctgataccacttgttagcccaaaaccgggagacgttggcccaaccgggagaaagccttgctacaccccaaaagctagctcaagaggtgaggggctccccccacttttaagttggttcaactcctcctagattagcaatgtgggactattcccaacaatggctagcaaaagaagaggaaaaaaacatatagttagcaaaaagacataaacacgcattatttttttagctacacaaagggaaataatttaccaatttcaacattcatagggtcaaatagatcaggtcacttgctataaatgctagtatcaccaagatccttgacatgtaacagataatcattatatgctttgtgcctcctgtgctagtgctaatttaaaaagagcatttgcaaatttcagatctcaaaccatgcgcctaccatacctgtaaaccctaacagagcctacatcataatgcggtcacaccctccatgatttcaataattgatcaaatccacccccaataattgctaaggcccggtttggaacatttgtatggttctaaaatttataataatatcaatattttaccagcacaatttcaagcctttttgtcagtatcagtagttcagtatgattgtccctaactctataagatacatatctaaaaatttagtt

SEQ ID NO: 13065 - DNA, 1505 bp, Oryza sativa
cagaggtagctgacagcctcctttcaattctatcaacaagaggtgcaaagtcaatcacctttggtctagtggttcccaaagggaggcccaaatatgtaaaaggtagtggtccaatagcacaaccaaacaaccctgaaagatgctgaactttttctggatccacattcaaaggaatcatgcaagatttactataattttttttgcggggagcaagatttactataattaacctttaaacctgtagaatcagcaaaggtgttgaggatagcctttagacaaaaaagttattttgaggaagctgtcaagaagagtaaagaatcatctacatattgtacaactggaaaatcattgtcaggtgttggaatgggaatagaaaggacccttgagaataggtcttattgattacagcctgcaaaagataagcaccaagcacaaataaaagaggggacaagggatccccttgcctcaccccccttgtgcaataaaaagatttccctgggacaccattaagcagcactgaagaggaagctgatgaaaagatcaagttaatccaactcaaacatttagagtcaaaacccatttgcttcataatattcaagataacagagtgttcaattgtgtcaaaagccttttcaaaatctagctttaagagcactatttccctctttgattgttgacactgatgcaggtattcaaaggaccaagcaagacaatcctgtatagttctgcctctaataaagccatactgattgtgatgaataagttctgtgaatactgattgcgacctatctgccagtacctactggtatttcttacaatcacagttaaaatccgcaagcgcatggatataccgatgtatcacttcccctacggagtattccaagggtatcgaatccaagggaacgtgtgcgatcagatcttcctctagttcaaccaaggacaccaagcaaatgataggccaggaaagagaggattcactagtaagaaatagtgtctagggaaagcttaactttaatcctaaggcaatacttcaggcactggcaacccgctgttcccagatgtcgctctactacgtaccccgacagggaggacttaagtgatttcgagggctgtcaccacctctacacctacctcaaacgtactgtgggatacacagcaattactggataacaattacctaaacaccacgtctaagaaattaatatctactttagtgtgtataactcaccaaagcaatcattatgcttttgttgattatagtgaacaataatcccgtatgctatttaggaactaaccaagagataattctcataagataaatctaaattactcaggaagaatattatattgaattcagagtaataaacagaataaaagaaataggagatgattaccgacaactccggaattcttccgacttcttatactctactttcttcctattctaatatacaatatagtatagtagagcttctataattcagctcaagcttggaaatgtgtga

SEQ ID NO: 13066 - DNA, 1986 bp, Oryza sativa
catatcataggtgtttagtctatcaattaggagaagccaagcaaacaccttaactttcatagaacactagaaaaaacgcgtggcaaaagccacgcatggtataatgagcttaggccattgggcctagtggggtaacaaatgagtatatacttccacttaattatgggcttattttctctgatgttttgggttttaaataaatttctatttcacattataaaatgtttggattttgaataaatttatagatggatcaatgtatgtgtattaaatgtttgaggttttgaataaatttatgtttcatagtataagatgttttgggttttaaataaatttataaatggatcaatatatgtgtttcatatatatgtcgaaatttatatgaacattagtgaatctagatgggagattgaagagcttaaaaatatccttgtgaagtttatgtccatattcattgtactacgatatgtcccatccagtacaggatgctatattttgagacggagagagtacaaggaaagtgaaaattaatcaaagctgtgcgtacaaaatagggaatacagactactgaatgtgccaattcatgcatcgatcatgcatcggatgtttgcattgatcagcatgcaccggatgtttgtatgctactcctacatcctacatatatggttaatatctcgtttcatccagcatcttcttgtgccattgcacggcctgctgagccatggtccatggacccaattgctcctcgatatattcgtgaagaagcttctggaagaaactccatccgatggctggtgcacgcacgcacgcaagagcaaatcgttgcacgcgcacacgcaagatcttttcgtcgagcctcttccgcgaaaccggtgctgccacgtggcaccattctctttgtgatcttttgcatcgaattcgtattataagatttgcttttccaaatccaacttaagtacccaggggcttggacatgcatgaagtttattgcatatattttctgagaagagaacagtccattaccccatacataagtccaaacatccttatcatcagataatagattcagggggtcagcttcactcatggattcatattgctggaaagcttgttcagataaaggcagagcaaaaagctgtgatatgcttttagtagaagttatgcttaccgagtccttgcgagagagtgcaaaagagtgaattctagggaacacagctgacctaactttaccattccaaaaatcatcccagaacaaaaaagtttttccatcacccactttacaatttgacggacttctgaaaatgtccacaaattgcaacacatccttccaccaaaaggaaccccttggatgaacaacatgtggtaatttatcagagttataagaggtctagatcaaatttacgcatgtaataggatgcctgttgtagaacttatgcaaatttttcatcaagagagcggcattctgaagattgagatcaataacacccaaaccacctgtattttttggttgacaaactctctcccaaagcactaaggatttcctactagaatttatgtcagatcccctccattggcaatgtctccttgctctatcaatactttcaatcacagattttgggagggagagggaacatatataataagtaggaagggaggaaagaactgaatttaccattgtgattctgtcaccataagacaatagagcagaggtagctgacagcctcctttcaattctatcaacaagaggtgcaaagtcaatcacctttggtctagtggttcccaaagggaggcccaaatatgtaaaaggtagtggtccaatagcacaaccaaacaaccctgaaagatgctgaactttttctggatccacattcaaaggaatcatgcaagatttactataattttttttgcggggagcaagatttactataattaacctttaaacctgtagaatcagcaaaggtgttgaggatagcctttagacaaaaa

SEQ ID NO: 13067 - DNA, 1038 bp, Oryza sativa
ttcctgcagcccatgtaatggccactgattgggcaaatgaggacttctctggacttgttatatcagagggtgatcatgtaccctgggagtataaggagaacgaggtaattgagggtgcaaggtatgctcataaggatgagatgaaggaggcggtgaagcattgggcagtttccttgcagagagagtttagggtggtcaagtcaacaaattatgtgtatgaagtgaggtgcatgaaggaagattgtccgtggcgtgtccatgcatataagggtaaatggaatgattattggaaagttagcattgtgaccgagcacaagtgctacttacaaggggtggagaagtatcaccgaaacatcacttcagcttttgtggcaagtgagatgtacagcagtgttgttggtaacattggctttgaaccaaaatcaattattaggcacatcgagaacaaattcaagtacaccataagctatgcaaaggcctggagagccaaacaaaagatcattgagatgaggtatggcacatttgaagcttcttatgatattttgcctcgtttgttagccaccattgcccagaggaataataatacgtactatgacctacatacatttacatcggttgatgatcgaacaaagagtgtgctgcaaagagcctttttctcattgggtgcttgcataaatgcttttgtgcattgtcgaccgatgttctatgcatagaaggaccttatatggacaggtaaaaacggaggtcagagattgacagcaattgggtgtgatgggaacacccaggttctacctatggcttttgcatttgtagagagtgagaacactgaaagctgggactggttcctagagagagtgcacattgcagtggtgcgtatgaggcccaacgtttgccttatacatgatcgtcatgcgggtatgttgcgggctattgactacttgcagaacggttgggatgagaagggacttccagctaagtggcctgatgttcggagtcggtggtgcatgcgtcacatgggtgcaaatttctacaagcaat

SEQ ID NO: 13068 - DNA, 5883 bp, Oryza sativa
ccctgctccactctaagaattgaaattcgcaggcatcagcaactgaagacatgggacggcaaatattggcctttggtgaaaggtgtggtgttttgattattctactgtattgctggaccttaaagttttgcctgttgcttatatctctattctatccagcgccacatggttatactattactgacttaatagtaaatacaaaagtttaatatgcactctagattttatagaactcatgtttagtagggttcagatgaactatgccatttgacttgttcatggaattaggatagaaggttatataatataggctggcaataacgtagcttttatagcacaaattattgctctctttatcgtttagatcagtacaagataactgaaaaaaacaggtttttacacttgataaatctttctgttggcattctacagtatttgcagaaattatctaaattattgtagtgagttagaacacccacacccccttcattccgttccatattgtcttcaatgtactcatttctgttatctgatgtgtatgggcagttattttgtatgtgctgctatataagctaaaagttttttttacaaaataaataaataaaaatatatacatattcaaatgatgaagttccctccatccagtttttccaaattcagaccttgtaattttagcccacaatttgtcatgttatatgcatattattttatccgtaaatttatatatataagtttttgtgttttcataggataaaggaatatgtaggtcttgtattgtattggaaattaatattcaaattttaattttgatgaccataccaactcaagccaagcctcaaaaaattgtacagagggtgtatatacctcaaactcatagcatggtgtttattatcctgtgttccctggaatatttttaatcttcaatgcaggctaatttacgccgtaatttttgtttcataaaatttttcaggaaacctgttgagcaccttctcaaggctgttgatggtgttactctgaaagacattacagcccttgctgagaaaatcatatcatcaccattgacaatggcatctcatggaaacggttagctcatatttttcatatgtagccagtcatctttacatagtgtaacagttgcagtatcctaactctgccctttacgatgcagttctgaacgtgccaacttatgattcagtcagtggcaagtttcgctcgaaatgagtagtaatgtggtcattgttttcctcctcctggacaagttttaactgttgatagtttttcctcaggccattcattggcagggtttcagagagaaaaataaggagcttcatacaattttgatcatttaactctggatgattgagaataccatattttacctttttctgcaacatttgtccacttgagttggaattttttatgctgttttcatcagttttatgggcctgtaaattttagggccctctttcggtggcggccagggcctgtacaaaataccggtctccttgcaaaatctttgacacgaatgctgaaacacttgaataaatattctatctatactcttgcatgacagtgaaattctgcaggagatgcgtccaaagcgagggaactgctgtgagccatcgcttttccacaattccaatcacgttttgcatgctgtttggactgtcaattcccgtctgtttggttccatgattgaattcgaggaaatcgagctcatgagtcgaaggcaaagagcaaagagcagctagaggcagcaatgcaggctggtaaactcccaaatgccctccaaggtctatgaataaaattaattattcagtatcatctactgtgctgaaaatgcagcaggggatgggtctgtgtacgatggtgcatcgtctggatgagctctagaaccaacttcctgcgaaggaaaatggttgtagcagcagcagcagccgaaatttctgagaaggtgtcttggttggaaggaaacgacacccttggttgacttctgggccgtgtacgagcggtttggacatgagtggcccatgggattggaaagggagggtccaggtcgcgaggcgacaccacatcggcaaagacgacggcgacgcctcctgtttgagggagtcgccgtttctgactccgagctcccggcggctggaggggccagaattattgcagtcgaggagacgacggaatgcaatcgcagtgccaccgacccacccaccacccattgccgatttgccactcgttgttccgagtccgagtcgttgtttgttggctcgtggatgctcctctacctcgacgtctccgtccttggttaacctgctcaaacaccggaggcgccggcgtttctctctctctctcgctcgctaaccccatggttttctcccgttcggtcttcttccttttcggtcgagtcaagttatcacaaacctattcatagcttcctgataaccacgaaggcttatatatgtgggtttttttttggagagtgtatgcaagaaaattattttctaagacaacttgccaccgtttgtgtggttagtcctggaaggctggaataatgcattgacagcattgttaccaacctactttttgatgctccaaagagtgaaacaaggtaccaaccaattgacggcatgctagtgaccactccccacgtcccaaaacgtggttacctagaacatgaagtgatattacctagtactataaatttggataaggacattaggaatctgaataaggacatattgggtaatgccacttcatgttctactatgtattaatattttgggacgaaaggagtaatgactagcaaatgggaaacaagcaaagtttgtaggcttttcgtgttgttatctgaatcctctaatggacttgttgggttatactcttattagtgacgtcgctgaaatctgtatatggttaatatggagtggagtaatttacagtagcattcctccaaatcaaataagtcaaagaatgtcgtattcgcctttgcctcgattgatcctactacatcatcaaggcataataatgtcaactagctacaccaatgtccaatggaagttaacacttaactcgagaaacgaacaaagcaaagcaaatgcatattttacatttcaagaacgaatctgaaacaagtttttctttttgctatatttttttccctgtcgaggaacaagaagaatttggagttggcacctagatgcatccatccgtttaaataaaggattggcttgggtttattaggacccaaattaatcattggtttaccagatagccgtttcgtatttaagtggattaaactaacgcaacggcggcgtttattcacagccacgaacaacaatattcatttgaacactccaatcatataacactctcaaattaaagaaaaaaatacttgcatcactcgcgacagagccaattggacgaaaagaaagtctatacatcgcttcatcaaattagaataacatttttcaatgcatcataatgttgcttgatgacctccatggagggtgacattttggactattgaaattcagctttgtgtaactttcatccacttcatccgtcattggcagcatcatgttagtttatacatagataaaacctttaatcatcaccaatggaaggcgatcagggtgagacagagggaggtaggtcatgagctcatcatgcatgcggagataatacctgtgttagataaaacctcatgtatgcaaacatcactggttactaattggagcttacctgtctaaaaaaaaaactaattggagcttagcctgctgcctttcaacttgcatgttgttcttttgtttcttccacttgatataattttgatcttctccaataaaaacgggtaaattttttgtccgttaatttaatctggcaaaattgggaattgttgctagctttctataatctcaaacctgagattgttgcagggaccatgaaatgaaatatagttgaaaccaccattatctgcttaaccagcagttttcgtttatttctagtatgtgttttgcggcacagttgtacagttttttttttttttgtgaacatacagttgtacaggttgagctccaattggacaagctagctaggtagccaaagaattaatcgacaaacttgacttcgctaccaatcaatagtttattttgttctcttgtctttgtctgatgtagaaggagcatttaaatctgttcatttgtagtttgataccaccggtatgtgtcgttttcatgagcaaagcaaaccgaagaggaaggaaggaacggacgccaagttttcggagatgatgctctcattataattttgtttttctcctctgaagaaaaggagaagttcgagaagattttgtggtattcctatataataaatcacggaaagtattacatcactgacactgtttttagcatagagaacatgttgtttgatgtagcattctgcattccttcaaaaggaaaaagtattttttttaaaaaaaaaaaggtaacaagtgtacattttgagtataacatattctgttttcctatgtgaagctatatgaactcttttctactccatggaagcatagccttagcactcctttttttaatatatgatactgttgactttttgagatacgtttgaccattcgtcttatttaaaaaattgtataattatcatttattttattgtgacttgatttatcatcaaatgttatgtaagcatgatataaatatttttatatttacacaaaagttttaaataagacgaataaccaaacgttaataaaaaaaagtcaacgggtatcatacattaaagaaatgaaggaagcatttatttgtattgattggaaattgaagctaccatcttgaccttctgattggaaaatgaaggtcctgattacatgattctacacatgaaacatgcaagtggtatcagctacccaaagtcatcaacaagaaagacaacaagaataatgcatcccaaggaggagatgataagaggagatcgattcggatttgacaaaacagggaggggaaccttaatatgccctccattacaataatgacactttacacttctctcatctaaaagcaagtttataatactcatcacccatccctaacctctcataggtcacaaccaaacatctaatcaggatctcacaggtggatgcatacatgatatacgcacaataagcttataagcatctcccagggaataatgctcctgtcatcatccaaaaccactcgctggtagcctatctgcctctgatctataagcttatcagggaccatgtgagaggttatcaaggcatcagcaccctgattttgactctaacccaaccataaactaaccaatgctaccactttttaattactagtttgttggcgtgctgtcattagtgagttgatcagagttttgtgctttgtttgcttgctgagagagagattgacaggaaagaaaaagaaatatgtgggcggttgaggaagccaagacggatcgcacatagtcttgcaataaaaattgtgaactccacatggatgcgactggagaaaagagcttggtcggccggccatggagtctttcttctatggctgcctcctctcaatgtgtcctaagctttgctgctgcctgtgtttgttttctttgattagtctctttcttagagtaattagagtcttttatgaaagttgtcatggacgcatgtatcactcggacaggtagaactggttcaggaattgaagacaaagctaggaaatttaattaggaattgtttagttagggaaaaatttaggtttagtggttatatcggatatgcggaaacacatttaaagtattaaacgcagtttaataacaaaataaattacagattccgctctgaaaccgcaagacgaatttatt

SEQ ID NO: 13069 - DNA, 1746 bp, Oryza sativa
ggatccatggtcatctccttttggatccctgtgtttggccaactcggttttgtcttctttggtggttgccctctaacatggacagggttctcatcctctgcttttactgatcttggtgctattatgaagctttcgttatcgtctggagtgatgctttggtaagtaacatggttacgtttatgtgtatatatgaaattttcaacaaaaaaattgatgatggcaaatagaaagttaatattttagatgctaactgttaatcaagtttttttatacaaataattagaagctcattaatttattctcatttttcttttaccttttcagtttagaattgtggtacaacaccatattggtgctcctcactggttatatgaagaatgcagaggttgctcttgatgctctttctatatggtaatatattccactctaatctgttgtgtattagtttagaaaacaacaaccagatcatgttgtatcatgtatatcattgtattgttttgtgtttctcctctagtaattgaaaaggttgcttattgaacattgttgttttcacttgcaaactttgtagccttaatatcaatggttgggagatgatgatttctatcggatttttgtctgcaatagggtaacttcacgatctcagctgtcactcactatgtggttcatctaactgatgcaacatgaaccataaatttgacatatacttaatgcatgtacatttttagagtgcgggtggcaaatgaacttggagccgggagtgcaagaagggctaagtttgccattttcaatgtggtcaccacttctttcttgataggatttgtgttgtttgtgctcttccttttcttccgtggaagccttgcatacatatttactgaaagtaaggcagtagcagatgaagtcgctgatcttgctccccttctagctttctccattttgttgaatagtgttcaaccagtgctctcaggtatgttattccatttgaaggacaagtatatcaaagtaattcaaaatttaacaataaaattactaattttctaatttatctataggtgtcgctatcggatcgggttggcaaagtgtagttgcctatgttaatgttacatcgtactacttgattggtatccctcttggtgcaatactaggctatgtgctaggatttcaagcaaaggtaaggaatttttgtatgatagaatttcactagttaatctggatttaagttgtgtccctcacttatgttcattctttttgcagggcatttggatcggcatgcttcttggaacactagtccagactcttgtgcttctattcatcacacttaggaccaattggaaaaaacaggttgcctttttttacctctgctcatatttttttcttatcctttttttctgattaaatatcttttttcaaataatttaagggtctctctagaaaattcatgggtcattagaagagcatatttttctcatttaatgatgtgcttcatgtttaattttttcaggtagagattactcgagagagattaaacagatggtatatggatgagaacggacgatcacagaattcaataggaaatgcatgatataaaacttctgcacacttgtaaagaattttgatgatttatgaatcaacctgtcaaaatgggattgtgctcggatttaagattttcaaggtttgaactttcaaaaaaaaatcatcaaggtcacgtatccaccaaagaacaattttaatcatatggcttggggggat

SEQ ID NO: 13070 - DNA, 2470 bp, Oryza sativa
atagacctaataaataaacacaaatatgtagatcatttagaaataaacttaaaaaaactatatgcagatcaatttggaatggagggagtaaggcataaccacttttcttatatgttacataatagtactactagtataaggcatgcatgcaagcatccaatttactatgacatcttctctattaaattactacttttttaaatcctctactctcatattatctaattctattggatgcatgcattatatttattaggatgatccaaactacaagataataataattatttcttggtctttgggttaatggaggttgtgctttatattttgaaatggagggagtacactgcactgataaatcttaattaatctgttttgcactgcatattacaggaaggaaaccaatatagatgtgtgttcggcacctcattttcccaatacatctccatcgtttttcgcgcgcacacttttcaagctgctaaatgatgcgttttttgtaaaaagtttctatacgaaagttgttttaaaaaatcaaattaatccattttttttaaaaagatagtgtaacactccgcttttcttgagacattaaaaactaattcggcaaaatcctaattgcgaaaatttcgttctttgtgtgcgagtctaagttatgccaaggatctcaattcaaatcctgttgttccctctcatcgaaatcaaaatcctccacctcaaattcctcttccgattcaagtctccaaatcaaattccaaaattcaatcgcatcctttgaatcctcgctaaacactcgctcccaattccgaaaaataccaaaccctatattgagccttccttgatttctccctgagcgctcgagttcgaatatcgaatttgaatcaaaatccaaactcagattctctccaattcaattcctctgcagaagtctatttttcctcctagttttggatgggccgaatccctctcccctcggcccatctcttctcttagccgttgcccctcctcccttcccacgtgcgccgcacgcgagctgctcgggagagagagctctctcattctctctcggttctctctctctctcctcttgccacactatacgccgtcgccgcgattcgattttcgccaccgcctttgaattcccgtcgcacccttgcgtccgcgcgtgctcccgcgtcgtggccgaccgcccggccgctcgccttttgccgtcatccatggctccaccactagcttccaaagcaaagaggcagtgccaccctcctctctctctctctctctcaccaaaatggcaagagaccgcgaccgcctcgtccccttgaccgcgccagcccgcgctcgcggtttgattctcgccgtccgatccaccgcctccacagcgcccttgcatccacgccgtcgccgcttttgcactgcctacgaaaccgccagctgccgccttgaccgccctaagtcggtttcctccctccccaaatcgacatccccctccgctataaaaactcgagcactcccatctccctcgttgtctcgcctcctctcctcgccacaccattgccgccttgaccgccgttgtcgtcgtcgcgcgtgccgtgggagccggcgagcgcgaggagccaaagaggagctccgggccgccccatcttcacactccctcttatcttccccgacacactcgcctcgacgccgcgctgcctcggcgtcatccgccgtgcgccgccgctcggtcgtgtgccgccatcggccttccacccctttccatcctcaaatcgccgccgataccgtttccgcacgccggtgagctcttcgcccaaattcttgccatttgcatcatcttggataagccccgagtcattcggttgcttgctcgtccccctaaacgtgccaccccgccgttgctatgcttcgccgccgccacgcccgcctatgcgccgccgtggaccccctcgccaatccctcgcgccaccaccattcttaagctccctaggaccaccccaaatcattccctagcgccgtcgacgccgccataagctcgccgtcgacgccgcttgaacccacaccgcacctcgccgtcaccggcttctctcggagtccctctgctccatccgacactagaaacgaaacccttgagcaccggagatgctcccgctgccgcgaatcggactcccgtcgcccgtcgacgaatcccctcttttgccaccgccggaggtcgccgccgcgattcgtcgccgtcgaagctcccccggcgcatccgaaccaagaaacgacaccctcaccttgtcctctctcccccggtggtcattcctcctcccgccgcgcctcgtgccgttccgccgacgcgcgctggcgtccgccgttcatccccggccacgggcttcttcctcctctcgccacccacgtggcctggcataggtgccacgtcggcttgacccggtcaagccggtcagccgctcgccctcgccccttcatccccgtg

SEQ ID NO: 13071 - DNA, 632 bp, Oryza sativa
tcaaacaagcagaaacttgaagaccccaccttccatcactatgtgatattctccaagaatgtgcttgcagtttcgactacaattaattcaacggttatgaactccaaggtatttccaactgattgaaaaacttatgaccaatgagtaatccttctcagttctaacttgtgtcctcttgacacatttcaggattctggtagcattgttttccatttgttcaccgattcacaaaatttttatgcgatgaagcattggtttgacagaaatatgtatttggaagcaactgtacatgtaactgacattgaggatcaccagaagctctctaaggatgttgattttcatgatatgaaactgttacgacctgctgaggaattccgtgtcacgttccgtaatcattatcaatctttccagaagcaaatgaaaactgagtacatttctacttttggccattcacatttcctcctgcctgaccttcttcctagcttgaatagagttgtagttctagatgatgatttgattgtccagaaagacttgtcatctctgtggaacctcaatatgggaggtaaagtggtgggagctattcagttctgtgaagttaaattaggacaattgaaggcttacaccgaggaacg

SEQ ID NO: 13072 - DNA, 1048 bp, Oryza sativa
cctcacatttctgggagaaagtccatgaagccctaggaagttaccttgcgtttagcacagcttatcatccacagacagatggccagacggagagaaccaaccaggtcctagaggacatgctgagagcttgtgcgctggattttagcaaggactgggagaggtgtttgccctacgccgagttctcctacaacaacagctttcaagcaagcctgaagatgtcccccaatgaagcattgtttggtcgacgatgacggacgccgctgatgtggtctaagacaggtgaatgagcggtatttggacctgacattatcaacgaggccgaagagaaggttcgcctgattcgagaccgtttaaaggtagcacaatcacgacaaaagagttacgccgacacccgaagaagaaacctggaatttaaggaaggagattacgtttatctaaaggtttctccgatgaggggaacgaaaaggtttaaggtcaaaggaaaactggcaccaagatatgtgggaccattccagatcatcgccagacgaggagaagttgcataccagttacagctagcagaaaatatcgccgatgtgcatccagtcttccatgtgtcccaattaaagaaatgcttacaagtgccggaagaacaagctccgctggaggaaattcacatttgcaatgatctcacgtatccagaacacccaatccggatattggatgaagctgaaaagaggactagaaccaaagtctggcgtatgtacaaagtacaatggagtaatcacactgaggatgaagccacctgggaaagcgaagaattcttgaggacggaatacccgcatctattcgaaaactggtaagaaatctcgggacgagatttatttaaggggggtaggtttgtaacaccctgaaaattcgatcgacaaaatcaaaactctaaaaatacggattttcaaaaacctttttaaattaattgcatcatgccgatcttattcgcctattttatccggatttgatctcgaagattattaatcgtgagtaaagaatagttaattaggaataaacc

SEQ ID NO: 13073 - DNA, 629 bp, Oryza sativa
ttcattcaaaaaagcacagtttaatgatttagaaagcttgtacatgaaaactgatcaagtaactctttctataagctgaaaaaacggtgcctggctgtgttcgctatctccggatcccaaccggaacagtaacgcacggaaaacagaccgatatattagcgcgtaattaattaagtattagctatctgtcacaccccaatccggcaccgccgtacaacggcacctgacaggagcgtgtcgtaggaaaaacggggtgaaccgctttcaacgaaaccgcgatctcagtaccagtcccaggacatagtgctggtacccacggtgacaaatatgaatcattgcaatccttaaaataaatagaggacttaattaccttaacttaggttgcagctcagaacagcccgagaatgcaaccgacgacgcggacgaggaaacaccaacaacagcagcagtggcggaaccaacgaactaacacccaacaccacaggcgacggctgggaaccaagacaaacccctatctttacttacttaatcttaactttcaggcgggggaccttatatatttatatagagcagggggagtctttttgtacttaacacgtacgggaatttaggtgtctgatgcaaccttg

SEQ ID NO: 13074 - DNA, 1786 bp, Oryza sativa
atcctaggaatcttttttttctcatccaccggtgcatcatctttgtcgaccacctctccatcggaggctccgttacccgtcttgtaccgactcgtcccacatgttgggcaagagtctaaatccgcgaatttcttgctgtacagtatgcaataattttcacatgaatggatcttctgaacacctaaagaaaatggacatatcaatttctacacttgatatgtgttcgttggcgcaggttcggcttaagaagcataactctcaaaagatccatcaaatcattgaagctagtgtccgacaattcatttctggccttcaatctgagaagttcaagcaccgagcgcagcatcgaatagtccttgtcgcatcctttcgcttcgtcatacagaaggtccttcgctgctttctccaacgcttcccaattgtccaaccctcatcttctaccagttaggacctctggttcaacgtgccacaacatatcttccagatcaaattcaatgccttcattctctatatgtcacgaccggaaataacccaacgggcgttccttatgtgcatgtattattccttgtcccaggaggcaaggaacaccaaaagttgatacatttcagagtttatcaagcggaagcgtaaatagatactttattacatgggcgacgaaggcccagcacacacaaagacaaacgagaaacagcggaagactagggcgacgaccacaggcacttgacggcaggcacgagctagacaccaaagccttcatcatccaggggctcctcttctgtgttgggaaaaaattgagcaagactgagtacaaccaccgtactcaacaagacacacccacatttgcataataaatacaagggagtacaagggagttataatataaagggttagggttgcagtaaacagcatttaaagatgcttagttgctcaaagctattttgtaaacacgattctagaactatgcaatattatttatcaaggccgtgaacccacacaaacctgccttaacccaaggcctacgatgattcagatcgaaccggcaacccgaccctgggtcccagctcgtcccaagccaacccaggccaaccattccacattttcgttgttgagcaaattttaagaattaaaacactaacttgggtacattgcttggcttgcccataaccgagggcgcggctattcgaatagattatactctgatcagaggtgtacatctttacccacaagacacatcttcctcacgtgtaaccacgtgccacataccaccacggtatacagacggaagacgtgacatagtttccaacccatcctagccatagacaagagtaccgacccaatcccacctacggccggaacccccgggacaggtaggcaggactgagcccctagcagcaggacaccggccctgtgccatgacatctcgactaccgggccgcagctcgtgtagccttcatttgccctggagatgtccatcgacccccgacttcgtccatctccatccgtgtacttttgtttataaccagactgagccacaaactaagccttacccactagacatgtggaagtacggtagtgctttgcaacagaggcccgaagaccggtccttatatggccgaggtgctactatcaaaaccatgcaccccgagcacagcctaaaaccattttggggattttgaatagagggggcggtgtgaatctaattccacaatactccaacaattccaaagtgtccaggtgatatgaatatcccaaagtctagagttgtaaaaccgcctaatgttaccta

SEQ ID NO: 13075 - DNA, 836 bp, Oryza sativa
aaacctacccccccttaaacggaatctcgaccccgagattcggaagaactgacgaagagatcgggatgggatgccttcagctcgtcttcacgctcccaagtagcttcttcctcggcgtggttgctccattggaccttgcaaaaacggataacccggttcctggtccttcgctccatggtgtccaggattttcactggcctctccacgtaggtcaagtcttcgcgaacttcaatttgctctgagtcggcctgctgggatggcactcgaagacatttcttgagttgcgacacatggaacacatcatgcacgttgcccaaggaggcgggcagctccaactggtaagcgacttctccgcgccgagcaatcatacggaaaggacccacaaaccgaggtgcgagcttcccctttgtctgaaacctgtgtacacctcgcaagggcgtgacccgaagatacacaaagtcatccactgcgaattccaggtcacggcgtcggttgtctgcataactcttctgccgagactgggccacctttagattatcccgaatggttctgactttagcttcagcttctctcaggatatcggtcccgaacacttggctttccccaacttggtcccacaatagcggtgtccggcatttacgcccatacaacgcttcataaggtgccatttgtatgctggcttggtagctgttattgtaggagaactcggcataggggagactcttatcccaggtcttcccgaaatctaggacacatgcgcgaagcatatcttctaggatctgatttagacgctcggtctgtccatctgtctgcgggtgatacgcggtgctgaaatt

SEQ ID NO: 13076 - DNA, 697 bp, Oryza sativa
gaggccgtggggcttgagatgctgcgcatcgaccgcgcgtggaagtccgtgaagccgacaagctctgccagcggcagccgcgggctgatgccggtggagctgctccggcctgtggtcgccgccgtcgcatcgctggctcgctgcgtgcgtgcatgtgctgaggaatcgaatcgaatcgagggaggaagtggctggtgcgtggcggcgatggacggggacgccagggtgaggagtggctatggcgcgagggcgggtcctggtgctactactagtgctacgacgtcgtcgtcgccgtcgtacatgagcattgacggcgacgacaatggtggtgccggcggggcgaaggtgtgggtgctcgtgctgctcttcttgctgatcgtgctcatgttcttgccgtcggtggtgcggcgaggcaggccatggggaggagggggaggagagcaccatcgaggagggggcgggcttagcctcaagagcggccgggatgttgtcaacctctgcctcgtggcgttcgccatcctgtgcgggctgcttggccgcgccagacgacttgctgcctcgccgccgagccggctggaaagaactagctcggcgccatacacgaaagggaattcactgtatgtgcatgtgctctcgccctcccgatcaaaatttcccctcattttttttgtgatctctccatctctatattcaaatt

SEQ ID NO: 13077 - DNA, 658 bp, Oryza sativa
aggatgtggataggtaacaatactttacttcaacaaaagattttggctaacttgcatactgcaccagttgggggtcattcaggcattcatgtcacttatcaaagggtgaaacaactatttgcttggcctcacttgcgcactacagttatgcagtttgttactgcttgttctgtttgtcaacaagccaaatcagaacatgtcaagtatctaggaatgttgcaaccactgcctgtacctgaacatgcttggcaagttgtttctttggattttattgagggcttaccaaagtcagctaccttcaattgtatcctggtggtagtcgacaagttttccaagtatagccattttgttcctctttctcaccctttcacagctatggacgtggccgaagcttatatgcagtttattcataaattgcatggattacctcagtcactcatttctgaccgtgataggatcttcacaagcaccctgtggactactctattcaaattggctagtacacaactccggttgagttcttcttactatcctcaaactgatggacagacggagcgagtgaatcaatgtcttgagactttccttcgctgctttgtgcatgcttgtccttctcagtggagtcgatggctggctctagcagagtattggtataatactt

SEQ ID NO: 13078 - DNA, 2855 bp, Oryza sativa
taggtgaagttaccttttcttttgccaaatgagcaaacacaaattaaatcacttagttcattaagcacaaaacgttaattgattatatgaatcctgaaggattaatggatcgatgcatagtaaacataacaagtaataagcataccattgaatccacgcagcatgcaattgataaatggtccattctttctcttcaggatctgcgtgcgagatgcaaaaccgccatagtgcaaatagctgcaatttgctgattgatcttaataaactacggttcaaaaagattatatatgcattctttcccatattttgtacagtaagttcagatattaacaggctacaacctacatgcttcaatagttcagtttattcagtattcaccagtattttgtgtgcaacgaatgaattaatgttgcactttctaagtagtatattattcactagcttgtagtggactgagatgtaaaacattatcaaattatacttaacaagagggtgaacttattaattgacatgtgcacataaatgttgtaatcttttccattgagatactccttcacaacatagggatcttttccttcgggcacctttggagcattagcagtggtgtttgatgagatggcgtatgccatttatacggatccacctccaatatcaaccacccctacagttttagagtagtctcctcccaatttatccagcagataatttagagcaacccacatgtatgatccttgctgggatccctcaagaacataagaacattgatctagttcgggttatgctgatactttctcttggtgtggactacatccctaacctgtattaagacccagagtactaaagggattattaagaataaagatttattagaatcaaagcaagaaatggttttgagttaaaattttgtatgatatgatgtatatcattctggaattatacgtacagcttctagaatctggtttgccttttcatctccaataagtctgggtccagtagttgcctacgtatttgattgaattaacaaagaacaaaatttatagagtgcaagaagtcaggccattttgttcgagaggaaacattatcatcattaagtattttaagaaactatttcgtcagataaaacatcatacagaaacattagtacgtatcaaaaatttttggattaagttcctgatgtaggttttgtttgataattagatgaagagtaaatcaatttagtggtgtacgtaccccaagtttaaggggagttttgttcataagcctggcagggacaacggtgttggccttgtcaagcagaggcagtatggagtttgctgcagcctagggacgtctagcctttttgcacaaaatgatattcatactactacctccattttaaaatgtagcaatctaataagtagtagacaagatacaaactagaataatttatagtactaaaatatgtcttatcctgtatgtactagattattatattttgagataaaggtaattgatactagtctagaaccgtagattcaaatcagcaaaatgcagaggcatacatatgcatatatctctcgaacgtcgaacattcacggaggggatcaaattggggccatagcttcgagccatcaatttaataaggattgctagctgcagcggcggaggacgaggttgaacaacaaggttctttctcagcatactacgcctacttggcccacttagattcgtatctgaccaatttattgggccatttttctgtggggaacaatttttctttggggccttgaccttggacctacttttgtcattgcacaatataatattattgggttgccggcctctgctctccatcacccgtcgtcttgttcgatcgatcaatcatccgttcaaggaatgtaaattaagctaagctccattattacttagcaacaaatatacatgcaagttacaataaactggaaacacacgcaacacacaacaatagtacattaattcatatcctagctactccggccaggctcttgatgcttctttttgggcgagataacctcaatggcagtgcccaatggccacgctgcttctatgtaggactctccatgcttcaccttctctaccagagtaatctccttcgttgcttccaaacctgaatatatcatgcagtgcatatattcatgtcatttctcaagaatatatacatccatatatacacatggcacatagtacaagttcttcattgatagtttaatttgtccatatgtacataccgaagccatcgacaagcaaggtgtattgatagatgagatccatgcataagtaggcgtgatcacgagctattgggtatgctgctttcgcttcttcgatgctcagtatacaaaccttctctgatgcagccttgtacgctgctggtgtagactttgcactgggcgcctcactgtcgatgaacccaatctatttttcccattattggagagaacaatatatcattatgttgatcacaatattcataatttacacagaattaaatctgaataggagttattatatatatgctcatgtaaatagccaactttatacgctgcctgataaattgattactccagtataaaccggttagttaatgagacgtacaccggaggctatgtagtagaagctggatgtgacgtagatctcgtcttgcccaacgccgccgccgccgttccacacgccgttgaagctgcaatttttggtttcgcagggcgagtctaggttcagtgccttcaccacatcttgtctgcatttgtggtagtctgcaccttgtggtgctgccattgcttcgtactgctccccgttgtaggtgaatttgccttttatttgtcccatgataaaataaacat

SEQ ID NO: 13079 - DNA, 990 bp, Oryza sativa
ttttacttgataattttatctccaatgcatacattttgatcggaccgggataaaggttgggttcatcgacagcgatgcacccagtgcaaagtcgacccctgcaacgtttaaggctgttgcagaaaaggcttgtaaactgagtgtcaaagaagcaaaagtagaataccccaacgttcgtgatcatgcctacttatgcatggatcttatctacgaatactccttgctcgttgacggcttcggtacgtacactagcttctaataatggagatacaatatatatccatgtataagaaattaactctaaagaaaaagaactcatatataggtgtgcaaattgttgaacaatttatctaacatgcagtttactaatatatatatatatatatatatatatatatataattatatatatataattggatgtcaggtctacatccaagtaaggagataacgctggtagacaaggtgaagcatggggagtactacattgacgcggcttggccattgggtacagctattgaagctgtgtcacccaaaaaacggcttcgagaaatatacaaatgatattgagatcgatgtactagctactttggaagttaggatatcgttttttgtatgatcgatgtttgtgtgctggttattacagtataactgagtatcatgatatataagtagtatgttaataacggatcgagctatcaatagatcgaggtggccatgctctttgtcctagactccaagttgtgtacgtttgaatatatagcagctttctatatataattactatcatagaaatcatcggttgtgttcgtgtgtcatgagcacgcatgtcttgtatgtaaaagactgaacatctggtgcacatttgagtatttgacctgacacaatcgtatcataattatttttttctaagagttcagatagtgtgaaagtaaaataaaagaagcatataaaactacaagctaaatgtattgcgcgttcagagttaag

SEQ ID NO: 13080 - DNA, 3115 bp, Oryza sativa
caagatttttgatgataacctttggcctgcggcatatgcatggagcccatacttctatgagaaacatatggcagccatacaagaagttaaaccagaagcagtagcataccttaagaagtatcacaaaaggctatggagtaggagtcagttctctacaattagcaaggttgattatgtgacaaataaccttgcagaaagcttcaacaatttggtgaaagattggaaagcactacatttatatgacttcttggagaggattcggtggtggttgttggtgaaatgggataagaggcaaagaataggtcagaaatttgaaggctgcattctacctcatattgtcaaggaattgaatgaaaaaagtagagatttaaacatggtggtcacaaggaatggagactttgaggcagaaattgaggtcaagggaggtagtgggtttagacatgttgtgaatttggagcacaaaacatgtacatgtagggaattccaaatctcagggaagccttgtatccatgctatagcattcatcacatcaattagaggaaggctttgcagattatgtggatgattgctttagtgtgcatcgattcagggcagcatatgagaaattgatcccttcattacctgacaaggcacaatggccaaaagctgatcatgggtttttcttggcaccacccattctgaagaaatcagctgggagaccaagaactatgaggtacaaaggatgcactgagaaaggaagcaaaaggagtaggaggcacaaatgccccatttgcaagagttatggccatcattggcacaattgcaaagagggtgatccagaggaagtagcagcaatgattgctgaaaggtacatatcattgcaagtcttttattcattgtagttggtggttacaatttaagcaactgtgtaagttgataaatatatgtcatgacattccatccttgtagtactagacattataattaatggataatattagaaagtcatgtggtggttcgatctaattacctaaacacttgtatatatatgtctcacaaatttccattctatttctaacaagccttatgacatatattttctcttgttcatagagggccaccaaagaagagaacgaagaaaactaatgaagcaacctcggagactagtatcatggctgctccaatagttacaccaataatggcataccctcctaggttagcaaatcttctttatttcattctacattggatttagatcaattagctacataatagtttatttttcacagtcaaaactttaatttcaccgaggacaatatagcatggaacaatagctcgggttcaagtatatcaattaggtaagtaattagatcaattatgtcaatttgctggtattatgttgttctatgcaatatatttcacaattctccttttcagatcaacatcacttactggctccaaccaacttgagcaatctaacatgattgtagccttgccatgtctgggggaggaaacacctacagttgcaccaaaaatgaccaagagcaagacaaagggaaagccatcatgttctagtactcctggtagcccagctatgagcacaaggagcaaaaataagagtcctgcaatgggcactaggagcaaaagaaaacttatggattgaatcatatggcttgctaattaggttttattttggtactgtccatttcttttgtggaggctgatggattttgttgttgtgatgccgtacaaagtggtctagtcatagttgacatattttgctattgtaaggattgcttcctcatgatgtattgatgcactgttatggaccttatgccattatgctcatgatatactgcctagctaatttggtttgttggttgcactattttgtttgaaatggaaagttggtttggttcctgcactattgagtatggaaatggaattgtgggtgcacatgatatgaactgttatgtatggatgatggaaagattatgttctgtgcatgatattgtgtgttctgtatggatatctctattgttatgtatgatggtattcatgctcttattttaccataatcaatttcttatgcagaggaaccaatttcttctatagagaaaactgataactgtacagacagtcagcttttcctgatcctattatttttccaaacaaaaagttcattatattgtatttttttcagtgccacaataaatttgttatacgctcattatttagtctcataaaatacacatattgttcagttgacatttttttcaattttttctatctagctgccactcctccatctacaagggtattttagacatttggaaccacacataacgtgaaaatgaaggaaacctaacgggaggggcatggaagggatcaaagtgaaatttcaggggtacacaggggattgggtaaaattcgagggtatagaagggattatgtgagttttcatgggcatacaagggattttctctctaaaatatagcaacatactattggattagacacaatctaaacacctaataccggattagacacaacctagctactaggttatgtctaatgttatattttgtgatgaagaaaatgtttcaatagaattaaatattttcttatttttgatatattaaattgaaaataataatcaaatatatgtttcggagaccatgagtcattgtctaaaacatcgtgaattatgaaaccggcgtgagaaaccactttcactgattgatgatgaagttcacaaagtaacctgcaaaagaacaaaattaaatatagaacagttgtgcacatagatactctagaaagggctatatcatatcatattttctttcacgtgatgtatgctttatggatcgatagccaattgattctttggtgcaagttttgatgccaagcgtgaaacgtgatgattcgttttatgtcaacatgtttagcttgtagtaattaataggggtgtatgtcaacgagtcttttacttttacatacaagagatgcatgctcatgagtcatgacacaggatcaaaactgatgacatctgagatagtgagagcgattatatatataccaagctgctatatattcaaacgtacacaacttggaatatatcttggacaaagagcat

SEQ ID NO: 13081 - DNA, 1078 bp, Oryza sativa
cctttcgctagggtttctattggccgacggctctcaacgatgcggtcgacctggtccggcggtgcagggcgtgccagttccacgccaggcaaacccatcagccggcccaggccctgcagaccatacctctttcgtggccgtttgttgtctgggggctcgatatcctgggtccgtttaggcgggccccgggcgggttcgagtatctgtatgtcgctgtcgaaagttcactaagtggcccgaggcttatccggtcgtcaagatcgataagcactccgcgctaaaattcatcaggggcatcactgctcggtttggggtgcctaaccatatcattacggataacggcacccagttcactagtgagctcttcggtgactactgcgaagacatgggcatcaagctctgcttcgcctcccccgcccaccccagaagcaatggccaagtgtagcgcgccaacgcggaaatcctcaaaggcctcaaaaccaagaccttcaacatcctcaagaagcacggcgactcgtggatcgaggagctgccagcagtgctctaggcaaaccgaaccacgccaagccgagcaaccggggaaacgcctttcttcctcgtctacggcgcggaggcggtcctcccatctgagctcaccctgaggtcccctcgggccaccatgtactgcgaggctgatcaagatcagcttcgcagagacgacctcgactacttggaagagcgaaggcggcgcgcggccctccgagccgcgcgctaccagcagagcctgcggcgctaccatcagcgccacgtccgagcccgatcactctgcgtcgacgacctcgtcctacgccgcgtccaaacgcgtgctggactgagcaagctctcaccaatgcgggagggtccgtatcgagtgatcggcgtcccccggccgggctccgttcggctggccacgggcgacggcacagagctgcctaacccatggaacatcgaacaccttcgtcgcttctacccctagtgggggtcgggtgtcaggtctcgggctcaggccaaccccgcacccccccgggcgtgcagggttggccgggggctaccacatgca

SEQ ID NO: 13082 - DNA, 1190 bp, Oryza sativa
  unsure (1)..(1190): unsure at all n locations
ccccctgggcggcgtcgagcttcttccctagctccgcctcccagttcccgtattgaaggcggagggtgtcctgcgcctcgttcatcacggtggtggcaatgagggcagtctcccactcctcctccacctccttggcgatctccgccaggaccttcttacgggcctcaagctcggaagcatgccggcggtgtgccttgcggcccgcctccaccatggcctccaccgagcgccgcccctcctcgacacgcgcccacgccgcgtcgagctccgcccgctccgcctgcaggacctccatctgggcacttaacccgtctaacaccgtagtattcgcggcggccaaggcctgcagaaggggctctgcgctcggtggggcagcggaaggcagaggggagagccgtctcggtgagggtgccgcacggctcggcccgccgatcgacgtgccggacgcggtgtactcccaggtgccccgggcgcgccgttggagcggcgcgatccggcgacgaaggtagtcgccgaacaccatggcccccgtaagcccctgngatcgcagacccgccaggcggtcaagaatggcgtcgtagccgtctcccagatctaccgtcgcccgccagctggaggcctgcgccgggggctggctcggaagtcggaggcgcgcttcgtcggcgaggagggtgtagaaccaatcgctcttccagtcgtcccactttttgcggaggacgcagggaatgtagcggttcagcacctgcccccgcggctggaagtagcagccaccgactaccgacggcggcgacaccggctgtacggtgaagaaccaccggaacagccggagagatgggcgcaccccgatgaacatctcgcacaggtgcgcgaagatggccaacgtcattaccgcgttgggggtgaggtgcgccatctggagatcataaaactccagaatatccatgaaaaaagaagagaatggcgggaccagccctgccattgcgaaagagaggaagaagacggaccgccccgggtagtgtggcgccgggcgtccctcacccagcgcgaccacctcccggccggtgacagattccggcatgaatcggcgcggcagcccggcctgcctctcgctcacgatgcgggaaggcggcagcacgctaccgtcgagcggtgcggagccccgtgccatgatgccggcggaggaggagctt

SEQ ID NO: 13083 - DNA, 815 bp, Oryza sativa
actccttctttggcaaccccatctcaagtggatttcagccaacctagcagcagcactcttccttctcatgtcattgtgccatcagacacatacttagtaaacccattttctatggctgaacatgttggtgttgatgaggaaggcatatacttagatgaggaggaggctgttgttggtcatgctgatgaaactagaggtgaaggggctgtcaatgaagtatccgaggatgaatcttgggctacatctgaggatgaatctgaggatgcatctgaggatgatggtgtcaatgaatccgaggatgagtcaatggcatcagatgggatgcctgaacatattcctattgcaacttatgacaaaaatgacccaccaatgatcgtaggcagcgtatatccaaacattaatgaatttagattggcaatagcacaacatgcaataaaaaaggagtttgaatataacatcatccgaagtgaaccagggcaatatactgcaagttgtgctgctaaaggctgcaaatggaggattcatgcatccgtggttgctgatggtgtcactatgatggtatgtttttaatttaaatcagcatgcattctttaagtatattgccatatatatatatatatatatatatatatatatatatattattgtggtattgactgtatttacatttcaggtgaaaactaatgttgtgccacatgaatgctcaagtactagaagaagtgagactatcaaggctgcaagcaagttttggatttgtgagaaggtaaaagattggttgttggaggatgctagtgtgggagcaaaggaattgcaaa

SEQ ID NO: 13084 - DNA, 2606 bp, Oryza sativa
tgctgctgcttgggatgttcccttccgatgggtacacgctcattgaggagaatggcgccctgaagcttggatggaaggatctgtgccttctcactgcctctgcttggcgcccaattcaggcttcgggacgttagtactgagggggaatttatagagctgaagtatcacttgatcttacttaggtgcaattacctagtccttttgcttcttttagctgctcaatttggtcaattctgagaaaagaaaaataaaaaaaattctgatcactaattgccagatctccacacggtggtagttactgatgtgcagcttagctttagcttttattctgttcatgctccagttaaccattctgtccagtttagtttattttgcaattttgtagtgcttaatccttgctgacattgttttgggggaacacgcaaaaggatccttactgacattagagatgcagttcttatcgtatgatcattgatcacaaaatgaaatatctggtggttagtgagctcaattagattgttgatagtgtagcattgtcaatgatcaccaaataatattgttagtgtccatctactatgagaatttacatgtacatttaagttaatgttcctaattttctccagaaaatgacttagggttgatctgaatgccaaattatcagcaatgaactaatgatgggtagcacatgagttgtgtactagaaagtcaggatgttagtggttttaattcatgccatctaaatcctgctaattcttttcttctgaaatatttgaaaccactgacctacactgctcatttagacattggtgtatcacttttctaacatttttgcattacaataatcttattatgtaattcacttattcctgtatccggcatctactggatatacatggttttactttttaacatcattttcacctttccgtccgtgatggttattagcttgttaaaagtcttgcttcctggacacttcggccagtatagccattttgtatgatcagcttggttccatgtttctttatcacaaaggttacgttccacgattgagattctggtgattttcttatttgactatccccatcaagaaatcccactccactagttttgctatttattttttgttcccggctaacctaagccaaacaggcttcttgggcattgtttacctggatgtcgttgtcttgcatattttcttcattacaatatcatcacgaatgttttggttgggatttgccttgagttagtaacattcctaagtagtttcgcatgttttttttttccttctaatgctggtgttgtctaccatttgtttgcgtcttattggcctacccgctttatgcaaaatagtagtatgtctgaatgattgctgtttattcactgccagattactacacattgatactttgtttactttgctaaagattggcagtttttggcactgggcacacctgcatttccaaccaaccaatgccatatttcactattagaagtagtagtaactgatttagcttcctagtcacatttccaaagttggttatgtgccaatgtggcaatcttgaacatcactttcattcaagggttggaacatagatccacctgatgatgcaattaccctcaaatgaatcacttgcttctactttacactcattatggtgttgtggagtgagagagggattgggattgggggcaggcagagtggggagagaaggcaggctataaatttgtttcccaacaatgcctttagaccacctttgcctgcttgccatgatggggtgatgcatggcattggcttctttcttctactgctactactacaaaagcttccctctttctcatgttctctctcctgcaaggcttcaagggtccaagcaagcaagcaaagggcccaatcttttcttgtccccagggcccagcattgccattgcccccaaggagaaggactagtccttttctatcagcagaggggcctgttgtctcttgttctcttgtgctagtgtggggagctactggcacgaggtcagcttggaaagacactgacctctctaaccccctttggcttgtgcagtgcagtgcaatgcagccttggagttgcagaaaagggggttgctagctatagtttggggaatgatgatgatagtcaggaagtggttgttgaacatcttcaatccatcgcaggaaagagaagggcactctctttgcgtttgatgttcttcaccacctgatgtgatggttaacttccctctactccctgatgcttttagttataaagggtaatttgcaaggactcttgccagaagagagtacagtgattattagttgagcatttcttctgaaactggttgctgatagagttacttagaatgaatgaattaaatgggggatgatgattgtatgagtggggcaaaggaacatgcagtgccatggtcctgaatattccccaatcatggagcaacaaaccaaatcaaattgcacactgtgtgaatgtgatgtgtgtgagactgagaaagagagagagagagagagcaaacagccaagcaaacatacctacaacacagttgctcctggcttatcacattgtggacctggggtgttgggaggactgc

SEQ ID NO: 13085 - DNA, 3636 bp, Oryza sativa
atctggattccaattggaatgggcccttttgctttgcccccaaatgattgactgcctcaagagaattttactcctgtagtgaccactactgcaattgtttttagcccattggagattcaaatgctcctatataagcacccattttctctgacctgcaatgttagtagtgttcctgaaatggataatcgaaatggacatgcacaattcaagttgatcgaattggataccaacaaaataacaacaaatgaagttttgttcaaagttagttgctattcatgcggcggatgaagcattggatcaaggtgtagagacaggattttatcagaaacagtagaaatgagattgggctatgaccattcacaatgtggtaaaaccaagatgtttccagtttccaacgatatcttcttcacctaccctggtcataagaaagaccatacaacactccaagcaagcaaggaaaagtaaaatactggaatttgttttgtagttgtcttttatgccacttataccatatcaggatccagccttgacacaatttgtaactttattccttgagttatggacactacatccaccaaagcttaaagcttatcttaatgcaatttacgtcatcatttcgtgtatcatttctctcgatgattcctttttctcttttgttcatttctgacagggggacatggggagtttttccttttcactgtatagaagtgataattctgcctaattgcctgatcaatttttagaactcggtgacacttgtgctattaaactgaagcctttttttttgacaatttttaggtggttgagcttgttagaagagctgttccgcttgcactctcaccggagaacgattcaagaaaagaagagctgaagaagctccaggagaagaaggaagagatcgacaagctggcgcacaagcaagtccggcgcatcctgtggtctggactaggtttcttcatgtgccaagttgggctcttcttccgccttactttctgggaattttcatgggatgtgatggagccaattgccttcttcacaactgcatctggcctgctcgttggttacgcatatttcctcattacctcaagggatccaacatatgaggacttcatggaaaggttgtatttgtcaagacacagaaagctttgtgccaagaatagttttaatatggcaaagtccctcgagttgcagaagcattgcaagtgtcctctggaaggtcattattcccatagttctaagtttcatgacttgtaacaccaggattggattgtctctactgttgttacttgataatgtactctttacttgtagaattgatagaaaaaaacacatgatcaagtcattgaaggggcatttataaaaaaaaacaacatcaacctaacaaaagcttgcatacttactgtagataaatggaaacgatttatattcacagaaatcagaaaccacttacagatttagcttgatccttactggagataaatgtgagctttcagatttaggcgttcttatctaccgtatgaaatttttacacaagatgtgttattagagcaatccaaaagccacaatgccctgcttatagtgaaaggggacaaggcacaagcagtgttgccatctgagtgcttaaattccttgcaaacaaaaacatattggaatatgcaggacataaagatgccattttgatgccaaagagcaaaacaaacatcgtttttctgcctataaagatgtcaacgcaccgaaaaatagccaggcttgccattggtaaagaattggatgaataaaatgacaacttgcaaggaactgcacctttgcaaacccaaacgtgcagttgaacaggtgaagtattcaacataacaccctggtaactggtaaactgcagcctacttcaaaggtgtcgtatggtgaccagctcacatgttctatacaaaaaattaacgcaaatgcttacagtttggtataataattaagaccataccccaacaatttctttcacttcatccggtggcttgcatttataatcgtagtttcttttgatacattccttacacattatatttgtgattttttatatgattcatacacatttatacaatgcaaattaggtcgattgatattggggcaatgatattttatttgaatctagaggtaatcaagtacctcaaaaaggtcgccaatttaaacatagttaaagggcacatctaaataacaaccatatcatataaataagagtagcattacatgcatatagacagcacacttcggtttactgtgtgggtaacctagataggtaagaccgatgtacactgattgcatgaagcattcactaaccatatagctaacagtagacgatgagatcgtaaaggcttgaacattcatggatatccttctagaactttaagaagggatggatacatgcatattacaaataagggtatcagtttctctaaatatggcttggaattaaattgcattattctgtcttcgttattaaatatgatgatcaccccttgcacaagttcaagaattaattatatcctgtatgcgagcataggcgtccatttgtacttgccgacattccgggctgcagaaagcgctctctcccctgttacaacatcttataattaaaaaagagaggcataaaaggatgtgaagttttcaatccacctcatcattgtacaatagtatattacaattgttcaacaataatttaattctttttctaaaaaaagaattcgcacgtgcatgtcaaacaaataaaaatcttccctatctataaaaacaaaatacactagtaccaaccacggatgaaaagttatataaattgatttcacctaaataagtaaaagtgatcataattagtagcatgtgtacaagttaattatgtatggagattagaaaattaattaactaaaccgtgcatgtatacaaagctattatcatttatcaaagaaaaagaagggttatcaattgtcatcaacaaattaattaatcagctaggttaggtacctgaagatgtagacgttcatctgtggactaagtgtgcggttgcaggtagcgcaaaacctcataaaattttgaggacgcagcgtagggggctgtgaactgatgggaacgccaacattatcatcaacacctcgtcgtgtttgatattcatctgccacgcccacgccccggtttctgctgcttggctggcctctcctcgtcctcacctgctcactactcatgtactccggctgctgctggccgccgacgggcaccagcggcggcggcggagcggcgtcgtcgtcggtgttcctctgacaagacaagctgtcgcccatatctcggccggctgacactgtagctatagctgaaggagaaatgtatgtactagctagctaggaataatggagctaatgatcgagccaatcagcgcgcgtttgaatatataatgatacagagtgatgcacatgcatgcaatcaaggaattaacttaggaaatatagcatgtatccatgcatgtatgcgtaaacgagggatttgatatatgtcgctccaaataattaaaaggctttcttaatttacaccagtgagattaggatcccgtatatattgtagtaatccggaaattaagagcgaatttctcgtgtttcatgtacg

SEQ ID NO: 13086 - DNA, 1712 bp, Oryza sativa
cgcacactgtttaacagatgtgcttaagtccctagaagacacatggttccaccacatctagaaatatatggcatatgtggtataaaatccgagtaaataaactcataaaggatttaccaaccgcctggaaaatgaccaaaatatataatcagcctaagccataatattggtcaataaaagtgcacacttacatggcaaaaagcaatgatattgtatccaatcaattgctttatgaacccaaacagcgccttgacttatataaaaaagtcagcggggagctatataaagcattactgtttggcaccttttaaaatgcattgtaccaactcctaaaaagttgagtaactgcggtataaaaggattttaaggtattgggcacataatcacgcgcacttttgcctaagcaaaaagatgcctaagtccctaaaagaacgtgacaggccacacctgaaaatatgggctgcaaacatattaggcctaggccaaaaaatatgccttcgacaccctttaaaggatgacgcatgtaacatgctcccgagtaataaatctttcgggtgatatagaccaagtgtagctcatatgaatagcttctgatctaagtgattatgctttatgggatactccaaaatagatataacaattgaattccgactggcgcaagtattcggttgataatccttacggggaataataaatagtccagtctttgagcatagaaaatagacccatgatcatcaaattcatgttgcatgtatccggaacaagtccaaattgaaggtatgatacttatgtttgaggtagtaagcccctgagtatataacttgtcgttctgtcgtagtcacaattgtccattgatggtagcttacgcagttggcatagagacaagacgaccaatatagagataatattgcccaccagaggtggcaaaaatattggtagtagtgaagataatgataccaatcaaaagtgatgaagttgcatagccgtggaggcgaagaaaccagtcggcaacagtcaggtcagccagcaatgaatatgaaggcgcccagcgataaagttgtgtagccatggcagtgaaataatcagtcggtgacagacgatgcagctggtgaagaagatgaagatgcccattagtggcgacataataagccatccatgaaggcgaggataccggtcggtggtgacgaaagcaagccgacggtgaagatgtagacacgcatcaaaggcgatgacgaaatccaccaatcatgaagatgaagaaaatagtcggcaacgacaaacgcaaccgacagtaatgatgataagcagcaatcatagatgatcaaatataatgacgaagttgcccatcaatagcagtagagtgggctatgttgaagaggcttgataggatgttgatgaagataacgatgtcggtgatccagtcgatagcaaccatgaaagtgaaataataagtcggcgaagacatagtcatccattagcaacagagttgatgacagggccaatgaagcataggtgctggtgataatgtcagtgacaataatccatccaattggtgtcatagctgttacagatgcttcacttggaggaaagtagatgatgttgtccaactcgtcgaaactgagctgattggttgatgcctctgccctaaagcaaagacgaagataatgactcctgtcattgactcgttggctaattaattgattgcttcagct

SEQ ID NO: 13087 - DNA, 1193 bp, Oryza sativa
ttatttcagtatttcaataaaagcagtttcaatttcctaaaggctgtatctgtgctgttttttccttttgaagaatcttgacttgaaataggtcactcgtgctcaatcctgccctcgggggctcgggtcggctaaaatcgccaaacggggcccagaaccgagccgtgccccggggcgtggtgaactccgggggggaatcggcaaaaacccacaatcgggtcacccataaccctcggtcaccacgttcccggcctggccagtctcgacatgtggatctccccaggcactagccccgacccgcgccttttgaggactgggacctgggcacgaacccttaatcaagctaagacacaaaaggaccacggcacagatcatcctcatctcatacacacagcaagatgaaattgacacaaaaatttcttcatttttgattacagattaagttgatctatacaaaaaagaggcccgaaggccttagaagaaagaaaagaagaaaaaactgaaggatggcgggggtctgggggctcaatccgatgcacccgggtcgccggcctcgtcgtcactgttgtctgcaccaccggcattgccctcctcgtcggagttgggggcgaacgcgagccgaggggccgagccctcgaagctgtcgacgatatggtcggcggtatcccggacctgcgcgcgcgcgtggtcctcggtcccaggagggaactcatccagcgccatccatggagagaaattggggtccctggcctggtaactcgctaggacgagctccaccgctccttgggcgaggtccctcgaggatgacttaattgtcttctcgagctcctcgtggagccgttggagagccccggccatcttcgagaggcgctgggcgagacctccctggttggcggcgtactttacggtccgccctctccagaggcccacttgccgaccggcgcaatctaggcgggagacggcgtcccaaagcatgccgggcccaacctcgcctgccaagcggagggcttcgacctccccggcggacgagtccagcgtgccctgcagatcggcgatggtgcgttcggcagctgcgaggcgggcggctaagtcgctttcgcccgcggccgccccgccgctgcgcgccctcgcgtccaactccttcgcccgcgcctcgagctcagcggcccgttggttcagtgcggccctctcgg

SEQ ID NO: 13088 - DNA, 1841 bp, Oryza sativa
ttcccgcctgcgggcctctgcggccgccggatcctcggtctcagactggccggacttggaatggcgggagggacgcgacgggatctcgctgaaacaaaagaaaagaccagaagacgaacaagatgggtgagtgaaaactcatgttgagagaatgaatacagccacgatgggtgagagacgaacctgcgagggggtcggttaaacgaccactttggaggggaaatgaggtttccccgagatggttctgtctcccccatcttgcggggccgcttcttcttgcgctccccctcgggctgcgatgctggcgcggccccctccgggcgcctgctgttggcacgcgccgccccgtcccctcggggaggagatgggggaggtgttcctccctgcttcctcttcccccgggcgttggcagggcggctgctccccgggccactgtcacgggacccagaagcatgaccccctctcggggtagattgttccccccggcggctcccgcctgcgccgtcgtggccctttggagctcgctcctctgaggccccgaccgccatcataatggtcaggatggaggcgcggtccggatcgctgcagagggggaggattccttggggaatgagggccgcctccacggagttgagattcagcacccgttggaccaatatcttgaagtcctcaggagccccgtcccatctcactccctggtgggtcctcatgaagtcttcggacccggtgtactcccaggcgccccgagcgcgccgctggagcggcgcaatccgacgacggaggtagtcgccatacaccatggcccccgtgagcccctgggatcgcaggcccgccaggcggtcgaggacggcgtcatagccatcccccagatctaccggcgcccgccagctggaggcctgcaccgggggctggctcggaagtcggaggcgcgcttcgtcggcaaggggggtgtagaaccagtcgctcttccagtcgtcccacttcttgcggagggtgcaggggatgtagcggttcgccaccggcccccgtggctggaagtagcagccaccaactaccgatggcggcgacaccgactgcacggtgaagaaccaccggaacagccgaagagatgggcgcaccccaatgaacatctcgcacagatgcgcgaagatggccaatgtcatcaccgcgttgggggtgaggtacgccatctggagatcgtagaactccagaacatccatgaagaaagaagaaaatggcggaactagccctgccattgcaaaagggagaaagaagacggaccgccccgggtagtctggcgccgggcgtccctcgcccagcgtgactatctcccggccggtggcagattccggcatgaagcggcgcggcagcccagcctgcctctcgctcacgatgcgggagggcggcagcacgctaccatcgagcagagcggagccccgtgccatggcgccggaaggaagagaagattaagagcgagcgcgtgtggcaaaggtagggcacaagaaagaaggagttagggcgcaagcggcgaagacaagggaaataatggcgaaaggaaggaaacaaatcccttcctcagtgcctttatactcttgccaacgctgtgcccggctcctcgcttctcgcgcccaatatttcgcccctcgtttctcgcgcccacgcttccactaatcccattcgcccgcttgcggcgcatgaggtggatatgcggttgtggcagtcgagatagatcatattgtgcgcgcggtaattacgctcgccgaccaaagcgacgttaccatatctccagacgaaacgaatcgccatgtccagattcgtgtgctactcgagtaatgtggcag

SEQ ID NO: 13089 - DNA, 4177 bp, Oryza sativa
ggcgaattcgagctcggtaccccgctagctagctaggaaattaatcaatccttttgcttaattacctgcatggttggatacgtgacatagcactttacactacacacagagatcttcatctgcaagcatgcatgctaatatacatgtatatggaagtggatttttttcctctcgaggggatatccccttaaatttaagttacatgtaaaaataaggggatatctttttcaagggagataatttgagttttctaatatatagtagtccatgcagtacatattaattaacttaccgagattatttatatggtaggaaataaataatcgtccccactggcatgtggccctgatattaggcacaaagtaggaggtgtatcacgagagaaataggggcgatgattaattcagtgttcaagtgggggccgtacgtggcgattaatttgatccgaccaaaataaaaaaaaagttaatagagattaaggccctgtttctttcagcttgggattattataatccagattattgggagtaagctggaagaaacagacaacttattgaattaagttattataatctggagcccagcttattataatctgataagctcatttaggtgaggtttttccagattattgagtgaaaaattatccaccatgccaccccactctctttttagacttgcaaacccaataatctaggctctaataatctaggaaagaaacaactaaccgtttattctactgcagattataacaatctagcttatagtaatctgactcaataatctagattataataatccaagctgaaagaaacatggtctaatactactccgtaattgatatgtgctaccaatgttatcttgcccggcccttgtgcggcccaacataattatgaacgtgtgttctaatatgtttctgattcggaagtcggaacgcgtactcacgagataaaatagagagagaagccttagccgccggtgatccctagctagaaccacccctctgcatcgatccccaaatcaaattgagattgagatcgaggcgtcgagcgagcgatatggctggcgaatttagtgatctgatgatacaggagggggcgaggctagggctgaagaggtgctccaacgcggagggcggcggccaagaagatgaaggtgaaggtgaaggagaggctgacgagggaagaggtggagcggctgctgtcgttcgtgccgaggccgtttcctcctcgcgacagaccacggtgcgacgatcccgacgtcaacgagatggaggatctcctcgcccacaccgtgctgctcctcaactccaacaaccaagtcatcctccgggcgcaggccagggcccgcgaggagctccggaccaagggctacgtcgagcgctgggtcaccaaatccgtcgccgacatgccggcctcaacagcctagctagctaggccctccatacctagctacctcaattcaagtatcaccatcgatctctcctaactgtattagtaatataatgtagatgagcatgacattacgatgatttgcttcttcggtggtgtggaagcatattttattactgattagtagcatctgtatatatctgtaaacagattttattacgacgacgacgaccaaaaatacgtactaggtttaatttgcggattatatttacgtcatccgattgactcccgcacgacgccctcctccgatccgtgcatcggcgtcgtctagccaactcgtccgatccgattaagagaccgaacgccgatcgatccggccaattggactcgaatcctacttgttttgcctcccccaggtatagtgatgcatatataaatgcagaccagcatcgctagctcagctcgtgtccaccaattcacaaaatcgattccaatacccaacaaggcgacgccgtcggaggaggaggaattaaagggaagagaagaagatcgatgtgtggcgatgacaaatgagctgaagaggtgctccaaggaggcgacgccatcggaggagaaggccgccaagaagatgaagaaggaggaggctgtgaagaagaagaggatgccgatggaacgggtgcaccacctgctgtcgatggtgccgagggcgccggttcctcttccggtgatccgcgatgattccccggagctgaaggagatcgaccaacgtcgtgcaggctctcaacaccagctctcaactcatccgccggatgcaggccaacgcccgtgagcagctgcggaccaagggctacgttgactccgacgacctctagttgaaactgatcgatgtctgtatgatgctgcaaactgtcattaattaattattagcgatctgaaccatcgagtgtcattagctattgacgatctcctcaaccatcgatgtatctgtattattatactgaaccatcgagtgtcattagctattatcaaagttttcgtgctcaactttgatcgtccgtcttatttataatttttttaaattagtatttttcttgttatgagatgataaaatatgaatagtaatttacttatgacttatgtttttattttttaaaaaaaaaattaaataagacagacgatcaaagttggacgcggaaaactatgactgtacttaaaatgatgggacggagggagtacatatatttcacctcacctactatacagcgggaggctgggatgaatcttgtagtgtgtgccctggtcttctttttttgttcagcgttttggttgctaccatgtcaaaattaatatggaaaatatcaaaacctagaaaaaattttggtagtgccaaagccattttttttggcaacctatgtgttattattggcatttttttagcaaaccaaaactaaccaaagaactattcaaattgccaaaaatttggtagggcacataattttggcatcaaaaccaaaattctttcatgctattgctttggttgtcataccaaaaataaaccgaataaaaccttactaatgttatattttgctacaatcaacgatggcctgaggtctatttggcacagctcagcactagctccacccctcctggagctggagctcagtcaaacagtttcagctccaccaaaactaggagtggagctttctcacaaaatgaactagaattgtggagctaggtttagacagctccacaactccactacagacccaactcctgaagctaaatttaggagttggagctgtaccaaacaggcatatgtgaatgagtgacctttacaggatgtcctgagtgctgaagacaaaatgtaaaggtagatgagcctgcagtatgcaatcacgctattctggttttgcaatgcttggacgttgaagctgttttagctctatgtactatcttttatcaaactgatgatacaagaatccttccgatgtacaaaatgcaaagatctcaaaacttagacattggtgtgacatggtacataggccttgaagaagaaagaaagaatcacccaatacttgcgggttgaggcattctacatctgtacatgccatgctagtgaacactcaagttatacagtatagctcttatacaacgagcaaagatacacatgaaagaatttatacgaaaaaataaccaccagggaactgctcttttgcaatcccaaagtggtaaatgtgaagaagatccatccaaatcgtgtaacaggtgaaggaatcaacatacaccattgttaaccagggatctacttcaaaggtatcatgctggtggcctgctaccatctttagctactatgaagtattgcttaaaatctggcacaaaaacatttcatcctatctccattttggaattaatgtagtgccaccatgccacccttactatactcaattcattataatgctgcatcagatttcatctcactctaaccctctttgttcccgaaagttctgttgctccaaaatcccagaaatgtagaatgtagtgaatctcatgtcactgttagtctgttattaatgtatattgcattctgtcataaacctttccccgttggtcatatatttcctccagtagcccttgtaatcatgtatgcccaaatcaagccaaggtttcatgacaccattgtagtgtagagtaacagacctttttatatcggtttgactaactccataatcatgtccaagacctgattggacccatgaatcttccaaaggatatatcaaatcttgaaa

SEQ ID NO: 13090 - DNA, 1457 bp, Oryza sativa
tctttggaaatttgttgacgaatcaatgcttctagttagtagaagcgggttacatacttctctcacgtatgacgaccgggtggaatttattagaaaaaaaattgacagtttcaacttaggttagcaacttttggtgcaacttccttgtcgatcgtacttttgtgatgacgtatactgccgattcttggatgtctcaaacaacttcaacacgagccatttatttttatgcaggaggcacgagccattcttttagttagattcagtactttgagcagagtcggcgagagctctcccagagaaaaagaaagtgctctttctgccgctccaatggcttcggttaccggtaactggaggtggagtatatatcgtctcgtagtagggtttatccaattcttctttagagtgtgtttattttacgctaaaattgaagtttaattgaaattgaaacgatgtgacgaaaatgttggaagtttatgtgtgtcaaaaagtttttatgtgatgaaaaagttaaaagttctaaaaaaaagttagaaactaatccatgccttagttatttgccggttcctgcgtggtgcaagagattgtcggcatcgtgttgtcatgtcccatcatcaagccatggattcctgctatttactttcgtggcttttgggctacagattgctcagattataggtatcccatacccacataacatggttatccgactagttacaggggataacttatatctatggaatatgtaatagatcatgacttgggtaatacgtttccttatatattatggaatggcctttagtcctggtttgataatattgtaaagtagatttaggaaactgataccgtattggttaaggtttctatcttgtaatcctgcccccatcctatataaggtgggcaggatgctctctagggggcagatgacatacaatcagatcgtcagatctataatacactcggcggattcaaatccccaaataggagtagggtattaattctcattgagagggcctgaacctttctaaatcctttgtctttgcatccctccacttttaggtctcgtgcgctaccctctttatattgctgaaatattgtttcgacagttggcgcgccaggtaagggcttcgccgagtttctgtcacggtctcgaattcgtaggagagattcggtcgagtagagaaggaaagagattgagagagatggcttgaggaagaagaagaaggagaagatcataacagaattgaacaggacagagatggaattgaatttgagtttgtttgattacatgatttgatccccttcctctcaatcgtgccggcttatatagcatcgaactacacagtctctctcactcactgacagttgcctagccaattactactgggtccacacacttgcagggaaacgggagttgggctgcttctcccgtctaggccgattcataggctgggtcactg

SEQ ID NO: 13091 - DNA, 2089 bp, Oryza sativa
  unsure (1)..(2089): unsure at all n locations
agtccataatgtgttccatgtgtcgcaattgaaaaagtgtttaagggtacctaccgaagaagctaatcttgaacagatagaagtccaagaggatctgacctatgttgagaaaccaatccgtatcttggaaacagatgagagaagaaccaggaatcgagttatccatttttgtaaagttcaatggagtaatcactcggaagaagaatcaacttgggaacgagaagatgaattgaagttagctcatccgcatctgttcgccagttcttccgaatctcgaggacgagattctgtttaaggggggttggtttgtcacaccctgaaaatcataaatatataaattgttgtttaaatggaattttttttgaaataattttaaaagccttgaagagaagatctaattttaattaataaattccaatataaaatggggccagataaaattttattaaatactttgcttaattctataattcctagatttttctgggattcatttgagctaaggaagtatttttaataaatggaattgcatttaagaaataatttaaattgaaaaaggttttaaaaagtcttcttttggctttgggccgaaagtcggcccaaaacctctcttctctctctcctcggcccagtccggcccagtccgccgccgcgcgcgcgcgccctcgctcgctgacaggtggggttcgtcttccccgagccgccgtcgcccggccgaaaccctagcgcgccgccgccgccgttcacttccaaatccggccgttcctttccttctccggccgaatcaaaagaggggaaatgatctccgggatctcctctaccttttctccgttggaatcatcggctaaaacgttttggaagttcgtggaatcgagttcgattcggatcggcctctttccttcaagccacgaagtttccttctcgtcaccggccgccgtgggccttcgccgccgcctcctagcccctttaaaaggctccccggtgtctcctctacccgccgccaccctcgccttcgcctctcgtcgcccgtagagctctagcgccgtgtgccctagcgccgccgtcgccgccgtgagtccagcagtgcgccgccgccgttccagacgtctccgtcactcgggaaggtcgtcgtcgtggtcgccaagtcgtcgcngtccttgtcngcngcttcgtcaccgtcggaaaccgccggagcatcgtcgcngtcgtcaagccgcagtccgccgccgttccttcgtcgtcgccgtcgccgtctgttggtcttccgccgctcccttggtcgccggtgagttcgccgtgccgtccgctacctgttggtgccctccgttcgtgccgtagtgccgccgttcgccggcgagcttgcgccgtccgagctgggagccgccgagccgccgccgccggtggtgacgtcatcgctgacgtcatcgtccccgtttcccgtgagccgccgtggacccgatcgatctcggccgtccgttttggatcaagtcgatctcggccgtccgttcccgtgaaccgccgccgtgcgcccggtccaccgcgaaaccctagcccgctgacgcaataaatcccttttccttttcaaaaataattcattattgcgtcataattcaattaaaatcaatttaagtgttttaatccgatttaatcttcaaaatttcataactaattcatcttagctccgatttagttggttcaagtctctaaatttttctaaaattgagatatacatattaaaaatatccacatgtactgttcatgcttgttttgtgctgttttggtgattttgctcttttttgcttagattccgtcgtttccgaagagtccgttttcgccggagaagagtttgaagagttccaaggccagcaaggcaagtcacacagatcccaaacaaccctttgagcatgttgatcctatttaaagctattgtttctattcaaatattgcatttattttcgaatgtcattgggtggaattaacctattgtttgttatagcctttttgttcttgattactttattccttgataccttgggttattataatttgactagttgagctttgtttatattggttcaactagacgtat

SEQ ID NO: 13092 - DNA, 820 bp, Oryza sativa
caaaatggtagcagggatggaatggatgaggaacgtaccaacgatgacgtctggagttgtcagcacgtcctcggccgtcacgtggttcacacgaccccgaatgacatccttaccaccgttgttggagcagggaggcgcttggccttgctggcgcctcgacttcgggcatttatccgcaaagtgcccgggctcgaagcagttgaagcacagacgctgcggaccttgaacgtccctgcggccttgaccagactgcgcggctggcgtaggaggacggggcgcatgggtcccttgctggctctgctgttgctgcggctgtgggacgcgcaccacgaattgaggtcgaggcgcggagcgaggttgctgctgctgcgaggaagatccccctggatagggattggtgtagcggatcctttggttagcaccctgttggttgcggaaatcgccaagcgacgcttgtgcgactccagttccttgtgcttggcttccaagcggatgcttttgtccaccagacgttggaaatccggatagtcaccggagactagacggacagacagctccgggtccattcctgccaagaacttctcttgcttctcctcatcttcccgcacatcctccggggcgtaccgggccaagttgttaaactcatgcaaatactccatcacggagcggttgccttgcttcaactctcggaactcccttttcttaagggccatgactccggcgggcacatgggtcctccggaaggcggcggtgaagcgggcccaagtaataggctgcccctctggctgcgtagcctggaaatgatcccaccatagagatg

SEQ ID NO: 13093 - DNA, 1402 bp, Oryza sativa
caaaagaagcagtcctgacattgctatttctcatataatttgttatgaagtttaattgtacaagttttttttttttacaaacaaagcagaagatatagatttgattactaagatcggactcacaatggtggaagatcagcatctgcaatggtgtcactgagcatgcgttcatgctcttggatgttttgtttcagttcacgtgtaaatgtttcctggttcttcagctttgcaatactaggatagtgagctcttgccatgaaaagttgatccttaagcctcttcacaataaaatctttcatcacttccttatactcaacagaccagaggcagtagctaccatattcaagttcacaggatctggggttctcatgctcgacttcttggtcttggttctctttcttatcaatagtagtatcctgtcacagaacagattcagagccttgtggcagaaaaaggaaagggcatccatcgtacacaaacacctatcaggttattgtgctactattgtcttcaaattcatttataccaagggaaaaaaatctgaaatttgaaaaagccttttctaatgtatcattatgtccataatgcagttgtgatttgccaaagcattaacaaacagaagcaccaaacatgtgtgtccaagatttgcagagtaatacaaaattattcagtggttctgagccatagaataaacttgtaccagcgaaaaaaatgggcacccaactaagtttcagaggaaaattcagttctatactgtgctgcaaactatgtcaagtatgtgcattcttaactgattgaaagtactggcaacagtgagacatctaagaagcaatttttaaggtgtgaaatatggccaaaaggacaagtcaactgtatagtacaaaattattgcacttttaatcaacacaaatgtatacattattactgaagccacactggaaataaaaaaaaatgttcctactcaaatattttacattcactatctgtcttcctgaagatcccattgactgtaaaatcccattactaatcaacttatcatagcaagaagtacaaacattataactaactgtgctcacagacaagaataatccgttggttactccaaaccaatgaaatgcacatatattaaaatcctaagattgcaaataagcatagaaactatttcttacctttgatctccaggataagtcctttaactggtatcttctttgtgtatgaagttctgaaataacattggatactataaaatggatgctggtggtatcttacagttcttgttttacaaagtaaatgcagtaacactctgcaaaatctgatctgacatttcttacctttgttttttctggtctcattttttagctgaactaaagaggaaacgagctcgagcttttcttttgatttg

SEQ ID NO: 13094 - DNA, 3179 bp, Oryza sativa
gagtccagccatatgctgccgccgctccggtcatcgtcgtcactcgggaaggccgccgtcgggatcgccaagtcgtcgccgtcctcgtcccgtcctctgtttccaccgaagaccgccggggcattgccgtcatcgtcgacccgaacgcctccaccgtttcgacctcgccgccgttgccatccgttgccgtccgtcgtcgtccgagccctcggtgagttcgccgcgtcgccgtctatgtgtagatgccctccgtttgcggcgctgcaccgtcgttcgccggcgagcgcgaggtgctgagccgccgccggtgatgacgtcatcgtcgacgtcagcgccgcgtcatccgtagaccgcggtggatcgaatcgatctcagccgtttattccgtagaccgttcccgtgcaccaagtccaccgtgaacccgagcccgctgacacaataaatcctttttccttttcaaaaatgattctttattgctcataattcaattaaaacccatataagtgttttaatccgatttaatctttaaaaattcataactaattcatcttagctcggatttagttggttcaagtctctaaatttttctaaaattgagatctacatgttaaaaatatccacatgtactgttcatgcttttttgtgtgctgttttggtgattttgctcctttctgtttagattccgacgtttccggagagtccgtttttacaggagaagaatttgaagagttccaaggccagcaaggcaagtcacacagatcccaaacaaccctttgagcatgttgatcccgtttaaagctattgtttctattcaactattgcatttattttcgaatgtcattgggtgtaattaacctattgtttgttatagccctttttgttcttgattactttattccttgataccttgggttattataacttgactagttgggctttatatattggttcagctagatattagataggattgcttagccatacttagaaacattagcacactattgggataacttatgactcactattatttattatttaatgatggcttaatgatagctcatgatggttaatcatgattggttaattaattaatttgccaactaaaacctgataatggtgggttgtgagcacatgattttgatggtcgtgctcatgacaattaaggaccagttcacgagtttcggttgtgaaacattaccgtgccaaccacaagccagcgtgggcaacggctttaccttttgtatagtatggttcattgcggggcaccagactgagaagtggcggagataagcccacgggggtcgctggggagtccatgccttgtttataagggggtgattatgatccaggaacggtgcactgtggtgagctgtgttgtgcgaggggtattgtcacagttcctttccaaggtaccgtggtggtattgaggcgcatggtgacatgttgtggagctgtgtcttgtgggtacagtggtacacctctggccagagtaaaactattcgaatagccgtgcccgcggttatgggtgggtctaacaatgtctttcgtgattagtttcacatttctcaccataataaaagatgctataactggtaataatttgattagctcctggtttggaatggttaattcctggtttggagatagaactgtgcagccgggatggttgttcagaatggttgggcctatgcaacagggtatgttgtatagcgttggattaatattgtttaattactacttaactattttattaaattctgaaatgtttattaaatgttgtttatgcaaatgaaaccctactatgccatcctttgttatcctgtgcacttgtatatttgctgcgtggcttgctgagtatgtcatatactcaccttgcaatcattcatcagaggaggagttctacagtgatgctgatggtgtggaggattaggtgtagccctggtcaagctgcctgtggagtgggtcgtctgcgccgtttatcttttttttttccgctgcttagatatttattgattgagaggaactatctacctctgtaatgacattttattcgcttattaattagagtaataattgtactctattatcaatttgttattgtgtgcctcggctgattcctggacgagggttcacacatatgtaagcgtttggaattttggatagaaattccaggcttgacagagtattatattaagttacatctcgtaatagactaatttattttgggctgaaactaggaataactagtgattttcttttttgccgctacaactaattaagtactccatgctggtagtactatactattgtcgggtgcaaaataaactatcaaattaatgttggcccttcttcggacgcacaagaatcacatatagaaagaaatgcgcgatcatgtcgctactaggacagtctcatttggaccagaccagctaattaacctctcctttactcctgctcttctggatttcgttgcgctttaatttcgtaccaatagagagatcaaagagactagcatttgttttgatcatggccatgacatattccttgcgtttaaacaattctccttccattacataatatactccatccattccaaattgatccacatatttcatagatacactaagaacaagaaaagctaataactctcttatactatatttactctagcaacaaactcaatgcatgcaccatccccactattttctagccaatagcaaatcaagatattgcatgtgggttataaatacatgtgtgcatggatgcatgcatcaatgtccatttactccaatgcacaaataacgaatagacctaataaataaacacaaatatgtagatcatttagaaataaacttaaaaaaactatatgcagatcaatttggaatggagggagtaaggcataaccacttttcttatatgttacataatagtactactagtataaggcatgcatgcaagcatccaatttactatgacatcttctctattaaattactacttttttaaatcctctactctcatattatctaattctattggatgcatgcattatatttattaggatgatccaaactacaagataataataattatttcttggtctttgggttaatggaggttgtgctttatattttgaaatggagggagtacactgcactgataaatcttaattaatc

SEQ ID NO: 13095 - DNA, 609 bp, Oryza sativa
tacgccatgggcggatggaccggctatggtcacgcagtgtccggtccgtcccggaggcaactacacttaccggttcaacgtcaccgggcaggagggcacgctgtggtggcactcccatttttccttcctccgcgccaccgtctatggcgcgctcatcatcaaacctcgcggcggcgccaaggcctacccgttccccgtgcccgatgaggaggtggtggtcatcctcggtgagtggtggaagacgaacgtgtacgacctgcagcagcgctccctcgttactggcaatccggcgccccacgccgacgcgtacaccatcaacggcaagcccggcgatttctacaactgctctgcccccaaccgtaagttgctgatcgatcacatgcaatattcatggcaatcgagatgtgtcttggatgaattttgatgtgtttttttttgctggcagaaacgcacaagttcgagctgaagcagaacaagacgtacatgctccggatattcaacgttgcgctcacaacaccgctcttctttaaggtggccaaaccacagcttcaacgtggtggccgccgacgcgtgttacaccaagccgtacaagaccgacgtggtggtcat

SEQ ID NO: 13096 - DNA, 588 bp, Oryza sativa
tctcctctttcttcaacaactgtgtcatgggtcgagcgattttggagaagttctcgatgaacctccggtagtatcctgccaaacctaagaaactgcgaatttgagtgactgtcttgggttgcttccaatcggtgacggcggtcactgtttcgggatccacagcaactcctttagcggatatcacgtgccctaagaatttgacttcggacaaccagaactccacttgctaagtttggcgtacaattgatgttcccgcaactttcccaacaccagacggagatggtgctgatggtcttcctctgattgtgagtataccagaatgtcatcaatgaaaaccacaacaaacttatccaagtatttcatgaacactttgttcattaagttcatgaagaaggcaggagcattggttaaaccgaacgacatcaccgtgaattcatacagtccgtatcgcgtggtgaatgcggtcttcggaatatcttcttcacggatgcgcaactggtgatatccagaacgaagatcaatcttggagaataccgtggcacctttaagctgatcgaacagatcatcgatccggggaagagggtactt

SEQ ID NO: 13097 - DNA, 592 bp, Oryza sativa
gctggtactgtttttcagttttgcatcttagtttatagtcaggttgtatttgtattgaagcatagcatctctactcaattccgtcgtcataacattctgtttttgggggcacttggtgtttaccgtatttgccagttcaacaagaggaccacatcgcccaatcatgaacctccatgagagaagtttgagtgttttggcttgccgttatgttgatgaagtgatcattggtgctccatgggatgtttcgaaagatatggttagttttctgttctactttatcatgatgctctcttactgtagtaggaattgcttgatgcaactgctagtaatagttcattgaacatggcacaactatgcatgcacagttcaaagattgaacatgatatttatgctacgccagcaaaagccttgctcacagctattattgattttagatacagattaacagatatggtcggatttgtgcttatccatgattttctgcagatgcacgattgcacgtagcattaattttatgtcacagtcaaataaactaaaagtttaggagctggctcggttccaaaagtataatttgatgtagtctaagtttccg

SEQ ID NO: 13098 - DNA, 596 bp, Oryza sativa
tggcaagtggatatttgctttgacagaatttgatcttcggtatgaatcgccaaaggcaattaagggacaagctatagccgattttattgtggatcaccgtgataactcaatcggctcggttaacattatgccctggacattgttttttgacggatcagtgtgcactcatggttgtggtattggcttagttataatttctcctcggggggcgagttttgagtttgcctatactattaagccttatgcaactaataatcaagttgaatatgaagcggttctcaaaggattgcaattgcttaaggaagttgaagccgatgctgtcaaaattatgggcgattctttgttagtaatcagtgaattaacaggagaatatgaaggcaaaaacgatatattgatggtctacaatgagaagtgccgagaattgatgagtgggtttcggctggtaactttgaaacatgtttctcgagagcagaatgttgaagctaatgacttggctcaaggggcatcgggatataagccgatgttgagaaatgtcgaggtagatgttgcaacgattacagccgacgattggagatatgatgtatttcaatatttgc

SEQ ID NO: 13099 - DNA, 660 bp, Oryza sativa
gccgtcaccggcaacgcgttcgcgcgtgcgcgcagtcgtcttcgccgcggccggtaggccgagcttgagccaagccgagccgggtcgccagccgcccgtccgatcgaccccaagggcgatcaggagccgtcggtcctgtggaccggcggtggaccacccgcgtggtcccggtccgcggtgaaccgccctcccccttgagtcgctgaccggtgggtcccgcgtgccggcgcccctttcctccctctcccgagccgctgaccggtgggccccgcatgtcggcgccgcgcccccttgatgacgtcagccctgggatttattgcgcaataaatgatttaaggtttttctttattagtaataaacacagtgaatcttctaaaattcataactaattcatccgagctccgtttaagcccattcaaagtctcagtaaatcaagaaaaatgtgtagaatccattaaaaatggttttgttccctgtttcagtagtcttatagcctgtttgcaatgtttgccttgtatgtcgcgagattccggttccttcgacgctccagtgtacctcgaaatagtcgccgaggttcctccagcagcagagcaaggcaagtcatgcttgtcacttgaacatgttgatcctatattgcaaatgctctattgttttctttca

SEQ ID NO: 13100 - DNA, 570 bp, Oryza sativa
ttttcttttctggtatgtaggttgataattgtccgtgctgtaaaatgggtgcacgatatcattcaagatgcaccttatgccatgactgaagatttcatgaacaaactattcaatgagtataatatagattacattatccatggtgataatccttgtctgctcctagatgataccgatgcatatgtccttgtcaactagatatataatcatatttcctccaaaagtatatgaccttatcaaccaaatatataatcacatttcctccaaaagtatatgtccttgtcaaccagatatataatcatatttcctccaaaagtatatatagtcccaccatgaatggtagggacattatcatgcccaaaaacaccctttaacaacaaagacaacgacaaaagataacagttttaagatatattattaatatggtcatatataattaactctgataattaagtctaatagtagaaacttacgctgtactcaggacgtctgcatgcaatccatattccttggcaaatatgaaggatgaaatagactgaggtattgcagcctgcactcatttcatgagaa

SEQ ID NO: 13101 - DNA, 644 bp, Oryza sativa
caatgccagaatcattaacagaatgtacgataggcgaggcttcaacaaagtccgcctcgtcatccaacattgcaggaactggtgggccctcttcaacctgtggctcgctgcttgcttcagattcagcctcggctacgaatggctccaacttggtgccttgacgctctaccatttgtcttctgtcaatggcatccccatcaaatggaagcctcccattttcagaagctatctttcctggtagatccacggaaaagggtggcgtgaacccaatgaagataccaaccatgaagcacactaataactgcagcatggccctcttcaagctcattcccttggaccttgacctctccaaggaccgggcatgcttgtgggatgatatagctgcccaagcagacttgaggctgctcgacatcaggacaaggtccagcgaggccaccgatgtcagaagccccctcattgcaacataggactgcgagtacgccagcttgggagacggcgaggggtcaaattcctcccagtccttgactgacccctcccgctgcattgccccggcattccttcgggacattgcaggatcgcaacagtatcaagcatgtacagctctcgaaccaagcaaaggcatcaaatttgacacgaaatcgctg

SEQ ID NO: 13102 - DNA, 698 bp, Oryza sativa
attagatccacaacagctcctccatcaaccatcatcttggacatcggcttcccattgacaaacccattgatgtacaacggcttgagatgtcgattctctgtcccttctggcttctcaaaaactgcttgctctcgagacaaaccaatttagccgaagcttcttcaacatcatcaacatcggcttgcctagcctcgaattctgcaggtaacatgaaaaccatatttattgaggcagatgtaccagctttgcccttaagcaacctttttgtcttgtcaccttcgatctcatcagctgttgcaaccgtgctcttaacacgtcactcttgcttggtctttgttttcctcagccgatgattaatctcctgttgcacctcctgaaaatgctccctgttcctcatcctttgcatccttctcttctgattcttggtgaaaatgcctgtaggacaccactgtgtattcctattttcatcttcatcatggcgataatcttgattcacagggcccaacctctgatgaacagctaccctcttctgactcagccgattacctctattgctggatcggcttgaactccctgaatcattgttgcatccaagacaatcctcaattgatggcagcctcataccttcattccaacaaaatctgaagaactcacattcccaatgaggatcaaaaccaccatcatcttcttcataatat

SEQ ID NO: 13103 - DNA, 666 bp, Oryza sativa
actacgttagaaacccattcagcatatcggcatggccgtataaaaccagcgtcacacaaacgtgcaacctcagccttgacagcctcaagcatatcggctttacatctccttggtggttgctgatatggtctaaccccaggtttgatgggaagccgatgctcgacaatcgatcggctgagtcctggcatctcatgatattcctaagcgaagcaatctctgtactcttttaaaagctctatcaacttggttctgaattctggggacaaattcttactaatgaatgtcggccttggtctatctcctggacctatgtcaatttcttccaaatcatcagccgacatgaaaccctgtccttgcttgtcatcgagatcatctactgtgtccttggtgtagacatttgaaccctccacgacgccctcaaaataataatttgggctctccatcttcaatcagttgtatatcacaatcggacacttttagaaaatctccatcccaaacttttccagataagcaatcaataccatacatctcccaaagagctagattggcattagcaacattaactgacctgtcggctagtacaatttcaatcttgtcaccatgccattgaattaagcactggtgcatggttgaaggaatacaacaattagcatgaatccaatccct

SEQ ID NO: 13104 - DNA, 1170 bp, Oryza sativa
tttctactttattttatcatccagcgggacttggcacctgacgcggggctgcatcggtcttcgatctccggagaagggataagtccaatgtttcgtcggcccaggcaattgtctcatctacgtcggcattgttcaaggctgcatcagtacattcgacctcttggattgctctggtttggatgatatatttgcctacctatttatcatatgtctctattaatctagtcttagcatatcaatttagctctatcggctgcttctcgttttagggtttctgccggtatcggctaaatcgcgttgctagattagattaacttagacatctaccactctgaagactcagtcaacggcttgattgtctagatattatgtttcttttcatacttagttctgcatcagttaagtttgatctactaagtcgtgcttagaaccataatctctagcctgcttcttgattgccaataagggtttcatcggggtttcagccggtgagttatctggacgttgcatcggctcataaggattgcatatataagttggatttagcttatgacaacaaaggcttcactgtttaatctaatcttgtggatttcatgacatcggacctccagccgatgtgtgctttaaccttcggatcgatgcttatttgtcatatcattgctagccgattggtttatacaggattatattgttattgtattacatcatcatcagccgattgcctttatatcattatctacattggacatatagccgattgcttaaaccctatcgctatcggctggtatcagcatcggctattatcggctatcggctggaaatactccatcggcttgtcagccgatcggttgttttgtctactatttgcatatcttgtcagttgcaggatcaaactgactggcacgcccacatctcattaagatttggacctgcacaggagctaagcagatctcccaagccggtgtgttcgattttttcgtcaacaccagccaatcatgcattaacccaaacacttgaataatatttcttaaagtacttgccattgagcgcccgtccataaaattctccatcaagtccttgcaacatataggctcctttagacacaaccttatggatgtgaaactgtccttcccaatttggtgaccacttgccgaatttattatcacgagt

SEQ ID NO: 13105 - DNA, 518 bp, Oryza sativa
agacgtgacatagtttccaacccatcctagccatagacaagagtaccgacccaaccccacctacggccggaaccccggggacaggtaggcaggattgagcccctagcagcaggacactggccctgtgccatgacatctcgactaccgggccgcagctcgtgtagccttcatttgccctagagatgtccatcgacccccgacttcgtccatctccatccgtgtacttttgtttataaccagactgagccacaaactaagccttacccactagacatgtggaagtacggtagtgctttgcaacagaggcccgaagaccgatccttatatggccgaggtgctactatcaaaaccatgcaccccaagcccagcctaaaaccattttgagggttttgaatagagggggaggggtgaatccaattccacaataatccatccattccatagtgtccaggtgatatgaatattcccaaagtctagagttgtaaaccacctaatgttgcctaattaaccagcgaagc

SEQ ID NO: 13106 - DNA, 1816 bp, Oryza sativa
tgaagcaagctctctttgattgcctctttcccttgtcatcatccttcctccctttgccatagccactcttgcgaagaaagtgcttgaatctcttgacaataaaagccatttcttcatcttcactttcttcacaacttgactcttcttcttattttgccttcaaagctacttcttgatttttgatcatggcggcattcttcaccatttgcctcacttcacgagcttccacttcttgcatctcatgagacacaattcttccaagaatgtcacttggggtgagcctcttgaaatctttcctttcccgtatcattgatacaagagtgggatttcttggaccaaaagcacggagaaatctcttgaccacaaagtgatttgtcatgtcctcactcccaagtcctttaatcttgttgacaaggatcatcatcctatcatacatctcttgtggtgtctccttgtcatccattacaaatcttccaagccttccttacaataattcaatcttggcctcacgaacggcgggtgatccctcatgagccaattgcaaagtatcccatatctccttggcctcctcaagaccatcaaacttgttgaactcctccggactcaaggcggagagaattgcattggaagcttgagcattgcggtggatgagctgctcttgctccgaagtgagctccatgtcatcatggggtacatcaacacctgtacaaacaattttccaaatacttggatgcaaagagattagatgcaacttcatcttgtgcttccaagcggcgtaatgtgtcccatcaaattgaggagcacgcccggaaggcacggagacaaagttgtgagggggaatggtaagtttgctgtaatcaaaaggtatagtagctcccttggataatgaagttcccttgctgctcgctccatcttcatttccattttccccgttctttccccctaaatccgacatcgtggattactcaaagcggcgaagcttgaatcaagagcaccttgctctgataccaattgaacgcgttgatgaagactagagggggggtgaataggttgtccctaaaaacttaaaaacaaatcaccgcggtaaagtccaaacagaccaggaacttcctggtaaggaactccagaacttccagcctgccaggcccggaacttggacagatggagtattgcaaaaaaggactccaagggaaacttgacacttggttcacactaagagcacttgatatatcttagagcatcacctggaacccctcttaaatagtacggtttttcctaaaaacttgatttcaaaagataaactatcctatgcacttctcgagttccggtccgctttgattttgtactttttggggggtctccaagcatccatcttccacaccttggactaatgcacctgaaagctactcaatgagctcattagtcccttaaccacatttgtcattaatcaccaaaacccactaggaggattaatgcactttcaatctccccctttttggtgattgatgacaacatggttaaaggttacaaaagattgataagaattttgatttgaatggttagaggtgaatgaaactcccccttaatgtatgcatatgaaagatatgagtggagctcatatgcatatatatatgggagcaaccgaggagagtttccttcctccctactcattcatgggatgcgaaaagcagtaagaatagatattatatacaaaagatacgacacggtgagcactcaaaaagataaaatcaacatcacatcacaaacaacaaataagacactcatagcataaatgaagagcagaataaataaaggg

SEQ ID NO: 13107 - DNA, 721 bp, Oryza sativa
ggatcccccacttgtcaccagccgatagatataatctgaacggcacccctttctgtggaggaatcagaaccggtggggaactaagatattccttgatattacccaaagccttctgctgctctgccccccaagtgaacttttgatcggctttcaatcttaacaaatgtgtaaagggttctaactttcctgataaattagaaataaaccttctgacaaaatttatcttgctgatcaactcctgcaacttcttcttgtcctctagaggttgaatcttctgaattgcattaacactcctttgagtcacctcaatccccctctcatgaacaagaaatcccagaaactggccagccgacacaccaaaggcacattttgttgggttcatctttaagccatatttcctggttctctcaaaaacttacctcaaatcggctatgtgattttctagttcttttgacttgactaccacatcatcaatataaacttcaaccaaccagccgatcagatcatggaatatgtaattcatagcccactaatatgtagctccagcactcttcaaactgaaagtcatcacgacccattcaaacaagccgattgcacaaggacatctagaggctgtcttatgaatatcttcttctgccataaagatttgattatatcctgcattgtcatccataaaacttaatatcttgtgtcctgaagcagcatcgaccaactgatcggc

SEQ ID NO: 13108 - DNA, 554 bp, Oryza sativa
gacgacgacttgcacgggcagaccaccacgacgtactaggctcctctcagcttggaggagctccagaggcgcacactcaggagcagccagaggtcacacctgtacaggcaggacgggttggccgtgccgtacccccggaccaactcacgtactcccacgggcacattagggcgcagggtaggagggacaggggtaagaggcctcgtcagtagtgtctacctcttcagtccttatgtgactgtttcttttggcttacaaacttgtaaagcagtactacttttgctattactactgcagtactacttgtgtttgtctcgtctacatagttcttttcattcatatggtgctagaacaacttatgctcacgacaacacactttcggcgctgcacggtagtgtcagatccagtagcgcgcacagtctacaacagcacacatgaaaagcggcagctcgagttatcactatcaactttcggcgctgcctgtttacataaagtgaatcacgcccacgcgtgatcgtcttgtcacatctaatgaataatgtatctcattgagt

SEQ ID NO: 13109 - DNA, 848 bp, Oryza sativa
atgcccgcggcgagcgagcgctcgaaggcggagttgagggcggcgtgggcgcggtgggcgacgggcatggcgcgcgcggcgtcggcgagctccgtgaggtacgcgtgccacagcttgtaggagcccgggagagcccgcagagcgcgctcgtagatgaccgagcgcttcgccagcggcgccgagcggatggccgacaggtagcgcgtccagcaccgtagccggaacggttcgcgcaggacgtcctcctcgtatggaacgtcctccggcgagatcatcatcgccgccaccatctctctaactcttttgactgatgaagggccggtctatcttctcttctcgtctcgtctgatcgttgcgttgcgctggatttggatgggcgattgtcgacgaggcggcacgaaccccagatttatagagaaggatgaccggtacgagcccgagtcggtttccacttccagcattccgcgtgaacgccagaagcccagaagtcggtgcccccctcggggttgcgaacaggagtcgtactccgactcgctggcccatgttccccgttgccccgctcgtcaagtcgtcattgggcagtacaaatatcaaggcaaaagccctgctaatcagctaatgtaaaatcttattttaatcttatcttatcttaatctatacctacacctatacctatacctacttttttaattaaaaaataagctaatttttcatccgtcattaaaacatgggcccacgcgatatttcaccactaagagcaagtttaatagtatagctaactactagctctaattcatttatagccaatctaacagctcatttatacaatagttatatactacactatt

SEQ ID NO: 13110 - DNA, 682 bp, Oryza sativa
ggttcatgtcatcttcatttgacaggatttgtttcttattgattaaaactaaacaaatttcaatgttgcttttgctgtttgcatctccagtgtcttcaatagtcttggtcttatgttcgtgacacatcaacaaagcactgctttgttctttgtccttttatttatggcattggcatgaatgtgattataaacttacaatccttcatcttggtaaataaaacaacatttatagtgatttccccatcgactatgccatgcaatatatgctgcataacattcatgtaccaactcatgctgataaaatggtgacaattcgatgttagaaggtatacccaaggaacagacatgcatttgggctgcttgcttggactgcaatgatgttctgaatcgacggtatgcatttgagctctttagtcatacacgttatcatgatcaggaatgcaagaccacagcttttttttacaagtttcgtaattgaaacatgcagattaagaatactagcagattccaaaggctacattcttgacgacactggtttgtatcttgctacaccgggcagtggtggaaagcgtgtatgtacatgtgatttttcattccaaatccatacaagttgtttgctttgctccattcattgtgagtttttgcaggggggaagatcagatgctatattaattgtgacacc

SEQ ID NO: 13111 - DNA, 699 bp, Oryza sativa
caagaactgcaaattacaagtacaaggaaaattactttttctcatctggagttgacaaaaatttaaataaatgtaattcagtgctggagaaaaaaaaaatcatatgatcatctaaacagatgcagaaaaagcatttgacacaagtcaacattcttataaaaactttcaacaaattaggtatagcaggaatacttctcaatataataaaggttatatatgacaagaccacagcttacatcatacccaatgatgaaaagctgaaggctctttcctctaagaccagaaacaagacagggatgctcactctcaccactgctattcatcttagtgctggaggtcccagccggagcaattagacaagaaaaagaaaatgcattcaaattggaaaggaagttatgaaactgtctctgttttcacatgacatatatcttatatacagaaaattctaaagactctaaaaagactgttaaaactaacaaatgaattccgtaaagttgcaggatacaaaatcaacatgcaaaaatcagttgtttttctacacactaacaaggaactatccaaaaaagaaatttagaaaaccatactatttacaatagcatcaaaaataataaaatacttcggaatagatttaacaaaagaagtgaaacatttgtacactgagaactgtgtaagtcattgatgaaaggaattaaaacacaa

SEQ ID NO: 13112 - DNA, 549 bp, Oryza sativa
acgcttacgtacgccaagtacggcgtatggaacgccattttgacgggatagagcttcggcatgtgcccagacgggataacatgattgccgacgaactctcacggctcgagtcttcgcgagcccagaccccaccgggcgcctttgaagaaaggcttacccagccgtcggcgcgacctaaccccttaggggagacgggtgtgcctgaccggcccccgaggcccgtcggagtccaggcctcgggacccgaagggagcgctccaagctcccttagattgattgcttgcatctccgagatccaagcatacctcacagataagactctacctgaggaccgcgaagggagtgaacgcgtccaacgcatttccaaacgctacgtgctggtagaagggaccctctatcggcgcgcggctaacggaatcctcctgaagtgcattcctcaggaacaaggcgttgagcttcttgccgatatccatgaaggcgagtgcggagcccattccgcctcgcgcaccttggttggcaaggcttttcgtcaaggattctattggccga

SEQ ID NO: 13113 - DNA, 673 bp, Oryza sativa
ctgaaaatgactctgtacaccacacttgcaattgctacatagagttgtcgttggttgtactattccatcatcaattctcattgtgatcagttgcatggtttgtgatttgatgttatacttcagatttttctcttcgaacaagatttcttttaatcgatctcctcttgttcctcaatgctcagagaatgcggtgcattctttgttaatgcagagatagacagctgaatttccagttatcttaagaactctactcatctgattctagcttattattgcaatttgatttctttcacccaggatcatggttgggcatcccaattgctatgtgtggcttgcttgtctctggctgccaagatggaggagtcctctgccccacccctccttgaccttcaggtaactaacttgatgtgaatagtgagtactcaatgtctttatttgcttttgttatgaatatgaatttcagcaaatgcaaacagattgaaggaacaagattcatttttgaacctcggacgatccagaggatggagctcatcgtcctcgtggagttggattggaggctccggtcagtgacgcctttcgcctttgttgatttcttcgcttgtaaggttggctcctctggaagaagctcaaggatcttggcattgcgtgcttgccaataattctcagtgcaatt

SEQ ID NO: 13114 - DNA, 722 bp, Oryza sativa
tggtgtgccgataaagacacccgtatcagcaacagttttagaggaggcattgaatggatcggttatggtttctcagctccagcttggaaactctgttcacaggaaggtaggtaatggcaactagctgtccatcatccaatgcttcttttcttgatgttagcaactaaataattgaaagctgcatgtggccaggtggaaaagcaatcagctcatttttattctgttgacataacagaaaaggaagctaaaatggggttagtttgtcgtgtgaaatcaactgatagaagcaaatttaaggttggtttttgttagcaaatgttttatcatgtaacctgtgtttcgtaagtacatttcatgcggttctggtgttgtcagttctgttttaatttattttgatctagacttgttcaagttgtgtacatttatcctgcgtagtgaagctatccttgtttgacaatgagaaaatttgcccttcagttggtgaaatttagatgatttactttgacatatagtactccctctgtttcatattataagtcgtttgactttttttctaatcaagtttgaccaagtttatagaaaaatatattagtatattcaacacaaaataaacatattatcaaaatatattcaatgttagattttgtgaaactagtttggtattttgaatgttgctaattttttctatgaacttagtcaaacttgactaggaaaaaagtcaa

SEQ ID NO: 13115 - DNA, 691 bp, Oryza sativa
atgatgctacagcaagtatgtcactttctgacaatttttctgtggaagtatcagcttgcgatttatttgcagtaagtggtagttttttggcactttcacttatttgtgatgaattctctgtggtagcaccattgttctttttatcttgaatgatctgtgatttgttatcagcagtcacattggttttctctgcttcttcagcaagtacacggttttgtaacggtttgttgctagatatatccttctctggctctttttctctagacacgcttctttgccatggctttttcacaaccacgctgctttggagcgggttggtgctagccacactaacttgtgatggtgtcacaaccgacgcaccgctttgcgattgcttttcagttggaacattgcgctgccacaatcttttgcccattcccctgctttcaggtgtctttgcatcagttacactgctctggggctgtttctggaatccgatgttacgttgccattgctttttaaccactgctgcagtgctctctgatggctttacatcatctgcactggtctgtgaaggtttctccgtgattccactgtgttcctgtggcacagtgggtgttgtactggtttctgccagcttcacatcgatagcactgctagatgacttctcagtgtctgtattgttctgcagtggcttctccgtgtctatatt

SEQ ID NO: 13116 - DNA, 512 bp, Oryza sativa
caacatgtacttcgtcaacctccggcgaggcctcggcctcctcgccaccgaccaggagctctacggcgacgcgcggacgcggccgcacgtggagcggtacgccgccaacgagacggcgttcttcgccgacttcgcgcgcgccgcccggaggctcagccaccacggcgtcaagaacggcgccaacggcgaggtgcgccgccggtgcgacgcctacaacggcggcccgcgcggctgatcgcggcgcgcacggtggcggcggcggcggcggcggtgcctcgaagcattgatagtctaatcttagattagtgcaggaagataacacggagaattcaaattagtaggtataaaaagaaaatatcttgctgttcagagaggaaaaaaaaggggaaataatcaactttcacaagtgaaatcatttcgtagtcatatactttaggctgtgttctaacgattatcaaggcacgaacaaataaattaaatactactccctctgtttcacaatgtaaaacttt

SEQ ID NO: 13117 - DNA, 632 bp, Oryza sativa
attgctcaaaaaattttagaatacaatataataagtaagcacaatacatatattacaatttgcaaagtccgtagcccctatacatatactagacgccttctcttgcattcctcgtcgaagccgctggcatgatcggcttgctgagcggcacacgcaagcagaggcctcttcggcgccgccaccgccgcgtccatctgttccatggcgtcgtcggcgaggacctgctcggccagctgcgccacggcgccggctccggcgttggcggccgccacggttctcttgacgcggagcatctcccggaacgtgcactcgtcgccgtgacgcacctcgaagtcgttccaccgcctccagaagtcggggtgagccgtcgggtcggtgaagccggaggcgtagacgtacagcgcccgtgcacggtgggcttcgccgaggccaatctcgaggtcggcgaactggaggcagagcaccctggcgtccgcgtccgggaggccgccgccgtggaggatggcctggtggtatatctccctcgccttgagtacgccgaacagcgcggtggcccgtgcgacgtacgcctcgtagacggcgagcttgtcgccgccggggacggcggccgcggcctcctcgtacaccttcag

SEQ ID NO: 13118 - DNA, 638 bp, Oryza sativa
cgaattcgagctcggtacccaaatgggcttaactcgggttattttatcgcgtgaactgtctttagaggaaattgctgaaattcgtcaacaagtgccagaaatggaattagaaattttcatacacggtgctttatgtatggcatattcaggccgcagtttactttctggttatattaataaacgcgatccaaatcaagggacttgtaccaacgcttgccgttgggaatataaaattgaagaaggtaaaaccgatgaagcgggcaatattgttccaaaaaataccgtacaacaatatacacctgaaattcaagttaaaaacattgcgccaaccttaggcgaaggtgctcatacagataaagtgtttttatataccgaacctaatcgaccagacgaacagatgaccgcctttgaagatgaacatggcacttattttatgaattcaaaagatttacgtgctgtgcaacacgttgaaaaattaacgcaaatgggcgtacattcattgaaaattgaaaggcgcacaaaatcattttattactgcgcacgtacagcacaagtttatcgcaaagcaattgatgatgcggctatgggcaagccattccacccatcattgatggataccttagaatcacttgctcacc

SEQ ID NO: 13119 - DNA, 550 bp, Oryza sativa
cgttgtgctgtgaattatgaattgatcgctctctcactctgcatctcactgaaacaaacagagtacagggatgcatgcaaatcctaatcaaatcaccagtgttactactagacctcatcacacacacacacaatgttcgtcgcacacgtggagcaaagcaaagcggcggctgacatggcgtgcgatgcaacgcgccacgtgtcactcgctcacgccttgtggtcggcggggacgtgccacacccagaactcctcgttccggcaagcagcggcgacggcgggcttcctcgggctgcccttgggcgacgtccggaggcggctgcggcggcggtgctgctcgtccttccgcgtccgccggtgccgccgccgggccttgtcgtcctcgtcgtcgtcggccgcggcggcggcgtcggcctcctgatccggcgcgacgaacagcacgacggggccgagggggacgtcgtcggtggcgacgagcagcggcttgagcgcgtcgacgacggcggacatgttggggcggttcttggggctccccctgaggcaccggtagg

SEQ ID NO: 13120 - DNA, 2694 bp, Oryza sativa
ggaaaaatgtcacgcctagaaatttagcccaaatttctagactattttgtgtatttaatccctgtccaggaccagccagggtacacaaaatgacaagtaatatacagttccaaacgtaaataaagcgtaaaatacttacagcagaggcacttagtcctcacaccgaaagagaacgacagcagcggaaaaagcgatcctagcggggcttcagctcctctccacaggcaaagctcaattggggtctgagccttggtcttctaacttcgtcttcagctcagaagcactacacttctgaaaagggggaaataatagcaaggctgagtacaaccaccgtactcagcaagccacaccattgatgcagacgtacaaggggaacacaaggatggtttgtggctatttgtataaaggcggttgtaaaacattttattgagaaaaacagtaaaactgttgagtaattaaagtaacattaaatctccactgatcaacgctacaccacgttgaacaggccccaaccaacccacctgaactacagtgcattgagtcaatttattaaaagtgggactaatcaccggtgaatcttggtcgatcgccccataaccgccggccacgggcttattcgaataagttttaacttttgggcccacagagagaaaacacgccgcccccgtccaactgtacccacaagacacgaattcacacatgtcgccatgccccaaaggtttcaccatgatactggaaagggggaaatcgtgacaagaccctgcgcataaccctcccctaaccatccacaccacgctaaggtttcacccccacccctcaaaaggcagtgggcggtctctcttgcgccgcagtgaatccggcagctggacaaccggacaccccggccgacccaactccatcacgcccaccctcgccaccggtggctaggaaagggtcaagctatacttcagatcaagcaattacccactcccgcttgtggtaagcacggtaagtctcccagggtttcccgtgaaccggtccttaactgcaatgggtgcgaccagcaaaaccatgcacccacagcccaccattcagtcgcattttagttggataaatacgaccatgaaacatggctagatgtctcgaacacgcagctcattctgatcctaaaaaggtctaatactgcagttatcccatcaaatgagctagtggtaattaagcatggctaagcatataattctagctaggtcacataagtaacatgagctagtcaatttatttgatgaaccctgagttcctctcgacactcaagattgttgttggcccgatctttcggtgagttcagataactacgatttgggagaaacgttgacgacccgactacaaccgtacaagatgttgtgttgcgcctttgcgatcgatacacctctccatgggttgttgatcttgccggtgcagatcaaccctattcctgcaagcaaatcgaagaaacaagcaagaacaagataaaagcaatctgatattgcaaataggaatttaatacaaatgataaattggggttccgaagaacaagcagacggacggtctagccgacacgcgcgctgcaagcaagtagcaatggctaaactttaatctaacaaaacccgagaaaccttgaaggggtaactagctatatataggggtgggaggacgacctaggggtgcctagggtcgtgctccaccagcttggggcgcaccccacatgggccccacctgggccggggtcccaaatgaagttacaagcccataggcccattataggtgacgcaacacattgttcctgtgattctggccacacgagatggaatttagagaagaggctggatccgttagaaagagggctccgagagctttctatcaagtactcacaggccgaaaacggaggtcgtatgcagattcggtggccgtttgaagtcagcagtgtagtaggtggccgaatcggattccagcacttggagtacttgatctcgatatcttcttgttcatccatgatgtcagcaatgattgcatccgtggtagccatggtcacatcattattacccagggttgacaaaggacagatatcaagtaaacatggcacaagcgagcagataggtaatacccacatcccatgtaattagcaaaacatgcatatttatttgcaaacggtaaaacatttgtaaagtaggatcaaaacgctcaaggggaatgtgtgacctgcgttgcttcttcacttggatcttctgaacacttttcctcgcgaccgcgaacttccgaaacgacggaaactacatgttggcacgcaaaacgaggaaaaactctaataaacaccaaggaaacagtacataaaaagtaaacaaacatgtaaatctcaattttagatgaattttgcaagttgaatggtttgggcgattttatgtggtttgggcgccagggcgcaggcgggagaggctggaatcgtgggcgacgtggggcggcatatgcgcggcatggcggcttcggctctggaggccgaaggtagaaggaagagctgacaagtggggtcttcgggcccacctgtcggcgaaagggggaggggagtcagggggttatttagactttacgcgaggggaaggtgaaatgggccgacggcttaagagaagagaggggaggccgactgaggaagggggaggagaggggcgcgggccgcgggagggg

SEQ ID NO: 13121 - DNA, 696 bp, Oryza sativa
ccctcccgtcccaggtattcgggagagacggatccgaaagattctgtccatctacgaatccgtaattgcagttgctcacggcgatgagaataccaaggcgaaggtaatccacctcgtgctcgacggcataggggaatcgacaagggagtacatgcgccgattctcgcaagcacggtgccaagtacaagacataaccaaagcatccatcgtcaacgcaggttcggccggcttgcttgagggtgaactcacaaggaagatcggacgcaaggagccaaggacgatcgaacacctctttcgcataattgatggatatgctcgaggtgaggaagacaccaagcgaaggcaagagatacaagctgaatatgacaaggcggctgcagccgcaacagccaccgtgcaagctaacgctcaaactcaggttcaagcccaagttgtcagttcggcgcccgttctggttcaccctacccctccggcgaacccagcgcagcattcaaggccaaaccaagccccgatgacatggaaaaaattcaggaccgatcgaggtggcaaggccgtgatggtagtcgaaaaagtgcacgtcctctgcaaggagttcgacgcccagcaagcgggcggacatcagcaaccttttcgcaaaatgatcaagaaagacctgtactgcgcctttcacggatgctcttcacacacaacagaaca

SEQ ID NO: 13122 - DNA, 3839 bp, Oryza sativa
atctgggctgaactgaaccgagcgaaaccggtgctgaaggtcgcactgatccgaagctaggggcgctcgaaggcaaacgaggtcctgcgaggatggaacatcaagttacgacggggtgatgttttcgtacaaaaacagaaacaaaacttaagaaacctctgggctgagcaggaccgggcgaaataggtgccgtaggtcgaggacctgctccgacggtaggcgcgcgaggccgtggttgtaccggaccagctggaggtaccacgtccacggcgctgcggacaggagaagacgcgcatgaccgcacgcatcttctcctgcatccgggcgaaggtcaaccctctgctcaacgtcagtcaagtgcaaacctctgttcaacctcacttggactgcggtgatatcggcactgatatcccgtgcggcatcagcctatgcaagatggaaataacaaattcagtagttgtcctatattatgcaagataaatgaaataattgtaagaagtaatacaaattggacgtaccgccacgaagtagtctcggtcacggtgcgtgggatacgcgtccgtgacagcggcaacgtgcggctctggggcgtctggagtgaaaggtcacacgcgcacgagtgcgaggaaggtaccagcgaaggtagtcacagtagttttcctccgtgtgtgggaagagctcgttgatcacctcttctgtagctaacacccagtcgtcaacgtactgctgtacacgtggagcccaaagtgcgcctgctagctgtccccgtcgagtcaacctgtgaagagaggtaaattatatggctcgatgaagtaattatcataaaaatttagaaatgaacaatccgaactcacgagtggtcggcagggaggacggtcggctgcacgttgcccggaaacacctgcctaagtccgaactgtctcatcacacgctgcgggcagtgaggctcaacgaaaatgtcgaacaccatcggcaggatggtgagccagtaagcctggtcgcgtgtgcacaaggacgaaagtcctagcggtgctctcgcagcgacggcctcttctgtgtacggctcccagatgacgtcgctcggctggagacggtcaaactcgaacacgaagtccgggtaaccacgtctcacctggatgtgagcgtaacgacgctgcaataaacatgatcggaattagacatgttatgtgaagaaaaaaaaagacgactgataaacttataacgcagcgaagttgcactaaccccacgtcgacaccagtaagtccccatcgtgggaccgtcctctggccactgcgcgctgcgaccaaccccgtagggtgcgctgtccaccactggtcgacctatggcaaacctctcggctgcccaaagctgaagcaacatagggcagccagcgatgatcgctcccgcgtcagtcttcgtgcacgcctcacagagggcacggtacgtggctgctagcacggcagaaccccagctccactgcggcacgtcctgtggctgagcatccgcgatggaccgtgcgtagtggaccagccggaagtccacagcgtgcccgtgggtgctagtgaacatcacccacccgaacgaccacaacaggtacgcctcaagggagcgtcggaccgagtaatcatcagcgtcagggtgcagaaggtccgcctacaattaagaatgaaatgttagtacaaaacactcatccggtcgcaaataagcacgtatgataataacaacttatttacttacagtgaactagagcaaccaagccttgctaggcccgactgtagagtacggaggaagggtgttggtcggtcctaggtgtggagggcgcatcacctgctcgaagcgcgcagtgatatcctccttccacccaaaaacaccgtccacgggaccaactggtgctcccgccagcggtagcccgagcaggtacgacacgtcctgcagtgtcggagccatctccccacagggaaggtggaacgtgtgcgtctcaggtctccagcggtctacaagagcggcaaggagtgaccggtctgcatcccaccgcttcgctgggtcagggtcgtccgccgccgcctcaacaagcctacaaagtggtagaaggcctgccgcacgcaacctgtatagagcaaacttcaaacataagtacaacacaaagcaaagttgagttgaaatgtgaacatacgcgtaccaaggaacgtgacgggggtcgacacgcaaccactcgcgcgacgtgcgtggacggaaggtgccgagctgtgcaccctcgactgctgacaggaacgagcggtggttcctgtcaatcccacggttcaacagcgccggtgtgtcgtacgccatacctgcatcaaataggttgatcagaaacatataaataattagttcaacataagtaataaatgttcataagcgaattactaacacatattaaacaagagtacaaacaaacaaaagtgtttagtccgaacactcatcacgataacattatgatacaacaccgaatagttcgcaatactactagtacaacaatagtcggaggtactcattacaacaacattgaattgaaattacacgatagaagtatttagtccgaacactcattacatcacaacagcattttatttcctaaatcgaaagcattgttacaccatggaatcgcatgctgcgcgacgacgccttggccttgcgcgcctgcttgttgttccttcaccaggtggtcgcctaccatcacttgcctgtccagatggactagcatctgcgccgcttggaacttatgcattcttcgggcatttcttgtaagtatggccgcgcagatcacacttgctgcagcgtaaagtcctcccacctgcttctgactcatccatatcatttctgatgcgtctagtttggcgtcgaccctttttcacccttaacttagatggatctggaatataaaaaacttgggcactcagcgttgtgtaagatcctgagatcccgaacccatatatctcctcactccatgtatgaaagattgcttctttcctgaaataatttgagacgtacacattgggagatatgccacaatcaccggcagcagcaagaacgtgtgagcaaggaaggtgatgaagcttcggcttcatacaactgcaggtacatccaccatccgccttcaagacacattcctgcacggcttgcttgcgatagataccacgcctgctcctatcaacacacattatttcataccgatgcacttgtgtgccttgagcaacaactcgatgtctccgtgcctttttgattttatcttccatgtactttgtcactacgttgccaaacactatgttgttatcggccatggacggactaattttcttgtatcgatccctaaagtacgcttgcgtgccgtgaaggatgaattcaacaatagcaaccaatggaagtacccgaactcctcgcattacccagttgtacacctctgccaaattggttgtcattatgccataccgagatccatcggtgtcgaacaatagagaccacttctccttaggctcattctcaatccactgagtgaaatttctgatggacgaccctgacctccttctcattgttggtgggtcatcatgtaatgcaccaagaggtatgggaggatcgtcaccttcaactagtggtatgcgagattgctcatctgtttgcttcgttgtcaactcatccaacttgtcccacaactcattaaatttcttctcttggttctgtgcacagagcctcttaaagagctccataagatgcttgttcttgaattgcttgtagaaatttgcacccatgtgacgcatgcaccaccgactccgaaaattaggccacttagctggaagtccctt

SEQ ID NO: 13123 - DNA, 1122 bp, Oryza sativa
aaaagtttcatcatgcagtatttcaaaaatatgttccagtccaatggatgtcagcacccggagcgcctcttaagcaaagtgaagaagaaagtaacagaagagatgaatgaatgcttaatggctcagtttattgtcgaagaaataaaggcatcaatagattcaattggagacctgaaggcgccaggaccagatggaatgccgcctgtattttacaagaatttctggcatgtggttggaggaaaggtgacctcaaaagttcttgatattttgaatggaggtcagatgccattaggttggaacgagacgacaatagttttaataccaaaggtgaagcagccggagcaaatcaaggatctccgcccaataagcctccgtaatgtcttgtacaaaattgtttcaaaagtgctcgcaaatagagttaaaaaagttttgcctgatgtaatctctcaatcacagagtgcttttgttccggggcacctaatctcggataatattttgattgcttatgagcagactcattgtttacggcacaaaagaactggtaatgttggttttgctgctttgaaactagatatgagtaaggcctatgacagagtggagtgggagttcctgtcagaaatgatgattaaacttggttttaaccaggtttggacgcagttaatcatgaagtgcattacgtcagtatcttataaaatccgagtgaatggagagttgacagaggagttcctgcctgggaggggtctgcaccaaggagaccccctctcgccgtatctatttctgctttgcgctgagggtttttcagctctgttgagtcaggcggaagaagaaggattaattcaaggggtgcgaaaatgccagggtgcaccaagtgtatcacacttgctatttgccaacgactctcttattttatgtcgtgcagatagaggtgatgcacagcagttacaaagtattttataggtgtacaaggagtgctctggctagatgattaataaagataagtccgcctgtgatgtttagtcagaacacatcgagagtaaagaaagaggagttcatgagggaattaaatctgtaaagggagacagtgaatgataggtatctgggactgcccgtttatatcggaat

SEQ ID NO: 13124 - DNA, 903 bp, Oryza sativa
cggctcggtctcggctgtggccggccggaggttaaagaaaggcccgacatgtgggccccacatgtcggcggctgagaggaggaaggggcggcggctcggcttgggccgcacggctgcgcaaaaaggggggggaaaagggttgggctgggaacaacccaacggcttagaagagggtttttttttactttctcaattaaaataattcgtgaaatgatgtttcatttattaaaaatactttccttgctcaaataattcccagaaaaatctagaaaatagataaataagcaaagtatttaatgaaattttatctagctcaattttatgttgaaatttttcctagattattagagtttaacttgtaagcttttaaaatagtttctaaaaatgcattaaagaatgaattactaaattaggcaattttcagggcgtgacagagcaatagttcgcttcttgctgctgggctaaccagagctggtgggctttgcagatactgctttagctcctcgaaggctgcttggcactcaggcgtccatttgaatttgccccccgaagggtcttgaagaaaggtaatcctctttcggctgcctttgataggaatcagctgagtgctgcaattcgccccgtgagcttttgtacttgtcgtacgctcgatggtggcttcatttgctgaatggcattgattttttcagggttagcttcaattcccctttcagacacaaggaaccccaataacttacccgtgcgaacaccgaacacacacttctccagtttaacttcatgccggctgcgtgaagattgtcgaaagtctcttgcagatctgacgcatggtcgaatgccttgcgtcttttcacaacaatgtcatcgacataggcttcaacatttcgccccaattgcgatcccaag

SEQ ID NO: 13125 - DNA, 569 bp, Oryza sativa
cgcctggaaataatggcgcagtttcctcgaagccatcagaatagcgtaaagcatcttctgggcctgagggtatcgggtcttggcgtcctggagggcctcactaacaaagtagacgggccgctgcacctttcggtggggccgatcctcttcgctaggggccacatccctggggcgctctttgtccaagcggccttgcggggtgcactcgtcttctgtgccgacgacctcggggtcggaggacggcaggggcggccttcccacagtggcctcggggccgtcctgggggtcgggggctcctggcgtcgttggacaagcgggcaaagggccaactccggccgtcaggggccttaggccaccgttcggctcgggggcctcttctccctgctgtctcccgggtcgagtcggcacagggttagcctcggggtcagagggcgataggtgcggccttcccgcagtggccctcgggccatcctgggggtcgggggcacctggcaccgtctgacaagcgggcagagggcctgctccggtcgtcgggggcctctcctccctgctctctcccgggccaaacc

SEQ ID NO: 13126 - DNA, 1182 bp, Oryza sativa
catcctccgcacccacccgtcccttgtcgccgtgaacacctcgccgccggcgtcgtccacgtacacgtcctccggcgcgctcagcatcccttccccaagcttctccagattctgccacatcgcaaaccatgaatccaccaacggccgacatgagcgcggcatggcgcggcgagctagaacgcaacgtaccgtacctggaggaggttgttgggagggaagcgagcggcgccgggtgggcgtgcgggcggcggggcgagcggctggatggggcagtggagcgcgacgtgcacggcgagcgacacgaagacggcggcgaggaggcccagctgctgcgccatgccgccgatcgacccaccaatgtgtagccgacgacgagctcgatcgatcgatcacgctatcggcgtcgactcgactcgccctgtagataagctggaggtgtcaggcatggcatacacgtgacgagtgggcacacacctgttatcgttagcccaagccacgtctgttttggacttgcccattattgcaccacataaaaggttctggtccaaacaaataaccgaaatttacttttctgaatacgtaaaaaattggaatccatagataccgtggtttaaacctgtaatgctcccctcgttccatttggaccatttagaagcctcaggtcactcatggattctgtaaaaggcaaaacgcttgtggactagagttaccaatccacttgttgactagccagttaaatgacatagctttatattccattcgtttcaaaatataaggtttctttgattcaaattcataacacaatataaacattactccctccatcccataatataagagattttagagggatgtgatatttttcaagcacttcgagtctgaataggcctgtccagattcgtagtactagaaaaatatcgtatccctctaaaatcccttatattatgaggcggaaggagtactacactaataactcatatggttcccatcatcatgaattccaaagcccagtcggatacttggaaaggtaatctaaacaattcaaaattcaaaaattgacaattgaagtgattaaactactgctaaacaactagaaacaatccttatattttagaatggctagaggaagtaattagtaccacctttgttcctttttacttgtcgttttggacaacacagttt

SEQ ID NO: 13127 - DNA, 3960 bp, Oryza sativa
ctcttgaccgggacctccacggtgagcacacgcccccacctccccttgtttactattggtcgccgattaccccctcttctcctccttagcaccgccgtgccaagaagccgccgccgcgccgccgtgccgagaagccgtgcgccgtgcgccggccgggactcgtcgtcgccgtgcgccgcctcctctgctcgtcatctcctctccaggtacccctctctctctctctgatgccgatgaatggaatggtgcagtggatggatgaatgaatgatgcaatgcaatggatgaatgaatgatgaactttggatgaacgatgaattttggggacaattgtgctctttctgaattgaaaatgcatatgtataattgtgccattttgaaacttgaatgtggatttaagtgccattttgacatgttaccattcatggagtgtatactgctttatatgttgttttgttcccttttgctagaactattgaattttggggataatgtttacatttagctgaaaaaggatggattgatagattggcaacagtgtggttagctagctagaaatagtttgtctagctagctagttaggggttatgttcgcttttcatttttttccctgtgctttccctgtgccccttattcatttttttctgcatagattatctacacttgttctttttttaatgcataagatcaaattatctacacttgttctttttttctgcataagaacagatttcctcctagcagctgatttcctctttttttcccttcatgcaaatgatggtaattgatgcataatttctgagcaaaactgaggccatatctttcatagtataccccttattacattggatctaatgctatttagtataatggtaggaaatttataagctttttcgtaaaaattagaccatgacaacgcccggcgcaaacccgccctccccaacacctgcgaggatccaggaagaagcaaacccagccacggagacagttgccgaaggtcatccctcgacaacagcggtcgaacaacccgaaattcatggtaatttataggacaaattttcaccacatgaccacataaattttagctagcaccctttaccaaatgttgccttctgtttgtgctgcagaattgccgtaggaacaacatacgtcgatgtcgggcgggacaagtgcaagtaggtcgagtagaaatccccggtcacaaaatatatggccgaccacagtgcaagttataagagaggttgacgctagtggtaggcccacggcgcccaggactgtcattggaagatggtctaactgctgcgggctggcggcacgtgagaacttcgggatcctctataaagatatcggtaaggtcacagaagccgagaaagaacgagcttggacggcaatggagaaatggttcacatttccggctgaagcaaaggataggctcaagcggaaggcattccataagatgtgcaaagcttggaagaattggaagtcgaagctcttcaccaagtttgtcaacccgcccagcaatcatacgccgttcgatgaataccctcaaataaccgaagcggtgtgggaggaattctgctctctcaagaacacccaagagtttagggaatcaagcgaggcacatcgcctactgcaacagcggaatgagcacccgcatcggctgggcaccgcagggtacatcggcaaggaggcaatatgggcccaagaagatgcagccgcagcagcaacgaatgtccctcccccgttttcagacatccctgaacaaagagctcgcaactgggcgcgggcaaggggtaaggtcaacccggacggctctgtcacatttgagaacaaaattgatgccgtcgtctatcaggaactggtgagttcactacttaacctaactaatttctgttcgtataaagtacaagttcgtataaacgacttttttttttcctagttgggcttggttgctgaacaagcttcacaaagcgaggttgagtccgcgccgaagaggcgcgaatatgacatcctcagaaaggcgctcggaaccaaagaacatcctgaccggactcggggaattggtagcgatgtgccctggaagcatggactcccgcagtacagctcccaatacaggaaacggaaagtctccaaggaagagagggacgttcgtttgaaggccgaacttaaggttgaggtcattcaagaactagaagctagcatgaatgctagggtggaagaaagggttaacaaggtcctcgccgacatgaatataccctgaggcacaacacctgttgtgcatccaactcctcgtgcacaacacgacgcgagtccgtcacagcataggagtagttgtgcatccacagaggtgccagcccctggtctcccggtcgcaccactagctgcagtggaccacatcgaggtaattgatgttatccgatccatatctaataaaaaacctttacacgttccaatattaaattcaaactttcacatatgcagggcgcagcacagtgtgtcctactggcgagagtccacccaactttcgctcctgaagtcgctgagggcatggctttcaagcccttggttacagacaaggtccacggcacagacctgctagctgggtatgccaaggtgtccatcgattcagtaaaggacacctggttaggctatccgctggccgtgccccccaatgatgaaatcatgactttgggcgatgcgcgcaagacgttcatacaatggcccaaagaagacatagttgtgagtccaagtcgaccgacggagcttacacctcccaagtctaagctatcaattgaggctccccgtggaccggcattgtcagtacctcattctcctggtggagctgatatggacttggcagatatagctcaaagcttggctccaataaagaccacaagaaagaccaatagctccccaccacttgtcaagggccagaagcgtgaacgcggcaaggggaaggtcggggagttggcgccggagccaaaaaggggcaaggctgtgacgtcgatgccggtgagcaaagcggggaaggtcgtgagggcgccggcccaatttgagctaggcatgccattggtggaggacaatgtgttagccgtgatgggtattgcttgccgagagctacataagcaatacatggagctaagcaatgccaagcggaaaatgagggagtcatccatagttggacatcatgaccaccagccattcctatcgtcgcctgcctatataactataggatttgatgacctcttcgaccttttcaggatccggaagttggacactggtcttctaaaatgctactccttgtaagtgcataccttctatacttgtgatatgattggactatatctcctaattaaattagttctaatacgtaaatgttttaaggttgtgttggatcgagagtcgtcgccttggtaatcaggttgggttctttgatccatccatggtgaacgaggttaatttacgacagagcttcactgaggtggttgactatgtcaaccggtgtttatgggcccatcaagacaaggagtacatcatgtgcgcacacaaccaagagtaagaggacaatatccttcgtgtatattatttttgaagttaaggttcttagtactaacgctacataaccactgcgcaggcgacattggattctcttagtcatcatacctaagtggagtagggttacctaccttaactccaataatttcaaagattatgatttcagtgaaatcaccaaggccttaaatatggcttggggcccatatgtggaaaagggtggtaggcacaaggagggcaaggacgaactttatcatgacccaagtttgcatgcgcacaacagatcggagaccaatgtggtttccacgtgtgccacaacatgtcaacatttctaagacaggtgaaagatttcgaccctgaggttgttgctaatggcgaataagctcatttcaatacaaacattggtatt

SEQ ID NO: 13128 - DNA, 6015 bp, Oryza sativa
gtgctgttggtgcactttgtaaacacagagagaagcaataaagttgttatctactttgagagttcttcaatttgtgtttcttcgggttcaggcggtagggaggaggttcgaccggcagcgtgcgagcggtccgaccagcgacggcgacaggactacgtcgagatttccatcgatttgagggtaacttttatttccgctaaaagtttttgggtttttggttttccctaccattcatccccctctggtaggcttggtttcttgcgttcgatcctacactatatatatcacggcgtgtcggccggtgcacgtcaatctcaataggcagtatatactgccctgttagaatcagctcggctatctttaataccgatttcaaggccaagattctagcttgccattgggccacgtggcagcctcaaaattcagctagacacctcagaaatccttccacgtgtccatctatatagttctacctttctccagcttattggtacacatgtgctagataactcgagggaaaaagtatccagtagaacaattacagattctagatgctttcaactatctagctgtttgcaacatttaggctccaagaggcattaaactgtctcattgaagataaatcataattggtttgggaaaaaaatataaatccataaaaaaaaggtgcagagggccggctcttacagatacaagtgaggcgccggagagaaaggcggcatcgaggaagacagcataaatatatggtaatgactgaaatatttttactaggagtcagaacgcatatatattggcaacttccgataaaacatactacctcctacttttaatagatgatgccgtttactttttatcaaacgtttaaccattcgtcttatttaaaaatttatgtaattataatttattttattgtgagttgttttatcactcaaagtattttaagcaacatttatatcttatacatttgcataattttttttataaactaatggtcaaacatgtattcaaaagtcagtgacaccatctattaaaaaacggaggaagtatatacggatttagtcctctttggaattttgtactataatttcttcttttaaaatctgcatgaaaaaaaatatagaatacatttttatcgacaagataattatgaagcaaaagacttagggcttgtttattttgctaccattttcaaccttaccaagttttggtattgccaaattttagtcaaattttggtaagttaccaaaattttggcaatgttactaaattttggcaagatttcatatgtacttactaaaatttggcaacagactgactaaatgtagccaaaattttggtaactttgtaaaaaaaaatggtatggttgaaaatggtatcaaaatgaataagcctttaggtgtgttctttttcctcttactattatggattataaagggcatgcttcacaagcttatggtttattatttgatttgttttatatcaatacatcaactttataatatttttaagctctgaaataattgttatacaccagtttcatctatagtccatcatcaatcgaaacttaaacgctacaggagcatcgtcaatcgaaacttaaatactgcaggagattaggctaatagtatgatatgcaaaatagaatatttgatgaaaatcgagataactctgaaaaaatcctgtaaattttcatattctaaacacaccctggaaaaattacatgcgttatctagcgcgtcatatggcgcgctaattttctagtttcctcgatttcaggagcatatttttcaaaatattaaatgatagacttcgtaaaaaaaatatgtatagaagttattttaaaaatgctatataaatattttttatttgtaaataactattacttaaattatttttttatcatgtttctcgttttacgtgcagctaatgtgttgtttttatccctggtttagaacacgcccttagcttgttttcgcctagctaactagcacaacacgcgtaagagaaacatgcttgtaaatagttttactcttactacatataatacttcctccattttataatataagactttctaacattatccacattcatttaaatgctaatgaatctagatatatatgtgtgactagattcattgacatatatatggatgtgtgcaatgctagaaagtcttatattatgaaatggagggagtatgtcggtattatcttgtactggttcgttaaaaaaaataattagccggtttaacgaagtgagcataattagttaggttcttttggtagaatcaatctacccaatttcaagtcgtatttatggctatttattttttcagtgatagacgtcgtatccgtcgttagcaagacattcgtgatgactttgtcaatctaaaaatgtgccggtccagtttttcggatatgtacatagaaatatggtatacgtgtgtgcgtttataagcatgagtgaacgtgtgtttgtaaaacaaacttaaacatgatgcaccatagatcacacgagcgaagcttatctagaaactgcaggctccagtttggccatcccaggctcccagcacacccgctcaatatgacagaagtttagagggagagaatatgcggtaattgttttcagtggagttggttacatactaatttcttataaaaatgttgatgattgtgtcacgttatgaacgaatcttgatttttcttataactcgcgactaattaaataaaatgttgaaatcattataaggaagaagtttataagactaccttttctattgcaatgctctttatcataaagacgaacgacctgtcactggtcatattactatataatacgctgaaacaactggtgctagggaaaggaaaaaaaagtttgaattacacctccgaactattgagcgagtaaaaattaccacctagactttagaccccctttgaatcaaatgaaattcataataattttagaggatttcggggctgtttggttcacatactaacattgcctaggtttaccatgttttcttagctaaacttaccaaaggtgaggccatcaaaatccaagccacactctagccaacaaaatgaaaccatgccacactttttagagtcacttacatgtgggacctagattacaaaagaggaatcttgccacatttgtgggagtcaaccaaacactaacctaacatgatcaaacttgcctaaccttaagtgtgacaaagtgtagcaacttatggctatcattcctataggaatttttcctataaagccttttgaatcaaaggaatgagctctatggaatcttatgaaattcctatggaatgcctcttcccatacaagttttggaggaattttaacaagaggtagaacctcatggaagaaatcctttgagtctttatctctcctcaaattcctgtattttttctgtggtccaattaaacggtcattcctatgtttttcctatgttttgcaatcctcttttttacacttacattcctgtcaaaatcctatatttttcatattcctccgtttttttattcctgtgattcaaaggggcccttagagtggttttgatcctacgtggcagactagtcaatattttttttaaaaaaatggtagtaccctgcgttcacgaaagttggtaggacccgtccatctcttattgcaggtggtttccactgatttattatgaaaattattgactttgctgccataatataggaccaaaaccactttggattgtgttaaggggattttcattcaataaaaaaattcaatattaatattaatagagcgttcgtgaaaatattaatagttgagagtgaaaaatgtatgattttcatgtctagggtttaatttgcaagtatccaataattagagggtgtaatttggacttttttccatagagaaatggggactgagtcaaacaacacatcattactgtagtagactgtgagtctgtgaagatagtataaatgtatgcttagcgcctagaggcacgccgaagccagacaggcagcgcagacactaaccgtggagtagtctgatcgatctatagaaatactgtagccaaaaactaggccaagagagagattggggtgttctgagcgtagccgaagacatggcaactgatggccacataacacacttcgctcatccacagcacctgcttctcaagacccggtatgacagcacctcgcgccatgtctgcgacatctgccgagccaagctctccggcctcgtcggctaccgctgcaacgcctgcgacttcgacatccatcaggcctgcgccgattacttcaagaagaccatcttcttcttcgcccatccgtggcataccctcactctgagctccatacccgatggaagcaccacgtggtcgtgcgacctttgcagggagaattgcccccggggaaacttcgtgtaccgctgcatccagtgcgccttcgacgtgcaccctctctgcattttgctcccgcaaacgatccgtagcccgcttcaccagcagcatgatatccacatggtcccttcatggggccgctgctccgcctgccgtgaagatttggacctttggtactaccagtgtggcttttgtctgtttaagctacatatccgttgcgtctctggcgcgccaagtggtgtcggtcagggtagcgggcctagcggagtaaggccttgtttagttcaggaaatttttttagatttagtggatatacggacacacatttgaatatttaaagtattaaacatagtctaataacaaaataaattacagatttcgtaaaaaaactgcgagacgaatttattaagcctaattaatccatcattagcaaatgtttactttaacatcacattgtcaaattatgacacaattagacttaaaagatccgcctcataatttatatacaatttgcgtaattgattttttttctacatttaatactccatgcatgtgtctaaacattcgatgtgacagcatggaattttttgttttgggaactaaaaagagccttgcaccagcaacgctgccatccgaactaccagtgatgctcagagcattgccatcgttcggcggagctgcagctctggtatcaccaagtttctcgtcaagaaaagcttcatggtcgcgattaacctagcaacaggcgggctggcatcgccggtgctcgacgtccttgaagctgtcctcgattaattgccacgtcgatgatcaccaggcctgtttggctcatctatgtatgtgtgtaagatcacctgtcgtttcaattccgttgaactttcttcttctccaataatgtgtagtaacccattgttcgatccacaagcggtataggctaagtcaagtcaaccgtatatgcccatcgaatcgcactacgccggaccaggtcatctctgacggacccaaaccctcacctttgacgggtttggtcttggtcagtgattagtggtcactgatgacaaaatcacctgtgatggatgaaacacccgtcacagataacccatctctgaccggtatataagtcatctctgacgggttaaaacttgtcacccgttacagatgagtcatcagtgacgtgtcgtaactacctgaccgtcactgatgactcatctctgacgggttgtaacttacgacccgtcactgatgacaaagcaagaaatacaatttttgaattttaaacgcaacaaaaaacctcaaaaaaatattttgaattttactagccatcctatacatggttacacatcactacctacaaattcacaatttttcacacaatataacttgtatgctacaagtgagattcgaacttaagacctcaacctccatatagagctcccttaccaactcacctacttaacacatattgactactaacccaatgttattattttgtctatgcttgtctgaatcatttaacatatatttaacaccctaaatgacttcaaatgaaaatattatcaactaaatagttatagatttcatcgtgttttataacttttacataaaaaatatcttcat

SEQ ID NO: 13129 - DNA, 11486 bp, Oryza sativa
aaaaaatattttttgaattttactagccatcctatacatggttacacatcactacctacaaattcacaatttttcacacaatataacttgtatgctacaagtgagattcgaacttaagacctcaacctccatatagagctcccttaccaactcacctacttaacacatattgactactaacccaatgttattattttgtctatgcttgtctgaatcatttaacatatatttaacaccctaaatgacttcaaatgaaaatattatcaactaaatagttatagatttcatcgtgttttataacttttacatagaaaatatcttcatccgatgttgtttgaagaattcaaaatttcatttttcaaaatatatctcactttataacatgtaaattttgtgaaatgaaaatattttcaattataatgttgtagatctgattgagttctatgactttgatacggggcatgtatccatccatgtcatttgaaaaaaaactcaaaattttgtttttaaaagtagatctgatcacttgtaatgcatgttcggggatgtaaacgatctctaatagaaatgttgttagttataaagttgtggatatcattgagagctacaacttttatataggacatgtttcaatccgaggttttttgcaaaatttaaaaatttgaattttcactcatcactgacgggtcataactaccacccgtcagagataacgttatctgtgacgtgtgttagttaaagacccgtcagagatgagtggtctcttttgtgatggttcataatactacacccgtcacagatgacatgtcatttgtgacgagccatggttgtgacccgtcacagacgatctgtgacgggttacaagtgcaagccgtcacagatgacttcacatctgtgacgggtcctccctggtagccatatattgaagaggatattttttcggcccgtcagagatgactcatctttgatgagttgcgttggcccgtcacagatgacccgtcactaaagcccggatctgtagtagtgtcggcaagttttttgttagtatatcttgtttctgtgtcctgtgttttctgtacgtacgccttatggatgtaatgttcaaataattaagcgaagatgaagtgggagagcgaagatggctttctaaacggagacccacgagctatgttatgttatgttatgattgctctccttttctcggttcctcggtgttctctttttttcttgttcttgtatttctcttgtttcggctggtttgtcagcctatcgggttttttaaaagaaaaatggaagcgggggactagagtattgccaaatatattaaaaggatagtgttgaacctgtttgtaaggaaaatcgaaaaaaaaaaccatactaaagtgaaaccgacgaaaacattacgcagaagacacagaaagtctgagacaaaacaactgcgaaccgcagaagacgggcaagcaaggctttcgccccggactccctcaaaaggtgcagaacttctaagaagccaaagcaaaactctcgcaccatggagagataagcacaccgctccaatctcagcaccacaacgagttcaataagccacaggacacgtgaagcaccggcgaggcctaagagacctaactacagacaggcaagaccaacaccgtggacgaacaaactcctcaagcaccgaaagagaccacggccagatctgaaagcagatggccaagggaaggttttgtatagtttcttttcaataagattcaggtggggagttttcctccccggtgaccgttaaacaatactccctccgtttcatattgtaagactttctatcattgcccacattcatatatatgcatatatgtgtctagattcattaacatctatatgaatatggataacgctagaaagtcttacattgtgaaacggagaaagtaataactaagtaattgtaatcgaatatttgttgggataaaatatgtactcaaatattgttaccaacaaacataactgtatttttcagttgttccaacaactttgaaccttccaaatgtttccacaaatcttaccttttatggcagttcaacttcttcgcagaaaaatcttaattcaaccaaatgggatgtactaccgcgttcataagggcatgtacaaaggtagagactaaggtggtgtttggatccagggacttaactttagtccctgtctttagacactaatttagagtattaaatatagattacttacaaaactaattacataaatgaaagctaattcacgagacaatttttttaagcctaattaatccataattagagaatgtttactgtggcatcacataggctaatcatggattagttaggctcaatagattcgtctcgcgaattagtccaagattatgaatgggttttattaatagtctacgtttaatatttataattaatattcaaacatccgatgtgatagggacttaaaagttttagtcccatctaaacagggcctaatatgagctctctatattaattaatatcactagagactatccttctacaatagtagagacaataagatttctaaaccattaatgcactaaatatttttttattatgcttctttccttttctataccctcatgcaacaaactttctgttaataaatgctaagagtcgactctgagccgttgttatgcgtagcaacgatgtttctcattccttccttctctttcttccacgtcaccaaatttacttgcatgacaacgaagagagcccgttattaaacaccattgtacatgccctagtattgttcttctagaaactgactccctgtagaaagacttgagattaatttgatagtggtcctctctctaccattcattagaaagatgatgctacatagaggtcttgcaggaacatcaatcatcagaatgtacatgatttgcacggtaacattactccctccatacacattataagatgttttgagtttgttctgtgttataaaaatatactaacagcatccctaactcaaaacaaatgtgctacataaatatattcaattgtggatttaatgaaactaattcggtgttatatttgcatattgtaatattattttttttataaattaggtcaagtttaaaaagtatgacttagaacaaacctaaagcatattatcttataatttggagcggagggcggagggagtagtctacttagaagtacaactatatttgtcatacaactccgacaactatttgcatgtttcttatgtaactgtaatgaccccctactcccctagtagccaactagctagtgtgtcacatatgggctattattatcaatattttcaagaaagtattgttattgttactataattgttaggttttgaccatatactattctgtaaatacgttggttgtttttgaaattatagggactaattagattggattaaaagaaaagtccaagttagggacaacatgctagtggttaatttctaatttagaattaaataataacttgtttatataattaagagtccaagacagtgcaacttcatatgtattagttttaaattttagaattgttcaattttggaaatagtaaaactaaaacatcaatgttatgtccaattacttattttatttaacataatctcttaattcaatggtcatgataatgtgattcaccttataaggagattccttctagttgatctcggggctctcccaaagagtatgaataaaagaataaaaactaaaggatgtgaccacgcatattttaccacggtatttccaattacatattttatttaccacaaactctcagtactatcagttttaggtaaaccttgagaaggagggcatgaagttaatgttttatattaagaagaaaaaggaatggacctagtttataagaaaaaatgggctagaaaaccaaacaaacgcatggttaattaagaaaaatcggcaaaatctcacatagaaagcgaaaagagcatgcggtgacacaactacatagactggccacaagtcatctttcccaagcttatcacgaataacaaacagctctgacttcctatgacgtacggacaactgtctcaaaaccacctaacactttgattgtgtagtaggaccttctggatgaaacctcccagaagaaaaaacaacgtcaaagacactgccaacacccattcggtaatcggactaggtttttacgtgaatgaagagaaccactatcatgattcctccaaggaggaaatggtgtccacaaacatcgacatcactggcaatggtcatagaggcttttgcccaaagctgtcacatctgctgaactcgtctagcgatgccataatgaaggtattgtgggttatcgttgttcagctcgccataccggatgcactagctccgagtccaccataactttatcattccaactccactccacatctaaaccctcaccacacagccaggacgagaaccctctcaatactatctatgaatcaactaatcgacaactacttaacatgacagatccctcaatggtccctatttcgaactaatactattttgaaaaatactaaactaaataatccaatataactttcccgaatacctgagggtataccatactcgtatgcttcgcaaccccaaggataggaggtatgcctaatctgtaaccctaacatgaagttactaggtaccaaattttacactagaaagtacctcgaggtaccaataatttgtggcatctcaaggtaattaacaatgttggatgacaaaattgcttttcaaaatataagggatttggttagattggacacatgttggtactataaatcttaatatcgtagtaataggattatgtcacatctaaccaaatcatattttaagacgaagcgagtacctttccatataccatattattgttgtcttgcagtagccgattgggcggttgccattaaaatcatgccagaccgtagtactgctccagttttcattccctccgtcccagaatataagcatttttagcatagtgttaagtcaaagattttttaactttgactatcaatataaaaaataaaaaggtcaaccatgtaaaattgacgttactagatttaccattaaacaaactatcataatatgcaactctttttatttaaaacattttatttctatagatattgttggtaaaaaaaatatcttgaagatcgtgtcgaagtccagaaatatttatattttaggatggagggagtactacacttgctccgagttgacttgacctgacttgtaagctagcctttttaagtccggccacttggaagaggacagacaatgcataagcatcaatgcatgtaggagtaatctacaacacatgcatgtcacagacgtcgttgctgctgcagctaccgttccatgtcgtgtttagaccctagcaagtccaccgcgaatggaaccgttccatggacttgctaggtcacgttcaaatcaatgtatatgtcccaacatttcaacatccacttgtacaaacccgattgaaactgtcaggtcggagcgaaacagccataatgcaagtcttcgtcgttccatcgctgtattactttaccagaaccgtgtgatcgaactcccaccagctatcccagagtcgacttgacctagccagtccaccgcgccctgccccctccaacgatgcggccgtgtacgcgtacaagtgcaacacggagagctagcagaggcacgtacgtaaaaacagtgcaacgtgtgattgcttgctgaccaagtgaccatgtaaaaccgatggcaccatgcacatcctcacgtcaccagctagctagcttcggaggacacctgcgtacaaccagtaggaaagccaccgtgcctgccacatctgcgaattattgcgcccgtcaccggcgtcggctaccgctgcaaccaccagtccaccaccactgcagcgacttcgccatccacgaggcttgcgccgaccgcttcgcccgggacacgatccacgggttcttcgcgcacccgcagcacccgctaagagcatatacaatagcagactataaaccaacatattttaattaattaagaagataaaagagaagagagaaaagtagcggtgcaacacggactgcaagattacttctaattaattcattatctcttggagtagccgattggcattaaaatcagagttaacttgacctgacttttatttcttccgtcccataaaaaacaaacctaatatgagatatgagatatgacctgacttgtactctctccgttacatcccgtactcttatttatagaactagaatatgtcatatcccatattaggattggttttatgggatggaggaagtaagtcttagactgcgattgaatcgtggtagtatctttcctcttcggcacgaaagatgatgtgatgacccattaactacgttttagctatagaaaaaaactttaaaaataatttaatataatttttaaaagtaatttttatgtagaattcatttttaaaaacacactgttttacagtttgagaaatatatacttacgaaaatcatgaaaatagattatggaggatcgaacatagccggccggttagaagggcctgtttggtacagctccaactcctaatttagctccaggagttgagtctagagcggagttgtggagctgtctaaacccagttccacaactctagtttattttgtgagagagctccacccagctccattcccattattggtagagctgaaactgtttagctgagctccagctcctggagaggtggagctggagctggagctatgccaaacaggcccgaagcagcgggtaccagctagcctgagttatttgtgctacactcaaaacgagatagtacgtcattagtgacttagcgagtgattagttgaatataatcgattacaaacttataaatagatttatttgatttttttaaaaaaaaattataccgactacgtccaaaaatgtaaaaatttgcaaggttagatacgagtatcaagaaaacaatgtggaattaaatgagacaatattgtgattgatagagaataataagtagaggaagacattcagccccatcgtttcgcttatatatacttatacttataagcaaaatttaaatactaaaacttaattaattttgtggtttcttttatcttagtttatattataacatttaattttgattgctaagggaaagtatatgaaaattgtaagcacaaattattatttgttttgctaataagccatatgtacaagtataatcataaacgaaacgatatggatgtttgaatatggtgggaaagttgttatattttacaacaattttaaatgctataagttattatattttgggatagggaaaatatgtagaactttttcgcacgacgcatgtagttaagtaaattttcagaatttttgactagccagagttcagctataaggacgataccttaagttctcaaattcgactagagtaccagcatgttgtaaattttctgaattttcgatgagaaaattccacatgtcacagtttgctgctgttgcattccatgtcgtgttcggtacgtatttagtactatttactacaggttcaaatcaatgtatatatactacatttcctaacatttcaacatctcttgtacatacccgatcgaaactgaatcagaccggagcgaaacaaccgagtctcccgttcgtttcttctgtaaaagtggatgaaaatttggatactcatgacacgcttttcaaacggttaaacggtacatttcgtgcgaaaactttctatataaaagttgttctaaaatattagattaatccatttttcaagtttgtaataattaaaacctaattaatcacatgttattaccacctcgtttttctgtgaaacacttaatctcttaatctccatcttcatcttcctctctgtacttattacccgaattaaccgcgtgaacccatagttgactgaccttgtaaaagctcttgcaaatccactgtctggccccctccaaggatgcatcatgcgtgtatgtaagggtctgtttagtacagatccagctctcgctccatctcttctagagttggagctcagctaaacagtttcagctccacctaaaatgggagcagagttggacggagctctctcacaaaataaacacagctccacaactccactccagacccaactcctgtagctaaatttaggagttggagctctactaaacaggccctaagaaaagtattttcatctggggatatcctttatttatttcttacatgatatttaaatagttattaaaaatatatgaaaaataattaacaagatagattaattatatgaaacataaggtcaaatgcaacataaaaaaaagaacaagttaattaacttatgtctatgtatgtaagcgtgctcttctctctgtgtatatatattggcacccggaactcaaagcgcaacacaaattaagagcagtgcacacgtacgtaaaaacagtacaccgcacgagctatacgagcgagagcgatcaagctatagtgattgctggccatggaaaaccgctggcacgttgcacatccacagcaccagcttcagaggtgcacatacaaccagcgggatcagatcagccaccgtgcctgcaacatctgcgagctacccatcaccggcgtcggctaccgctgcaaccaccaccactgtagcgacttcaccatccacgaggcttgcgccgaccgcttcgcccgggacacgatccacggcttcttcgcgcacccgcggcacccgctaaccgcggttgtggcctcggcgaaccccgggtggtgcgacctgtgccaggggcggatccagcccggccgcctcgtgtaccgctgcgcggagtgcgcgttcgacgtgcacccgctgtgcacgctgctgccgatgaccatccacccggccgccgggtgccacgggcacgtcctcaacttggtcccggcgcgcggggagtgcgcggcgtgccaccgggactgctccatctggcattaccggtgcggcctatgtctgttcatgctccacatcggctgcgtttcgccggccggcgccggcggtgctccagctggtgcgaggggttggcctgccaccggtggcggcggcggctgggccgccggtagcagtcccatcgtgaggtttctgatcatgttcgcccggcaactggcggtgaatttaattgtcaatgatattacggacatcctaaatgcgctatagtaagatgtgtgtgtgtgtttatataggtgattattgtgagcaactgatagcaccgggatggttgcataagttgcaagtaagtgggagtggattgaggggacatctttttcttctaaattcgatgcaaatagttgtgaaaaattctgaaaaaaattaaaaatgtagagtataatgatacctactagtccaccaaaattcatgttcaaattcgatctacacatcgagaaacaaaaaagacaaatttatatataaacagttcgctactattcatacgctgaatttgtcttttttatatctcgacgtgtgagttgagtttggacttaagattttgtggagttatatatatgtgttgtatgaatgttgtcaaatttttctagaatttttcataactgtttagatggtttttgagcaaacgagaaaacatcccctcgagggattagaatagtttcccgcaagtaaatagatatttgagcttcatctttcgtaattggtgttctgggtgcgaggagtgggtgatgatgctcgctatcctagcttggagagatgcaaaagatgttagaaattttgtgctagtttttttttactccctccgtctctaaatatttaacgccgttgacttttttaaaacatgtttgaccgttcgtcttattcaaaaacttgtgtaaaatatgtaaaactatatgtatacataaaagtatatttaacaatgaattgaatgataggaaaaaaattaataattagttaaattttttgaataagacaaacggttaaacatattttaaaaaatcaattgcgtcaaatatttagggtgagaggaagtatctttaaaaataatgtcaatatatataaagcaagaaacatctatttgctctcgagatggaaagcattcaaacagtgacgtgtgtatgaatttttttagcctgaacaagccttattagatataaaaactatatatatgcacaaaaccgaacaataacttcatagactatttatcatagataacttcataacagtcactgatgatccgttagaggtgagcggatcctgcgtagtagtttattgtccacgaaagataaggtctgctatagagttgtgttgctttggctctatggtcacagaaatgatggtttagcccttgttttgcttgttaatttattgagtaattatataattaaccttcagtagaacaaactaagtaatgtaattagataaataataattagtaatatgcatatataattgtgggtggtgtgaaaatgtttatgtaatgtgtatggcatcgtttgagttttttatttgaattgaatatagattggagatatggagtttgttttccatgaagagctcatccaataaatccacacagctatattttagatccaccctataattaacggtttagattttttttctcatattaatatgtaatttgagagcaaacataaaagcttatttctttgcaattacactttaataagataatagtctttcggtccttccatttcaaaataactttaactttaagtttagacttggacgttcaaaacaatgtagaagaaaaaaacaccaaagtgtcgctcactaataggaaactagtatatatgcgtggataggtagataggtaggtaaggataggtaaaagatattgatggagtaaaaaaaattcatcaaattgtggattagagcatgataggtaagttgataaaggtaaacttattttgagacgaggtagaggctaaaagtaaagttattttgagactaagggggagtaagataatagctagacttaaaaataagtagaaactaagtcaaaacaagccgcatatgataattttgagttacatttttacgtgttgtacatgcatgttgcacatctcacattttttttaaaatatttttatgtacatttaagtatacacaacatttacaatttaacgtttgtacaacatgtactgtatattaacgcacaagcaatatgcttccatatatgaaaatatggagaaattagttcatgctttgactctatgaggcattatgacggagctcgtggctcctcaccgggagaccgcgcaggcccccctttgccagttcggccgggggcttagggtgagatctcaagctctctctgtatgtggaaagatcgcgtgccaggaagaaacgcgagacacggacgatgtatacaggttcgggccgctgggaagcgtaataccctactcctgtgttttttgtggatctgtgta

SEQ ID NO: 13130 - DNA, 3730 bp, Oryza sativa
atttttgctaaaaatcaaggtaaaaaacacattattctccattccttctcaatatatcgatcatcatatatttttcttcgtatgttgttaatttcaagtggatcgtagatggatatactatgcgcatcgttcgtctaccgagtatagagagggggtcactgaatttgtcacatttgcggataatgacagaaaaagtaggatgagcatgcacatgttgtgtccatgtagggactgtaagaatgaacagatgatcgttgatagcgataaagtgcatgctcatttgataatgaatggatttatgaagaaatatacctgctgcaccaagcatggagagcaagaggcgcctgatgtcgcagctgaagatttgttggatcaggatgcagagaacaccgccgcagctcgagaaggcatgttcgtaccttctcctttaggtggagagaccatatatttggacactcaatgtctatctacaatgttgcatgacattgaagatgtaaaggacaacgacagagattttgagaagtttagtaagttggtggaagattgtcagatgcccttgtatgatggatacaagtcgaagcacagcaagttgtcatgcgtgttggaactcatgaagcttaaggctagtaatggctggtcggacaagagttttacaaaacttcttgagctgttaaaggacctgttgccagaggggaacaatttaccgcagacaacatatgaagcgaagcaagtattatgtccgttgggcctgaaggtcagaagaattcatgcatgtccgaatgactgcattttgtactacaaggaatacgctgacttggatgtctgccctgtctgtggggcatcaagatacaaacgagcaaagagtgaaggtgaaggaagtaagtcaaagaggggaggcccagcaaaggtggtgtggtatctcccaattgcggagcgcatgaagagaatgtttgcgaatatggaacaagctaagctagtgcgctggcatgccgaagaacggaaagtcgatagtatgctgaggcacccagcagattcagtacagtggaggacaatcgataggatttaccaggaattctcaaatgacccaagaaacatgcgtttcgcaatgtgtacggacggcattaatccatttggtgatttgagcagtcgtcacggtacatggccagttctgcttgttaactataaccttcctccctggttatgttcaaaagaaagtatattattcttgccatgctcatgcaaggaccgagacaacctgccaacgatatcgatgtgttccttgaaccgataatcgatgacttcgaaaggctatggaatgagggcacacgaacatgggacgcatatgcacaagagtatttcaacctccatgtgatgctgttttgtaccatcaatgattatccggcccttggaaactttctggccaaactgtgaaagggaaatgggcgtgttcggagtgtatggaggaaacaagatgcaaatggttgaagcattcacacaagacggtctacatgggtcacaggagatttctcccaaggtatcacccgtataggaatatgagaaagaatttcaatggacacagagatatagccggacccccggcagagctaacagggacagaggtgcacaatttagtgatgggaataactaacgagtttggaaaaaagaggaaagttggaaagacaaaagagaagagcacatcaaaggaaaaaacagaggagcatgtggaaaaacaaaagacaaaagagaggagcatgtggaaaaagaagtcaatattttggagactaccatactggaaggatcttgaagttcgccactacatagatttgatgcatgtcgagaagaatgtatgcgagagtttaatgggattactgcttaacccaggtactacaaaggatggtctcaacgcctgacgagatctggaagaaatgggtgttcgctcggaagtacatcccataaccacggaatccggcagggtttaccttcctccagcctgctacactctctcgaaagaagagaagattgatttactaacatgtttgagtggtataaaggttccatctggttactcatcaagaatcagtaggctcgtttcactgcaagatcttaagttggtaggaatgaagtcgcatgattgcgacgttcttatcacacagctgttgcccgttgaaataaggaatattttgcctcctaaggtgcgacacacgatccagcggttgtgttccttcttccatgcaatcggccagaagatcattgatcccgagggactagatgaactacaggcagaacttgtgagaaccctatgtcatcttgagatgtactttcctccaactttctttgacataatggaacatcttcccgtgcaccttgtgaggcaaacgaagtgctgtggtccagcattcatgacacagatgtatccttgcgaaaggtacctggggatccttaagggttatgtatggaaccgttcacaccccgaggggagtatcatcgagagttacaccaccgaagaggtcatcgatttttgtgtggactacatgtcagaaacatcttcaattggattaccacgatctcatcacgaagggaggcttgatggtgttggtactgttggaagaaagactattaggttggatcggaaggtgtacgataaagctcatttcacggtactgcagcatatgactgaggtggtgccgtacgttgacgaacgccttgcagttctccgacaagagaacccaggccgatcagagagttgggtcagaaataagcacatgtcttctttcaacgagtggctgaagaaccgaattgccaggttgcagaacttgtctagtgaaacacttcagtggttgtcacagggtcctaaatggagtgccaccacctggcaaggatatgacataaatggatacacctttcacacggtaaagcaagacagcaaatgcaccatgcagaacagtgggttacgcatcgaggctgctagtgacggtggtcgtcgtgatcaatactatggtagagttgagcaaatattggagctagattacttgaagttcaaagtcccgttgtttcgttgtcgatgggtcgatcttcgcaatgtaaaagttgacaatgaaggtttcaccactgtcaacttggctaacaacgcgtacaaggatgaaccgttcgttctcgctaaacaagttgttcaagtgttctacatagttgacccgtgtaacaagaaactacatgttgttcgcgaagagaaaaggagaattgttggattggacaatattgcagacgaggatgattacaaccagcacgtccacggtataggtcaagaaatacctctagaagaggaggaagaagaagatgaagttcaatatgcacgcgtcgaccatgaggaaggattatttttgtaatttatgtacgtagtttatgtctacatgtctgttatctatatgactctgatatgttcgcaatgatcaatagtatattccttatgaaatagtcaaataaaataattaagtgaagcacccactagaagtgaaataaaataattaagcaagtataaccattggaaataaaataataaaattagtaaaataatgtagtgcaattactactgttagtgaaataaaataattaagtataacaaaatatgtagtgtatgtggaaatatgttaaagaaaataaaagaactaagtgaaataaaataaaataaaattgttgtaggcaaactcatctgtgacgggctctaactgtgggg

SEQ ID NO: 13131 - DNA, 3007 bp, Oryza sativa
  unsure (1)..(3007): unsure at all n locations
accaagggcttacgtgcgcatctctaagaggtaacacgctagctccggctggagacgtgtgcctagaggctctcgtcttgacgggacggggcgaggcgtgcgtcagaccgccagtcgccacctaaccgttgatccgaccggtctgtgactggtcacagaccggataaaagagcgcgctgcattgcgctgcatgcagcgtgacacgcttgaccagaccgcaataaatgcggttaggtgagccctaccgtgttcacccaacctatgtacatagtgcaaaccccacagggggtcggggcacctcgtccctcggggccggggcaggagcaacccgacccccccttggggaaatcaggaggagggcggacacctcaccctcgggcccgacgtccccgaaggtgccaggccacgtgggcgattccatctgcctcaagcctccgggcgcaatactcccggtcccatatcaccgacagtagcccccggcgttatgtcagggcgatcatccttctcaagggaagcggtcgggcatgacgccactcataaagcctggtgacaggtgggaccggtctccgtgattgggcagaaacccaacggtctcaaaccacgcatatcggtaacggtgtcttggccgtcagtcatgggcggtctcttcaagactgccacatcacttgagcagcgctcgaatctgggcgtgcagattcgtttcgtctggagacatggtaacgtcgcttcggtcggcgagcgtaattaacgcgcacacgatacgatctatctcgactgccacaaccgcatatccacctcatgcgccgcaagcgggcgaatggaattagtggaagcgtgggcgcgagaaacgagggagcgagatagcgagtaacgagggggcgagatagtgggcacgagaaacgaggagccggactcagcgatggcaagggtataaagccatcgaggaaaggacttgctcccttcctttcgccactattcccctttccttcgccgtttgcgccctaaactctctctttgctgcgcctcaccttcgccacacacgctcgttctcaaccctctctttctccgacgacatggcacggggctccgctctgctcgacggtagcgtactaccaccttcccgcattgtgagcgagaggcaggctgggctgccgcgccgcttcatgccggaatctgccaccggccgggagatagtgatgctgggcgaggcgcgcccagcaccagattacccggggcggtccatcttcttcctccccttcgcaatggccgggttggttcctcctttttcttctttctttatggatgttctggagttctacgatctccagatggcgcacctcacccccaacgcagtgatgactttggccatcttcgcgcacctgtgcgagatgttcattggggtgcgcccatctcttcggctgttccggtggttcttcaccgtgcagtcggtgtcgccgccgtcggtggtcggtggttgctacttccagccgcgggggccggtgttgaaccgctacatcccctgcgccctccgcaagaagtgggacgattggaagagcgactggttctacaccccccttgccaacgaagcgcgcctccgactcccaagccagcccccggctccggtctccagctggcgggcgccagtagatctgggggatgactatgacgccgtcctcgaccgcctggcgggcctgcgatctcaggggctcacaggggccatggtgtacggcgactacctccgtcgccggattgcgccgcttcagcggcgcgcccggagcgcatgggagtacaccgggtccgaggactacatgaggacccaccggggagtcagatgggattgggctcccgatgacttcaagatcgtggtccaaagggtgctgaatctcagctccgtggaggcgtctcttattcctcaaggactcctccccctctgctgcgatccagaccgcgcctccattctgaccatcatgatgggggtcggggcctcagaggaggtggctcctaagggccacgacggcgccggcgggagccaccaggaagaatcaaccccaggagggggccgtgcttctgggccccgcgtcgggggctcggggagcaaccgccctaccgacgcccgggggaagagcaaactgggaggaacacctcccccatctcctccccgagggggcggggcggtgcgtgccagcagcaggcgcccggagggggccgcgccaacctcgcagcccgagggggagcgcaagaagaagcggctgcgcaagatgggggagacagaaccatcccggggaaacctaatttcccctccaaggtggtcatttaaccgaccccctcgcaggttcgtcccatgctcattgcgaccgtcttttcttctattccaaaagcaagtttcttcttacccatcctgtttgccttctggtttttctttctgcttcagtgatgtcccgtcgcgttcctcccgccatcccaagtccggccaatccgaagccgaagatccggcggccgcagaggaacggaggcgagaatctgaccggcgagaggccgcnnnnnnnnnnnnnnnnnnnnaaaaagccgccccggaaaccgcccgggctcgccaggctgaggataccgctcgggaagaagccgcccgggcccaccaagccgaggaagccgctcgggaggaggccgcccgggcccgccaagccgaggaagccgctcgggaggaggccgcccgagtccgccaagccgaggaaaccgctcgggaggaggccgcccgagcccgccaaactgaggcgatggcgtctttcgaggcagcccacgacaaagctgctggcgcgtcgcttgggcctactccctcgggcgacgctcaggcgacagcctccgggacggctcgcgacgagcccgcgggcggatcgcctgggcccgctccctcgggcgacgcccaggaccaaacgggtccgggggacatccccaagctcagtgcgtcttctggcgggccgagccgcgtcgcattttttccaaggcggttctt

SEQ ID NO: 13132 - DNA, 3646 bp, Oryza sativa
aagcggccgaaagaggtctcccattcttcaagaccctccggggcgcaggaaagttcagttggacaccagaatgccaagcagcgttcgacgacctaaaacaatacttgcaaagcccaccagccctcataagcccgaatccaggaagcgaactgctgctgtacttagcagcctcaccagcggcagtaagcgccgcccttgttcaagaaacagagttcggccagaaaccagtttattttgtctccgaagcgctgcaagaggcgaagacaagatacatcgagatggaaaagcttgcttacaccttggtgatggcttcgcacaagctcaagcactacttccaggcccataaaataatggtgccttcacagtaccctttgggcgaaatactacgaggcaaggaaatctttgggaggcttagtaaatgggcagcagaactatccccgtttgatttgcatttcgttgcgcgcactgctgtcaagtctcaagtgctagccgactttgtagccgaatggaccccagtgtcaacctctgaacccgagcccgtcgagcagccctggataatgtgctccgacggttcatggtcgcacaagggagcaggcgtcgcggcaattctcatttcgccgaacggtgtaccagttcggtacgccgcaaggttgcagtttaacacaaccaacaacgcagcagaatacgaagccattcttctaggcctaagaaaggcgaaagcactgggagttcggcgcttgctaattcgaaccgattctaagttggtagcaagccatgttgacaagtcctttgaggcgaaagaagaaggaatgaaaaagtatttggaggctgtccgaaccatggaaaagtacttcaccggcataacagtcgaacacttgcccagaggccagaatcaggaagcagacgctctggcgaaatctgccgctagtggcggaccgcatttgccgggcatatttttcgaggtactgcacacaccaagcgtgtctgtggacagtctggtcttaacaattgaccaggtaaaactgggagaagacccaaatgactggcgaaccccgtttgttaaatatatcgaaactggctggcttccggatgatgaagcagaagcaaagcgcttgcaaatcagagccacgaagtataagttaatctcaggccaactttaccgttctgggatgcttcaacctctactccgttgcgtttctttcgccgaaggtgagcaaatggcgaaggagatacaccaggggctatgtggcgctcaccaagctgcaagaacggtggcctccaaggtgtttagacaaggggtttactggccaactgtgttgaaagtctgtgcagagcagattaagaagtgcgagagctgccagcgtcatggctgaagtcaaaccgcgccccactatgacttgcagcccattgcgccaatttggcccttcgccagatggggactggacatcattggcccaatcccttcggcacgaaacgggtataagttcgccattgtggctgttgaatatttctctcggtgggtcgaagccgaactccttggtgcaattacttcggcagcagtacagaagttcgtgtggaaaaacattatctgccggttcggagtaccaaaggagttcatcaccgacaacggcaagcagttcgactctgaaaagttcagacaaatgtgcgaagggcttaacctggaaataaaattcgcatcggtcgcacacccgcagtccaacggagcggccgaacgaacaaatggcaagatcctggaagcactaaagaaaaggctcgagggggcagcgaaaggcaaatggccagaagagatgctatctgttctttgggccctgcgaacgacccccacaagaccaacgaggtttagcccgttcatgctcctctatggcgacgaggcaatgaccccagcagagctaggggctaactcaccaagggtggtgttctctgggggcgaagaaggacgcgaggtgtcgctcgaactattagaaggagtaagagtcgaagcactcgagcacatgcgcaaatatgccgtaaacacttcggcaacctacaacaaaaaggttcgaccgacagatctcttgcccggtcagctcgtcctaagaaaaaaggcgaacccagtggctgtcggcaagcttgaatcgaaatgggaaggcccgtacctcatcaagcacaaatcaaggacggggtcttttcggctggcaacattggaaggcgaggggctcgaccactcctggaatgctgcctccctcaagcgcttttatgtctagaataggtggcacccaaatcgccaacttgtaaaaatgtatatagtcatgtaagccattcggcactatgtacgcctcccggcaaaaaaaaaaggaaaaaaaaagaggaaaatgaaaaaagaaaaaaaaactggatgtagggttattatccgccatggaggcccgaaccagtataaaacctctgtgtcctctaccttcttttttttattgtgtgattgataacttgtggaaaaaccccaaggcaaacgcctgatcagcgaaaaagccaggggggcgaaacgaatcgcccgaagcatcgctcgccgaacgttgaaaccacaacagcttgtttcggaaataactaaccgaacgccattacattcgatcagcatgaaagtaaaagcgtctatcgaaaacggaagacgaaagctggaaaagtcgaagcctatttcgctaatgtatgcaaaggggccgacatgttccgacccaacgaaagcacgcgaagtgacaatgcgagaatagcgaaaaggaagtaaagcacacttttattgattcaaaaaaaaaagggaggtatcgaggattacaactcaaacagtgcaatatagatcacaaataaattacatcttcgccctcgtgtcccctttctcccctgtcggctaaagaatgatcgggcgaacaaggttcgtcgtcgctaatatcatacaccactctaaggggagaagggggcgaaacgcaaattatgccataacggcgccgaaagatcgcttcctgccgatcggtcttctgatgattccgccaaaagcgaagccatgtcgtccaaacgtcttgaatgaacaagatcataatcctccagggttcgctcagggtgactccgaagccacccagcaaccttgaaaaccttatagctgtgtccatttatcagcatttcacgatacacaggccgaaacgggcatcgcatcttcggcaaatcttttaaagccacaaatttctcgttttggtttcgccaacttccagacgggggtcgaatacacagttttcggcgaataccctggcagataatgcagaaatggcaaaaaaccaatcgaatagtgagaagtaggcgaaagcataacaaggaccaacagtaaagggcgaaaggtaggtctgttatacatattttaaatgcccaacgacaacttagtctcggttacaataaaaaggttagcggcagcctgccgaatatacaacggttcgccacccctggcgaaccccaaaaaaaaactatgaaaatctaaagaaagggcggagggcctcacacctctgggtgatcctgggcatcacctccacccccttcggcctccacgtactcttcttcgcgaagctccgccgcctcagccttcgccagctgctccaaaaggcgcgcctta

SEQ ID NO: 13133 - DNA, 5441 bp, Oryza sativa
cccgtggtaaaggccgcggacacgcgcgcacagcagtcgccgtacgcggtggcacagtccgaaaccgaaccaccagcctgctaggtccattcggagaagtcaaaggcagaggcatcttcggaagggacacctcgcactttcgcgcccatatcggtaagagcaaggcgaagcgtttggcaagctgttcgcgcggactcggtagttttcaccatctcccgtgaaaaccgccgcgactccgcagcagcgcttgcctcggccttgcagacttcctgccgaagagcctccatcttcgactcggtaaggttgtagtaatccacaagcacggcggagtgggccttttctttttgcagttcggccttcaagcgttcgacttcggccctagcttcattccctttttccagttccaactggagccgcttgttttcggctttcgtctccttcagggtgttagccaggacctccatctcaagatttttgcggcctatttcgtcatccttcgcccgaagacggcttttgaacccgtcaaggcgggctcgcacggttcgctctgttgaacagtgagccgcaaggatctgggcgcaaaacaagagcggcgaagagagcaagtgtcagcaaaagcaaagataagaacagagaaaaaggaggggaaagacgtacccgaaccacaagactttttatagcggagcacccctcattgaactcattaagttcggtgaacaggctcggggtgccggcaggcatgattagattgctcaccccttccacaaaaggaaggaggtctgcccgtgtctcgaagtcgccgggggcgaagcggggcaccgcaagcgaatactctgacgcggacgtttcgccagccgctctctttcccttcgcctcagtcagcggcgatgcaattggctgacgaggaggactgccgaaaactttcgccgcggccgtcacgatcctttccgcggaggccgaagccccagcggcagtgctaccacccgctccagtgccgccaagtggaggagcgggagcggctgaaagatccaggctgcggccagcgggcgaagtcagagtcccgtcagaggactcatcgtcgctaaaaactcgagcgatatcgacaagtcctttctttttagccgccttcttgacggggcctcccttcgccgccttgccagaggagaacgcaaccagagccttcgccacgttcaagtctttttggcgaaggggggagctattcgactccaccccagtctcgttatggccaggacttggagtgggggtataaccgggagtttcggcgcgtccctcggtcacctcgaccgcggcattttcgaccgcggtctccgtctcttcttcctccccctctcccttttcgccgtcaagttcttcgccatccttgtcgtcagcgtcagaatctgatgaaacaggagccctacgcttcctaggggcaagcttaacctgaccgcgcggccgcttccgcgaaggccctgcttcgtcaccagccttatggggattcgcccgaggaggcaattcgccgttaaaaacccggttcgcccgaccagttgcctgccgtgtaagcatttggctgtactcaacgaccgatacgtcgccgatcatcttacgggcttcggcttcggcttggtcaagggttagcactgcaaaggaaaggaaaggagtcaggttaaaaggtcaagcagagagagctaaagcgcgaaagtatatggcgaaaacagcagacttactgttcattccctcagggaggaccagcttaggcaagccatcaacctcttcgctcaggttaaccgcaacctgccatgactgggagaggggaaagatgcgaagcatgcagaactcctccaccaggtcgcggcagctgaggcgggaacagactttccttagcagggcgaaccgggcctccatagcgccatccacggcgatcctgggttttcgattcggcgcaataaccctgcgccgacaccgaagagctttcgctgaatcagagccggcctcgaaggggatggtgtggtaaaaccacctcgccatccaatggcggtcccacttcgacatggcagcattcgctggccaaaggtcggaccgttcggggcgaacattgaagttcacgctcccgatcaccgtcttcttcgtcccagccggagtaatcaccgtcttggagttcacggtggcgaagaatatggcgccgaagagagcagcgctaggttcgaacccagaagtccgacaagcccaatcgaaaattgagatccgaaccagcgtcgatgggctcaattgggggagctctacctggaagaggcgaaggatctccggcaatagcacgttgcacggaaaccgtagccctgcctcaaaaaagacggcgaaaaccaccgtccgattgtccacaggcttcggcaccacagctttccccggggcgaaagcctgccccgcaatcaacgccccagagctgactagtttcgccagctcgtcgtcatccacaagggaggcccccaaaaaggtggtgttatcgtcgtcgacccggccagggtccggtccgaccgcctgaacggggtttggtttgcgaggggccatggcgaaaggcgtgtgggccgtggcgaaccaatagggtaggcgaaacacctacggattcaagaaacgctgtggaaggagataacgaaggaggagagcgcacgcagtaaaagtggcaaagtgtgacggtgaaagggaaaggggtgagaatatatagcccaccgagtcgacgtttcgcataccctccaatcacaaagagccacgtggcgcgagggtaggcgtaacggtaaaatcccatcatccgaccagcacagtaaaaagcccattaagggaaagcccaatactgttcacttcggcccggaaaaagtaatgatattttatttgcaggaacagtacgggtttcggcaggagcatcgatcgaaagggggcgccacataccataccacatggtttgcacggtctcggccgaagctccgctctcacccttgcccgcgaggggcttgttggcggatggcatgagtcccttcgaccgaatctgccgaaacccatggcgaaaaccacgagccaaggatgatgcgaggcgaagggtcgcacgagtgcacgccgaagaaggacgacttcgccatgccgaagaaggacaacttcgccaggaccggttcgccccggcatccagcccagagaaggacagcttcgccaggtccagttcgcccccgcgagggccaaagtagccttctcggcccaccaagcatagaggccatagggccggcgatcgcccgatggcccatcaagggcccatgagcccccctttacgttatgtaaccctgtaaacgtccctttcataagggcaactatgtaaattcctcagtacaacctagaccctagaagtgagaatctgtaacggggctataaatagccccctagggccatgtaatacaggggagaaaattcaagaaatcaatatacttcgtttctttccaaccactgttaagtaaccacgtctttcgacgtatgcggttgtcgtttcgacaacacagttaatagcggctaaattgtaaatgagagtaaatagctagactcttctcaaacaactatgggcatcatcttttcacttatgcttatcaggcaaaatttgaattttcaatattaaatttggagctgattttgagatttttttcatcgaagtttatttttcagcctttgcttttagatcgctaagaatacgtatataaaagttttattgataaattatttttcgtttacaaataagccgtttcgcttataccgccaataagagaaacaatggcttcgtatgtctctatatacatatataatatatatagcggcagctatagccggaaatttaaaacggcgaggaatctaatctaacggcactttcaagaataacgccatactatacatacctgagtcatctctatcttgcttgaaatagaggaatccgagcagcaatccagccaacgaactcgtcaaggcaagagcaccttttacggcgccatggccgacgccgagatccctctgcgcggagagggacgggagcgtgagccgctgcgcgcgagtgatgaaattttcgatctgagatcagggggggaaacggagagagactcacgagggtgcggagagcgcgtggcttcgctggcctagtccccgccgccgccgccgatcgccgcgcctgcgcgccgcgtgccgagagcctccggtcgaggagagatgcgagtgcgcggaggaacatgggcctcgaaatctcgatcgatcggaggagacgcctcgatttctagggttttgacggacttcgctgtgggaggagtgggaagtgcggatgcgcaacgggtcgaacggatttccgacaaaatccgatcaaattttgtcaaatcagatatttaaaatccagtttgattttcccgtcggtttttttgtaaacacctgagaagggtcgcatggcccgtgcgcacgcgcaaaattgggccagtatgggcttctacctttccttctagcgcgcgccggtgcatcttggacatccacgtcttgtgctctgccgtgccggcgacggcggcggcggcgctgccaccgtgaaccgcgatggcgggcacggcgatgaagaactccttcgcgccaacatggccgcatggctaacgaccttgtcatgagaaacaccggtctcgacctgatgatcctgttttattgtgaatatatacgccactagactattagtaaaaatgcataatttttacaggcaaaacttgacatttattagtacacatacatcaactatattatctcatattagttcttagcgtacacatgttactttggattttggagaaagatgccaagtagctttcgaatttctgtttaacaatgtccggaatgtttaaacgcgtacagttttgaaggcaaatactatgtgggaataataatatcgaacgaagcacatcccagaacatataaatcaattcttgccagtcttcagtacaataggaacagtagcagcagcctactccatatttcagaattcagacagatcctagtttctgataccgcatattgacaggaaaacatttacctctaatcacctagcaagtactatagagaaaaatgaacagaaacaaaacttgatattggacaacttttgtagacagtggctctaatcatagtagtcttcatctgtcagaagaaaaagagaatgctttcattagtaatcttaacaaaaccaccagtagtccattttaggaagagagaaggatagatctgatatgaatagaagttcaaatttaaacttacgtgcttcctcctcttggttccagtcatcatcgtcgtcatcaaactcgatattctacaggaagttaaggtattagagtgctaaagagatgataaattacaattccaaaaaaaaaaaaaaatgattcatatgtgttccaacatgt

SEQ ID NO: 13134 - DNA, 14540 bp, Oryza sativa
  unsure (1)..(14540): unsure at all n locations
agtacaaaaaaccatattaacatggtgaaaaagagaaacaaacaaaacttgcaaaaacacggaattgctttcttgttggtgcttagtgcatccatattagtatcatagtccacagcctcagaccgaaaagcagtaacatgtctaaaatgcatagatgttatcaaaaattgattttagatagatgagctgatgaaaatttgaaaaactgaaagattagggatgatgctcttgccttgtgcttctcttcaagcttctcaaaaacttcaaatgcctgatcatctgtcaaaaaaggtcagatccaagtaaggatcgacacatatatggatgaacaacatgtagcagtagcattgataattcagattttattgctgctaacagacatgacaacagaatcgtacaaccccgcaagcaatgcagtttgctaaagttcatgacagaagcaaaagggacatcattctttatgaaacaaacctgagcttctatcccaacgcagcttcttactgcttggctgtcctcgcttagaacctgaaaagaaacaaaatgtcaagagagtattctgctgcaacaacatagcagataaattttatatgtacagaaatacaaaaaaaaaaatcaagattaccttgcactagttccacagggaaatttgcaggagttagtataagatatgacgcaagagcttcacgtttggaatgtgtcttacgtttcctatcagaatacctttcaatctctttatcatcattctctgatgggatatcaacacacaaaaaaaacttatcagaaatagctctacaaaagcaagcacaaatctctacaaatgcaaggaatgaagcaaaaccagaggatgcttgattgcttggaaggaaaaaaaagaggctgaaatgttcattaatttgtaaaaatgtttcaatggagatatagatagggctaatacaaaagaagagtaggtactaaaatgatgaatttctggttaaattgagctcgcagggaagcaaggcccaaaagaatattatgatttatggattctaggccccatatcaacaccaagctgaatgcaagagaaagttctctgtgcatgtcgaagtcaaaattatgtagtccatcaaagttcaacaatatataggaaaccataacaggttccactcagtaaaacagacagtcagtccaaataagccagagctccagtaaaacacttcagtacccaattctttgacccaccacctcaaaataaacatgaattacttcttgtaacatgtgttaactatctgacctatgctacatatatagtcgatttgtattaatcgagaagcaagatatcctaatgggcaggaagaagaactaaaaaatgtcacaataagttgagccatagtagtacttttcttggggacatcctcctccaggtggtagcaagaagtcttccagaaatcctcaaatttcaaggtggactgtatcaaagccttctcctccatggtcgccctggcgcacgtcatctccggcagggtgatgtcctgaatataccgacgcccaaatccggtgaatcgccccaaaaaaaaatcacaccacgagcatggcgaaaatcgcattcagcagcaacaacgagaggagagggaaagaatgggtgcagggaagtgtggggatggcggaacggggaatgaagtggagagaaaagaaggttcaccgggaaatcctcgtggggggtgtgcttggccgggtggtcgaagccgtacccttcctccccgcctcccccggcctctcccgcggccccgggacgccatctggaggggggacggatgtcgatcgaggcggcgaacctctccgcgcggcagaagcgcggccggagaagagaacagcggcgcggcgcgaggggaagtgcggcgtcggcggcggtaccgcgcggcgtggtggtcccgggctggctgtgttagggtaggcggttgggctttttatgggcctcatggtgactattgggctttgcgagctaccaggttgcacgtcagttcggctgtagatggaataagttcgagcatgtttattttgagggactgtctgaaaatcattcgacagatttttagtagaaaatcagtcggattttcaagccaccacgacgtgcggttcaaatgaaaacatatccacgtacgtcagtcaccggacggtaatcacgtcaatgatgcttaaagaaaaggaaaaacaagcaacttacatctatttacatcaacttacatatataattttaaaacttacagtgtaaatacaccgaaattacatatgtaattttgaaacttacagtgtaaatacactaaaattacatatgtaactttgggtacttgcaatgtaaatttattttatgaaaaatataacggtatatatagtcccaaaaatatcaaatcacacctcaaacaattaagttaactatagtgcaacaaaacaacgatgagtaaaaaattccgtacatgtaaaacaaaaattacacccgcatatacttaaaattacattgtaattgtagtgcacttacgttttaatcgtggtataactatgttgtgagtgggtgtagtgtaactgcagtgaaagttttaaaaaaagttacgcatagaaagaaagtagtcgtttgctgcttgctcagttggtacgatgcatgtcgtagcatcccgacatcatgggttcgattccctgttctagcgacattttttttttcactcaatggcacatacacgtatctcaaagtaaatcatacggtcaacaaatcgactgatttttaacagaaaatctgtcgccagatatgtagcaattccgttattttgatgccaaaaaaaccttaccaaattttggctatggcatagttactaaaattttggcagggtttcttatatagttaccaaaatttgatagcaaactaaatatagccactttttgtaactttaccaaaatttagtaaggttaaaaatagcatcaaagtgaacacgcccttcattttaggtccctcaacttgccagcgaaattgatttttatatccttagaccgaaatatcagatacaacgggtcattaactgttaaaaccgtgtaatgtaggtccgacagaagtatgacatgtggttttgtccgacgtaaaaatttgacccgaattaataatgttgagtcagtgtgagcctcacatgtcaatgcctcttcacctatatctctttgttcagttgtgactgagaagcatggcggccggcgacgggtggtgaagaggacagtcgctcacgggaaaagatagctcgatggaggaaggacaccgacggtggccatcgatgacggcgatggcaaggcagactagaagagaggcaagatccgggagcatgacatcgtcctcccctcacccctcgctcccctcgcccgttcttcccccacagccgcacgggacgggagccggcctcgccgcccaccggaggcagcgtcctgtctcgagttcgctcagaagccgcttgtcctcctcctctctccacgaccccatccgcgaacgccgcctctaccgcccacatcaactcctccacccacatcgccgcagaggtgggtggtgatggtggctgttgcagagaggcgcaaagaaggctctgtagtggtgagcccttgccggaaccaggatagccacgcagacttggaatagggagacctctagtaatgttgaacccgagagcctatcggcggtggcgcgcggcgcaaattggtagcggggaagagccagtggaggaagaaatcggggcgacgaataccgaagtcaacgggtggaggtcccctccgcttgccggccatcggccatggcttgagccccacccttcctcatccccttactcctcgtctcctccttgctcacgccttttgccgcagtggctgcattcgtcggcctcgagtccttcctggcggcggtgactacccgcgacccctctgctggcaataacaccttcggcgccctccccaccccggtcctccgtcagttctcggcctcttcaccttcttcagatgatgagctttgcagccccacgagaacaggagaacaattcagattcacttcaaatggatagcatcaatttgaacaataaaggtgaacgcagtatttctgatatttgatttacttaagtcttttctaactcatgaatgatatgtataatctgtactgattagtttagaaactcaccaaaattttgatccgatttagttgatcaatttgcaaaatccaataagaaatgggatgagaaatttgattagttcgcagcaaaaaaagaatcatgagctaagtttaaaatcaaatactagcagtacgagatctaaattggaacatatagttatatcctgtttaaattcagaactagtttactaatttacatgatttcttatatgtggatacaaggttacaagtcaaattacaatacatttctgataaaaattacagaaaaaaactattgtaatttttggttgaaagcattttacctgaaattacaaattttagcagtgtacattttgtgaaaattagcaatacaatcaaaataaacttgtaatttcaaacaatgtttacagaaagaaaattataagggttgccaccaatcatagttgatagattatttagttgataaatttttggttgaaagcattttaaacacataaggtttagtatatttgaaatttgcaagttgataggtgctaattggcacactctaattagtacactagaatatagcagatcttggtgctaaaaagaaatcaaacagtttttttttttaaaaaaagtacgtttagttgaaatgccacaaaaggtaagatttgtggaaacatttggaagatttaaagttgttggaacaactaaaaaatacagttaagttgttggtaacaatatttgagtacatcttttagttttatcccaacaaatattcgattacaatcgcttaattatttgaacattacatccataaggcgtacagaaaacacaggacacgaacaagggatttggatccggtgcagttggtagtgtgactgcaacttatgcagtccactatcagctgttagatccggatccaagggctaacatgcgtccgggtactgtagataactgtagcaacattgtttagtactgcttttacattcactgtagctaaggatctagtccgttcatcaacaaaatagatggctccttttgcttgcagtagcttaacttgcagtccatatacaaactgcatgcgatcccaattcacgaagaagatatactaacagacttgccgatcgattcgatgagcatatacggttgacttgacttagcctataaccccggtggatcgaacaacgggttactacacattattggaggaaaagaaagttcaaaacggaattgaaacgacaggtgatcgcacacacatacatatatgacccaaacaggcctggtgatcatcgacgtggcaattaatcgaggaccgcttgaaggacgtcgagcaccggcgatgccagcccgccggttgctaggtcaatcgctatcatgaagcttttcttgaggagaaacttgctgacgctagtgctgcggctccgctcaacaacagcagtagtgttccgagcatcactggtagtttggttggcaccgctgctggtgttgccggtgccctggccacggctgctactgttgttctggttggtggtgctgccgctaccctgaccgacaccgcttggcgcgccagagacgcacccgatatgtagccgataagacggagacgtacaagggccacagatgtagtgccacacgggcaaacgttcagggcaagcattgcagtgccctgaagaaggtaccatgttgaggtcgtggtgtgggtgaagcgggctgcggatcgtctgagggagcaacgtgcacagggggtgcacgtcgaacttgcactggatgcagcggtacacgaaatttcctgggggacaatgctccatgcagaggtcacatacccatcctttattctcaggaggcatgcggcagagcgtgagggtgtgccacgggtgggcgaagaaggagatggtctccttgaagtagtcggcgcacgcctcatggatgtcgaagtcgcaggcgttgcagcggtagccgacgaggccggagagcttggcttcgcagatgtcgcagacatggcgcgaggcgctgctgtacggggtcttgagaaggcggtgttgtggatgggcgaagtgtgttatgtgggcatcagttgccatgtctttggctacgctcagaacgcccaatctctctcttggcctagtttttggctacagtactgtgttctactacttagtatttctatagatcgatcagactactccacggttagtgtctgcctgtctggcttcggcgtgcctctaggcgctcagcatacatttataccatcttcacaggctcacagtctactgcagtaattaatgatgtggtgttgtttgactcagtgcccatttctgtatggaaaaaagtccaaattacacccgctaaattattagacgagtgcaaattaacctcctagacacaaaaatcatacatttttcactctcaactattacaccctctaaattattggatgagtgcaaattaacctctagacacgaaaatcatacatttttcactctcaactataaatattttcatgaacgccatattaatattaatattgaatttttttattgaattaaaatccccttaacacaatccaaaatagttttggtcctatattatgacagctcaatcaataattttcataataaatcagtggaacccacctgtaagaagagatggacgggtcctaccaattttttttttaaaaaatattgactagtctatcacataagagcaaaaccaatctaaagtctaggtggtaattcttactcactcactagtttggaggtctaattcaaactttttttcctttccctaatccctagtaccaattgtttcagcgtattatatagtaatatgaccattgacaggtcgttcgtctttatgataaagagcattgcaatagaaaaaatagtcttatatataaacttcttccttataatgatttcaacattttatttaattagtcgcgagttataaaaaaaaaatcaagattcgttcataacgtggcacaatcaacatttttataagaaatttgtatgtaaccaactccactaaaaaaaattaccgcatattctctctctctctctaaacttctgtctttttgagcgggtgtgctgggagcctgggatggccaaactggagcctgcagtttcaagataagcttcgctcgtgtgatctatggtgcatgtttattatgcttttttttacaaacacacgtttactcacccttataaacacacgtataccatatttctacgtgcatatccgaaaaactggaccgacacatatttagattgatgaagttatcannnnnnnnnnnnnnnnnnnnnnnacgtcgcctatcactgaaaaaataaataaccataaatgcgagcatccgtgtcaagtctaggattttgaaatcgggtagattgattctaccaaaggaacctaactaaatgagctatgctcacttcgttaaactggccaattattttttttaacgaaccagcaccagataataccgacatattatatagagtaagagtaaaactatttacaagcatgtttctcttacgcgagttgtgctagttaattagctaggcgaaaacaagctaagggtgtgttctaaaccagggataaaaacaactcattagctgcacataaagcgagaaacgtgatttgtatataatttgagtaataattatttaaaaataaaaaatttatctatcttttttaaaataacctttatacataaattttttgtacgaagtctgtcatttaacattttgaaaaatatgctcatgaaaatcaaggaaatagccaagctgattctaacggggcagtatactacctattgagaatcatctgtgtcatgcatggagatcgtcacactggtcaataaattaacatgcatcaacatacatatagtcatcacattcccataagacaagttgtacattgatcactgtattgttgcaatatccctccacgatcaaattaaggcttactttgggcttggtcgctccaatcaattaagagattgactctgagattgatgatatacaatgttcaattgcgagattagctatcgagactaacgtatatcgatggtgatacttggaaaaagtctatcagtccggcgactataaccacccttctattacatgtgtttacacgttgtttacatcaattcgcttaattttataataactactccgtattaacaatgtgaataagtatgggtagaatataattgcatgaaggaacattaacaaatttatcataatttgtaactaagaatattatcataacaataaataatttagcatacattaccgtgacatttaccacaatctgttgaatttctaaatgttcatttgaagtcatattgtaaatatgttgtaatatgaaaagcccaacccatcttttggttgaacgaaacattgagtgcaatggctacagttatggtttttattcatcttttgtgccgctgctttgtgctccctatgtgcgcaggcgcagccataaccgccttcgctgctgcttgagctccgaccttggctgtgtttagatcgtgtaccaatttttttttaaaatatacagacacacatttgaagtattgaacgtagattaataataaaataaattacagattccgcatgtaaactgtgagacgaatttgaaaagcctaattaatctgtcattagcaaatgtttactgtagcatcatattgtcaaatcatagcgtaattagactcaaaagattcgtcttgcaatttacagtcagactgtgcaattgatttttttcgtccacatttgatgctctatacatgtgtccaaatatttgatgtgatggaaaagttggaagtttgaagaaaaaaattggaatctaaacacggcccttgttgccatctccccggctgttgcatgaccggatgaaccccttatcccctcttatattcaacagtaaacgatatactactaacacatagttaattaaagaggaatatgcaattggtatcgcacatccagtataattttaatcactaactacgatttactttaaaaacctaaccatgactaaagtaccactctagtaagaaaatgggaaattcagttgtgtggtaattgcaatgtgctcaaaatagagctaacatgttaaaagagcagaataaagtcagttcgggaggattattatttctatttctcccttcttctagctactttcttcctgtaagcagaatgaaacaattagtatttgctcctcatttttttatagtcaaactaaaaattgaaatatatcgttgtgttaaaaacaatgaaaatggctggtccaacatgatagaatatattgtgttcctataagctgcaaaaacattaacacatatctaaaaaaatgcagaacaacgcttccaatttgtaaactctaaatactacgatcattattatctgctatgattcaaacatttataatttgatcttccagtttttcagaaggtaattaatttgtcatgtctaacacttcagcaacttcttaatttccaaatacctattattagcaaggagaaagaagaacagggttacctaaaaaggattaaatataatttgaaggacagatctttgcccatctctatatagtaaacagcgtgtgtgcattcatgacaacctaaactttagtactgctatataaattggcgtaaagagattccacactgaggattaaaaataattttaaggacagaggtttgtccatctctaaatacttttaaggcaagtttatgacaattcaaagatcaattaattaatttagaccagttccaatgtcgatctatataattggcaagagatatatatgaatatagtaacacctattgctccaaacaaaaatgtgaaactctgaattaaggatattatatatctcttgcccttgactaaatcataggccacgatcagtgagctagctagtgagccagtgagcgtacacgtcgaatcattttttttttataatgaaacaaattttgacctttattttgaagaagctataaccattatgtcggatcgattagtagtgcacgtatatatgctcacctgtcaaatcttgatttggtaagtaacaaaaacacataaacataaattaatatgtcaattagcaactattcgcaataattaacctattggcttagctaggggacagaaagtggtggagctagaaaatttataaatcctggacaagcctaactaaaacggtaaaatcactaccacttatttaatgtttatatgctcatttcactatcaattgaagacacaacaattttctaacaaaaaaaacagttcaatatgcatgtaaaatttcactatagcttgaaaagcaagatgattttattataaaatagacgattcatatgcatgctagttgagtaggtcacgtcctccattacgagacaggcaaatcaacaacggtgtttaggccctaattgtatgattaatgaaaagtcagcctgctcaacttgtccggaagtcaacgaatcgatggattttaaagtagataaataactccatctcgatgggtcagcatgcgcagcccgggcaactgcccatgttggccaggtagttaattaatctgttgctggacagacaatcatcatgggcaatttggcagttgacaattaacaatgcccactagcattctactcctaattatatagcctacttgtctctcccattgcggattttgctcaaaagtactccctccgtctaaaaaaagccaaaccctgagtttccgtgccaacgtttgactgcccgtcttatttgaaatttttttataattagtattttcattgttgttagatgataaaacatgattaatactttatgcgtgacttatctttttaattttttcttaattttttcaaataagacgaacgatcaaatgttgtacacggaaaccatggtttgtctttttttggatggagggagtatgcatctatgagcaagttcaatagtatagtccaccactagctccaatttatctatagccgatctaatagccaattcatacaatagttgcttactatactattaacatatggtcccacctgtcatacacacattacatcttggagtccgtgctgtagctggctacagatctgtagcccgctgctcttctctctcatcttttatctcattaaaatatgtttataactggctagtagcccgctattgtacgtgctctaaaaagactcttcacagtagcaagctagcatagacatcttgtgtcgttcttctccaatcctaggttatacatacctttggttcgtcttcaaggctcttaattggtcgttggttccgcgcgtctttgagacaaagttaggtaaaatttttcacactttgcatccaaattagtttgtttatatagtaatgtgtcggtgatatgggaccgggagtattgcgcccggaggcttgaggcagatggaatcgcccacgtggcctggcaccttcggggacgtcgggcccgagggtgaggtgtccgccctcctcctgatttccccaagggggggtcgggttgctcctgccccggccccgagggacgaggtgccccgaccccctgtggggtttgcactatgtacataggttgggtgaacacggtagggctcacctaaccgcatttattgcggtctggtcaagcgtgtcacgctgcatgcagcgcaatgcagcgcgctcttttatccggtctgtgaccagtcacagaccggtcggatcaacggttaggtggcgactggcggtctgacgcacgcctcgccccgtcccgtcaagacgagagcctctaggcacacgtctccagccggagctagcgtgttacctcttagagatggcacgttagccctggttagatgaataccaggcttcatcccaaccattacaggcaagatgctacaaaaagaagggtgatcatgcagatcgctgaactgacgcatagaggacaagaatgaccgatctgtgaccggtctgacactggtcgcgtcagcaacagacagccacgatcccacgttgcgcctgtctccgccgggagtggaggtaggtgtgggctgtcccatcgaagtgtcattcgggcggcaaccataccaacctccgtccataaagagaagaaaagtccagtttggaagggagagggtacatgtggtatccccttaagatataaaaggaggaccatgcccacaaagagaggggactggattttcccgggagaggagagggctggttgatattttgtaacttgctcttacacagatccacaaaaaacacaggagtagggtattacgcttcccagcggcccgaacctgtatacatcgtccgtgtctcgcgtttcttcctggcacgcgatctttccacatacagagagagcttgagatctcaccctaagcccccggccgaactggcaaaggggggcctgcgcggtctcccggtgaggagccacgagctccgtcatctggcgcgccaggtagggggctcagcgtgtgttttctgagctctcatactcttccgtgtgcgccaagtttcccttgttcagcctaatggccgagcaagcaaaggcgcacgacctctctccgagtgtgagcggcgacgacggggagccaaacccgcgccatcgagctcgtactcccccaccttctccgcgccaaagtcctaagcggggggaggcgctcgagagggttgaaaaacccacagcatcaccagtcgcaggtgatgcaggagagcggcgagacggggagcgtcgcctcctcgtctacggtgacggcagcacgccccagggagcgcttcaggctgctggcgcgctcctacgtcacccgcccgtcgtccctgacccggagtctccagcccagcgatggctggacgacgtggccaacttggtcatgacggcacagcagcgcctgggtgctggtggacggtccgccaccaccaggacctccggcgccgccacctccggctctgtgtcatcaaggcgaagggcgcggcgagcggcggctgctgcacgccattcggctaccactccctcgtcggcgcctccgactcgggaggatcagcatgaagagccggatgcccgcctcgacatcgagcgccgacgtagtgatcggcgtgctccccgcgcaacggagggtgcctcttcgtccagggtgtcacctcgacatggacgtgaggatcagccctccgtgcccccggttggtggtgttggctgtagagcctttgtggcgagtcttcggaatgtccgttggcccccaaggttccggcccaccatcaccgagaagtatgatgggagcgtcaaccccaccgagtttctccaggtctatacgaccgggatcgaggccgctgggggagacgacagggtcatggcgaatttctttcccatggccctgaagggacaggcgcggggttggctaatgaacctgccgcccgcgtcggtccactcctgggaggatttgtgccagcagttcaccatgaactttcaaggcacctatccacgcccaggtgaagaagcggacttgcacgcagtacagcgaggggatgatgaatcccttcgctcgtacattcagcgtttctgccaagtccgcaatactataccttgcatccctgcacacgcggtgatctacgcgttcagggggggtgtgcggcacaaccgcatgctcgaaaagattgcctccaaagagccccagactaccgcagaactttttcagctcgcggaccgagtggctcgtaaggaggaggcctggacctggaacccctccggttccggtgtggcagcttcggccgcccccggatccgccgctcagacagggcggcgtgacaggaggaggaagaaaaggtcggtccattccggcgacgagggtcacgtcctcgccgtcgagggcgctccgcgggccacccgaaaggggaggcctgcgagcgacaaaaagaaagaggctggtactcccagcagggagcgcccagccagcaagtggtgctccgtccacaacacctccctccacgatctcgcggactgtcgcgcagtcaaaaacttggctgagcgaacgaggaagtgggaggaggacaggaggcaggaacgccgtgagggcaagtccgcggcagttccctccggtaaacggcgaagtgaggccaaacagaaggcccccgccgttgacatcgatgacggtgatgatgacctaggtttccaagaacctggggccaccattgccactgtcgacgggggagcgtgtgctcgcgtttctcgccggagtttcaaggccatgaggcgagagcttctcgccgcggcccctactcatgaggcgacgcgtcgggcgcggtggtcggaggtggccctcacctttgaccagaccgaccacccaccgtgcgttgcccggggagggcagattgcgatggtggtttctcccaccatctgcaatgtgaagttggggcgtgtcctcatagat

SEQ ID NO: 13135 - DNA, 5597 bp, Oryza sativa
  unsure (1)..(5597): unsure at all n locations
ccatgaggcgagagcttctcgccgcggcccctactcatgaggcgacgcgtcgggcgcggtggtcggaggtggccctcacctttgaccagaccgaccacccaccgtgcgttgcccggggagggcagattgcgatggtggtttctcccaccatctgcaatgtgaagttggggcgtgtcctcatagatggaggagcggctctcaacatcctttcccccgcggcctttgatgctatcaaggccccggggatggtgctccagccgtctcaaccgatcatcggtgtgacgccggggcacacatggccgttaggtcacatcgacctaccggtcacctttggtggatcagccaacttccgcacggagcgggtgaacttcgatgtggcggacctcagtctgccctacaacgcggtcctggggaggcccgcgttggtgaagtttatggcggcggtccactacgcctacctccagatgaagatgccgggccccggtggccccatctctgtccgtggcgaccttaaagtcgcgctcgcttgcatggagcagtgcgcggaccacctcgctgctgcgaccaagcccgagggtggtgacgagaggcttggcacctctgcccccaccgccccgaggcagcggattgccacatgcgacgaggtcccggtcaaggaggttgccttgggcgacggcccatccaagaccacacggatcggtggtcttctggatggcaaataggaagacgcgctcgtctccttcctgcgggcaaacgctgacgtcttcgcatggagaccagcggacatgcccggggtccccagggaggtgattgagcaccgtctcgccgtgcggccgggcgcaaggccggtccggcagaaagtgcggcggcaggccccggaacgtcaagccttcatccgcgaggaggtggcgaggcttctggaggccggattcatccgtgaagtcatccatccggagtggctggcgaacccggtggtcgttcccaaggcgaacggcaagcttcggatgtgcatcgactacaccgaccttaacaaggcatgtcctaaggatccttaccccctgcctcgcatagatcagatcgtcgactccactgcggggtgcgaccttttgtgttttctagatgcatactctggttaccatcagattcgcatggctagggaggatgaggagaaaactgcgttcattacccccgtaggaacctattgttttacatcaatgcccttcgggttaaagaatgcaggtcctacttttcaacgtactactcgaatttctttgggtagccaaataggacgtaatgttgaggcttatgtcgatgacttggttgtaaaaacgcgcaaccaagaaactttactttcagatctagcggaaacttttgagaacctccgctccgcccgcataaagctgaaccccgataagtgtgtgtttggtgtacctgcgggcaagcttctcgggttcttggtctctgcccgaggcattgaggccaaccccgagaagattcgagctatcgagcggatgcgcccccccagcaaacttagggatgtgcaatgcgtcaccggttgcatggccgccctaagtcgtttcatatcaaggctgggagagaaggcgctacccttgtttaagctcctcaagcgcacggggccgtttacttggacggaggaagctgaacatgccctcactcagttaaaggcatatctcagctctcccccggttctagtcgccccggagccaaatgagcccctgctactttacttagcggcgaccccccaagtagttagtgcagcattggttgtggagcgcgatgaagacaatcctcatttcgtgcacccccattctgtgctaacttggcccgggagcgagcggggaggagaggcccccgagtcggacggtggcctacggcccctgacgaccggagccggccctctgcccgcttgtcagacggtgctaggtgcccccgaccctcaggagggccccaaggccactgcgggaaggccgcacttaacgccctttgaccccgaggctaaccctgtgctgactcgacccgggaaagagcagggagaagaggccccccgagccgaacggaggccagaggcccctgacgaccggagttggccctttgcccgcttgtccgacgatgccaggagccccccgacccccaagacggccccgaggccactgagggaaggcccgccctttcatcctccgaccccaaggtcatcggcacaaaaaacaagtgcgccccgaaaggccacttgaacgaagaacgccccggngatacggcccctagcagagaggatcggccccaccgaagggtgcagcggcctgtctactttgntagtgaggccctccgggacgctaagacccgataccctcaggcccagaagatgctttacgctattctgatggcctcgaaggaaactgcgccattattttcaggcacatagggtcactgtggttacgtcttaccccctcggtcaaatcttgcatgatcgagagggtacagggcgggtggtaaaatgggcaatcgagctttctgaattcgatctgcactttgaaccacgccacgctatcaagagccaggccctcgccgattttgtggcagagtggaccccggctccagagaccgtctcaatccccgaggccagcacgaacccctcgcagttgcctcacaccacccactgggtaatgcagttcgatggttctctgtccctccagggtgccggtgcgggggtcacgttgacctccccgaccggagacgtccttagatatctggtccgcctcgactttcgagcgaccaataatatggcagagtacgagggactccttgccggactcagggtggcagccggactggggatccgccgtctcctagtgttaggcgattcccagctggtcgttaaccaggtctgtaaggagtaccggtgctctgacccgcaaatggacgcctatgtacgccaagtgcggcgtatggagcgccattttgacgggatagagcttcggcatgtgcccagacgggataacatgatagccgacgaactctcacggctcgcgtcctcgcgagcccagaccccaccgggcgcctttgaagaaaggcttacccagccgtcggcgcgacccgaccccttaggggagacggatgcgcctgaccggcccccgaggcccgtcggagtccaggcctcgggacccgaagggagcgctccaagctcccttagattgattgcttggatctctgagatccaaacataccttacagataagactctacctgaggaccgcgaagggagtgaacgcgtacaacgcatttccaaacgctatgtgctggtagaagggaccctctatcggcgcgcggctaacggaatcctcctgaagtgcattcctcaggaacaaggcgttgagcttcttgctgacatccatgagggcgagtgcggagcccattccgcctcgcgcaccctggttggcaaggcctttcgtcaaggattttattggccgacagctctcaatgatgcagtcgatctggtccggcgatgcagagcgtgtcagttccacgccaagcaaatccatcagccggcccaggccctgcagatcataccactgtcatggccatttgctgtctgggggcttgatatcctgggaccgttcaaacgggccccgggcaggtttgagtatctgtatgttgcgatcgacaagttcactaagtggcccgaggcttatccggttgtcaagatcgataagcactctgctcttaaattcattaagggcatcacggcccgttttggagtgcctaaccgtattattacggataatggcacccaattcactagtgaactcttcggcgactactgcgaagacatgggcatcaagctctgcttcgcctcacctgcccaccccagaagcaatggccaagtggagcgcgccaatgcagaaatcctcaaaggccttaaaaccaagaccttcaatattctcaagaagcacggcgattcatggatcgaggagttgccagcggtgctctgggcaaaccgaaccacaccaagccgagcgaccggggaaacgcctttcttcctcgtctacggcgcagaagcggttctcccatccgagctcaccctgaggtctcctcgggccaccatgtactgcgaggctgatcaagatcagcttcgtagagatgacctcgactacttggaagagcgaaggcggcgcgcggcccttcgagccgcgcgctaccagcagagcctgcggcgctaccatcagcgccacgtccgggcccgatcactctgcgtcgacgacctcgtcctacgccgcgtccaaacgcgtgctggactgagcaagctctcaccaatgtgggagggtctgtatcgagtgatcggcgtcccccggccaggctccgtacggctggccacgggcgacggcactgagctgccaaacccgtggaacatcgaacaccttcgtcgcttctacccctgaggggggggggggtcgggtgtcaggtttcgggctcgggctaaccccgcacccccctcgggtgtgcagggttagccgggggctaccacacatgcacagccttacttttcttatttcagcatttcaataaaagcagtttcaatttcctaaaggttgtgtctgtgccgtttttccttctgaagaatcttaacttgaaataaggtcactcgtgctcaaccttgccctcgggggctcggttcggtcagctaaaatcgccaagcggggcccagaaccgaaccgtgccccggggggtggtgaactccgggggggaatcggcaaaaacccacaattgggtcacccataaccctcggtccccatgttcccggcctggccagtctcgacatgtggatctccccaggcactagccccgacccgagccatttgaggatcgggacttgagcacgagcccttaaatcaagctaaaatgcaaaaggaccacggcacaaatcatcctcaactcatatgcatagaaaaataaagttaacatagaaatttttcatcatttttgattgcagattaagttgatctatacaaaaagaagaaagaaaaagaaaaaattggagattggcgggggcctgggggctcattccaatgcgcccgggtcgccggcctcgtcgccaccgtcgtccttaccgctggcgtcgccctcctcgtcggagctgggggcgaacgcgagccgaggggccgacccctcgaagctttggacgatgtggttggcggcatcccggacccgcgcacgcgcatcgtcctcggtcccgggagggaactcctccagcgccatccatggggagaagccggggtccctggcctggtaactcgctaacacgagttccaccgctccttgggcgaggtccctcgaggatgacttgatggtcttctcgagctcctcggggagttgttggacagcccaggccatcctcctaaggtgcggggcaaggccttccagattggtggagcgcgaaattgtctggcctttccagaggcccgcttcccgaccggcgcgatccagccgggagactgcatcccaaagcatgccgggccctatctcacccgacaagcggagggcctcggcttccccggtggatgagtccagggcgcgctgcatgt

SEQ ID NO: 13136 - DNA, 511 bp, Oryza sativa
cgcgcctgctcctcctgcgctgcctcgcggagggacaggctgtccgccagccgttgtgtcgcggcctcggactcctcaagagctcgctcccgctcagcaagcgcgtcctcgcggagccggagcgcggactcctcttcggcgcaggcggcctcgtgcgccgccagcgtcgcctcacggatagcggcggcggcctcgcggtccgccaagctggtctccacggcgccggcatgatcttccagcgccatggcacgggcttcaagggcctcttcgcgccgccgggacgccgcttcagcctccgttgctcgctgctctcgggcagcggcggcgtcaaggaccccctgggcggcgtcgagctttttctttagctccgcctcccagctcccgtgttgaaggcggagggagtcctgcgcctcaatcatcgcggtggtggcgatgagggcggcctctcgctcctcctccacctctcgggcgatctccgccagcgccgccttgcgggcttcaagctccgaga

SEQ ID NO: 13137 - DNA, 1852 bp, Oryza sativa
gactctagaggatcccctgagaaattagttggatgcaatccaaaggttgttcagttcgaggatgtcaacaattcttagctagcagttgttgatggaggagtaacatacaatggcatcatcgatgcaatgggagaggatatcattgtgcatatcattttcaaactttctcttcggcattgcttactcaagttctaaccaaattatttgttttgttgaatgattgtaggttggaccgtaggaagagcaagaagattacggactggcatgctcatcatctccatcttattgagcggtgggacaacatagcagctaacgtagtgcctcacggagtggagcacaacaagacatacttcgacgagtacctagcttggctcctgaggaactaccgcctttttcttcggccggcatggactctagctgacatagctacagatcccgaggatgttgaggagatgaacgagtatgacacccacactcgagcaggggcgacggtcgagtacgggcctgtacgtgaccgagtggtaagtattaaggctcagagttgtcatttcacatacacctacatgttctcacaatattaaatccacttgcaggcacgtgagctgatgaggtccgtgaacgacgcgggtgttgcccttggcacacctgctgggtcagagaatgaagttgggatacttcggagcgcacttcaggtaattaaccaattagttcaatccatgaatcatttcacttgcctctaacttatttgttttgttcttgcagaggctaaaacaacgaagtcggatgttagcggcaagacttggttgtaggtccacaaacgcagtcgacccacaaccaagactaacgcggacacaggccggagaaacaagtcaacaaagagctgaagaggaagggtaggaagaacatgatgaaggggaggaagaacatgaggaaggggaagaaggagatggacagagtgacgaagaggaagaggaacaacccgaagaaatcgggtcatctcagcttgcaggtgccccgcagccatcgcaaccttcccaaggtcgcccgcatagaaagagagcaccggtggaccggtacacaccttccactagtggccggaggggtcggcactagtggattactttgtacttaacactctaagcagcgttagacttatatcaaactttagatgatggttgatggatgtgttgaactctatattttgtgatggttgatggatgtgttgaactctaaatgctgtgatggttgatggatgttcagttgctgtgatgtcttaaatactatgtggctgtcaattttatgatgctgtcaatttctgtgtggctggctgtgctatgccagccactgcttgacctcagcgccaaatagaatggcgctgagattgtgcaggtcagcgccagagcagttggcgctgaggtgcacaagatcagcgccaaggtctttggcgctgagatgcagcccactcagcgacccagccatccctcgggtggcaacctcagcgccaaatcggctggcgctgagattcagcccccccaaacgtcagcagacggccatacaccgaaggaaacggccgtcaagtactcagcgccgatgcggttggcgctgagttgttcaacctcagcaccgtcggccttggcgctgaggtcggggtccagatctggtgatagtttttgccagggaccaaatttgcaaatagttttcaaaaagggccaaattgtcaaattttcggttgatcactgtattgttgcaatatccctccacgatcaaaggcttactttgggctcggtcgctccaatcaattaagagattgactctgaggttgatgatatacaatgttcaattgcgagattag

SEQ ID NO: 13138 - DNA, 626 bp, Oryza sativa
tttacggggtgcgcaagatcaaggagagatggtgatgcaggtgtttatcctggttcaggccctcgagaagaggtaataccctacgtccagtgtgtttttctctgtatttgggtggaaaaatgaactcagaagccaagagagaagaaggtagaagtctcggaaatcctccggcctagggaccccttccccctcttatataggatgaggggggagggttacaaggaaagtatctagttgattgcaactagatcctcctattccatctataaagatatgcatgatacccgagatttatatcttatcccggaaatctctctttctttatttacaagtatgccgcaggggcctagcacacttggcccaccccatgcgatgcggcccaaggtttgttgttgggtacctgggtatcgtgtaccccacagctgccacggcacacgcgatgggttgctgcttgtctgtgctgagagttctgtagttcggaaaaacacccccaggcagaaaaactgggccctgagtttgatgctcagctatcgtgccgtcaaaaaacccccccccatagatttgatcatgtaggtcaaaggtattgaccagcattcccgattggttgaccaaagcatgatgaacgg

SEQ ID NO: 13139 - DNA, 512 bp, Oryza sativa
tgctcccgggccaagtcggcacagagtgggggtgcgcgtaatgagaattgtcctcatcgcgctccacaaccaacgctgcactaactacttggggggtcgctgctaagtaaagtagcagggactcatttggctccggggcgactagaaccggaggagagctgaaatacgccttcaactcccgagggcattttcagcttccttcgtccaagtaaacggccccgagcgcttgaggagcttaaataagggtagcgccttctctcccagcctcgatataaaacgacttagggcggccatgcaaccagtgacgcactgcacatccctaagtttgctgggggggcgcatccgctctatagctcgtatcttctcggggttggcctcaatgcctcgggcagagaccaagaacccgagaagcttgcccgcaggcacaccaaacacgcacttatcggggttcagttttatgcgggcggagcggagattctcaaaagtttccgctagatctaaaagtaaagttt

SEQ ID NO: 13140 - DNA, 653 bp, Oryza sativa
actgcagaaatgtacacctcagatgttagtgttatggcatggagcataacttggaaaggtaagtgttcatataactacatttttttataggaactctcatataatatcatgagcattgccactatctgaaaacgaggcgacagtgtgaaattttgcttaccaggaggctcagcaaggcggaggtacaggttctcaccaaggctggccttcttctctgagtcgacaagctcccctgtccaaaccaagcatcttgacgggtcagccatggtgccgccactgctcaagttggcgtaagcatatgccttgcaagagcagttgctgctgcactcggccgcgcactggtcgaagctcctgttccggatctgcaagaacttgtcggggaccttcatgtcaggcaatgacacgaagcggtgaccgccctctccgcatctcagctcttcctttctccggcatcctgattgcgagatgctgggatctacaggctcgaacccatcgaggcaccggcacgccgggacggcccccgtgaagtcgcagtagccaaacgggccgcacgagccatagacctcgcagctgccggcggcggggcgctggaagatcaacatccatgacgacgagctgttgtcccagctcaggaacatcatcgtgcccgtgct

SEQ ID NO: 13141 - DNA, 818 bp, Oryza sativa
taggtattaaaaccaattatgatttttatcccaagttatatatatatttttttgaaggaaaggcaagtaatcgtagtctttactgctctcttttagcttacctagttttgagcacagtggtttcaattctccactctcttttttcttaatcgcctagtgcagaaacttccaactcaccaataattgagcgaaattgcttatggaagaatttccttttttttttttttgtaaaccattgaagatgaaccatacacccacaaagcaatcatattcctaggttcttgcacaattgatcaagtggtgaattctacagccagctatatctgaaatttaaacatctaacgtccttgtagtgtggtaagacttgtactgttcacagacttgttggcatcctctcttgccccttctgccatgcaattccttggcacaaaatatgcaggttgcttagaagtaggaagtgttgtggcttcattctcgaacatggccacaactgatgacatgagtggtctagcatttgggtcttcctgaacgcataacagtcctacatggatacagagcaaaaactcattaagcgaatagcactccagaataggggatccacaaatgtcgctgcctttccatctttccacaagctccatgcctgaacaaagagaggagatatcctaatcagtgctaaatcctagctgttgaaattttgttcatctcaatatttcatagaacttacacaggctataaggtttggaaaatccattataagatgagttgagctgatcttacaaccacttataagttccaagactaaaacaccaaagctatat

SEQ ID NO: 13142 - DNA, 11911 bp, Oryza sativa
aaggttgatgtggcaatgctgacaggtggggcccacgttgactcacccgccacgtcagacaaaaccagggtcaaaaccaccaaaggaccttaagcgaacggttttgttagttgagggacctccggtatctggttttgcggttgggggacgattttgtaactcgatgacaggttgagggaccttcggtgtacttttccctttcagaattggaccaaagtgacaacagggtccagggcacccaacaaccccggacacattaagttgacaagacaatcacagcagttaaatgacctcggagctacatcagtcacacaattcacaaactacattacttgtagaagttccagtccttcagataacaccgggtatgagcatgaacacaagaacggccaagattcagcaccatgaaccttgccgtcaatccctccacctgtgaccacagcttgggttgcagcagatgaagtacagtgtcaggcctttctcccccttagttggagcctgcaagttcaacgggaaaaagagtgactgattgcatccacagcttgtggcagatactaggattctgaacagagttgtaatatgtcacaatcaccaccactacgagaaaagccaattatgtaatgaaacggtttcctgaaccctgtggatacgaagcgatacatactatactaaaaactttaatatgctgacagaaatgtagatttgtatgttcatgctttcatattgctattctattcttgtatcagtgactgtatagaactatagatgatacagtagtcacatcgtatatagcaagaatcgcatagagaacaataagtaaacaacacaaatacactgacctgaaaaaaagcagcctctggatggccacagttgtaacatttaatacttctggtgcgaggcagggtgggatcagttgctgcatcttttaggatatctttgggttccccagcaggtttacggagaacccttttgtacacacaagtgtcagtggcaggctcctgcttatatgaacgatccaaataaatggaaatcattagtcaacctacaagaaaacttacacacaaattttttaaaaatgtcggaactacgaaaactataaatgcaatatagctgcaaagtatgtaagccttgagaaaaactcagcaatcacttcaataaacagaaaaaaaagagaggacattttgtggaagaatgcctaaaacaccaaggaaatctgtcttatttctatcctgattacattggttcttaatgaagttaatatgtttcagaagctacaacaagggacatatcaaacttcttttaagggacacttagttgtgatttgttacattgatacctcaggtaggttgttgcagtgtgcataattctggcatatgtttgtctctttccaatgagtaacatcttaagcatagtttgtgattacaagacaagttcctgattttctgagggcattgtatgccagataagctagaaacacttctcaaggaaagagagctaaagcccttgtaatatacaggctctatgtgggagtagatcctactttcaacagttctctgaccacagattttcagcagaaagttcatctcaaacggctagtgggaagccacttatgtaaccttaatccttaacttgaaagggaaaattggtttcataccacccgaaatatttcccttttagtcttaccaccaaaattttggggcatgctttgataccacctaataagattccgtttctttttttaaccaccagcacccattgccattcaatttttttttaacctctcctgctccgtatcgcccattacaccctcatatcccgcggtcccattcatccatcacacctctgccttctgcgctccccatactcccaactcccaagtcagcaccttccattagttgaaggaggcaactgagtttgtgaaatttattgctgaatccaccaaggatatctccttgtatatgctatttcaatgctacctcaaaatcttagtagtattaaacaaaataggcgatacttgcacggtacggaaccagccaattttgctaacatagaagccccaaatttggacaaatatgtcggcagtaatgacaaagagattctccgcctaacctttatgtatgagatcgagaacaaagcatgataagctgataactacctacaaaggaatattagccgtctaccaattcatcataaactcgccaagtcccaaccagaacccctctactctatcaatcgaacaaagcaagcatcaataacattatgggacatcaaattctttcctcagcgaaatctcccgcatgcagcaaccgtaaaaacgtgcgcaccaaacaatcataaatccatcccaaataataaagaaaaaagaaattacgatctcaacaatgcaccattaaacctagaaacctccatatacatacaccacatcactaaacccagcctaaaccctagatcaccattccccaaaatccccaatccaacctagggtcccaagagtttatttaccacacccaatccaaaaccatattaatctgagccgatgaacaaggcaaatccacctggtgctcgcaggaattgcaggcgtagagcagggtgtgcgtctccttgtcctcccgcgggtagagcatgttgctgctgcatatccaaccaaaaaaacacacaaaaaatcaaacctccaatcgaatcaaatctcggactacgaatcacaagccaagagattcctccgcctcaccattcgccgcagaacttgagggcgctcatggccatcgatggcttcctcctcctctccaattcactcgccgcagccgccgccgccttctcttctgcgctctcggctacttgtactcccgagatgcggcgccgcctggcaagcgggccccaggatcggtgtccccacacgtcagcgataagtgagggtacaggatacagtacgagatgggaaagggggtacacgtggcaccacacggtgggtcacatgccccccaacgccgcatcggatccgaccacctcctgggctcctctctccactaccaacctctcgcggagacccaaaccctagctcccaaatcccgaccagccgaagcatttccaacggaattcctctgttcggctcctcctcggggttcaaatcgagcttgaatttgtggttttttttggggagggttttttttttctttttggtgttgtttttggatgcgagtgtggcttggcagggttggtggtggtgatgccatgatgcacatgctggtggcccccgatggaggcggcggaggggagatgccgccgccgtacgggggagccgcggcggcgccgccgccgccgaggagcaggagctggagctccaccgcgacaacgccgacgacggcctcgacggccacgtgcggtgagagcttctctctgtgtgtgtgtggcaagtcacttgtgttcatgagttcatcggcggtgaggaggtgggcgaggtctcgtagcgtctcgcctttgcgtggtattcggggttcatccattctggcgtgctctggtttaagctcagaagattttgtttgtcctgttgcacgagtgaattttagtaaaagaaccttgggctttccatttgtcgtgttgatagttttactgtgtttggccaggtgcttgaggtgtggtatatccggcaacgcgacgccccatatgcgccgcggccctgatggcccaagaactctctgtaatgcgtgcggcattgcgtacagaaaggtatggctgcgctctaattttcgatacagaataccgatgagcctgttgtgtgataccatgttcagctataattcatttccgaggaaattttatagctgtctcttggccattttcctcctgttttggtgcattgatgataatctaaaatactaaatgtgtctatttctgtttatttactcaagtaatagtatgattggttttctaggggaaaatgagacgaatgatagaagctgaaccacctatagatgaagctgcacttgctaagctggttcctgaggtaggcatggaatttgagagtgaggacaaggcctatgaattctacaacaaatatgctggacatgttggttttagtgttcggaaaagtacatcacacaaatcttccggaaatattaccaaagtaaggacttttgtttgctcaagggaaggttacaacagggacaaaaaatcattggaagcaaagaagccaaggctggatacaagaattggttgtccagcgcggttgattattaaagtcacaccagagagtaaatacagagtcactgacttcaaagcggaccacaatcatcagctggcccctccttcgacaatgcatatgttaaggtcacagaggatattgacagaacttcagtctggggaagcagaattgtcagatgattctgtcatgacacctacaacaaaagcaaccggtgatcttgttgtgagacaaattggtttccttcgaagtatctctctcctcccagcagattataagaattatctccgttcaaagcgtatgaaggctatgcaactcggtgatggtggcgcaatattgaaatatttgcagacaatgcaaatggaaaatcctgctttcttttacaccatgcagattgatgaagacgacaagctaaccaacttcttttgggctgacccaaaatctagagaagacttcaactactttggtgatgtcctctgtctagacacaacttacaaaataaatggatatggcagaccattgtcattattcctcggagtgaatcatcacaaacaaacaattgtttttggtgcagctatgctttatgatgaatcatttgagtcatataggtggctgtttgagagttttaagattgctatgcatggaaaacaaccagcggtagctttagtagatcaatctattccacttgctagtgcaatggcagcagcatggccaaatactactcaaagaacttgtgcttggcatgtatatcagaactctcttaagcaccttaatcatgttttccaaggttcaaaaacatttgcaaaggattttagcagatgtgtatttggctatgaggaagaggaagaattcttgtttgcctggagaagcatgctagaaaagtatgatcttaggcataatgagtggctgtctaaattgtttgatgaaagggaaagatgggctttggcatatgagagacatatattttgtgctgacataataagtgcacttcaagctgaaagcttcagtagtgttctgaaaaagttcttgggccctcaactggatttactgtccttcttcaagcattatgaaagagccgtagatgagcaccgctatgctgagctccaagctgacttccaagctagtcaaagttatccaagaatacccccagccaagatgttaaagcaagctgcccatacatataccccagtggtgtttgagatctttcgtaaagagtttgagctgttcatggactctgttctgttcagttgtggggaagctggggcaacctctgagtacaaagtcgctccctctgaaaaacccaaggaacattttgttagatttgactcgagtgactgctcctgtatctgcacttgtaggaagtttgagtttatgggtattccatgttgccatatgttgaaggtgctcgattacagaaatatcaaagaattacctcagagatatctgttgaagcgatggagaaggactgccaagtctgcaaatgaagaaaaccaagggtatgtggcaaatggaaatggttcatcattaaattccattgtacctcctgcaaaccatcatggtctccaaggcttcagtgcaatgattcaagtaaccaatctgcaagattcattctccttgttttccccctgtatgtgctgtggctgataaagttttctatcttggttaactgcaggacactcctgtttctaatatgcatgagaattcatttcgcagaagctcatgatgcaggtatcatacatgattatgaattattaatatgccaatttgatctcttgttttgtttggactattactgagcctatctggttctatccattgcaccaaaacctagggcattgatttacaaccaaagtttcccccttctgagagatgcatgacaaattttttagggagatttagatagaatattttgtttgttgaatattgctcacttggttctggattttcctccttcgaggtacaattattaaagcagtttggcgatgacacgtggacaaacttagctctgttggatcaaacagattatttatgtgatcaatttatcatgcaggtgacttgaatctaaacattattccttctgcacggtgcctgctccacgatactggcgttgaagcagtgagaacaggccatgcggagctcccccgaataaaagtttccaacttgtaaattatgcagctgtaggaaatcccagctattgaggcgcccatcctacttaggctcttagactagattctggtatgaaatcatatgattgtgctgcccacctgcacccagggaaattttgtgcattctgtaaacagtctatttatcctagcccattcataaaagaaaaaaaaaggtgatcagatgccaatgcagagagattgctcctttgaaactttgcagggcaagcagacccatcatgatcatcaatcctaggagggtttcagttagattcagatcttggggtggtttcatttcgtttcatttcacctgcaggtgaggtgagctggacagctcatgcaataaaacgttggaagcaagacaagcccagcttggcagtgtggatctcaagcccggagagctaccggccgagctaggagctgcctttgacgctacagtggacagctgtgctttcaagcctggctttgggcgcatttgtcccatatgcacagttgcataatgcgtgcaaatgttgttcattgtcctcaatgcatcgtatatcttgggagcttcgataatgctgctaccaatgtgtccttgaaaaacacattcgaggtgctttcgtgctcgctctcttttttccaactctgtcaggtttcttttcaaacaaagttatttcagacatttttctataaaatgtctttgaaatatatacttccattcaaaggaagcctcaatgcgatcattttaacggttctaagtaaagtatcatatatttagtcttgttttgtgttacctctatggtgaagaggggcatatgtgcgctggtgcatgtgtttatcttaggccccgtttagttctctaaatttttttttccaaaaacatcacatcgaatctttaaacacatgcatgaagcattaaatatagataaattaaaaaactaattacacagttagggaggaaatcgcgagacgaatcttttgagcctaattagtccatgattagtcataagtgctacagtaatccatatgtgctaatgacggattaattaggctcaaaagattcgtatcgtggtttccatgcaagttatgaaattatttttttcattcgtgtccgaaaagccctttcgatatccggtcaaacatccgatgtgacacccaaaatttttcttttcgcgaactaaacaggccctgacttagtacctgtaaaagaaaagtcagtgttttcggcatcaacttatcgactgtaaaaataaacgatcgtgttggggccttggggattgaaaatgagatcttgaggttgaaactacacatccctggtcactttacacatccctcgtcacggtaacatctcatatccttgacaactgtaaaaatgctctctcagtaaacagtaaaattttgtgccgggcaactgtcctgatgataatgtggagcgattggctgctgtgccgtagcaatgtgtcgttcgctgttgattgctctgccgtcacgcgacgcatcaagcagctagcagagcatgtgacctgactatatgggcaacgtgctgtggctgctctctgcttttcttttcctcccctgcagccactgtactgatcgactgatatctgcttcctttgcgtgctttctccgtgtaaactcaagtaacaatgccattttttctcttcctttttttaacgaatattatgagataatgtaatatttcacattgatatagcaggaaaaagagccctaagagaccataattagaaaaagaaaaaaaacaaacagcaccacgtcacggaggaaagagtgccaatttttattcctcggtttgaaaaaatacaagagatagttcaaggagatttgtccaagtgttgcttgagtgcaaatttgacgatgcttttcagcttcagtctgaaggtgtgatgaaaattcaggagccgtcacatttgatcccggtcgttggtcggtcaatcttcgtcactgcgattcaaaacaagcaccatctgattatttctgcaatggttagtgagctaattggcatcaaaggctaaaggttaatttggatgtctcttttcatgagaagcagccaaggaaacaaagctgatttgtgcgttctctgaaaataaaaagacatgaaaaagtttgagttcaggtgcttgctccactattccctacttaactccaaagcaatgtcatgtggggagtctaatacgtgattatttcgcattaaccttaagctaagcattcttctcgccgtaatcactgacatgcagaaattcaacgtcctttcttgatggatacatcacacgaattgggtcaagtgtttgttcaagaaaaactccacatatcaagtcattttctttttctgatttagatcactgtcagtgtcaattgctagttggttagtgtttaattttgaggattacaaggggaataaatgctgaatttataccacgaatgacttgctggcagggtgtcattacttgtacccgaatttcagcaagattgtgtatttatgtgtttgtcagtaattgatttgggatgctatatgtgcatcattttcctgagtaatagtgttactagtacccaagttgttcatcattgctttatcattacttcaagtattatgaagaaacctgaataggagtagtacctgataagtatgccacccattctgttttttcctgaaactcatcattgaagcagcccctaactctgaattttcttttagacggatggtcagactaactcagaatttaatcatgatgtttaagaaaccattagctttattagtatatgtactaactcgagattatccaaacagaacaggttaagcaagcaaggaaagagagatggccccaaaatcccagataagtgacacgttttcagctttgctaatcacttctgaattctgacagggaaccaactaatcatctgatggagatggacacgaatcttaaagctcgacctgatcggattagtcgatcaaatctctggaggaaaaaagaaagaaaggtgatcagacaaatggatgatggatttgttcaatcccacgatatgcttgcaagagtacaaagcaagatacttcctaatcggagcatcaacaactttctattaaatatatgtgagaagaacactttggtcactctccatcttgtctttggcgtcggctagttaattacttttggggggcaaaatggaatcacaaatgtttttccatggaccacatgaagcacaagggtataaattttcaaatacataatatttgagggacctatttgtaattatgaattagatattatttttttttataccgcaacaaagtcaaataccagaggtgtacagttcctgtattattcagagatatgggacaagagatagagctaattaagaagttcagtcacaaggccaggctgacttgacagagggagcatacaaagcagaagactgtactgaagaatgttttaatgtgccatgcacagtatagcatgttcagattattagtttttatttgttttttcttttctttttcttgtctctttgaccattactgtgtgcagtgtgccatgctaagctcaactcctaccaattgtgtcggtttctttgttttattaatcaatcagttgcttggaatcatcagccagtgtttcattgagagatgcacccctcacatttttaatggtagatatgtactcttttcttcttgagaaactgaaccttgtgaagaagtgtgacccttattttaaccaaggaacaattggttaaatacttcaaattagttgctacatgcatgttcagattgattaaaggatttttagaagaggggggggggggggatgcagtggatgttattttctagacatagatctaattgacaaagatccaattttttctcctcataattgcctagctgtatattttgcacaatgagtccagaattgatgatcagcaatgccaccaacaaaccatgactaatcaacatctacagtactatgaggcaggtgatcaaaccctgtcctggagttgacctgctttaagaaaagctagatagggggtgaaacattgcaatcttataaacacaattagcagtaaatttatccatgcacatgcactatttgtgatgcaatactagcttacagtgtttatgataaaaattatagaccttgtatctatcaagtcaaggttgcatcttatcactgtttgttagaaccgagcacatcatgtcacctgactaggacttgacttaattttgctacgacaacgataataaagtttcatgtattatcaatttgtcatgaaaacaattgaaatttcgtgtaagcattcagtgggtcagagaaatttgtggtactgttttcttttccttaaaattaaagaaagtttccaatgttacatcacaggaacctataaacaaaaccaaagtaatggataaatcaatgtttgttagaaatcttgagccaaaatccaatgacctcatgtgaaagtgactgtgtggggtaatacatgagcctaatgttccaactactcactctattgtaccattactctgccccactgtcttttttttctctcccagtcccttcatatgatttacaaacagtactaatgcaaagacattttcattcttgagagatgttacatctgctgctaatggaggttaagatgaagatttgctataataacctagaaacaagtttgttggttctgttctaagggccatggttatgttataattattctagattaacttgattctgaaccttgttgtctgggacaagctcccttggttgcaattctcaattcctaagttgttttcaccgacagagaggtggaaaattagcatcatgttgcatcatggttatgtgagttactgtttctctcatgttttttttttgagcttcccgtactatttgcacattggattcctttttttctttcttggtcttctcgttttctcaaaaatcaatgaacatcaaatgtcggtcaacagcaagacctagatttttgggaattagttttggaaaatattgccaagagaaaattggaaaactaatccttttgcatttgttccgtactatatgcatctttttataaagaggctgagagtgttctctgtacaattctattatctttatataattaattgagtttaataaagcttcaattatcgaaacaaatctaccatacaatgcattgattaggctaatttagaagaatattagggtcacttagtcacaaataaaatgctcaaaaatcttttaacacaaggctgggctagctgtcactgtttacccctttggggcccctgttaattgtctagaacaatcggtgcatgatgcttactccaggtcagatgacctgatgtttagtgcagaaaccaagaggtgctcaattggaccaccgtttatcgtaccagcctctcttttgcctgttggaaagaagaaaagttgtggttgacactacagggatttttgggtcgagaaaataagtgtaccgatttccttcaatcctcccttgtaagttactagtagtatgttggtaggtgagtaaaaatgaaaatttctatctgttcctattatcaaattacatt

SEQ ID NO: 13143 - DNA, 22388 bp, Oryza sativa
cccttcgattactgcggtaaccttgtgcgataatcattttagttttaaaatctttacagttttcttggtaatgtaattgtttttgcggttactgcaataagcctaagtagaagtaatcctaccaaaacagtaaggaaaaccctcgcagtacgtctataatttctttgtagaattcactgttcatttcaatgtatttacccgttgtgttgaagacaagactcagctgacattatttaaaatggttgtatgtgaacaagacagccttcaagggatttggtgagtgtgaagaacactgatcactacagctaactgttagttggaatttcctgtaaactaccaagaccaaggttaaaggtcattttctttacctcaacttgtgcatgactaatgacaaaagatataaataaataaataaataatcagtgggaataattgctctgctcggtgcacgtactattcgagataaagaagacgatttggtccaacaaatccatctgttaattactccttttgggaaagctagtagtgtgcttccctttgcttttataattaatttatagtatcattgatctcaagatactgcaatttgtcagatataattgttctcaccttgattttcacctcagtagtatcaccacgaacacaagtggctctatttttaaactcgccacacacgagaaacactgccattgcaacttttataaagactctgcaacttggaaaacaaaaaacacaggggattataatttttcctctgacttgactgaactagtatacgtgcaacacgagttcaactctttttttttcctgtcagacaacagcaaggctgattatttttctttatttctgttaaaactctagaaccctaattcggtcggttaattttctgttccatgcagttgcgttgccgcgccgttttaaaatcttgaattcagaattagtccagaattttttccagggagaggattgaaaaaatggcgtcgactgatcatcaaggccaaaacgagttgccactgattggccagtcgtcgtcttgtcgagcactgatgatcaatccacaaataattgccctctcgctccatgctcgtcaacactcaacgcattgtgagatgagacccgtgaagaagtgtactccctccttttcgaaatgtttgacgccgttgactttttagcacgtgtttgaccgttcgtcttattcaaaaaatttaagtaattattaattctttttctatcatttgattcattgttaaatatatttttatgtaggcatataattttacatatttcacaaaagtttttgaataagacgaacggtcaaacatgtgctaaaaaatcaactgtgtcaaacatttcgaaacggagggagtaatatataaccttttggtatctttcgactgtgattgagtatgatattgaaatttaatatttctccaaacacaatctcccctaaatctcatattgtttttatatatagaaattttcaacaaaaaacttgagcttgttttacatggatatttcaccgattcgcatatatgaagtttcaaagaaacttgagttgacttaaagcacatttcagggaggcagttttaagaccttaaatggatattgtcctgttgctcctaaagtgccatgtaaatacttgaatacgttgatacaaaatgaacctattattcccacacacacaaaaaagtgcacctatcatctgaaaaattctactccaaatttgttttaccacccaccatcaccaaaaaaaaaaaaaaccgtttcaccaactgaggaattatacataaccgattttgtttgtctatgttaatatgtatagtttcaagccttatgttagcctcccttgcttaattctacacttaagctgtgttcgttttaggaggatgggaactaatacctcccgcacggaaaatagagcgttccagtagcgcttgattaattaagtattaactatttttttaaaaaaaagaatcaatatgattttttaagcaactttcgtatagaaactttttacaaaatacgcaccgtttagcagtttaaaagcgtgtgtgcagaaaatgtgagtgggggagttgggaacgactactggaaactaacgcagccttaacaccatcccaataacctagacctctacttgatctcctatatattttacttgaatgaataaatcgctagctacactaaatggatcgatctgatagatcctacaccgacagattgattgagccctattagccatgtgtaagcaagcaaccctttgaaaatcatatatcaaggacttgcaaactgtagctaggctgttggggaaaggaacatcgatatccgacaacgatatgagatgaaagcgatgctaattgtaatttccatgaggttggaagagagcaggaagtttcagcttgacaggcaccccccccccctacatccctccaaaaaggctgttaatttaggcctcaatcacgttcatgcacttcataacttattatttcaccaaagtgttgtacttaaggttaaggacacaatttattgactaatctctctgtattatgtgttggtgttactttcctttaaagtacaatatgggatgtgtgcacacacatgcgctacactcacaccacataaatttggtgaacatgcacctagtggtaattcttaaatttgaagctacactatttagccatctggcaacaaaggcacctacacgtgatttggtgtttgattctttactattaacaactgttacatacatttgtcaataatcacacatgcataatcaaaaagttctactacctctatctcagaataattacatttatatcatttaacatttgtcccaaaaaattgtatttctgcgaacttgggatccaaccttctttttaatcaagtttaagaatggtaattatgtgggtttatggtcttaaccttctgtctgtttcacattataagtcgttttgaattctttttctaatcaaacttctttagatttgattgagtttgtaaaagaatttagcaacatctcaaaaaactcaaacctaaagaaatttaactaagaaaaagaaagtcaaaatgatttataatatgaaacaaagttatttagacttttccactctaaagtaaaaagaataggcacgcaaaaaaaattacttcatcctaacctagattcagaggcgcctactgtaaattaaaatgtccggcacatagaaaattactttgtatcctcacctaaattcaaaggcaactatttggatccgaaagtctgacagaaagtatacggcaatgtttagatacacaaaactttctagtcacttttacgatgaacacgatcaggtaagttccatcctacctaaccttttgtactctacaagtaccagtctcaaagtacattcatcctacccatgacaaccaatccaacacttacatttgttggcacttggcagcaaaacccgacctgaaaaattaaattaaagccaacccaaagctgctgctactactaaaccactatcaagaaattcaagacggatcatggattcccccccagccaggtgtaaccgggtcgggtcaaacccaaaaccaaaacccgacccgacccggatccgacacgtctcgcgctcaccgcctcgtgctgcatgtaccgacccgatcgatcgcgcacatggggggcgcgggccccacccgcaattaaggaaaagggcgaaaaatcgctataaaataaatccggagaatatttaaaagaggagggggaggggagcagtcgcggtggggcccaccaccccctcgctccgcacacgaaccacgtgcggaatccgcgcatttagtactcgcatcgtcccccccagcccgcgaaatgataccgaattgaataaaataatatttaaaagaagaaatctgttactccgttccaaaatacagttacttgtaataacaaaatattcttctatagtaaacctatttatccatcaatatccttctaacccatcacaaagttcacaaccctcgtccatttatttcattcatcttattttttatctcaacaaatcataatatttctccaataaattttacttactttcttaatacctactactatgtctaaaaaaagataaactttagctacgaatctagacacgcatatattcgtagcttacatacgtgtctaaattcgtagctagaattgaattttttttaagacgctagggtaccatctatctattttataattatttactccatctgtctcagaatataacaaccaatgattgatggtgttcatcatctatctattttataattatttactccatctgtctcagaatataacaaccaatgattgatggtgttcatcattggttgctatattatgagacagggggagtatatttctagaacagatgtaactcccttcgttctaaaacgtagtactcttattatgatataataacaaagttggatagagatgaatccagtggtaataattgagataaggtaaaaggtaatttataagtagtattttggaacgaagagagcaactattttctccattccaaattaaattatgggataaacatatcgtaataatactataaatttagacatatttgtattactacaatatgtcacattgtgttagattaacttattccagtacggagtactccctccgtcccaaaaaaaaaagacaccctggcttccatgcccaacgtttgaccgtccgtcttatttaaaaaaattatgaaaaaaattaaaaagacaagtcacacataaaatattaataatatttttttatttaaaagaattataaaaaaatttcatacaagacggacagttaaagttggacacgaaaatatatagggtttgttttttttggagggaggaagtaggtaattaggagaagaaaaaaatgggaagaaagaaaatccgcgaggttaaattgaatcgaattgagtggtgaccagaaaccgcagcggctgcgtcgtctccgtctcctctccttgcttataaacgctcgcgcacgagcctctctctctctagctctcgctctcgcagctcaaccactagcagcagcggcaggaaggcgagaggaggaatcggaggtagctggacggcggcgaggcgacgacgagccggggtggtgcagcaagaacggcgcggcgagcggcggggaggagagattggatcgacgccgggtagttaggaagggagcttggagagatggcggcttccgcgaggcccgtcggcgtcggcggggagagggcgacgagcttcgccatggcgtgcagcctgctcagccgctacgtccgccagaacggcgccgccgccgccgagctcggcctcggcatcagaggtgaggaggagaagggaaaaaaaaaagaactcatccctttttttgtgggtgtgcttcggcttggttggatcttcatcttcagcttcggtttcgtgttgagatctgatcacaaggtttggggttttggttcggttccaggtgagggtgaggctccgagggcggcgccggcgacgatgagcttgctgcccggggaggcggagaggaagaaggagaccatggagctcttcccgcagagcgccggctttggccagcaggatgccatcaccgccgattctgctgctgatgctaggtatggggccatgccacttggttctctgcttcatttttgtgcagttcctgctccttaggtgtatgtgtgtgtgtgtcctagttcttggaatcacgcagagaaatgacaaattttgcagtctacaaaacttagctgtaagtgcctcaataggttgaagccactgtttttggtatcaaatctagttgaggggagagagggttatgagtaaacattttgttgttttttgctttgggttcagatactaattggaattaggcaagcagagttactaggtcattcagacttcagggagttgttaatggatctataaaaactttacctatctttgttaatagaaaattttaaccccaaacttagggttttttttttgtttaaactggggcactgaaaacgtagtttcaaaaagaaccctttttatgcttgccggtgaaaatagagttagtcagatggtgcagaattggaggggtgatatactggtatcccaggtgttcatagtgttctctgtgcaaatgaatttcagggaacaagagcctgagaagcgtcagctgaccatcttctatggtgggaaggtgctcgtgttcaacgacttcccagccgacaaggcaaagggcttgatgcagctggctagcaagggcagcccggtggctcctcagaatgccgcggcacctgcaccagcagctgttacagacaacaccaaggcccctatggccgtgccggccccggtcagtagcttgcctacagctcaggccgatgctcagaagcctgctcgcgcgaatgcttctggtaattactctgccctttcttgatgttcatgtctgtcggggtattgaacgcataaccagttgaattttgttgtagcagttatcaagtgacctctttttttctgtgtagatatgcctattgctaggaaggcatcactccacaggttccttgagaagagaaaggatcggtaagttgttttgctgtgatgatttgcatgatgtttaagttcagtattttgatcactgcagttcatggatctaatatgcgccttttgttgtcacagtcttaatgcaaagacgccataccaggcttctccttcagatgcaaccccagtcaagaaggagcctgagagccagccatggctcggactagggccgaacgccgtcgtgaagcccatagaacgcggccaatgaggttgcatggaaacttcaccaaagctcttcaaaaatatatgaaatgcgcttgccgttagagtaccaaatcatatatgttctctcataccccatgttttagtgttttttctttagttcgtgcttctatgttgttcacttgtcacatagttctgaatgtaaaggaaaaaggtagtagcattgacgaccagtgccgagagcctgagagaagttttggcatgttaacacatggtgactctgaaaatggccatgctaaggtaaaaagttattgcaaaggaaacatatatgtatcttctgaaattctgatcatctggctttgtccttggctctagccttgctctatgcaaagcaaagtgattgtaatggattcagaatataattcatattcctattgttgatttctgttacatggcttattggcttggtcctcctccaatatgtctgcattatttggtccccattatatgtgcctgcagagtcaatttgctcttggactttcttttttccttttcttgacgcgttttcattttttcttaaatgcaaacctcattatttagcataaaataataactacatacacaaactacaaactaatggaatatttgatgttccacaaacacaattattagtgattgcctatgaatcttttctgttttgtagctatatattttatcatcatgcaaaggggatacagggcagcacaggaggcagcctggggtaggttggatggcactgtcaagctgaagataagggttttgcgaaggaaggtgcacaaggcaagacttgtcaccccatgcccaattctttaatcaaaagatatgagcacatgtgagaaattgggggtggagatgagttgataggattcttgtttgacagctaaagcaaagcaaagcatgaagagcaaaacaacaggaagctgtttggaaattgcaaagggggggggggggggggggaagaaggatgcattgaccgggattctctgcagtactgtcgatatgataatagcaactgacatgtgggatcggatccacctgtcagtgattgctactgaaccaattgtactgcggaggatccatgtccagtatgcatacatgatacggagtacatacatacaaaagacatttttcagagagagatgtttgttggacgcatgggagcccacagtgagccaagttgcctgcttttttctcctttctcaacttgtttgtattatactcctaacaaaaggacttgatgaactagtgctcacattcctgcaacttgctgtctaccaattgtcaaatcttttgattagttttttctcttacagaagattttgcatgccattctcgatcattcctttgtgacacaattttgtcagagagcttgtgtaactctctctctttactcttcactgaatcaatttcaaattcaggaatccagccaatctggtcagactacttctgttccacgaaccgataaaattaacacatcttggcagctttacaataccttttttttttcttgcaggcttctgccttgtaatttactcattgatttgcccggttgatgcatgcacgtactaccaatcgtcctttgtgtgtttgaagaattatcaaaagagaaagataacaacaaaaaggcacaccatgtgctcaagctgttcatggttacaactaacaaaatccgtgtgccgtcctctgtggtccaggagacatgctgcccttgtttccaggatgcaattgcttgtttaatccgaggcactaatgatgggtttattgggtccagtaatccattatccatccaggtcaaaattcagagcgttcttcagaccacacggccacatggggggcatgaagtggactgcaaatggcagcatggaccatttgaatcgagctagctgttcatcatctgatggatgaaccaacgacctaccgatgattcagtagctaccaaacagtgggaaaaacgaattggctgtgtgacttgcaacagaaagaatccttgcaagaaagagactgcctcaaccttgtctaagttcttggttgtgttctttaatttcttctcacgcaactgtagtgatggatttagagttcatacccgcacgcaagaatgaagaaaaagaaagagagggatcttgacaatcgtggaaaaccgaccgagaaccgctcatttttcgtgaaaccattggttatctgtcgtaaaatccgagcggttttagctggttttttacgaagttgactgaaagtggtgattttatcggtttccggtaaaccaacaggtatcggtttttacttcgaaaacgataacgtaaaccctggtgctactttggaacaccatgtgtgtaattggttttgggggaaaaacttgaaaagactgaaagacattgattcattctgaagccattttaattattttcaatctgaaaaaacagggggagcatggtagctatccggaggcagggggaggaatctgtccattgcttgctgctcctttttatttcagtaactttagcccaggtccatttcatcacatgctgattctttagaactttagtaatataataatatgcatagtatgatgatgaattgatacagtatgcttctactattctgactctcctgtttgtgtctgcaaagcaatttctgaatgcacgctgtttatttaagcagtgcacgcttccgtagactggactaaataggccgagtttagatctaaagtttttcttcaaacttctaacttttccatcacatcaaaattttcctacacacataaacttccaacttttccgtcacattgttccaatttcaaccaaacttttaattttggcgtgaaactaaacacacccataacactgcactctgctgttgtgtatcagcagtggttgtacagtgtacagttactctgaatgactgaatcattcacgtactatactgcttatccacgggcttgctgttattgtactgcctcccatcttttaatttcttggacattgttgaaaatactatatttttctttattaattggcccgattaatggaatgtggcagtgtgtggttgtggagacgaggaatactttggatatttcatcactaaagcacccttggtacttgataaatagctatatttcgatacaaaatttgaacacgcattgaaaatgagagattatatatttaataaaattatttaaaatataactatatgaaactttttcataacaaatacactaacacaaattttaagtttaaaatcctaatagtttaacattattaataattcaatattttaaggtttgactacacatattcttcatgtatatcatccatttttagaacgaattaggtgtagtaagaatataatgtactatatgacggcccatactttattgcaaaatatatatggatggatatatattaaatgttatataaatgatggatggatctgtgttaaagtattatgtaaatgatttgagaaattatgatttagcgtgcttatatgttgagttatgtctgtatgttgactcgtaagtgtttagtgggttgatgtgacatgtttgtaggttaggttttagaatatactaatgattgctatgtttgtatgtgttttttcgaaatttagtggttaaaactatatagaaataaatagaagatacggggtataatctcgtatatgtacatcttgacgtgcagagggggagataggggggcccaggttacaacccatcgcagaggcatcggttgcttacttgggctttttctgtgtggatgcatatgtgggctttgagcccaagaatggttggggcattggcgatgcatgaagatgccactgtttatgctggactaatcgcccgtacagcactacagtgtgctgcgattgttccattatttcaaaaactttatgttcagtagtacgcgacagtgagatatttcgatcaagtttttcgaggatgtttataaaggtagaggtaagtgtgtgcgtgttatgagtgttacaactatattatgttattttttaaaaaaatcgttgtcatgttccattgctccagatgatagttttttagctttcaattttttcaaagctatcagtggttgtaattctccgtaacacgatgcgctcttatccgaaccaccccgatgccgaaagctaacaatggagttcttctacattgcagctcgccaggggttgttagttggcgcgcgccagctgttcccggcccatcagcccatcagccctctttttctttttttcgtgattttttttttcgtttttcttttacgatttttttcgctttttttctgattacttttttttaatctttagcacacttatttttttaaaaaaagttttgagttgaaagttttcaaatctcgattttaaagtttttaaatctgagatgaaagttttcaaatctcgagttgaaagttttcaaatctaagatgaaagttttcaaatctaagttgaaattttttcaaatttgagatgaaaattaaaagttttcaaatctgagttgaaagtttttaaaatttaacttcaaagtttaaatctcaagttaaaaattttcaaatgtaacttaaaaattttcaatctattagtaaaaaaaatctcaaaaaaaaatatttccttaattactactattattatccttaacatagttagttacgttacttaaaaaatgccacgagaaaaaagatcgatcagcatcgatggccgcgtgggccgtgggcctgaagtgctagcccgtagcgcgtatgcacgaattaggaatctcgagctcgccagccataggagcactttattgttcagaaccgagaataaaactgattttaaacgtaggggtgtatttaaaaaaaagactcaaagctgcgagcttgctttttctaggttaggttcgagctcagcttaagctctaaatgagccaagcccaaacccaaactcacgaattttatctagccgatctcaagcttctaaccatcttgaccatgtataataacttttatggtttatataccttgttaatttgataaacttataggcactagtggagaaaccatctttgatcggtccacccaaatccacaatagtcccggttctattaaaaaccgggactaaaaagcatttttagccccggttgataactgtaaggggactatatcatcttttatcccggttcgtgttattaaccgggactaaaaatcatctttagtcccgattggtaacaccaaccggtcccggttcatgtcgtgtcagaggctgccagtccctagagatctttagtcccggttggtattaccaaccgggactaaaatcctaactttactctcggttgttgtttctaaccgggactaaaaatcaaatataccatatataatcccttgctgctatcctcaaaaatttctatctcctatttctcctcttctctctcacacttatccttatcctcttctcagtctctttctattcctctctcaacacttagccggcgaggagctcgcccccggagcgcggcgacagggacccgagcgcagtcggcggcccatgccgggaggcggtggcggccgtccatggcaggcggcggcggcggccgcgcacggcatgaggaggcggcggccgcccgcggcaggaggcaacagcggcggcggccgccctcggcgaccggatttttttttaataacttgtgattcattggatctagatctggatctgggttatttgatctgtgatgtatttgtgattgtgattgtgatgtaattttttttaagaatttgtgatgttttttttctgacaatttgtgatgtgaatattatgatttgtgatgttgctatttgatctggggatgtagggagtatctcgatttcgatttggactttgtgattgattttatgattttggagagagtggtgtgaaatcaatattcaaaagaacatgaaaaaaaactgggactaaccctttagtcccagttggtaacaagatcgatctctaccaatgagataaatatatgtttacctacacaataatttagcatgtgtcaatggtaatattttttctacctttttttaagtgtggttcactagagaaatgttatccttaccaaagaattatcattgaaatatatcgctaagcttgatcgagctcgaaacaaacttacctaaaatatgaaataggctcggctcgagcttatgttgagatctgattgttcacaactctttagaagcaagaaccaccaccccgcaattccagcaccgaaccacctccttttaaatatccacaaggtgccaaatacacattgtcttatcattactttctctgctcgtaattttatgtttacaaagcttaatgaaaatataaccgtaaaaaatatttttcatgataaatccacgtattaaattcaaataatattttaagtctattactgattcaatagtttcagatttgaatgtacctattattttctattttctacgataggatacgttaaggaaatagataataataaagagatactacacaaagaaagtacatgtggcgtttgatggtgtactcattggtgtatgactcaacccatcagaatttaaaccctatttaaaaataaacattactatttagtgtcatttcaatatgattttattgagaatagagtatgtgttataaggtgtgttcggttatatctaagtgaagtgcgtatgtgcttccaatggaaaaaaagaagagaacttgaaaaataaaaacaatatatccatctctcactccgcaagcgcggaatgcaacaaaattggttgggggtttgatgttaaggcagtcccaaacctccacctaggatggtgtctatagtattaaatacattgtcatgtaggacttttagcttatgtagcactatatattaattaagagagagagagtgaagagagtaagaaattgggtctcatgcaagacacaccttcaacacaaaaaacctatgcgctagatactatcaagttttgcattgggagagaatagtgtcttcataatagatgaagaataaatattattggtagagaagagagatgatgtatttattaatagcccactttaagaaaccatgggttgtagagtatagtttctattgtgatatcaccatagacactgcttatggacactatgggttgggactgcccttagaaaccgtcgcacccaacacgtaaaatggagcagtaaaatagcatataattaattaattaattaaacacttaaaaaaagactaacatgattttaaatcaattacctatataaatttttaataaaaaaaaataaaattactaaaacaagtataataccatttataagcaggggcaattgctcatttcaccatgttatgaagcctatactaatttgattatatttttttcaagtttgctcatttgaccttgttttttaaaattgaagatcaagactgattttatttcatgatgataagataatagtgttaactaaggggcaaattatcctttttgtccttactcagttgaccatgcttctttttttatccgaatccttgacatacttgtaataaaatctagcatagattcgatagttttgatacaagtttcatagttttggcttgaaatcgacaaaatcgataaaatcaaattagcaaaatttgatacatttatggctgaactttcaaaaggattttcgtagcatatttgtctttttcctctcctctctcctactccatccgtcccattttaagtgcatccattttctgtactcaattttgatcgtccgttttatttgaaagtttttctaaaagaaattaaaaatataagtcacgcataaagtattattcatgttttatcatctcataacaacaaaagtactagttataaaattttttttaaataaaacgaacgattaaaattaggcaaaaatgcacttaaaattggcggagggagacatggagtacttgctctataagggtggaaaataaaagaaatgcagccaaaatctctcaccaactttactagtactactctatcaacccttcttcccagtcagtccactccactccccaaaccttctcgacccttcttctcccctcccctccccccaccgtcgcgcgcggcgtcgccttcctcctccgcctccgccgcgctacaaccctaggccctcccggcgacggtggggagcgcccgcgcgatgctgccgcagcagcagcagcagcagaagcagcaggcggcggcgctgatgccgccgtccatgtacgcgatgccgccaccgccgccgctccaccaccaccaccacccgctcctcgccgccgcgccgccccagcagcaggtccgtgccgtgcccctcacacagttagctgcccgcgaaagaggctgcgggtttcgcgggagtttggtcgggtaaagcgggggagctttgctagtctcgctgattgatcgcttcgtttcctgtgccttggctctgctagcgtcgaatggtttccaactgttgggttcctagatttcgattgattgacgggtgttgtgtggggtgaaaaagtgaaagcattggtggtctctgactctgatttacgggtgttgtggaaaatgacggatcttttgagtgataccgaggtgatttgcacgaaattgaggggctttctagttgtgtttcatgcatgcttgctgcttgtggggagggtagtgcaatttggaattcaaagacaccttttttctttctcttgtttggagaatacaagtctgagaatttgagtgatccgaatttatgcagtgttctgatacttgatcagttaattttgtttgagattggtcttcaggtgatctggaagttttgtgcttctgattgtaacgagtaattaatcgataaaatcttgaaggacttagggagttttgtgtttctctttgtttgattttgcaaaggtatagcctttgggacttttgggtgatttaggtccgtttggtttgaatccttgcagggttggggattgtttgggcttaggtgcccacttttttggtgcttcttgttgtcttggttaggaatattttgattccttttggttggttaagttagttcaaccttatctagttgggaatggagatcacattactcttgttgctgtgttgcacggatcacatcattgtgatgtactgatgtctaagtaaaacatgcatcattgatgaggtctgatttccttttactcaggttaggatttgtagggcttggattttagctctcatttgtaaggttcctattttattactagctgaaatttttctatatttgacatatacgtctattctgtaccctgattgatcgggagcgccgtttttacccccttttgctggcaaataaagcatgcagctttctcccttcctctgttacatttatctcattggaactttgctgtagtatctgcaggatgccttgtgtagtttgcatgtaccaggcttctttttgctaaggcgtttcctattatttgtagatttttatttcttctttctttgtttttttacatttttatttttgcagatagagccaatccttactggaaatctgcctcctggctttgatacgagtacatgccgcagtgtgtgagtcccattagggattctttttattttttttattttcttttcttcgtatgcttgaaaatgcataagttcatgctttggactttagggcatcttttcctgtacacatgtaatgtaatttaatacatctagcaagaatcttccattagctgtgtacacaagcacatattttgttggtgaagcttttgcaagtctatctgctagccactgttttcttaattgcatgttggccatgtatacattaaaactttgacacaatggtattttggtaacatgaaattttacatactatatttatttcatagctgaaagtaaggtgaaaatttgtgccttgaatacatttacaagatctatatgcattaatccttactaaaaattgaaacatgtctaatgttttctgttcacaaaataacacggcaaatttattaatctttgtatttcttatgtaagagcatattttgcatggaagcatggtctaatgttttctgatatgctctattttcataattttagatatgttggcaatgttcatgttcaagtcacagaggcacttctccgagaggtttttcagagtactggtttagttgaaggatgcaagcttatacgaaaagagaaggtttgctttcattacctgatttttctgtttatttcagttatatttttgaaagcgtatcctttgtggggtgattcagtctgacacaactattgtcatgaggatctcatgatttacttttaaacatatgtttctgcagtcatcttatggctttgttgactactatgaccgcagatcagctgcattatcaattttgacacttaatggaaagcaaatgtaagagaaaagctattcatttctgctagtttgttgaagcttaattatgtttttttttctccccaaaaacactcattgaagaaaaatgatacagttttgggcagcttatcagagttaattgggcatatgctagtgggcagagggaggacacaacaggttgatactatgtttgctttttataccagtattctcagaattttttgatataacttttggcaagacatggtaaattttatcacttttgcagaccatttcaatatttttgttggtgatcttagcccagaggttactgattccgcattatttgcattcttctctggatattccagttgctcgtaagtatttattacctttatccactagtgttttctgccattggcccaatttggcttttcctaccccagctttataatattttgtgcgttgtcagctgtcctcttttaattcttctgttgtcacgatttcataataatcatcagttgtgtcagtagtacctctaccgccactaggatacatcctagttcacttttcataccattttctttatcttactaattaaattaaggtttatctggatcttaaattgcactactttctggtatctagtgatgcccgagttatgtgggatcaaaagactggaagatctagaggttatggctttgtttccttcaggaatcaacaggtatggtaattctaaaagcacgtgcatttgtatgggttctttgtttactcctgtcacttaaaaaaaagttttttggtgagcttacaggatgcacaaagtgccataaatgacctaaatggtatgtcatgcacaaactccaaatatttctcatttaagaatgtacaatgtttttgggttgtgtggttttggatttggttggcttggtgccttattcatctgatcttattcataggacaatggcttggaagtcggcagatacgctgcaactgggcaacaaagggtgccagcaatggcgagcagcagacttcagattcaaaaaacgtagctgatctgactaacaatttgacaggtaatctttatggatatgtaacatatttgtgttagtcatattttaatattttaaattccttccatttgctagtatgtactttcagaagacagaataaattaaagcatagtgttttagctgtgcattgcaaatgtgagaggtttggtaattaaatataaaaatatagaataatatatagagagccttcaaacatattgcttcctgcaaatggtagaggtttggtaattaaaaaccacttcctctttgagttcttctaacaaataactcaggcagtaacattacaaaacattgcctggtttaaccagaatatttttgtaacgaatgatggtgttgatctgttctactcctattttcattatgattttgctgtgtgcgtcttctttcgttgttgtgctgcgcacttgcatgatactcttagccctgctgttggaacgaagggctgcagttcattgttcttaatacgatgggcttcagtatgaatatatgatgagttgtgctgttcttttttaatcttgttcagaagacgggaaggagaaagcaaatgaagatgccccagagaacaatccacagtacagaactgtttatgttggaaaccttgctcacgaggtaattctatttcagcgttactaaatgtatggcatattgaatccttcgaacactagacgctgtgaatgttgttccggttgtcttactgataaattgacgtctttgaatttcaggttactcaagatgtgctccatcgtcttttccacgcacttggagctggggccattgaggaggtccggatccagcttggcaaaggatttggcttcgtcagatacagcaaccacgcagaagccgccctcgcaatccagatgggaaacggtcgcattctaggtggtaaaccaatcaaggtgactcacatttcccgcttcaccgttttcgcgcatgccgttatcattcctcttaactccattgaaccctaagattcacctttgacacctggttacacttgtctctccagtgttcctggggcaacaagccgacgccacccggcaccacgtcggcgcctctgccccctcccgccgctcccagcgtgacggcggccgatctcctcgagtaccagcgcagcctcgccttgagcaagatggtgtcaagccaggcgctgatgcaggctcaggcacagcagcatctgaagcaggcaatggggatgggtgcaggcgtgagccaggccatgtatgatgccagcttccccaacgttggcccctcgcagcagcagctcatgtactactgaataaaattcctgcgagctcgtcgctgtaatttgtgactcgatcagtctgatctctttttttttctggttttgttttagctaatgttactttttttacgtctatatttagagtgtttctggagctattttcgatgttgtttcgtacatggatggatggagaatgtgtaatggtatatgtgtgtgaaggatgtaagctgacaattttatataatcttagtctaatgttattgctgccagcctgccatcagtggtttgtttattgtatttttgcattagaaatgtgtttaaaaatagcaatgttgttccaggttccaaagagtgtgctctgtacaagtatcgctgctcgtgggctcgtcggacgggccttgctaccggcccgctaaagttgggcccgaacgagatagcagaaagcgtacggcccaatgaagttaggccggaacgggattcgtcgaagatgcggcccatacgagttgggtcggaaggggatttctgcttacgcgcggcccactattatttgggccggaacagatcccagcgaacgcgtggcccgttagaagcgttcaaatatttatctgaaaacgagttcgtctcgatacgaactgaattcgtagcttttgctacgaggcaacgatacacagattaaccaaaccactgcgcgcgtctttaatttgttttggacttcatagcttcgcctaatttttcttttcatttccttttgctggtgaaacctgaaaacggctgcatgctgtaatgagacaaccttgcagcctgcagtaacgtacattcggctagcagtcgtgtttcactgcttaatcacatatataatgtgtaagaagaatccatcaccctacatatgtatatgcattgtggatcgatccaaagataaggattgcatctatcactacctatagcatcatgcaagtatatcgttcttacaaattaacggacagatcagaaaagatacaaatggaaaaaaaataaaagtatttttgtctcttaagaaaaagttcctttgtttttatgcatgtcactttaaaaaatcacaaaaaaaagagcaacacaaaatactcagatatatatcgactagccatgcatggtggccttgatttgatcccctttattcatcctcattacagtacactaagtatattactattgtattatattatggtggagatcgattattattacagccaagctccgattatcatccgccatgcaatgcacgcatgatgcatcatatccatcacattcttcacaggtcgtcggcgcagatgaagaagatgctcccctccctgcactcctccccgcccttcctcgccgccgccgcctccttcttcttctccggcgacgcggcggcggcggcggcggcgcggcgcttctcctccctcgcctcgcgcagcgcctcctccaccacgtacctcgacctgcactcctccttgcagaacgccttctctccactgcatatgcattccaacaaaacacacacacaaaaaaaaaacatcaaattaatgcaatgcagtacaagctaacatactgttcagcttctttcaatctctactattttagttgagttaattactgtgcaatgcatgcttaattagttactaattgtacatgtagatgaagctggggcggccggcgagagggacgccgcagaggttgcagcacagcaagaactcggcaatggcgaacgggttattcccggtgcagatgctgcaccacggcacggtgcagtagccgcccgaggcgccgccggagctgatctgcttgtgcgtcccctccatgatggcgcgcgcgctggggcgcgcaggccgcgcgacgcggccgacgacgtcgtccatggcggcggcggccgcggccggaactgggcggtggtcatcgacggcagcgatcgccgcgttgacgccgacggcggcggcggcggcgcgctctacgaagacgaagcatcggcggcggctcgccggagcggcggccggtggcttggctacgacggcggaggccataggagttcagtgtgagtgagtgagtgaaaatggtgagattgggagggtgaggcggtgtgggtttatatagctttggggggagaagggggttgcttggtgaggaattctaaatgcctttatttgttgcttcctttaattttgttggtactttcggcgcggctaaagcaacaccaagagtgtacacaagttattatgtgcttgggaggctttgtttggcggtggcggcgctggtaggatttatggcggtcattttgtaccttttagatgaaaataaaagcatttaacacggtctactctagggaggagcgtcccatctatcttatttaagacgtaaatgttagctatttgagatccctttcttgacgattttatttatcgtctaacttatcaaattttgaaatcaaacctacccaatcctctacaattagttagtcagcacatgtttccaacctccaccaattctacaattttctcagatggtgaaagttggaaactctcaagtttttgcgattagaggagaaactcgctcgcgttgtccctcttctcctattatccttagttacataaatcaagcacgtcaccccgtacctataccaatctctctcttcttaaataaatcataaatcagtgaacaaaaagttttgtccatatatcttctttgagatgaaaggaaaaaaatgaaatatttggtagctaaattcattctcaattccttctctattttttttcatgttatttgcttttgtgtgaatgagaatctttacatgatttcctaactcatgtatatatggagagaaaaaaatttctcttaataactaaatactggtaaaaattttcccaccaggtaacaaccttataaacggagatccatttaaaacaatctagaaataacattat

SEQ ID NO: 13144 - DNA, 835 bp, Oryza sativa
cttgtttggttattccttgacttgtaaggtgcccttactgcaaaatggcgagttacgcggttgagtaccgcggtgtcaagacgaaggaggaaaagggcactgagcagattgtgagtgtccgcaagacatgatttcgttcagtgttgtcttctatgttttgtatttttgccaatggttggagctggaacttgtggtgtggataggaggagcagagggtgatcgaggcgcagatccggatgcggcagcaggagctccaggacgatgctgagcggatgaagaagaagcaggctgctgctttgaccgatgtggtaacaactgcacaagtagaacattgtgatactggtggcgcatccaccacaggtatatgcactggaatgtgctaactttgtttctcagttattcttttgtcatgcaatctctaaccctgtctattatgttgacagtcaaaagcagtgggcaaggcagtgatatgctctcatctcaagtgcagcatgcggagttactgctgaagacttctgaacgcttaaagcagatgcggttcgtactgcttactgagttgtgcttgatattctgtaaaagtagctgcttattgttgcatcagtgcaatttagatcaaagtcatgacagtatctcaatgactgactaccgtttaagatctgaaatgtctatatctggtccctccaatcctcaaatagtttaagttttcgtccctcaactccaatattagccagaactcatcagtcaactatcaaaacgtctaaatatgttcttgggcatgttttccaagtggttttgagtgccgcgccatccttttttgccatgtcttttaccacat

SEQ ID NO: 13145 - DNA, 1101 bp, Oryza sativa
ggatgctttaactttatagggaaaaatttgaagtggggggtatatttgtagacttgaatctccattgatgcctacacttcaacataaaaagtagggcacaacaactccaattagttcagtattgggcaaaggagtgacatgcactggctattatttggggatagggtggaagccttgtcaattctttgagctaacttggcactggatgagtggatgggccatgcagtcagttattagccaaagtgtgagaaaactatgtttcttttttcttaaaaaaagtgtaactgattaactgaagcatcagttagtcagactgtttgatctaatatcaaccatcatctgctgtcagtttgtcacagttttgtcactcataatgtgtcaacctcagagaatggattaagctgtgacatatgttgtttgttcagagttcaggctaatccagagagagaaataatatgccattgtgttaccatcattcagatcaacatcttgcaacaatatatcatgcatttgctgatttgctttgcatggatggatgcagataactccatcatgcatgtgacatgagcaaagctcaacaactactaattaatttacaagattatccacatgagacctctgtctacaagaccaatgtcaaagcacatcttttgacaacttcgattccttattcctctagctgtcacacattcccaggaggaaagctcaattagcatctaatcagtggatcactgtatttgtttaatctgtcagctgtaattatctgcctgctaactcagtactactccttctggtttcctaataccaaatcattaacttttaaatacacgtttaatcaacattctcatttaaaaatcttatacaaatatataaaaaatatatgtcacatttaaaatacgtttaattataaaaacaaatcacaacaaataaatggtaattacatattttttaataaaacaaatttttggataataaaaataaattacatcgtcggtttttattataagacatacaaacattaagtttttttaacaaataaccaatcttaagttaatatcatcgtatattaaaaaacaaaaaatatcatcgacgaatcggatg

SEQ ID NO: 13146 - DNA, 646 bp, Oryza sativa
gattttaaatttaagctcaaattctaaaaagtggtcggagatgtaatttatcttctgttatcttcttatctctactctttgaaaaccagtcatccttcttctctcaccctacaacgcgcgccaaaaaaaacctgtaaaaaccgatcggcccccctcccatcgtactgcaaggtttttttttttcttccaccaaagaattaaccgatcagaaaaagcaaatagagaaaactaaacctataatacaattattttgtcttattccttcatatatacttatatctcattgtaaagcacagccatagcgcaatggggaaggagtcgtttcgggtctcgttggttgccgatggaccctgacccgaactttagcatcaacggctaagatggaatactatactgttggaagtattttttagcacactggagctctcccattagtttgttgatcgctttattaattgtcttctgtgtttctcgcgaaaacttgttggtgatgtagcaaaacttgtgaagtaacagcaatagagtttgctggttccgaagataataaagatgaagtcgctccaccatgatgacaaagttgtgttgccgtgatgaagtgaaccggtagtgaagacgcgcagttgtgaagataaaagcaccagtcggc

SEQ ID NO: 13147 - DNA, 543 bp, Oryza sativa
aggcggggacaccagtcgccggcgacgaaggcaagccggtcggtgaagacgtagacgcccaacaacggcggcataataggccagccgtgcaggcggaaacaccagtcggcggcggcgaaggcaagccggtcggtgaagacgtagacgcccaacaacggcggcataaaggccagccgtgcaggcgaggacatcggtcggcggcgacgaaggcaagccggtcggtgaagacgtaggcgcccaacaacggcggcataataggccagccgtgcaggcgaggacaccagtcggcggcggcgaaggcaagccggtcggtgaagacgtagacgcccaacaacggcggcataataggccagccgtgtaggcggaaacaccagtcggcggcggtcgaggcgagccggtggtgatgttctgactgatccattcctggagcgtaagagataagcttaaagccatgaatcccttttatgcatatctggatctggatcctgcagaacaaacatataggatgagtagtatctgatataaatataatactcgagaaaa

SEQ ID NO: 13148 - DNA, 1116 bp, Oryza sativa
tccagatcttgtcggagaggccgagggagcggaagaagttggcgtccatggcggtggctccggtgatcgccatgttcgctcccttcttgaagtcggcgctcgtcgacttcgacggcggcaggaacggcagcccgaacttactcgctgcaacaaccaccagccgccgccgtcagctcgccggagcaagcaaaccaagaagacgaaggaatcaaagaaagaatcaaagttaccgaggaagtcgacgacgacgcggccgtcgcagcagcggcaggtaggggagccgaagtaggtctcgccgtagggaggctgggtgaaggtgatctgcgacggcctgccattggtgcacaggttgccggtgtccgtgatcgagtccccgaagttgtacaccgcattgtacttctgcgccgccgccgccgccaccaccatcgccgcgcacaccaccaccaccaccctcctcgccgccgacgagctctgcctccccatcattgcaaagaaattaaaacagagcacaagccaagaaaagaagaggagaagcagagcagtggatgatgtgatgatgcgtggaaagggcaggggtggcgcgttttataggcgtgaccgcgtgagcccgtgaggaggcgtgaggcccgtctgcctggcgcatctggggacaggtgtaatgtaatgcatatcatgtagtagtagcaatgtaatgcactatcatgtgtgcactttaccttttcgtgccgtcggtattcggcaagcactgttcctcccggatccgggtcctctaccatgcaccgcccgatcggtatcggacggtcgagatcgtccgatacgtcggtcggtttgcgacgatatggatatttgttcccagcaggggtttattatcccgggagaaaaccggttctgatttcgtgaaatctggttttttcggaccatgtctaaaacataaaccgctcgggtttttgtgtgaagttaaaaaattaaaataaaaatggattattaatttttttccagatttgttcggatttcatcggttttcttttggtttatcaatggtttctacaaaatccgaagatactgctcgtgagcgatttttatctgatatcaggatagcgaaccacagtttcaagg

SEQ ID NO: 13149 - DNA, 603 bp, Oryza sativa
gtcttcctcctccttccctatcttgtcaaggacatcaagatgacccctataaactggatcatatgacatctgcatccgcaccacctccagtatctgtcccaagtgtccaagttgcttctctgtcggtgccttcatcgtactcacatacccagataaaaactcaagcaccgagcccgaatcaacctcatcatcatcgccgctctctgcggccgcaaatacagctggcagcacctcttccagcatttccaatgccgcggctccatcagcatcactagagccaagcttgcgataacactcgagagcctcgacagcgtatgccgtcaccaaatgtgccattttcaaaccgctgtcagggctaccaaaccccttctgggcagacatgagcgacctcagcaacgccacctttgccctcgcgtccatcctctttgctgccacagcagagaggcaccccaccgccgcggcagcaagaggagccacgctccccggggacagcgcaatgtcaaagagcaagggaacaaacacgtcattcgcgaccagggagacatcgatccaggagatgcacctccgcgccgcatcgagggctactgcggcgacggcggggtc

SEQ ID NO: 13150 - DNA, 575 bp, Oryza sativa
aactcaaaactcatgtacgctacatcccataaaatgtggtgtatgaactggccacattatcatttcatggagttggtatagccgtgtaggttgtgaactcgtaatgccatctccatctgcgtcgtatctcaataatgcaagaatgcaacctaactaaataataaaaataataataatgtttcactaatttattttcaactgtacgtctgtgcgaaagaaaaaaaaaagcttttgtggacaaaaatacagtaactagctagttttctatatccacactaaacacatcgaacatactccatccgtcccaaaaaaaaaaaactcaacatagaaggggatgtgacccctcctagaacaacgaatctggattatccttaggttgagtttttttttttgggacactgcttactactgagacaagtcctacactcctactagagaggcaaaacctttgctttggttatttaggaaaccatagttattatacttctgaccatgcagcacaggggactgaagatcttataagttggcacggaaatatttccgtgactcctgctgttttatgctgtccgccacat

SEQ ID NO: 13151 - DNA, 2218 bp, Oryza sativa
tattccatattcacaatgtgcttgtagccatccagtgaacgatgtgagggctgcatatggaggaggaaaaaaattactgaagtattcacacagtgctgcaatttggtttctaatcaaattctagtggagatcactgaacacctttgtaaggtctttttctcttcttattgaagatgttcgccatccgaccatatctggcatatgttcaagaaaacaagagcagcaaaatagaaaatggtttggagcaaaaaaaaattcgtttgcatatcaggcagaggaaatcatgtggtactaactaggagtaaggaaggatacggtcgtacgaaacattagcgtacaaaatgcggttcttgaaagctgctagtgcagatctgaggaacattgaagaaacaatatgttctactacaatgtttgaacgaagaagatatgttctactataataagttagccttaagacctttcttatgacttacataaattttttatcctcatgatcagatgccatctctagcagaagaggtggcttgctaggttcaccatccgtgagaaagagttgggcaccagtgcggccaacaccaagggagccaaaggtgcagcaatcttttctagaatagatagcccttgaagaaatggaagctggtaatattattgcagaaaatgcatgtaattaatacattgatcacaagtcacaacatattcagaagtagtacttggttactggtctttggcctccgattagctatgcaacaatagtcgtatactaaaatcttactaggcaactcaaagtccaatatagtagtttttgcttccagcagaactaattttgaggggaataaaaatgtatcagataatttaatagatttagagacccacctgatttttccctctaacaccaaggtgtggggttgctaaggtaataaaattaattggttccagcccagcaattgcacctaatcctgaagtgcactccaacttttcagaccctccagttgtaggagctatacaagcagcactttgacttgcatccttcattgctgttgaataaaggatagaaatagcatatcgcgcaaacaaaccacccaaagaatgtgctaggaaggaaatctttctcaatccagccatcttctgaatcacatccaatacctgcttcgatagcggattttcgtcagagccctcttaagcgcagccatgagtgcagaccacagtttctacaaaagtgaatacttgaaaccttttgctaggactaactagcgagtacatacttgatttggctaccttgttccagcaacatcaatcccatcgaaagttttggtgtagatatttgacgaactagctgcaatgatatagttcactgtaagttttatggctagaaacgaattgttctcatttgcaaagtgcaaaccaatgtagctacagtaatgaagtggtgtgaatttcatcttgcagtactaattaaaaatataggtattctgtagtctgtacatctgatcctaagctcaattttgtcagaaagccaataggaatgggcaggtgatccctatatgtcatacctaccatagatgaaaaaattgtcacctaacctcttctttagcactgcttctccataggtccagtcactggggctgcattaaaagggagaacaatgaaggaaatttatcagcaaagctcaagaaagaattgtgacaggaacaactagcactgcaatcttgctatgcattttcagacaggtgctatgttatcgtgacaggatatactcaccttgcaatgataccatggacaagaatcagcagatgatctggtcctcgctttctttgggatttttccatgaaagatgaacgcgacacacggctacggcttcccccgaacgttggatgggaataaagttctctaccactgtcaagttctgcatgaatcaactgtcagcacactatttcattttcattaacacagcattttgaagaacatcgcgatactaagtacagtagtgttactttggatgctcatttggttgtgtcaaaactgaaagagatcttgtaccctcatgttgctagaaacaaacaagttaatatcacctagcttcttctccattagcaataaaaataaaaatcgacgtcaatcgatcaacgaagttatctactggataaccaattgtttatcccatcttccccccaaaatcaagaatgaaatacagaaggaatgggtatggaaaggcgggcga

SEQ ID NO: 13152 - DNA, 729 bp, Oryza sativa
ttttaagatagaaagtaacaactgcagtggatacttaaatatatttgtagagcatctgtgcatgacttctatattactaaatcacatgcaaacctaaatattttttttaaaaaaaaaaactatgtcgatcctttttacctcttgatccaccctaacctaatccaggtggtataggtgtgtcatcactttattcttaatgcgtgaattgagcatcattcttaactcataggtgggaatgttgaaagagtcattgccttgtggtgttttctaatgttgaaaatgcattgttccctgtgtcaaaacttttgacctgattttctctgcatgtttcatattactgaatgcccccttatcttttctcctatttcttcttatccagttgaaggtgcccttgcacatccttacctggcatcactgcatgacataagtgatgagccagtctgctcatcacccttcagctttgacttcgagcagcatgcattgtccgaggaacaaatgaaggatctaatctaccaagaaggccttgcgttcaaccctgattaccagtagctggtgttctatttcaccttggattgattctattcatatggagttttttcctcctgcgccacaaaaggtcgccgacagtgatcactagttgtaaataattgcctcacctgaaaaatcctccctggttcaaagctgaaggtgttgttctaagagtagaaatgtactttgtgatcaagttcc

SEQ ID NO: 13153 - DNA, 688 bp, Oryza sativa
tttcttcacccatgaatccccctcattgtcatcttctatcgaacagaaaaaaaagagaaaaaacccaaattagtccccaagatcatgatactgtcaagagatcaagggaaggtgaggaacatgtagcgaaactgaaattgaaggcaataactaacctcctctgccaccgcgcgtcatgatcttgatctcgaatcgatcaggctcgctcgatgatctcgaggtgatctctcaactgggttgaggtgatcgagaagagccgtgccggtatatatgcgccaacagtacacaggggtgtttgatttcttatcggattcggagttggaaatttcaaatttcttgatcgaccattttattttttggcccatccaaacaggattcactcccattgcggttcggaaatgtgtatgaagatctttatttgaatgagtactatccattttgaatttgaacggactgttttcgtgtgaaatttacagcttctctttcgaacgcaagcaatggcgttgcaacgatagctcctgcatctcctctctgaagcagtgcgtcgccatcgccggcaccgcgagaacaccttgaacccgcgccgccgcctctcgtcggctgcgccgtacggcacgaagaagcacggctccgtgctcccgagcagcctccacgagagcggcagcacggccgccggcgagccccaccc

SEQ ID NO: 13154 - DNA, 2203 bp, Oryza sativa
ggtttgatacctataagtaccggattcgatacctaggtcgggtttgatacctatgagtaccggatccaatacctatataccaggttaatacatattagtagcggatctgataccaaatatagggtgtgatggtaggagacttcagacgtgataccactaattctgatatttatgggttatatacttctattcaaccatcaaataaaaagatggaccatgcatagctaggccagaaagtacagccaaacttgctcatgtgccgctgagtgcttaattctaacttgctgacatgctttgtttaggctcatgctactagctctagtgcttaattctaactttgctagttgaagcaggtgtgagacccatatggacctaaagaggtgtagaagtagtgttgtattagagtatttcatagctattttgtactgtaggagaaaagagacctctcgtcagtcgtcactagtcagcagcctccatgtgaaaggacagcacacgacatgctttcagagagaaagaatcgatgagtgattggtaagtataaattataaactataccgttgagacggtacaccatcccatagtttttctattttattaaaaccggtacaatttaactcggtggttttcaagagcggtttcgttgatgtggcgtctacatgacggtattaatctggcatgtggcattgactttatgccatgtcaatgccacagaccaggtcaacagtgccacgtggacgtcacgttaatgaaagcatcctccaaaattatcgagggagttaaattacaccgatattaatagttatgagtcgagatatctagtattgtggtttaagcactggtttaagagtttaagagagtcaaagtaaacttattccttctgccgttgttgtcacgtacagccgtacaggagagaggaaattcggatggttattggtggctcatctgggtacacactacacagtattcaatggcgattcagagtactacacggcattgcatcattcaatcatatgcaacctggtagatcgatcagggagaaggcaccgcatttggaatctatatctttactcttcataaagaaactgattttaagccaaactttactctttagcatgtaacagtagtagtaagtacaggcttaaagatgcttaattttgttcttgcagaagagtttgttagccttggacagtaaggtggagaagccaaaataaaaaaaaaaaacagacagaaccaaaagggatcctgcattattttggtttggtatctaaaactggggtgcatgcatcatattcagacttaaagttggccaaacttctttaataaaagaaactgtttttttttttccctgtaaataaactccaaagcaacatgcacagtcactcactctgtgtagcatagtttctgtaccagaaaagaaggtgaagcattcattcactagttccatacaagcatgtggtcatgcgatccaggattcctaacttgtattaaagtttttttctttctttttttgagatggcagcaaaccaagttgatgagcttagataagatcttgctcgcatttatgatttcatccggatccagcatgtgcgtatgtgaccatctccaaccaaaccatgcaacaaattactaagatttaattaattaattgcaacacataattaaattgcctcccaatctcatacatactacacaaatgtgcattacctaaaacaaaaacaaattaaccacccacaacgaaaatcaactaatcaccatcttattcatttcccagtcgatcgcaagatgtcttcttcttcctcttgctatccatttttcttctcttcttctgctaaacaaatcaaatcagcagcagctagccggccatcctccggccgccgtcgccgccgccggcgatgatctagggcatgatcggcgggtggcagtagggcccgttgacccacccgtcggcgatctgcttgtacgccgcctccgtgagatggatgccgtcccagctcaacgacgacgacgggttggagcacgcgtaggctcccgacatgccgcacctcgcgccgttctggtagttgtacttccctcctcccgccccgcagcacgccctcaaattcgtgctaaaccctgcgcaaattcatcacaaaaaaccgtcgaattaatcattcataaacttcaaaccatccagggtaccgagctcgaattcgcctatagtagt

SEQ ID NO: 13155 - DNA, 613 bp, Oryza sativa
gttccgtgctttaaggaccattatggcggagagggagttaatcgacagggataaactcgtgcttataatttgcagttccacggtttccatggagtgaaatcagaagagaaaactctaggtcaaaagttcgttgtggatgttgatgcgtggatggatttgagtgttgctggggagactgacagcatatctgatacggttagctacacagatatctacgggtaggagtaacaaattaatcccgatttgtttttatttcaccattttactagaaatgtcttgattgattgttctttttaagatattaaatcttgcttgtccatttcagcaatgtaggattattcagtttattttattgttcttttactaattccaatcattggagaactgaaatatgttcatgctctgcacttacaggattgccaaggatgttgttgaaggcccatcgcggaaccttttggaagcagtagctcatcgaatcgcaagtaacgcattgcttaagttccctcaaatctcaaccatcagagtgaaagttgggaaacctcatgttgctgtacgtggaatcgtcgattatttgggtgttgagatattgaggcataaaaaagatgtgggaggc

SEQ ID NO: 13156 - DNA, 692 bp, Oryza sativa
agccatcttaccctcagcgctcgtgcaaacttttctaggttgaacacccctagcccttcataagctgttggcatacaagttcttgcccagttggccctgcatttttcgcctgtgatgttatcggcccctgcacaaaggaaccgtttcctctgtttgtcaagcacctcaagggattccttcgtaacttttagagttgtccagagtagacaggttgctgacgtgaggattgacttgactagtgttattcccctccccccctatccctatgtttcttcctcgctagcctactaggtgtcttgcggatttgtcaaaaagtggctggaggtctgccttgtgtagccttgtcatggctagggagagccctaagtatttcattgggaagcttgctctggtcgtcggcgtgctttccaacaagtcgtcgaggtctatgctggcacacctaattggcttcacctgagatttttgtatgttggtgcatagccctgttgcttgtccgaagcattcacagaggccagcgaatgcatctacatcgtccttctttgggttgatgaagaccgttgcgtcgttggtgtacattgagattcagaggcatggtgaccgaccctagccctaagcttgctgagcaaattgaggtatgtggcttcgggcagaaggcatgtagtgggctgattgctagaataaagaagagcggg

SEQ ID NO: 13157 - DNA, 583 bp, Oryza sativa
cttcggctgttccggtggttcttcaccgtgcagtcggtgtcgccgccatcggtagtcggtggctgctacttccagccacgggggccggcgctgaaccgctacatcccctgcgccctccgcaagaagtgggacgactggaagagcgattggttctacactcccctcgccgacgaagcgcgcctccgacttccgagccagcccccggcgcaggcctccagttggcgggcgccggtagaatctgggggatggctatgacgctgtcctcgaccgcctggcgggcctgcgatcccaggggctcacaggggccatggtgtatggcgactacctccgtcgtcggattgcgccgctccagcggcgcgctcggggcgcctgggagtacaccgggtccgaagactactgaggacccaccggggagtgagatgggactgggctcctgaggacttcaagatattggtccaacgggtgctgaatctcaactccgtggaggcgtctctcattccccaaggaatcctccccctctgcagcgatccagaccgcgcctccatcttgaccattatgacgggggtcggggcctcagaggagg

SEQ ID NO: 13158 - DNA, 809 bp, Oryza sativa
ccattattcctattaatcaaaggaggccagttttctattggtacatgtacgaatggttaaaaataaattctttttgggacagagatatagtatcaatattcggtagaaatagttcaaattattgatttataaattctattaattatgattttcttacacctcagtagaaagatattttattgttggtagtaggggtgaaaacggtacggaaacggacggaaacaacctttatcgttttcgtttccatatttttttcggaatcggaaaccccaaaaacgaaaacggaaacgaatattatcgaaaccgaaaacagagcgaaaacgaaccggcgcggatacggtaacgaaaatttatcggaatacaaaaacccctcaaactgagcttcaaacttttgtcaagttcaattctcaagtcttaacagtctacaattcatcataaaacacaattatatgaagtctaattgttaagtctcaacagcaaaatatattcttctataacttcgtataatttgcataacaaatattctaaaaaaaattacagcaaaataccatggtataaggtataaagtatacactattagcccgcagcccgcagcctctctcttcctccacgggccggcttccccttcccctcctccctcttcgggccgccggcccagcccttttgctcctccctcgccgagaagtctataatgcctccttcctttcaattcaaatattttttagggtagtaaatgatttcaaatgaaaaaaatgtcattaccaaagttgtataacttatcaagatcaacaacttttgttttggtcatt

SEQ ID NO: 13159 - DNA, 2059 bp, Oryza sativa
  unsure (1)..(2059): unsure at all n locations
cgagggagacagggggccatgtgagccgtagcaagattcctcagttttgtgccagtgaatgagcagtttgcttaagtagggtagtagtgtccgacatgggcaatccgagctcgtgattgccattttatatggggggaacagtagtcgtcttgctccaacgactagctagacacccaaattatgccagattaatggcagatacgcccggttaggtgtgtggacttatgtttgtacctacgaatccaactgcacgcacgttcctccgttccctcaccggaactcaccccatgttcccccaactaaacacacatgtgagacagtgtcaaacgactacccccgagcagtggcgttttggcagtgtgcatcctactcctttcgttctgaaatataagagattttaaacggacgtctaaattcgtagcactaaaaagagtcacatccattcaaaatcgtttatgttttatgacggatggagtagatgatacagagaccaaagatgattaaactgatgagctatatatattttttgacatgtaggatttagcacggtgttcgagacgtgctgcgggtcaggcggcggcaagttcaactacaacaacaacgcgaggtgtgggatgtcaggcgcatcagcgtgctccaacccggcgtcgcatcttagctgggacggcatccacctcaccgaggcagcttacaagcagatcactgacggctggctcaacggcccgtactgtagcccggccatcctccacagctaaagcaaaatgactggaaagaacgagccattagttaatttattactttattattaaagctggtgtntattaattaagcgggaattaattaaaggggaatggtttgggttcttgatttttatttgggtggcatatatggtgggtggtgtgacggtgaaatggtttacttgcgttgccaanaaagcaaagaaagcgatggcatctgtagaataaatgttggttactgttgtaatttgataattgtttctctttcagaatcaaatgaatcatcaatggtattatactcagttattttttttcttttgcttttagaagagacttttttgccatgcagcttatgtttggatcttttgcctggccaggggcatgtggtctgtgctttagaaaaagcaactgcagaaaattcactctgatggtcatcctgtctgagacggtcttgtcattattagtcagagactctgaaagtgaaagtgacagtgtttttttctcattgcaaacttttagctaactaaccactaggttgatgaacaaattggacactcctactggggaaggaaaacctgagcaaatttatccaaggatagatagatatgcagcatatgctccaagtacaataatgcaaaaggaaagcaagctactcttgcatagtgatgcactcgctctcctactgctgaatctagctagttgcatcaaatcgacttgaatacatgagatggagtaatatgcagggcatgtgggtgacgcaagtgggatggcctgaattattcgtagctgttggaattaaatccaacggcgacccatccttggaaggaggagacgaatcttcgtatttgattgcctaacacatctattgattatgatagtgatgcacatttgcaaactaggacagggcacacaagcaagtacaagcatgaagcatcaatcagagcggctgatttatacttacataaacgcagtaaacaaaaaaaagaaataaaaacatggcatgcgtaggattgaaacacagaaccaagcctaccatagaggttgaaggatgttacgtatagcgaaggttaaaaaaatatattcaaaagtacgaagcatagaaactgtgtgttaatttgtgatgcattctactactatacaacaaaactgcttcacaagggcacatgatgagcattcctggcaagaatatactaccaagttctgaagtcataagcaaatgagaatgtgacaagaatgtggaacaagagctctgtgatcccgtgtatctgacgcctgaaatcggcggtgttggctgcctggacggcgcgccccaggcaatgatt

SEQ ID NO: 13160 - DNA, 682 bp, Oryza sativa
tgaagctccagcatctttacttccgggtggcatagccctggatgatgatagatttgggaacatgttagcatgcgtcagctagactgaaagatcttaggcattagtgtccttgagaaaaacaatgctttgcaagtttcagaaccagcttctgcacaagcacatccctcacttttattcatcttcctaacaagagtttggttttttagtactatgcaatacttgtgcaggttaatgttaactttattgattctcagcttcacagacctatatgggctacggcctttgtgatgttgaagttgatcaaaaggaaagtgtgatgtgataatactttaagggccacgcaaatatatagataaggaaaaaagataattcaccaagcacttccacttcaaatgacatcaatataagagtcaagaaagtaaataacctgaacattttggaatatcccaaacagcaattgaagactctgtgcactcaggtgaacaaagtgcatgtgtgttctcatggttgacgttcatagcaagcatccaggatccaatagtaacatcctcattgctgaacatacggaaactggagaaacatatgtgagaatccattaaacaaacatataacgtgactcgatcgtggatgaagtttaacagtgatgcaaaatgaagggtaccgagctcgaattcgcctatag

SEQ ID NO: 13161 - DNA, 7855 bp, Oryza sativa
aatcgcagcacacacacgcagttgcaatgctgtagctgcttttaggtgcaaccaggtaggtaaaccggttcatatatggccataggcagctgtcatgacaaaaaaaaattggcatttcttcgctctagacacaattcctgtgttccaaataagccctaacaatcgagaatttagccatttctaacaagtctccgagagttggaaactacagtgcatagaatgtgaattctgaacacgtgtttttataacaatattaatcattttcttttttcaaacacaactctgtgtatatatatatttaataagaacacaaaaaaaaagaggaaaatggaaccataatgaatccagattggatgtgtggggcttatggcacggcatgatgagatgctggctgtgatgtgagagcctctttaattctgttttttggtagtactgtgctgtaataataatccttgcgagttaatgcgggcattggttggctgatgccttgtcctgcgacgtcgtgcatggcgtggcgtggcgtggcgtggcgtgacatggcaggaagggtacatcgtgccgcgctcgccggcggtggaggcggtgcccatggacaagctgccgcggccggtgatcttccacgacggccgcctcgcgcggcggccgactccgctggcggcgctgctcgccgtgctctggttccccgtggggttcgcgctggcgtgcgtccgcatcgcggcgggcgcgctgctgccgatgccgtgggtgtactacgcgttctgggcgctgggcgtgcgcgtcgtggtgcgcggcgcgccgccgccgcgcgcggagcgcgccgcggggcgccgcggggtgctcttcgcctgctcccaccgtacgctgctcgacccgatcttcctctcggcggcgctcggccgccccgtggccgccgtcacctactcgctgtcgcggctgtcggagttcctgtcgccgatcaggacggtgcggctgacgcgggaccgcgccgccgacgccgccatgatcggcgagctcctcgacgagggcgacctggcgatctgccccgaggggacgacgtgccgggagccgttcctgctgcggttctcggcgctgttcgcggagctcaccgacgaggtggtgccggtggcgatggagagccggatgggcatgttccacggcacaacggcgagggggtggaaggggatggaccccttctacttcgtcatgaaccccagcccggcgtacagtcgtcacgttcctcggcaagctgccgccggagcacaccttcggcgccggcggcaggtccagccacgaggtggccaactacatccagaggctcattgccgccacgctctcccacgagtgcaccagcctcaccaggaaggacaagtacagggcgctcgccggcaaagacggcgtcgtcgacaacgccaccggcaagctgccatcgccggcgacggcgacggcgaacaacagcaaggacaaagcttgctaggagaagggaaaaaaaagggggaagtggatgttctagtagtgtaaaactataatgttattaatttttacctgtgtcgatttgcatggggcggtaaatttcctctttcttttggttatttgtactgtgtatgcacttgcaatgtaccaacggggagttgaatgcaatttgcataagtaaaagcaatgggccaggacaagcaaactattcttgtgagtcagaaactcagaagcatgcatctttctgcaggcaacagctaagaacataaaagcaaatttatttggtttggtagattgggtatcacacattacacataggccagggcataggtgttccattcgattcggcaactgaacaacaacccaacaagtaaaacgacaccagacattattgatatatacatactacgagtctacttatcaaatctggtccagatcaattgagttgtctctcgtttttgtaaattgcaagcaaccagtttcaccagaagaataactttcctttccaagaagaaaagcaatcgattgccacagaaagtgaagcaaagaagagtgtacaatccgtggtcgtagattccattgcttcagctaaaatgagtaactagcctcgagcttgaacaatgaacagaaacaagagtctggctataatttttctaggtgcatataggcgaaatggatcttagtacatcttaactccttccaggttacacatgctatgctcagtcctatatacacccggtaccgcggcaacaattatcgagggcgtgctgctatgtatcacaagggtggatcagtaacttactgtgcacacacattgcagcttttccggcagaagccaggtgcttcattggtacccaccatgtagttcggattcttggcacactcccctactgcagcccactgggggcagaggacgttctcatcctcgcacccgtcagtggaagctccctgcttgacagagatgtcgaaggacctcacatggatccatttagttgcggaccacttctgaccttcaatgaccgggcagctcccgtgcaggctgtcagagtctgttgttgcatcggggtggagactgaagaacagaagggcatcaccctttaccggttttactgaagaggagaaccaacagttaaacagctgattaaataatgatcataatggaaggtataactcatatatgcacggctaagacaacatgctgagtgctaagcccacagaatttatcagctgacaaggaacatacatagttctgcattatttaatatctggttttagaagcaaagtaacttaaaattctattacaggcaattcactatacctgcatatccatttttagcacagtcagaccatgtatcatccttgggttgtaataacttcccctaaaaaaaatagtcgagttactgcaagggaaatccaagtggctaacactgtagaaagttaaagaggacaggtaaactacctctgcttctggaaagatggtctctccccccttcccaacgtctgaaaggtacatgagcacagtggcgatccgatgtcctccaagagcttgattatttttgtcatggaagtaatcatagtgtggctcatacttctcgccattctgataatgtaatatttgaatggattcgccattatctaaacatgggcaagataatgataataccattaatgattacaaaaaatgaggtagagaaattttaacctagaatggttaggcatttcggatacctggtggaaggaacgtccaagctgcaatcctctcctctatcctagctacaacttcgtcctgccaaatgaatagttcagttcaacttagttgttacatgtggtactctgtaccagacacaatcagctaaaggcacggtagattattaatctgactcatctgaaagcaaaggtagctttaacagtctctatggtacagaatggaaactgaactacaggtggttgtgtgcagatatgtttgcaatagtgaacacatggggcaatatcccaactggtctgccctcaggttcaaatagtaagttcagatcatcacaattacgagcttgagaactggcctgttactcagtattgacgtccatatggcaaatatgactacgtggttcagtgctataagacaacagcatagacagtaagacagatgcaaagaaaaaatgagcaaggtggaaaacaatataaagcatgagaggcagttacaacccataagacaatgcacacagctcggatttgaagtccatttaaaacagtatacatgcaatggtacgagtcaagaggagagaaattggtgaagcgaatccagcagaggaaacatgacatgtaaaactaacatcaaaggtcaatcacccagatattggtattaatcattaatgccataaagtaactaagtatggctgatattaaagagttgcgatgtattttgagcaaccaattacatgggcactaaataaagtatacaagaagcatctacctaccaattaatcagaactgaatttttgtcatacattttcacatagcctcataaacaaatcacttactcaaatcaacacaactgctgggaggaacaaacataataacatttcactagtgagtacaaatttcagagaaggtaaaagcaacaaataatgaagataagaaatagttcaagtttattgtggttatatcaagaaaaggaaaaaaaaaactttttctagtagcaaatggatgaatttcagcatatgatatataaggacttcctacagactctggtgtgttccctacaagctaaagctagcaatatgaacagaacaaatgactgtagagtactttattacagtacagtctgcatgtcacaactgacaactattgagatgagttgtaagaaaagctgaaaacaggtaaaaatataaggaatagaaatatacatgaatttcaaatagtagcatacctttgcaaacaatactaatgtaaataggaaataattgatcgaatttcatctctcgcaaactacaaaagaaaactacctaggaaaaaaaataagcaccccagattccaataaatatgaagacaaaaaaaacatggagaagtattagtacattgagcgaacatgataaaaagatatgaacccccaacgatgaaacttcagccaaaaaaaaacattggtttcaaacatgtgttgcagataccaaatcaccaaagttgcgtattaccaaatagaagcttagccatatatcccctcttttaatttggccatgctaaaaaagtatccccaagcattttagatgaaatgttatctccaaattgagaggaaacaacaagttcaccaaatcacaagaagaactatagtagccaagttctgatccagcatttagtgtactgattgtgataaccaacaaaaagctgtaaaagactgcatctgccacaggctatttaatccaagcacattaaattcaaattctgaactgcttctgctataaaatcctaaattggtacaagcacatagattaatctcccttggcagtttaatactacctaaacatgcacgaacaccaactataaagacctggtatggcagtggcatggtagcgcatcaagaatcattacctacaaggactaccacccaaaatacaaaaatctgctattttagatttccaacacatatccaatctaaaaatacaaactataccgcagcaattccaccaattcccctttccatgtcgaaattacagtcgacacagaggcattctccttcctagatctctactattaacagcgagctgagccagtgaggcctataaccaggtcgggaccaatccaacacctcaaaacattatcgaaagaacagaacggaatcaggcggtgcggtggctggctgctgacctgcttcttctcgaggaacatgccggagctggtccgcacctcgctcatgacgctcttcccggactcgttgtccgccaccatcgacttctccagcttgtccttcgcctacaaatcgaatcaatccactattacccaaaaggttccccgaatgcggcgagatcgagcgggatgccacagtgtacactcaccagcgagatcaggtgctcgcactccgcgtccgtcaggaaccccttgtgcaggaacgccctagaacgaagcggcgggtcaggatatcgcacgaaccctaattcgcggcgggatggccatgggggagagagagagagagatcgtctcgtcagtcgtcacactcacctggggcgccacgagagctgcacgacgcgggatgggtcaaatgcgccgcggccgctccccgccgcggcggcggaggaggccactccggcgagcaccaggagggccacggcgaggaggcggaggctgccatggcggcggcgcgagctgagagcggccatggcgcggcgccgagatgcgcggaggaggaggaaaagcttcgaagggggagggggagagagaggcgcgatgtagtagtagtcgcgtagagtgagtgacaggtgggcccgacgactcgtggggcccggctgccagtgagagatggaggcgctagtttgttgggttccttctggaagcttccggggttcgcggggggtgatggactttgacttttacgtgttgctcgcacggaggcgtacttcttatctgcttgtacttttggtgaagcatttgtgagatcgtccggtgtgtgagggggagaaaaatcaagccaattccgtgtgctatgagaaatgcgtgtctgttgagattcaaacctcatttgaaacacatgaatcccagaaagaaattctgcgatgagttttcattaggttaacttttacatttgaatctctcgtcatctccgcggctaccacatgaccttttaaaccgattggtatcggacagcaatattgtgactgctcaagttttcagtcgtcagaccatcaaacttcagggaaatcagatgtgcatagctttactcccatttccatagctccagcaggtagtggcatccagagtcagagtcaggaggaccaactcacgaataggcagtaaattcaatttcatactatgcctcatatgcgagtaatttcagtttttttttctgttgttgtttggaaaacagagtaatttatgttcaacagcattggcatttagaacggtaaaaacctgtcaagacaaattggactataattcctatttcagacattttttatatgtagttacagaatagtccagttcagtatattgacagccgtgttatcttttgctaacaaatccagacgtgcagtgcaggcacagaatcaagtcaaacaacaaacaagatctgatgtttgttcgtttccagcttcttaaaaatagcagcagagtagaaacactcaaagcgaaaaaaggtagaagtatcctaaaaataaaacaggaatcctgatacagagaggtttcagagttttacagctcaaaaggaaaaacccattttatttcaggagaactaggtctgataagagtaactgcattttcgttcacaaagaaaacggagtaactgaatgatggtgcagatgaagtcatgaaactatgcagggggaacgcattggtgcttaaaaacagcaatacaacctatcatggtaacctaaacagcaaggcaacatataatggtaaccaagcatcatggaagtgtccattcttgtttttctctcaaaacaaacattggccatccaaggtgcagaaacaaaatgtcacaccagatgagcaaatcaagcactattattacgtataccctgattcctgataattcagttgatcagtacaggagtgaagcataacatttgccggaatgaccgaaggaggtcatttaatgtaattaagataagaagggagtgaagcataacataaggtggcctgcataatctagcagtccacatgaacaaaacaaatacctcacacaaattcatttgaagtcataatggagcaattcatgcatagatcactaagaaatgtgtattctaaaaaataaaacatatggctgagcggaccaaactttcaatcattttgttgtactgaacagcataacatctgcttattacagtgaatgaatttataaatctcactagcagaaaacaacaataatggtgtaataccaaaaggtacctcttctatctctcgatttaacaaggtatgattcatatgcagcaaatagtgcatatggtattgaactattgacatttggaatgacaaaataccaaatgtcctcaaaatttgtctcctaaaatacaaggagctctcctggatcccaattccattctaacaacttattattgcctgatgataaattacaaatggagatcacatacacctccaagaacacaacaaaaaatttgcatgcgcagctaagttctcatgatcaaactctcctcgtaaccaaagcacaaggcacgggctgcag

SEQ ID NO: 13162 - DNA, 679 bp, Oryza sativa
ttaatgaatatgaacttagtgagaatatagacatctattatatatcaaattccaatatagagtgcataggattacaagcatttgcaccaaattggtatagggatattaagtctaaaaaggatatagaaaaaattgttcaaagattagaggatatccaaattataggagaaattcctatgaaatattgggagaaaaatgctctcgagtgtaaaattaatataataaacccagaatatattattaagaccagcccaatagaagcaactccgaaagatatagaagaatttaagatgcatatagaagaactgctgaaactaggagcaataagagagagtagaagtccacataggtctgcagcatttatagtaagaaatcatgcggaagaagttagaggtaaatctagaagcatagctgattatgaattttctttattaagagatatagcataacttattaagagatatagcagatgaatataataactctatgaaaagtgagtggcctaaaattagagacaaggaactttatttctatagagaactatccaggattaagaaacaaaaaaaagagaaaagcttggtcatagaaacccccagaacccaggaaattaaaatagaacaaataaagtcagaagaaccaagagaagaaatccaaaagttagataaggtattaagtgagg

SEQ ID NO: 13163 - DNA, 668 bp, Oryza sativa
cctgcattaaacacttatttcccatggcttgctgagtactcccgtactcacccttgctctatataaataatcccccctagttgctgaagaagatgaagcggatcccgctgacgaggagttcttccaggagcaagccggctacgatgagttttagggtttcggcctagttcccaagtcgtgcctgtgatgtttggtccaagtcttggcttccgcttcccttttgtaatgcagttgtgagctcgggatctgtccgcagcccaacatgactggactcctaccttataataaagagacctctggtgctgggatattctgtcttcctgtgataccagcactgtttcctgggattggtatcgattaacaggttaatttggagcgtcacgggctagttccgctcgggactagttcggggcgtgacagtctctttggtggacgaccgcctggtgcagtggttggcctcgctggaaccctgatcttaatgagggccctgggccattggatgaagggaccacgggcatttcctagtgagaggaccctcgccgttcggtggatacttcagagggaacagctcgtattcgggcttcaccaagtcgacttgaactttgcacaggcgggcctgggtgggctccatgcccttttgtctctggggtcgggttgacgcaagtccc

SEQ ID NO: 13164 - DNA, 522 bp, Oryza sativa
tatatatatatatatatatatatatatatatatatatatatatatatatatatttattatatatatatatatatatatatatatatatatatatatatatatataaaccatgcagcaacaggggcatgcaaaaaaagtcagctctatctttagtcccggttggtaacaccaaccgggactaaagatggctcagccacgtggattttttaaaatagggcaggtttcatagtgtccctggggacaggtgaatgcagtccattctatagactcttctgtcatttttacttgccaaaacccagcttttaagtcaaatttcgagaaatatttgctaccttgtatcctattaatccattcttgcttatttgggatattataggcatcttctatagtattatcatttagccttttataatttatgaccatcctagatttacctctaacttcttccgcatgatttcttactataaatgctgcagacctatgtggacttctactctctcttattgctcctagtttcagcag

SEQ ID NO: 13165 - DNA, 2632 bp, Oryza sativa
gccttggatgtcttctggtttcatcgttcttcttggaataccagcttctttctacaaataaaaaaagagaataacaggaataaacctgttaaatgccatgttttgatcgataaggttaaccaagattgtgtacagcagggtcagaaacaacaatgcaaaatacattatatgtgacttacaccagttatagtccatttgtttctgtcctatctagtacaaacccaaaatgaacaagataaatgtgacgggcactggttgccagtaaaattttttaaaaaaattcctttatttccctagatgatgccattacctaacaagatgcacactggatggattcctcgttaatcataccaaggtgtgcctcaaattttactaacatgattagttattccatttttgagaaataaaatgtgcaagtgacacaccaaaactttttgcaatggattcattggcacaaaattgaattgaagtctaacatataatagagacaaggcatgtttgacaaggatatcaactaaaacaatccttttttacctaagactagcagttttttctccaacagcaggttcatctattgcacatatcaaactgataatatttgacagaaatagattccaaaataagaaggaacaactaaccttttggaagtcaattccagaataaacaatatggcagtttgaaagctctctgattttctcatcaattgcctgttcagtcaaaatacagtcagttgccaaaacaaaaagaaaacttcaattggcttataatgatatgaatatcccagttgactaatgatttgcacataaagttatcaagtgctcaggagtcaggacagctgaaaaggagtaatattgcttccagtttatgtttaagcagcaattagccttttatgtcacctgtctttgacgcctaatcatcgttgccagatcaacatatggcaacttttgatcaattctgcactccatcaatattcctccatcatagtctttaatgtacctggaatcagcaactattgagttcaacagataaaaacctgctgtagcctagtacaataatactctcagacaacaagtagtgttatcattgttacacttttattaggagttactgactcactttatacttcaaggaaatgataaaacaatataattgacaataaattgcttacccttgccatctttctttgtccaatgtgatctcctttgtgaaaccctacaaattgccagcagcaaaggacaataaaataaaccaaattattgtttgcaagacatatgctaattgatctcttttgtttaaatcgtcaagaattcttatgatcaagaaactactaagtacagaaactgttgctgaacatatgcctaagggaactaatttatagctgaaacaaaactgtaggacttaggagataagttgaactattaaagattcaaagttagtcacctgatacaatcttacaaagactgctagacaatgttggacacaacatgtttagaaataactttataaaccatgcattgaaacattctttttgtcgctaattctatgaagtcactatttcgttaggttcaagtgtatttcgtagctgccacttgagaacaatcacaaaacaatgaaattttaagaaagaaagcatataaaagagttcagtcaaatagtcaaacctgctttacaaaatagccaacggcattgttatctgcataagttaagaaatgagtgagcccatcagcatctcgggcatgttgcttcaggtgattcattaaccgtgtcccatagcctttaacttgctcatcagctgtaattgcacaaaatgctatttctccaaacttctggctacaatttcaaaacctatattaggacagaaacttatgctgcagcagaaaaggaacatctctggcatggtgcatggcatgacgcaacagaaataatcaattgccagacaaacagaagtgtgcatgctgtcctacaacataacctttactgctttgagatcactgaacaataaatagtagaatcctataacacaatctcattatcaaaaatcaacgttagctacaaaaacttaaaagaacagctcatagcttccattagatttcattatcaataactatcagatatctaaacaaaaaagtaccacaacttgatcattcatgcaagtgcaaatacatataacagatgtcaatacatcatacaagttctagcaccaaggtggaaatattaccttgtataaggccggtaagtaatgcctcctacaacaatattattcctgataaccatcattgatttgtgagttctgcaagacacatcacaataatttcttttataagcactaacgaagagagatattcttgtcctctgcttccaaaatacgtagtaggcacattacactgagaattacctatccataacaagacggacaatgtactctttgggcatgttaggaagctgccgagcaaagatattcttcaagcctaccaacctggggaaaaacatcagtcactaacaaatctgaggttgtttggaacaataattttagcatacaaaccaaatcatatgttcatcaactccatcattagaatagcatagaaatttcagcctccctgcttcttcctgcagaacaatccaccaattttag

SEQ ID NO: 13166 - DNA, 503 bp, Oryza sativa
tctcagaaatcctatgcgcattgcgcgccttggtgaatggctccgaacagcaagaacacagctgcctggatttcgatctccttgtgtcaaccacatcattcgttgctacagtgcatcttttgcagagatcatcacattgtgcaagattgttgtggctactgcagtatgccagagatgatatctccgacctatgcgcggcgcagaccaaatccgaagagaaccatggcttcccatgaagggcatgatccatccttgtgcacaggatgcatggcatcttgagcttgtggatgcgcgccaacctcgtcgccaggtaggatgctcctgcggccacatggagcaggatgatcaagcaaagctcgctgcaagcataagacagcatggaccagaatctcctccagaagtcctgggatctcgcatggtttttcgcagccatggatgatcaatgtgcatcaaaaaaatcacatgaaaggttcctcaatgcagcttcaaggcaaccaaaatca

SEQ ID NO: 13167 - DNA, 2606 bp, Oryza sativa
gagcaacagtctcccacatgcgtgcactgtcagtctcaatgctcatcgttgggtcggagatgtcaaccagggtgatgctcatgttgttgcggacgatgcaaagcttcccatttaatgtaaccaacgctgcagcttcaaaggcgcgcgagctgcccaggtggtgcttgctgtccatgaattttgcccatgttcctgtgtttggatcatacaccctaagcttgcagccatctcgacaatcagatgaatagagctttccgttgaaggtaatgcttgggttccgccagccggtaaccatttcatcatcaatggttgaccataaattggatgatggtaggtagacttcactcgtcacttggcgatgggaatcaagccctttcaggaaccacttgccatcatatacaactccaatgaaaggtaccatcccattgttcatttcagcaacgcaggcccatctgttcctatttggatcataaacttcagcagacgggagtgtcctttgtattccttcacactccccaccagcaacatacaagcaattgtttatgacacaagaaccaaaaaagtgtcgtttccgtaacatatctggagctcggtgccatttgtttgtccgagcattgtaaaatacaacacgcctcatagagcccctcagaggatccttaccgccaaataagtacagatagcaaccactcagaacagcacagccaaagcctaatgcttctgaatattctgctggaactggtggaagtgacttccatagctggtgcagtgggtcaaaggcatgccaggatatctttccttcacggtcccttttaaagacataaacccattcttccgccatcccgtttctcttgcgcaaggaataatagtaattcccagataagagacggttccatcttttgcaaactatccgaagattgggatgttccactcgaggaacccgtatgagacaagcaatagcaaggtcatcaggaagaccaggcaaaagtggtgcttgagttcggctcctctccttacgagagccccttgatttgcacttgttgggtttgacatcaggttgcatacacatctttgctccaggaacaaactttctagcatcaacaacagttttcagaccagtatctaatctgcagtagcatgagacagactctacctgagaaatgcaaccatacaacatataaattagcaatcaatgtactagaaggggaaaaactgcaacgcatgaaaaccacagctcatattcactcagaatgtgcctacttgtccaccaacacatgcaacatataattttatccaccacaaaaatatcatgcagatcaaatttgctctgaaacagcaacaattttcaaatccaccacaaccctattttattatgcgagatatgacatggagaaaaatagacactaccactctaatagtccaggttacactaggttatcagatagatcaaaatatatggatacatggccctgagtaaaattaatcactaaaaaactctggagagattgtcgaacttgttttacaaagatcaacactgcaacatgatgttgttgatttataaccattttttttattttcaaaagctaatttctgtttaaatacccaaacagaagctaatgtggattagcgacatcataagatttaactgttagcacatatgggtaaaaaaaggttgcaggatagcctccataatttacaggcatgtagcagacaaaatcaacaaagcaagactatgagtggtagttgcacatcaaaagctgagatttttcttaactgcgaagtttaagattaaaaccatggtacagactaagcttaagaaaatcacaagtcaggacaaaccagctcatgacaaacaaagcattacacaaaagaaaaaattaagcacaataagcatgttaagtttgtcaagaaatggtaatggaaatgcgaagctgggttcatgatgtcagtgcccagaaaccagttgaaagctaaagatactaactaatctacctacctaagttagcagatatctgtgtgaacacttgaaacggtatggacgagcttagtgtaacagttaaagacctgaccagaacaattgcaactttccaacccaaattatcaattggccaaattcaaggccaaaatggacgcccaagctatacaactacattatggttagaaacaacaaaattctccagactcacagatactcgccgatcatttgttcatctcattacttgagcagaatacattcccaaaaaaaaatgaagaaacttaactaatcgattgcacacatacagggagcttttagagcatagcagaagcccatctgctcatgcaaactttccatatgcataaccagggataccgaaatgcggttgcgaggaacatatatgatgtccggcagaatcttatcctaacatgttgtaccagccacagattagtgctctaagatcactaccaccaccaccacaagtacctaaccccgagtagcacctgataccgcgatgaaattccacaccagcaaatctactacttgcctatgatttccgactcattttcaccgatttcccccacattccaacaacacggtaacccttccaagaaggcacacccccccccccccc

SEQ ID NO: 13168 - DNA, 541 bp, Oryza sativa
ggtgttcgtcaaggcgcaggtcgggaaccagatcctcaagacgtcggtggtggcggcgccgacgctgaaccgcggtggaacgaggacctggtgttcgtcgtcgccgagccgttcgaggagcagctgttgctgacggtggaggaccgggtgacgccgcgcaaggacgacctcctcggccgcgccgcgctgccgctcgcgctgttcgagaagcggctggaccaccggccgttcgtccagtcgcggtggttcgacctcgagaagttcgggatcggcggtgccatcgagggggagacgcggcgggagctccggttcgcgagccgcgtgcacgtcaaggcgtgcctggagggcgcctaccacgtcatggacgagtccaccatgtacattagcgacacccgccccacggcgaggcagctctggaagccgcccgtcggcgtgctcgaagtcggcatcctcggcgccgccggcctccagccgatgaagaatcgcgacggccgtggcaccaccgacgcctactgagtcgccaagtacggccagaagtggg

SEQ ID NO: 13169 - DNA, 833 bp, Oryza sativa
atgtctaccgtccagaaaaccaataactctcgacagaagaatgattatgaaccatctacaacaggctctgttgcaggtaatatatctattacaccactatttccttctatattatatattattacatgttttgagaaatatttacatgtacttaatgttcctatcatgcttttttggtttagatgcacataggggacatgcatatgaagatgatgatgtcgaggcattcacttatgtattgcatggtacatatgatgatgggttgccatcaaaatcgagtcacaaaaggaaacaccttatgcagcaaaagatgaatggcacaaggcattacagtactggtgttgacatgccttatgatccatatgtggagagcaagccaggaaaccaaccatttttatcaaatggaaaaagaccttcagatttctttaatattcctacaaaacgcatccggacagctgctagacaacgagttgtaagcccatatcctgctaatgcttctggagccactgcattcacaagtaaaacagatgcttctagtggagacacaaactcttgtcaagatgaccaaagttcattgcatggtggatcttttccaaggaagaatgtggatattgaatcgacagttgattttgatagacaattgtatgatggcagtgaggtatctactaagtcaaaaaagaagaaaaagtctaagccccttgatacaagacacctcaaagtgtcgctgagtcttgctctttgattgctgggaaggttaagatctttatgccaactctctctctatcttgttaccaatgttgtagagtaagtgattctgctgatgtttcagggca

SEQ ID NO: 13170 - DNA, 9405 bp, Oryza sativa
cagcagtccatcacttgtgataacaacctttaaatgctccggttttatggcccttattgcaattgcaagaaacacggtgagcaagacatgacagtcgtgtgaattataaccagataccgagaaatctttcatggaaactagtcgactgttgtttgatgagaaacctatgggcactctgacatcacggagtgacttgcaaaatgacttcttctcctcagatgtcagtgtgaaacaggctggtggaagatatactttgccattcttctctccttcttgagggtgtaactcttcctgattcccatctcgactaggtgatggggctagagaattaatggtttgaatcaccgagtttttttttttttgagaagatgcatctcacactcaattaatcttgattgtaattcttacagccacaattgaagtaatactccgtacaatcttgagcaactgaaagccaggtagaaaaactactcaaagacattcctgcctgagctaatctatgagcaattttattcactgatctcctaacccgaacgacactaaagctattgaaaggactcagcttcaatttcagatcttgtaccagatccataaatcgatctactaacttccttctgagcaaccatcctcgttacttccaaagaaccagtctcaataattagtttagatactcccaactaatgcaagatcagccatcctgctacaagctagtaattccaaggtggtagcgtcctgaatacttgggatgatactgtgctactgccgccataaaacctccactgtcatttcgcatgaccacctccactgctctaaacttgtgtgccatcacaaaagcccaatcagtatttgccttcacccagctgatcggtggtcttcgccaagtttgtgctgaattgtgaacagggccattgttcctggatggcaagttccatggccaaaccattctggatcaatctccagcaatgtaccttcattttatttggaacacttcattttattctggagtctcttgttacggtgagtctggtgaaggcttgtcgggacggctcgatgtgagcggcaaaaaaggatcaactcaagtcttggtacacgaaggttcgagcaagtaacagattcggattggcgtggcatattcgccaaggtggagtttgttagagtttgtgtcgaatatatgtacgtagtcggttacagtttaggacttggagttgtactaggtgtaggactagagtatgagtcggactctatcctaggatctcttataaatagaggtgcgtgtctgttgtaaccgcatggcgacataccatagcgagagtgagcggctgccggcggcgaccggccgtatgtcgttgtaactctgatacgctgtatatgctggatcggggaggagcacccgtaatcagtgccctggagatgtaggcctcggctgaactccgttatcaaatatcgtgcctcggtgtcgtcatcatatttggatctcctatggcgttttcttccgcgtttagctaccgatgtcgatttcggggctggtttttataacaagtggtatcagagcctgcgggagatccaagatagaggtacgaaagaggtgctccacaccgcgacgactacacaggatatccacggacggacatggacgcaaggtggagcacggtggcgatcaacggaatttgatcaatggaatcggacacttcagacagcggtctgaactgttcgatggctgtaatcaacaaggagatgaccagacgtggtgctcgggttgatggcggccgaagcgattggcgatccaattggtgggtcggacacttcgagcgggtggctcggactttctggtgagctactctcaacagggagacgtggggccccacgctcgggttgattgaagctggaggtgatcggcgttctcagtcggtgggtcgaacactctgggcggggtggcccgggcctttcgatgagctgcgttcaacagggagatggctagacatagcactcgggtcgtttggcggctaggaagacggcatgtgatttgtcggcttcggctcacgactagattgatgggtgatcaatcggaagtcggggcgggttgcgggctcgaggtggagcagcaacagtggcgacgaacttcgggcggcaggaacacggcttggtgtagtcgtcgtataggtgccgacgagattcgacgcggaccggctccggtgtttggagggggcaatgacggcaactgctacagaaggaccggcgctcagggagaagcgtgcggtatggctgcggcagcaaagtcgtgaggctcgacacgcacaatagcagggcgcacaacagaccaagctgggtagcagagtctaacagggacttgggtttggcttggttttcttcaacacaagaagcaaggtgcataggaagtatcgtgtagctggctgcatgtacatgggaacttgagccaaaattggagagacggtcaacatgcatagattattggaggaaagcatgcatgttgcatgcatgcaggatcaaatcaagcatgtgttggtgttgcaatccaaaagggagctcaggagtccggataggatgcagggacacggtacgtgtatgcatggataccgaaaaaattagcaggttgagaggaggagtccgtggtagagttgtattcgtaattgaactttggcggctcatgacatctcaacggctggaggctcggtgaagcttgaggttgaagggaggcgcgggtgctatatatgtgtaggaagactggttgatatatataatcagggtaaatcaatttccccggcaacagcgggtgaaaatcgttgagggcgtcaacgggttgtctggcagtacaggatatatccaggatctgcgggaattgcatgatagggatatatgaaatctgcgtcactgaaggagaagagtaaacgctatagtggtaatttcttcagatgattcaaagcaacggtgattttctcaaactattaggaattcagtctacggatgcgggaaagcgtggatgttggatttattagctcggttcataagaggacaaggaagaaaaggttctcttcaagtttggtgagtttgatttatctatttggtgatgacatcggttatctggccatggattagatcaagtcaaatttaaaacggtagatggaggtgaacatggtcttcgggaagtctatgatgtgacagctaggaaggatccaatttcacttggcaagacgactgtggtgatatgagagaaggtggagcactgttgcaggtggagtcaagaggaagaaattacagggatagcgggagtctcttgttacggtgagtctggtgaagacttatcggggcggctcggcgtgagcggtaaaaaaggatcaactcaagtcttggtacacgaaggttcgagcaagtaacatattcggattggcgtggcatattcgccaaggtggagtttgttagagtttgtgtcgaatatgtgtacgtagtcggttacagtttaggatttggagttgtactatgtgtaggactagagtatgagtcggactcaatcctaggatctctcataaatagaggagcgtgcctgttgtaaccgcatggcgacatagcatagcgagagtgagcggctgccggcggcgaccggccgtgagtcgttgtaactctgatacgctgtatatgctggattggggaggagcacccgtaatcagtgccctggagatgtaggcctcggctgaactccgttatcaaatatcgtgcctcggtgtcgtcatcatatttggatctcctatggcgttttcttccgcgtttagctaccgatgtcgatttcggagctggtttttataacagttgattacaggttgacgcctactggcctactgcgattgcgctctgctgcatatgacaggagcatttcaccaaaaacacccaagactttgtgaattgctaggcaacaaaatcttctccatcatgttcaggtaacggtatattaagcacatcggtggtgtcacactcaaacgaaaaaacagaaactctatcattgtcccattgttttgtgcttgatataaatagttttgatactgtctggtcgcccaccggctccttaaaacctagcggtctctaggagcccacccatgggatcaaattatctcttttaattttgattgatttaccatcggtaatatgccataacaggcccttgctcagcagctctctaccaaaaataatgcttctccacatatacaaagccttccttggacatgtagcttccagaaaggagcaatttttaaaatagagagcctttaatactttggaacacagacactctggacatgtcaaaatcctccacccctgcctagcaagcattgcttgattaaaaatcttgaaatcccgaaaccctatgcctccactctttgatttacataatctttgccaagaaatctatttagtcttcttcttccctgctgtcgcccccactagaaattcctgacaatggtggttaataatttggagcacaaaccttttggcaatctctcatggagtaggttggaactgctaataggactgattttttttacacatcttttcctgcattcgataaaccctgccctttaaaacctgaaacttttgtccacatcctctctctgctattcttgaaggcacccaatttgctgatctcatggtggaccatctgatggctcagcaataagaagacccaggtcttctttagatatagcataaacaaaaaaggggcgtctaaggaatttattttgacaaacagtcaatcacagcttgtctatgaagcattcggtgacatggtaatatttgacagtatatgttgtgtgaactggtacaatattccatttgtaccttttgttgaagctaaccatcattgcaacacaattatttttgggtgtggtattttgtcaaatgagacaatttcttcatatgtttggctgtggcaaactcttttggaggcaatgcaccaaaaacatcgaaagtcattgatcactgacggggatgcatcaacggcgaaggcaattatgaaggttatgcccaatactgataatagattgtgtagttggcacattgaggagaatatgaaacgtcaccttcgttggcaaaagcttgcatacttcaagaaattcctttatgataatatagatgctgatgagtttgacagaagttggattgagtataaagacaagtatagattcactgaaaatgacttatgagctgcatgacatacgaattaaggaagaagtagtccgtagcatatatgaaaaggaaacacttccttggaatgcggagcaaccaacaaagcgagtctttaaactcaaggctgcataggcatcttgatcgaaagatgtcgctagtccatttggttgagaactatgaattttgcttatcacgtatccgtaggaatgaagccaagctggatgcgagagcctcacagtctgtcccattcactagtctacaatatgtgctaacccattagagaaaagtgtggtacacatttacacaccgaccatgttcaagaaggtttgggctgagataaggaagctatataagtgggaaattgtcaatgtgacatgacaagatggagctggtgtgtttactgttgcatcaaaaaacaataatgctctacaggttcatgtggtgtgtaattttgaagagcaatcgacgagtagtgccaattgccattaccaaaagatggagtatgacattatcccgtgctcacgtatttttaccagttcttaaatttcttggtttcagtactgttccccgttattgtgttatgatcaggtacacaatggaagggaaagaaacatttgagtcaaatagaagtatcaacactcgtgtgtggtctgagcaaatggattgctacagtggcctgaaaaacataagtagacttgctttatttatagcctctagatcaactgagcatgcataaaaggtaagagagtttttttcggagtattatggatgaagattcagtgaaccctgataaagagtggccgtttggtcctttgccagcgcacttttctacttttcagctagtaactaaccatacaggaagagagtcctttatcctgaagtgattacatctaaaggtgctccctcatagaagatattgaggccaatcagtgattgcagacaggataaatacatggtttatgttttcataataaattttgccacaatagaagatacttggttccttttgagattaccaacgaagttatctgtaaaattatgggataagttttggtaaaaaagaaagaatggttgacgatgatggcttgaggatacgccatagggaaagctgattatgttattaacctcaggcgatccttccaaatttcaggtgaggccaaccgctgtaataaaaataaagataatgttgtttctccgtgagtgctagggtgggatcatgtttggcttggggctgtttggttcccagccacactttaccattacttgccaacaaaagttgccacaccttgcctaaggtgaggtgatcaaattgttagccacaacttactaagcctaagggaatcttgccacacttttttgagccattgacacgtgggacccaatttgttggaggggaatcttgccacaactgtggctacaaccaaacacctgtcaaatttgcctaaccttaggcgtggcaaactgtggcaaagtgtggcttgcaaccaaacacacccaatcccttgttgttggcacttccttcctcagccagacagacctcatgcttgaaaatcaaacactcaaatggggtcttactagtgttcctccctattttatccctggttgttcttatccatcattgaaatgattagccactgctaaaaattgaactcccaatgcctctctctcctattgtattgctatttccagagtggttatttccatgatctcttggccgatcggtttgtttcttctcctagagttttgtgaattgcgttcctttcgtaacatggaattgaagactcctgctatttattgatagtgtagtcgtggagtggcgggtatgctggcattaactgacaatctgtgtgagacaccaactcatatatgaaatgcagtagattagaatttgtttggtgcattacctaaaattctagaaaacataccaaagtcttctccagagtttttttgggtctctaggaaggtgtgtaaatactggattttatctatgccagtgtaaaaatcacctacatttcttggcaatttttttctataacaatcttttcttttaaaaacatcgtcttaccataaatctggttttacatattgtaatctcgcgcatcgcaacaatcttgtggtggcaggtttgcattcctcgtgcctcctcttcctactgaacggctcctacatggagagtgaaaatctgccgattctcattggcctggctcctcttcctactgaacgtacggttcctacatcgagagtgaaaacatatcactgtactaagtttggatgtgtgcattcgttgtgtggatgtagaggccgggttttaatccatcatcttaaaagaaatgtgagaaaaaccagagtttggaggttaagttaaagcttagtacattggactggagttgaatttccatgtgcaaggagatgcacttgctaggagtatattacagtggcgtctggctttgcatgtagacgtagatatccccatggttccatcatgatctctcagcagttcaaaaacattcagttgaagtgtccaagatgacacgcggtgctctttcctattttatgacgagtggaacatgtttaacggtaaatgcagaacaaataatttaaaaaatataagggtgctagtgaaataacactatagaccaagactaaataatacattaagagtatagatggttcatatatgttttatcatggtgtcattacgagatcaaaactaccggtatgagcttattggtttttccatatcgtcgtgcattaagttcaacttgtttacatgggaaaaaatgttgggtataattgccatttcttgcaaatcaacgaatagataattttggaagctatattagtacaatggtgtagaactaaaaatccacaagcaatcaagctagtgtacatgtaattggcatttggcatacatgaggcctgctaatgggaaggaatccaatccgaatccaacccaccccatctcttttatgcacagctgaccaaaccaacccaatccatttcaccacttcaaactccaacccccacaagatttgggaccaaaccaacccaatccattctcctgaaatgggtcttaatccatttccaatccagggctcaaaccaaagcgcgtgcagtgcaggcttcatctcaagccacagaggtgtttgcgtccatggacatggccacagcgccctcctcgaggcataagaacgaacgggggagaggatgaaggtggagacgtctgtttttctgaactgagttggatgttggctattgactggagtagaatccaattgaatccttggactcaatccattcttgccccaccgttttagttttgcatccaaaaccaaaccgctccaaaccaattagtctatgcactaatcaatcactagtccattgcccccaatccaaagctaaccaaactaaaatccaatccattttatccatttcaatccaatctattggcaggcctaaatgatagcttttattagctaattgggaatccctcctatcactctctaggtgtttacactactacgtaacacattttcccggacgggaatatccatttttccgtgcggtcatttggcccgcctgcacacccctgtctgtgaaaatcagtattttcgcgtgcgggcggaaggaccgcatgggataatcgattatcccgtgcggtcatactgaaccaccgcacggaataaaaaataccaaaaaaaaaaaagaaaaatcgccgtccgcccgctggccgccgcaactcgtcgtcgacatcgtcgtgcccaccgccgcccctcaccgccacgggggacggccgccgccgccggatccgggcgcgtgggggctggttgctgtcggccctcgccgccgcgcccgctcgccaccgccgcctcgccgtgaccgcccagtcgtcgcctcgcgaaagtagggagaggagagccctccctcctcatcgtcgtcatcgtcctcgagcggggaagccctccctcctcgtcgttgttgttgtggtcgccaccgccgctcccgcctcgtcgtcatcgtcgtcgtcgccctcgagcggggaagggtgggagagggacgctgccgccggatccgggcggggacggccgctgctgccggatccgtgcggggacggccgcgagccacccgtcgttgcctgcccgcccgcccgccggatccggcggctacgtgctcccgtcgcccccggggaggggaggggaggggaggggacacctt

SEQ ID NO: 13171 - DNA, 15814 bp, Oryza sativa
aaaagtttgtagcagctactccaccaaccatctcaacactatttctctcatcgaagaaaagtagctataattagttgagtgattttagggcgtgtacagtaatgattaataggggctctttagctttgctaaagaggaatgtttgctgatatggaagagaaagaaagaggagagataaaatattgttgatgtgagtaacaatggctcaacatagaatgtttgctggcacggaagagagagaaaaaggagagataaaatatcgttactatgagtaacaatggctcaacatcgactcatagcctttataaaatggaaacatagttgcatgagggtgggaaaaaaagaagaataagaaaaaaataattttgagttaatgattaaaacctttatcgtcttaactattgtatagacacggtctctaaataatcttgtaacgtctaagataccatactagactcacattgatacttgttggtattagaggtaccaagatttacataagaaacatggtaccctctatatgactatcagagactataaaatttgtctaattaattgataggagtagaagaaatgcttcgatcaaagagttctaccagtgcatgtgcatgctattctacaacatcatgcgtgtgaaaaatacaccatggcttggttgacgagacctataattcccatcagccaaaaggacagaggaaccagcctgatgaattattcctgatgctgcctccatttcctattcaagtttgcacaacagcgatcatccatatgcatcccatcattcacgtctttttccctgccaatatgcaacttaatttattggacaaaatgaagttcaatgttgtgctcgctcataatgtggaaatgcacacacatataacttgatttgatttcaggtgcttgaaaaaacagcatcttaggtactaggagttaccaaaatttacgagagaagatttggtacctgcaaattcttattaaaaaacataaacatatagagagagagagagagtgtgtgtgtgttttgtagattgctatttttcactggaatgatgagcaaaggtaattaatttacagtttagtgtaacgacattggataaggacctattgagtttggaaccatggtttgatcccggcaaatgctccaacactagctaggctgaaattctttgtacatagaattccttgcactggtggagaaaccgtttgtagtcccggttggtaaccccctttagtcccggttgtccaaccgggactatgaatccgggactaaagatagctctatctttagtcccgggtgaaataaccgggactaaagatcgatctttagtcccagttcgtgttaccaaccgggactaaagatcggtcagtcacgtggccggctaaaccatttttagtcccggtttgtgttacaagtggaaatgaatagtcctggatgcagaatactccttctgattcttacacttattgcatggacaacaaataaaacccttttgcctgttagctttggccactctcaaaaaataatgcacgccgttagtaaactctttggaccgcaacagtcagcgtacatccattgccgatccatctacatgacatgaaaaaaaaatcgtacacaaataattattcgtgcaataatgacagtcatacaataattataaaataattacaaactctttcaacaatgacacaataatgacatatcattattcatacaaaaattatgaaatattacaccaaataattcttatttactatttataaagttttaaactaatattaatgtgttgtacttattttaatttttcattttagtttgttttctattattcaagattaactttcactatattttccttctcaactattttataaaaccttctttagcaaataaactaaatttctatatattctttcttccccacacaaattttctctctcatcaactaacaacaaaattttgaagacaaaaaagtgtgtaaaacatagctccaaatgtaatatgaccaaaaaaaaacattggaggatgaagttgctaaccttttaggcacctccgatttgtataaaatcaccaaaataaattcactagaaattttggcatgacctcccctcttttttgaagaaattttgaagcttgctcgggcagctggagtagaaagaaaacatatatataggggtgggactttagtcctggttggtgttatgaaccggggctaaagatcgctaaagtttagtcccggttggtattaccaaccgggactaaagatcaaatatgtccgttaccctttttaaccgggactaaagatcatctttagtcccattttttttgcaaccgggactattgtggaattaggccgaccgacgaaagatggtttctctaccagtgttggtaatactacaatgcaaccaggttaatatatatagctgcatatatatgtttagcatgcttgatcgagatcataaaaactctctctaaacaattaattatgctcgaatcgatatgctaagctgtaagggatgcctctcgcgatcggtatacttgctcgagcagctcacatggcgcgtctccccttgttcctcagatcagttcgctaatctggctagcagagcaatttgcacaaaagatataggccgtgtttagtttcaaaataattcttcaaactttcgacttttccatcacatcaaaactttcctacacacataaatttccaacttttccgtcacatcgttctaatttcaaccaaacttccaattctagtgtgaactaaacacagccgcaggaaccgtgggactgcgattcaatggtatcaagaggaattgccgcacgatgtgttgtggcctcttgtcatcaaagaattagcacattgcaggccgctagttcatcaagatttatgtgggtgagtgtaggatcgaatcacaagaactaagccaaccagaggggggtgaatggttgatatacccaaaaacccaaacttttagcggaaataaaagttaccctcaaattcgatgtagatcggtctaaccgaggttgatccgccggtctgaccgagctcgtgccgccggtctgaccggtgttgatccgccggtccaaccgcctgaagattgcctgccgcgtgtgaagtcgccgccggtctgaccgcctctcctccatcggtctgaccgccgcctgccgccggtctgaccgccggtatgtcgccggttagactgccgaaacccgatgaaacacaaatcgaagaactctcaaagtagataacaactttattacttctctctgtgtttacaaagtgcaccaacagcactccttacaaaaatctcgactaaactcgaaaccctaactaaactagcaactcaattgctctcaaaagcgataccgggaagcctcacgctccccctctatttatacatgaggtaggcagcctaaagccatgaactaaactcatactaagtgtcctaaacaccttaggaaaccctctagtacaagacacaaactttacataaccaattgtaccaaatttggactccttccaaattcgactccgcatcccatacgcacacaatacctccatcgtatgccatatggaatcttcaccaaccacgtgcatcaactctagccttagtatcccgcatgatatctgaccaccacggacattgtcttaccaccaagccgactcccggtccatcaccgcaaatactctcccgaggcatcgggtcacctacacatgaaataaacaaagaaaacatattctaagaccaagctatccccaacttgactcattgttagcaaacaacagtattacatacgtatagtatccatctagaagctataaccatgaaacaatcacagatatccaaagaaacaacccgaaaccgaaaccgacacagcgtcggccggtcagaccgcgggccggctggtctgaccgctcgatcaccaccggtctgaccggcatacaccacccggtcggaccggtcacataaaataacagtgaattcgatcatcacctgaaaattgattatctcaaaaccactttcgacgataatctccaaatatcaaaaccaataatcatagatgccaattgttcatcacagaataagaatcaaaacacactttaatcttacagtgagtaggcatcaaactcccgttgcctccctgtcctattggggatggttgtatgtacatctggaatgatatatatacttgttcaagttgagttgttgtcgctgtgctcttcctccggttggcaggctgattactgttcaacatgggagattatcattatatatccttgtcatgacaaagtataacactgaaaggtgcatgcaacacgctcacaggctctacccgttctgtttaacatgacacacctaagccatatatagcacatctaccacaatggttgtgaagatgtaatgaaattttcattaggaaggttgataccacctgctagtacctcgtcaagtaccatgaaatcacgctaatataatggtgtggtcttattaaatgttagaccatacaggaaacctgaataaagcgaagaaaacaaaaacaatagcatcaatcgagagcaattacatattttagtattgcctatcttttgaactccagttcttagtactggctgcttaataaggttgtaatttaggtgaaattttaagttaaatatctacatgtagtcataactatttttcttctcacaactattctcagaaaaattctaaaactttcgatgaagttcatgttcagattgttttaatatatatatatatatatacatgtggggccacaccaatagaggatgaagttgctagccttttacaattatgaagtactctttttttttctaaaattatgaagtactcttattttctctacaaatttattctctcctctttttccataacccttttgtaaaagaatgacatatagaccatacatcaatacaggatgaagttgctaaccttttatatccttttgatttgtgtaatatcaccaaaatactttcacaaaaaatttgagcagcaactctcttcctcctcctcctcttggcagcaatgtctcgggctggagaaggaagaaggcatataaaaaaatgaacaacaccaaccggtactaaagattatatgtactaaatatcaatataatctttagtaccagttggcgacatcaaccagtactaaagattgattttagtccctattcaacattgtcagaccgtgttgtactaaagattgtatagtaccgttggtgttatcgaccagtattaaagaacatctttagtaccgtttggtaatagatccgagaaatttgtgttttttgataccacgatgaaagatcagatctcaattagtgtggccttatgtgtctaacttgtgttatctagaaacaattggttgcaaaagtgtttttttggtccaatttgagactcttgtagtgcatccattttaattttcttcacacactaagaattccatgtcatttctacttgccacgaattgtatttagatgtatagagtcaaaatatggtataacagccctcttggctgctgcagttgttcttctccaagaaaaatcatggtcgccgcaaggaagagaataattacacttccacaaagaacatcacattgttatctcaccaagtgtatctagttcctcatggctctctgcaggttatctcgccaatctcaaagtgaattcatccgccatgaaggaagaatagccgatcagtattcctgatgtctccgattcctaccctaccctgagtttacacacgcgtacaacatgctctgattcgcctccttgtttgtctccctttttctcttttcacgctacttcatatatatgagaggacggaatttcatattggcctcgctcataatgtgcatacacaagtgggtgcaatttattgctgggtgtagatacgtaaataatgcactagcgcatggcctacaatataaataatccaccagctatctccaaacccttgctccatcagcaaagtgaattcatggctgaacatcacgtccaatataattggcatgcacaaaaaatgtaagcgtgattggcttgctaattaagttcacatgactgcctgtggcctccgttagtatgctttttttttcttacaaaaatacagagcatgcttcactgaaattataggtaagagaacttgaacacgtaaagatcaagagcaagaaaatgttagtccaatacacagctgagacaaatatgggtttgtccctgtcgtagtgcactgtttgttgtgaatttttgcatgtatatcattgccctattgcgtccattactacacatattcgatggtagacacacttgacttagatcaagattaatggttgtgtttcatattataatccacaaggatttcaaattttaaacttgatttttcagaataatcttagctaaatatcttttacttgtcaatcgtgaaaaaatatctaggcaaagagttatgaagaaaactaaaattattcttaaaataaaattttgaaatcttacgattatagcaaagactcaacaaatagatcatcttagcttgacagtcgacattacacccatggatgaatgttgcgatgttcttttatccatgggaacaccttgttcgaaaaagcaatgattgatatatctttgacatgtatacccctagtatctttcaagtaccataaaaaatccgagtattaaagagtattggcacacttaattctaattgtcttttttgcaaaaaaaaaaacatatcaaccaaaatcattatgtgcatcagtatgcttgtctatgtactcctcgaacgaatgcatcaccagtatctacattactgggtcgagtacaacacaaacaggttgatctggataatagacacacttgaactagatcatgtttgtttgaaaaaaaaagagtgaaaggtctagaggataggcacataaggaagaaaagtgcaaaaagaaaaaaaatgacaatagaatggtaggagaggaagttttacgagaccaaaaaggcattatgatcaacttagaaggataaataataagaaattatttcaaaactccacactcagttgtgctcaagtggatagtcgtaagctagacaagcatatccaggcgagatgtttctgcttggatagcagttctctcatcttagcagccataagatacatgagagccgtagaattaactccagcgggatggtagtaggaagaggtactgcacacgacgtgatgtagcttcttcacgttagagaattgttatcttgcacactgctaccacacttcacccatatttggcttcatggctacgaatggaacttccggtgcctccctctcctatcaggcatggatgtgtactacacatcgagaaagatactagcttgttatgttcatctttcctagagttcaacaggagagattgcctgactagtgtttgaggaactacaccacactgaaacggcgaacgctacatatgtatctgctcaattatatctacacttctcatcatgaaacataagctatggtactattggtacatctagtactccaacaggcccaccatcgtatctcaacaccttcaattttgatttttcgagtaaattagtttgctactcctaattgatagtaatcttgaatggcagtcatcttatacatattgcatgttagtccataaaggaaggcacatggggtgaaagaaataacattaaaaaaatggcatcaagtcaaagcaattgcatgtttgcatatagcatctagtctatatagactgaatttaaacgaattctagtacctagtacaagtctcacaatgtcataaggctggcatttttagttttgagaaatatagtacaagtgcaggcactcacaatgcgtgaacactcacccctatgaatgcacgcgtgtacaccctacccctatgagcatctttggaatactagaccgacatatcttgagattgacgaagtcaccacggctgtctcgttatcgacaggtacgtctcgcctaccagtgaaaaaataattagttgtaaatacgagcacccatatcaagtctagaacttgaacccagttgggttgtttccatcataaggaatcaaccagttgagcaacgctcacttcatcataagactgaaatttgaagttcaatatctagttcttttatgtaccttctcacaaccattctaaaaaattctaaacttcgacgaatgtttaagtttaaattatttataactatattcgtctttttccttcctagctagtgttctctagacaaaaaaaatgttaacaaaaaggccttcgctttcctatttcggggcctaacgcatctagggatgtcaaggggaccctgttccctggtccctggcagggataaggatgggcatgtttcaatcaccatttggctactaacgggaaattctctctcaatcggattagagactttgatgtgtttgggccatccaaataagaaacttacatattaaacatctctaccctccccattctattatttatacttttctgtagctgccaccaagtgacctagcatgagcatgcatggctgagtcgcggttgatcagagcaaaattcactatcagattgcttggtttgctagccgatcgacattgtcctggacggtatccgaaagtgtgatcttgtttggttaatttgctcctcgtgaagcgaaggggatggccgagtgccttatcagaaaataccgtgagtcatcgccatggactaggacgatatggtggaactccgaaccgtccacctccaagaagtgtgtcatcatcagcattaggatgaataaatgaggtggaagggacggtgacttccatagaatggcaggcaagagatacaatattagagcttgtacaatgattgttgatggtggtctcttagcgtagctaattaataatatttgtttatatgaaagagagagaaagaggaaagacaaaacatcgttgctaaagaatagtaataaaaggaatattttttatacaatggttagagtctttatcgtctcaactgttgcaaaaatatgatctctaaataaacttaaaatgtttaagagatcatacttgtctctaccattaatcatgcccttagttgtatatgataacatcttagatggaagtagtaagacaaactacacgccctgatacgactctttcacagcagacaatcattgtcctgctctggcttgtaacacgtccaaacagtcctaatgtcagtaacctcgaattgaattctggtgcctccctttcttatcgagaccagtacatatacatataagctagaatgattcttttatcattgccatctccctccaatccagctgatacttagaatatgattgtttcgaggactatatgtagcactgcaatagatatgctacatgctgagatgcctctatcctatcagctattcataaaactagtggatgttttttttgcgaaacaaccctcgtcttccccattttacaacccaatccctatccgcgattttttctctccgaacactgttcgtggggggcctatatctaattacaaaaaatcggagggctttttcacaaaatttaatctgacgtggcagcgcccagcgtccgccccaagcgccatcctttatagtctctaatgtactccaatggttcaaccgtctacaacaccatcaattaatttgattcgtggagtaaattttcttctcctagatcccaacaagaaggaaatcttgaatggcagtcttataaatgttagttcatattttcgaaacgacaaatatggaacaaaaaacatcaactaactgacattagctagctgagaacaattaaatatttttatatttcctagagtaatttggactttagtgctggagacgccgactggaggaggcaagagtggaggggctgattgtgatgggacttattggcttgagggtgtgtttagttcacgccaaaattgaaagtttgattaaaattaaaatgatgtgatgaaaaaattgaaagtttgaagaaaaatttagacactaaaccagacctgatttggaaccgactggttgttggaatacttctctttgtgttcgcctaggtgaaagtgatcgatcgatcagtagcagtgcctcagacaggggggattcctcgatgtgccatatgcactagagctgcgcatgtacttgtatataataccaatctcaccgggatcctcgatcgatctcgcaagctaattaattaaccgatcacactctcgctcaaacacaagattgacatgcaaccagatgaacacagtaacacatgcacgcaaggtgtttgatgatttgatgctgctgctaaccttgccgcagcttttctgcatgtacgtattcgttgcctgcagtccacgcacactacaagcacatgacccatctggattagcgtgtacacatatgtgccatcgatcccatatatactctttccgttcttaaaaaaaagtccaaccctagctagtatgcactactacagagataatattatggcgtgtgacccggacgtgctgacgctatcacaacgtgaacgtgcaggcctcggtgtgcagaaaatgctctggcacgctcagcaagggagcagccgagctcagctaaacaagctcgaaaatggctaactaagcttaacagacaggaaagcaaaactaacttaaccaacacacacgcccatagggctatcgacggactctgtactaactaagctcccggtgcttccttttcctggttgtttttgtatatcatgctactaggatgagtactgaggccaccactgtttgtcattctcatcttccatgagtctggctgttttgagggtaatatatactccatgcatcctataatataataatctagaattgtaggtatgagacatttcaaatacaactaatctggacggttgttatattatgtaacggagggagtatatatacagtactttctcggttatttttattataacatttgacaccattcatcattttgtgcaaacatgtaaaatataagtaatgcttaaaactcctttagtgataaatcaagaaaaaaaataaattttcttaatttttatttaataagatgaaagttcaaatataattaaaaatttgacgacgttatatattaaaaaatagaggtagtatataagaccggcaatatagcagcctagcaggtcatatatgctcacaagtatctgtgctgttttttttccagccttagcacatctactccaccaaccatctcaacactatatattcatcactggaggaaacttgctagtagtcaatatggaaacggttgaatagcaaattcttatcaattctagtatatagatcaagacagaagaagtatgaaaacaacatgcaagtagggaagagtgaggctaggtagatccatacctcgaggtatctaaactttatactagattttttaaaatttaggtatctctaagtaagtatatagagtacaaaattttacactagaaaatatagtacattattccggtacattcttaagaatagtaaaattattctttttagataatggaattcattcaggcctttacatcagataagttatacccaattattgcaaagactaattaacttgtgaattacaaaattacaacttgatcattcatacccgaccataagccaaaaggacagaagagaaccggcctgaattatttttggatgcctccatttcctactcgagtttagtttgcacagctagcagccacatcctatcattcacaacattttgtttccccacatgtatgcagtttaacttatattggcctcgctcatattgtggaaactcatatgcacatatgcttgcagcttgctatatatttatcactagaaagatgagcgggtataattaatttagattagagcttaattacttaaggtatggacaataagcaaaattgagtttctcgactagctaacataaccctgtcaaaagaaaaggattgctttatttggtcgctacataaaatggcaatttttcggtcaaattaatccatgtataatgcgatcatcaattccaatggaagaatccataagaggatcttatgggaggtaaaggtaccactaaaaatcaaagcatttatgtggtttcttcaaaaaaaaagtaattttgacgaaatataacctcataaagagaaaatagagggaaaacaagcaatgttgttttttaatacacaagaaaccatccaacatttttttctttgactgtcatgttgcatgttttgcttggcgatgtgtcttctttgccttcaatattccctctccccacaatgcaaaagatatttttggtaactggctaaggggagtgcctagacccacaaaaaaatgattttatttggagctagtgctctatgttggtcaatttggcgttgccgtaatgatatggtttttaaccataaaaaaatgcctaacatcatgcaggctatcttcatgtgttccaattggctccactcttggtgtatgatgctttcacaggaacaacaagatactatgtgcaatggtgctacacgcttggaattggtagccaaggaacttttactcaagtttggatggcgtagtacctacagaatttcgtgatagaatctacataattttaaaaaacattattttagtagatcatattatctgcagaagttgggagtttgtcccatctcgccttttttaagctcttttctattcacttctggactttttggctgtgtgcctacggacagaggccagatatgtaacccattttcattatctagacatggtttgatatcccgcaaatgcaatgcactagcttaaatggtttggcttaaaattcttttgtaatactacctgtcatacaatacaattaaacatgttaatatgttatatatagccgtcgttagttcattggtacgttcggttgcttggggcagtgaaaaactctacacagtttagctcaaatggatacgatcgataaatgtaagctagggatgcctctcctgcaggtagctttgatgctttcttgaacagatcgcgtggaaaaactctcgcactaattaacagaactagaacctacggcgcgcttcgcggtgcccttgctgtgtaaatgaggaaaataaataaggaggccctgaagagcctattcagtggattggctgtagcaccgctagctatagcattcaggttgtgaggaaaaccattgatggattaagtagacataaaatacatagaccgaatgttaacattgtttgtggagaacaatgcataatctagagtacattatacatcacagatacaaccattggaactaacatcgataaataggcaggaaattatggggtagattggtgagggccacgcctgcgaaattcgagaggaagacggcgtggaagcgtggctgggggaccaccctagaggtgtgaggcaaattctaagcagcagcgccggcgcagcatccacgatcccccctgcacacgcacacacattcagaacagtaggcagggagcataaatcagggcagcagattacctagtgttggccattgatgtaagagcgaaaaggggaaagatgagagaagagccaagaaaacaaccgaagcaacgcagctgtttgaatggcctcaatctctactaacgaatcaggtaagaggaacgataggaaaggctagggccatgccagatgcattaatgcctgcgcgcatgccggtacggctcgtgcgtaggacgatttgatgtggcctgacgaggcacgtcagacactgtagcacgcggcgcttagaaaaacatggcacgatagactcacagcctcttggatacgcataacacatggtatatgggacaacccacaaaaccgaccccacctgtcattggctctacaacgaataggtgcatgtccatcatttatccaatgtaataaccagtaggtaatttgcccaatcctttcgttgcactggatgaacgtgctcctagcgcacaaaacacaggcagagaggagcactcgtgtgaccagggattacggtggaccagacgttggtaggagaatcatgaagaaacgtgcctgcctcgcactgtcgcacatagtgacatcgcatagagaaacatgaggctatgctgggtaaacgtgggggtgcaccaaaagtcaaggctgtcaggcagggagagagctacataggccaagcgcagcatggaccaaggtgatttccaggtgggccatagagcgttaggaccgatggcacacacgcacccaaccacatgcccacggtgaaccgcacaaaggatccaaggcatcacaggatgaactataaacaccacctaattaaaccgacaaatcaaacgtgatatattcatcgtattaatcacataggtaatatgttctgtgtagcaacacgaaagacacatgctaaactttggtggcagcatgccacagaattactgggcaaattcctatcgccagcagaaaatgatgtgctattttttgttacagaaaactaatctgttattgcctctcttttttctggaaaatgaatctccatatcgaatctaccatgtgctctgagaagcaacataccatagtttttttaatggctatctaatttgaccatgcaaaaatctgcataattcaaggtaagaacagagagaacagataagagctgcagttacaacaggctgtgtatgtggaggaatgatataattcaaggtccaaatattagcaggatctcaaggtctaaatattagcaggatccaggatcactaagtagaaataaacacacacggagtttctgtttacagtggcgctataccagattctggataggaattttcctaccaatatatcacccctgtcctaagcacatatccagttatacatgcttgcttaataggaaactaatctggataggaattttcctaccaatatatcacctctgtcctaagcacatatccagttatacatgcttgcttaatagaaaactaatctgcatattgagtgttatttttttgctgtagtaaataaatctgcatattgaatttaccatctgttctgagaagcaacatgattcataggcacaaatggatggggatctaggacagaagccctgatgtacttgtctagaacactaacttctttcaaaaaccagtcagtattgtgattttttttatcaaacagtcaacatgcttgtatagaacactaagggtgtgtttggttcctggtcaagattggatgggatacggtggtccatattttgctggatatggcggtccatttttttgtttggttgtctgaatatggcgattcaattttttgtttggttgtagggacaaaggtggatttggtgatccaattttttgtttggttggaggaagtatggtggatttgtaggtgtggtcgcctctcacttgagatggtgaatataacccatcaaattaatacataatacacattccattataaatacacactccattataaatacacattccattataaatacacatagaaaaaagaaaaaagaaaaaagaaaaagaaaaaagaaaaaaaaaagcagcgccagatctgggctcgccgacgccgctggcagcctcctcccgccggcttcctcccgccgccggccgcctcctcccaccaccgaggctcgcctcctcccgccgccgccttcctctctcgtcacccgcgccagctgccgagctcgtcacctctctcgtcggccgccacgctcgtcgaccgcgccggccgccgagctggtcgcctctctcgccggccaccgcgctcgttgcccgcgccggccgcctcctcccaccaccgaggctcgcctcctcccgccgccg

SEQ ID NO: 13172 - DNA, 8066 bp, Oryza sativa
aaaaatagaagaagttcatttgtggttcttcatttttttcaaagcattataacaattatagtatttgaatatgtttaattcaaagcaaacttaaaagaaggtagtttcattcttttttaattaaataatttttaaatgatgtttgtattattaaaattagcaattaagctctgaaaattccaataaaattttaacgagtgtaactaatcatggagaatttaaaaaaattaaatttaaccatgtcattttatttctcacacttgctttacttgtaaatttatttaattatacacatacctacttaaaaataccaaatatttcagcgaatttgtattttaattaattgcatatttttctgatctgtacgcttcccgttgcaacgcacaggcacttttgctaaaccaaacaacactgggccgaagaaaaatagaagaagttcatttttggttcttcattttttcaaagcattataacaattatagttattgaatatgtttaattcgaagcaaacctaaaaggaagtagtttctttcttttttaattaaataattgttaaatgatgtttgtattattaaaattagcaattaagctttgaaaattccaataaaattttaaagagtgtaactaatcatggagaatttaaaaaaaataaatttaaccatgtcattttatttttcacacttgctttacttgtaaatttatttaattatacacatacatacttaaaaataccaaatatttcagcgaatttatattttaattacttgcttatttttctgatctgtatgcttcccgttgcaacgcacaggcacttttgctaaaccaaacaacacttttggtcaatatacacactccgtaatcacccggtgcaacgcacatgcacttttgctagtataactaaatgaatgtaggcaagaagacgccacatgcacatacgtatggtatttatcaagattctatggtatttatcaagattcacgaacacaactgtttacacccaaatttggcacgtaggttcaaattaagcaaaattaccaagatttgggaaaatcgccgatttcctccacagggctggtatgatcgctgtttgtgggctggtcagacagttacttgaaggccggtcagaccggcgtcatgtggtcggtcagaccagcagagtccgagactgagtctgttttcgtcgggtctcaggattccttactcggcaggctatgtttcgggtttcctttgctttctatcctgaattggacatggagatggaagcaaagtatttagttgtccgatcgtgcgtgtccacttgtcaaaaagttgtcaacataaacatcacaacataataattaaccactccaattaaaaagtagggctcagtagtaagcaccaccattttagtctgtttggttcaagaaattagagattattcatcaaattagttgagataactccatttcttatttcttcgggcagagtttgtgccggcccccacgtcaccataaggttcgggcgacatgggcagtgttctctcgccccgctgccacccccacctcgctgccaccagaacaagccatcaaaatccgcatagctacaaggacggcggtgacgggccttcccttccccctgagactttgaggtcgaagcccacggcccagatgcggggcggcgctagccgcaatggcgacaggtgggaggtggtgcacggtgccaacggcgacaaatgagggggtggtgatgagggttggtcggacggccgtggcaagaagggtccgacaacggtggcaagaaggatcggttaggtggggttgtggcagtgggaggtggacagtggtgaatctaaatgtaaattgaggtgtggttgtgtaaaagttatattatgactcaaataaactagaaatatatcgacgaaattagttttcaatgaaatccaaaaaccatatgatcggaagagaacacaattctttctccattatatataaataaataggtaataagtatggtccgcacagagtgatccacgaataaaatctatattgccttgtcttgctcaaaacaactattggtatggtctgctttagctagtgaggtagcttgccttgcctcaaaccagtttttcattgattaatggttaattatatgtgttaatggctaattaggtgcatgaattggaggtggggatggcgccctaaccagccccaacagtgaatccgccactggttcaggtggaggcggccagcagcctcgccacaccaattgcggggtcgacagcggcagccaacgacatcgacgagggatggattgcccggtgcggcggctcttgagcagtgggctttgtcgctggcctggcacggccggggtgcaggtggtgccatcgcgcaggggtcagaggctcgagcgtgtagatacagtactgatcactgaatactgtcagtgttaatactagaagggataccatcatctcaatcggacggtaaaccccatctcaattggacacggcgtccatcacaggctagaagtcacagatgtgaagagttatcttaatcgggcaaacggccgtcacggatgaatctatctcaatcgggccctaattaaacgccgtcaccgatagctttgacccagacgatcagtcaaactatagcccgtcacggatgacctatctcaatcgggccacaactagcgcccgtcacagatgacccttatctgtgacgggcattaactatagcccgtcacagatgagtcatctgtgatgggcattaaatatggcccgtcacagatgacactcatttcaatcgggcctaagttaatgctcgtcacagatgagtataatccaaaaaaactaaattttattttttggctagtcttaggcctcctaggccagtctttttttttgtcctcacttgaaattcaaacttcccgattggtcacccatcctaaaattgctccaaaccaagtagttgtaacttgttggtataagtattctattaatcttattaagccctaggccaggatgtcaaattggggttattaaatgatttcaaatggaaaagtcaccaaaaccaaagttgtagaactcatcgaggtgcaaaatttttattttgatcatttctccatatggctctatttaaacaatttgaaatttaaaattcaaagtttgaaaagttcaaatagaattttagatcagtctaaaaactgaaaaagtcataaacaacaaagttgtataactcatcaatatctgtaacttttattttggtcatttttctatataacattttttgaaccgtttgaatttgaatttgaaaatatgacaacttcaaacaatattttcaaatactaaacgatatcaactgaaaaagtcatcaacaacaaaattgaataactcatcaagatctaaaacttttattttagtcatttcttcatacgataaagtgatagtaacattgttcacaaaattgacatatctcttatctggttttataaattataacacatatatgtaaaatttgtgaataatattactaacattttgtcggatgaagaaataacaaaagtaaaagttttagatcttgatgagttattcaactttgttgttgatgactttttcaattgaaatcattcagtatttgaaaatgttgtttgaatttgttatattttcaaattcaaattcaaactattcaaaaaaaatattatatagaaaaatgaccaaactaaaagttgtaaatcttgataagttatacaactttattattgacattttttccatttgaaatcatttactacccgtaaaattattttgactcataaaatgaattattatactggacttaattattttgctatagttcaacttacaaatataaaaatttcatataaaaaatgaaaaatagtcatcggtgacgggttttagttaatgcccgatagagattaagtatatagcccgtcattgatgagtcatctgtgacggacctagttgctatctcaaacggggccctttaaaaggtttttgggggggtttttgggggcccccccaaacagtacggatgatggttatccgtgacgggccacaacttgaggcccgtttaagatatggaatgttatctcaatcaggcctaaagttggcgcccgtcacagatgatggtcatctgtgacgggccacatctttaggctcgtttgagatatggaatgttatctcaatcgggtctaaactatggcccgtcactgataggtgtcatccgtgacgggcttaagttttatgcccatctaatatgtctgtgcgaccatatttcaatcgggcattttttggcccgattgagatgacttccttgtgacggcccgctatttctaggcatattagagcccgtcacagatagaagaatctgtactagtgtgtaaggagttgcctgcagttacgcaatcgccacgattccttgcctcccactgtggggattgccgaagcacagagcatacgcatctttcaggctcctatctcgtagtggtttcttttcgcccagtactggcaggtagtatggattataaaacgctgcactagtcacttggacctgaattccacagatgcctccatttcatactggaattcgtcagataagagtcctattgactcccgcagtgacgggcacaggttgtgatcgatgcacagtgagatcgatgttgccactgctatttatcatgaccctcaatgtaattgcgctatgcactggttgagctcacagagtgaagtcaatatatatttagggaaccttatggtgtggaactacttcatgattgcattcatgcacatgtctatatttatgtgcttgactgtctgaaaggagatagcatgtcactatgtcagtttaatctgatgcgcaaaaacacatagttgctctccctagctggcggactctggtcattattaagcgccttttgattacagatgagaagttatagttaattgcagtagatgctcatttatttatttattttgtagagttctttttttgttttcttccattatcttaaaaaaatctcctggaattaaaagtcagaataagtcaggtattatatactagcatcaatgatggtggttttactttcatcggtaaaccatgcaaatagtcgaacaattacagcagtcaattgttcacctggatatcgacataactgaatacaagacgagactctaagccaggcttcctgtccatcaaatatctggacgaagcatgcgcggatgtttccaaccatatcatcgatgcttcaaggtcagcgccatggtcacggtaatcctagctcttgccgccggcaaaaatggatgaaaatgcttcaaggcgggctgtgcccaggcaccctttggtcttcctgctgcgttgcatatcaatcttctggtcggcttgcacttaatttgcctctgacatattgtttgagctacacatacatttgcaaccttgcatcgatcccctttctattggacgtgattgtccatctagctagcttgagagtacttgcagatgttggcccatcgtgatcctcctattacattacccattgtaagaatttgacgagagagagatatatggcgcagcttgtgtttatttgaggggttatatatatacactggtactgattctttttagagttatattggagtaaacttgctagttcgtatacggatgcatgaatggcagcgtcacacaaatatgttgtctatgcgcatgaattcacaaggagctcgcaagggtacgtagtcaatgttaaagggaacagatggactactgcaacgttgcattcttgcatatgtcactagaattatgtatctggcattctgagtgagagagcgtgtcgaattggcaatataaatctgatgcgtacaaagagaaaaaaaaacaattgctctggctggcggactctgtcgtcattaaccgtcttttgatagcagatgaaaggctatactaactgtagagtattgattttttttagtaaagtccatcgccggtccctaaacttgtaccgctgtctcatcccggtccctaaactcgcaaatcgaccgttcaggtccttaaacttgttcgactgtatcatcctggtccctaaacttgtagatcactcgtttagctcttctccaacttgttcagttgtgtcaccccggtctctaaacttggatttgaatatcatctgagtcaaataggacggtctaaagactttatatttaaaaataattcatgactttttcatgtgaactctaatgaagacaaactttgggcctgtttggggaagctttagattctgagaagcagttgtttggtagccagcttctgagaatctggaaaagctctaaaacctagcttctccagcttctagctttttagttcattttttagaatttataactacagattctcagaagctgtggactgtttatggcagcttttagcagaagcagcttttgggaaaagctgcagctgggataagctcccccaaacagggtctttatatcaaacttgtagccctcgacgtgatctacaactttgtagttgaatttttttattgtaagtcatcttttgtcccaaaatgttattttaaaattaaaattttaaaatctataaacatgcaacaatattttgggaccctaaacagttttaattcaaaaacttttcaactacaaagttgtaggtcgcatcgagggctacaattttgatataaagtttgtcttcattagagttcacatgaaaatattatgaattatttttaaatataaggtctttagaccatcctgtttagggaccggggtgacacaactgaacaagttggaggacctaaatgagtgatatgcaagtttagggaccgggatgagtcgaacaagtttgaggacctgaacggtcgatttgcgagtttagggatcggaatgacacagcagtataagtttagggaccggtgatggactttactctatttttttttgttctcaccaaatttgggctttatatctcggggggaaaaaagttgagaattaagtgaggtgagaaagtttatatcgcgctggtgatggtgatggttttgctttcaacatggtaaagcaaataaattgaacacttacaacatattcttacacatggctagtgcttaagttctttcacagtgcgtgtatgtggcgcgcggcccgagcgtagattccataccatgtacgcgagagtcgtagtcgctagcgaggaacgcggaacaaaaatgggacacccgttcttcagacgaaacacggctttgcagcatgggttgaggcatccggccgcactgtgaaggtcatgtcctatcgtaactaattgcctgcgtccaaggttcataaatcactgttgctacatagcactataagacctatgtccttttaggaacttgagcctagctggctagtgggatccaacagatgagaagctgtactgctacgtactgccctaacaggacgaagcacacacggctgcaaactgaaggaagcacatgcttgcttagaacagattgtgtcttcattaaactcccggtgcctccctttcctattggacacgattgtctatctagcttgagacttgcaaacattggcctatcaccaattcaccatatatcctcctcatatactgcatgccgtccaagaatttgatgagagagatggatgagaagcaagttgtgttctgttttgtgggactattatatatacatgaattcaaaggagtgagaagctggagcaatttggttcagtagaggaggacatagactgccatttacggctgtgttgaatggagccggctgatctggcatttcgaatatgtctcatcatgatctcttcgtttcttcctttcacgtctctgatttttctataatgcaatttaatttgtaagagccatcaacttggttcgtgatgagcccgtggttgtacaaggtcctcaacagccagaacaggagaaactgtgttgccatggacaagctctggtcagaaactctccaccacactcttccagtctgtgtcctttgttactggctatagctaccatagcagttgttcatgaatttagcaaatggctctgtaccaagatcccggt

SEQ ID NO: 13173 - DNA, 1513 bp, Oryza sativa
attcataatatattcttttcttcttgatacgtaggtcaaattaattaggactccaaagtttacgtgatggtatatatatacacacacctatcagagttgtcaaatagtattgtcacaatttccggctagctctgctaatccaatgggtcaaaaatgaactttgcaacacaacagtagaaagaagcatcgctttttctgaacgctttccctttccttgcccctgctactgttgtttttttaaaaaaggtaaaaaattttaaaaagcggcaacagaccgcgtcgctaagctggaaattacctctgaaaatcaccggcgtttccacacactgtgcaaggttccttgccccaaatcaaagcgtccataaagttgagaagaaagaaaagaaaaaaaaacaaggcttagctagctagctacttaaacaaagcccacaccacaactcaaagaatcgattcccccattgatcaatcaatcaatcgatgagctagctctctttatttaccacccacaaacatcttttaatcccctttgatcaacacatgatcgatcaccatctgtccctttttttctctgaatttgaatcgatcccttctctgttaatttctccttgccatacatggcttctgcctcttcttgctcagcttaaagttcagaaccctagaaagttgttattggcttagctatagctgcttgctctcccaccaagtctacactactgtcacacactgacattgtccgtcctccatgtacatggatgcacagcaaaaagccctagcttaattagctacgtataccttccttgtcgccgggttcaccgcggcgaggcgacgtcgacgccgacaccggcgtcgccgctttgcttgccggcgaggccacctcccggatgcccctccatggccgtgcagtgaccacgcatatgcctgctcatcactttctccttgtagagttctaggtataaatgtctcgcgccattgttaccgtctagtgaaatctcgatcttggaacatttaggtgagattattgatgccgagttatctgcgaattttcatggagttttccggtgttttaattcgatggtgtggtttggttgcaggtacaaggttgaagacgacggccggcaacgacggcgacgatgacgatgaccggagggcaccaccatgacgcgcaccacgaggacttccagctgaaggacacgaacccgctgctgggggagcaatggccgaagggcgcggcggggccggcgcggccggccgtcggcggcggcatcgccggttggctggggttggagaagccgtcgagcacctacgacctcgtcgagcagatgttcttcctgtacgtgcgcgtcgtcaaggcgaaggacctcccgcccaaccccatcaccgggtcccccatggatccgtacgtcgaggtcaagctcgggaactacaagggcacgacgaagcactacgaccggcgagccaacccggagtgggaccaggtgttcgccttctccaagtcgagggtgcagtccaacgt

SEQ ID NO: 13174 - DNA, 16069 bp, Oryza sativa
tttcaaatggatgtgaaaagtgcttttctgaatggagttattgaggaagaggtctatgtcaaacaacctcctggttttgaaaatctaaaatttccaaatcatgtgttcaaacttgataaagctctttatggtttaaaacaagctcccagagcctggtatgaaagattgaaaacctttttgcttcaaaatggttttgaaatgggggcagttgataaaactctttactcttcatagtggcattgattttcttcttgtcgagatatatgttgatgacatcatatttggtggctcctctcatgcacttgttgcccagttttctgatgtgatgagcagggaattcgaaatgagcatgatgggagagctgactttcttccttggacttcaaattaagcaaaccaaggaaggaatctttgtacatcagaccaagtactccaaagagctcctgaagaagttcgacatggccgactgcaagccaatcgccactcccatggcaactacttcatcgcttggtcctgatgaggacggtgaagaagttgaccagcgcgagtacagaagtatgattggctccctcctctacttgactgcgtcaaggccggacatccacttctctgtgtgcctgtgcgcgaggttccaggctttttcaagaacatcacatcgccaagcagtcaagcgcatctttcgctacatcaagtctacacttgagtacggtatttggtactcctgctcttctgcctttcagttcgagctttttcagatgctgaatttgctgggtgtaagattgatcgcaaaagtacttctggcacttgtcattttcttggcacttctttggtctcttggtcctctcgtaagcagtcttctgttgctcaatcaacagctgaggctgagtacgtagctgctgctagtgcatgtagtcaagttctttggatgatttcaactctgaaagattatggtctgtttttctctggtgttcctctgctttgtgataatacaagtgcaatcaatattgcaaaaaatccagttcaacactccaggaccaagcacattgagatacggtaccactttctccgagacaatgttgagaaaggtaccattgtgctagaatttgttgaatctgaaaaacaattggcagacatttttacaaaaccacttgatcgctctcgttttgagttcttgcggagtgagttaggggtgatccacccctatggcttgatttgagggggagttgtttttcttttgcatgcatttgtaacatattgcatcatgtttactttatgcattgttttatacactcttcaattgagctttgcttgttatctcttggtcatcactatgctatgcatgtatcactcttatgctagtttgatctcttgtctagctttcatttgcttaagtagcttgtgtgatcatgttatgctgttcaagcttgttgaaacctgcttaaattgactattcatttgaacttaatcaatgtgcaatgcttgctctagaagtttgtttaaattgaagtatccctctcatactcatgccatgtttacattctttttgcaataactgtcagtacatgcttatgaatgctcatgcttatgcgtccatactttgtatcaatcatgctttacaagctttatctctgtttttgtccgggctactgagtgcgtttacgcatgagtagtgccgaagatagcactgagacagcctgtaatctgaactctagctggaaaacttgattgaggtcagacggcagtgtttggcacaaccatcacttgctgactgataagatcaggtggaccgtcgtgattgtgctattgtctttaaagaaattaaaaaaaaatcttaaatataaaagtcatgagaaaagattaaaaactcatgttctatgctttgttatcatgttgatactctttatgaactgggcattagcacattagcatgggttcattgctttgattatgtaaatcttgcatgattatgagctggtttgcttccttttaagcttcttctagaaatagctttgcacactaaatcactaattcacttgaaaactttttgcttgctggcgatactaacttgatatccatgacatgtttcatacttcttatgcacatgcttagctaggcttgagcacatgcttgtatctgtgtgatccatgtctaccttttgatgcctttagataactctcaaagctctcaaaacactaaaatttgtaagtttcatctcatttttatcttgcatttttgtctcttttgatcttgatggcatcattgacaaagggggagagaaatttgcacttattaaaacttgctttagatcttggtgaaagggggagtttggcacatagggggagcattcttgcatttgcattcgcatcccttttcttcttgtcacttcacttggtcttgatttttcacgatttcaaaatgaccaaagttcgacgtttgcaaaatggtttactttgtgaatcaaaaatcaaattttcaaaatttttgcttgggattgtcaatgttcccatcaagggggagattgtgaaaccatgtgtggttatagttcttttgtgatgggaaattgacaagtactggaagtgcaagaagtgtgtgcgtggactaacattggtcagattgcgacatctgtgccaagacaacggttgtttggttcatgtgtgtgcaggtgatcggggtcgatcttggtcaacggcggatcgggactagactcagggaggagttgaggtccaaagcgatcaaggatgccgggtgacaagattggacataaggttgcacacggtggacgaacaccgtgtgaggaggtcttcgcaacggacttcgcaaggtcaagtgcaagtgccgggttcgcgaacagaatggagaatggaagaggagcttgtatacatgcactggcatgtgcatatgcaagcatggacagtggtgcttcggttgtgcatgcgtgcacatggccgaatgccatgcacgggggcaagacatgcatgtgtgcatgaggagcttgctagcccattggtgcatgtgagctgtgattggttggcagggaggccaagccaatccagcccttcctcgtggctcaagatgatggatggatcagcaggcagggaggccaggccgagcaggcccaagacaagacgacggcccacggcattggcaccatgcgcgggcaagcgcgggagatcgcgcgaggcacgcgcgcgcagtggacacgcggcggcaaggaattcggcgctgtttcaagtggctcggaggcgggagttgtactgggacccacgcgcgatttcgcgagcatgcgcgggagcagctcggcgggacgcgtggaggctttggactggatgcgcgcaggtgagcgtgggatccacgcggtggagcgcgcgctctcgcgtgctgaggcgtgacgtggcggctcgtcactggtttggagagggagcacgcggatcagtgcggcgtggagagtttggatcaacgatgtggcaagcatccaggaggcttccttcggttctaaggaagaatgggtggaccagatccattctgagttagggtttcgccctaggggtatttgagacaatgtcttaggggtcttagcctataaatagagagatggatgcaagggtggaggttgcttctttggcaatccttttgagatgctcggtgagagagtttcagtgtgagtttggagtgagtttgcccgagaggcttttgtattaggattagtttggagtgtgtttgtccgagagattttaagtttgtgttaatgttcctctgaaggtgtatgtttgctcctagttgagcggttattttgcatcacctataaatgaaatgatttgaaggatttcatttttgccttgtccatttaaattccgcaatttaaattccgcttgcaatttgaactttgcgatgatgagttttgctctctcttcctcacctctcttctagtttcgggaattcattttctcttcctcctctagtttcgggaattccttctctcttctttttctctcttcttttctagatccggcttctctaatagccgcggttctagtaaggattttgagaaatccggcttgatgagtattttcgggggcaagatttgaattgctatattcagaatcctcaccggatttgctatgatcatgctccaattttttggttttatactcgaaggcatcaggctctcgagtgcttgtcctgtttgtttcttagacttgagttcctggtgcctccatttcctacaccgattagtactaaaataccctccatgtctttctactaccgttatatatatggccaagacctttttaagatactgcatcgcatctctatttatagggatagagttcttttacgatacaccatactagtttgtaaagacccaccatgcagggtcttatggccataaggtacagtagtatatgggaaatctagacgttcatttgtacaggtaaacccaccatgccgtccttccctgccgcacgttggtttgcgaagaacccttaagaattatgtagggattactggttgtatgtacatccctagttggtagattactcactaagaattatgcatggatgtatggtgtgttgcgtgagttgtgttttgggtactatttctgcacaaggtttgggaactacgtagttggtgtcccgtagcataatgtgtactacctccgtttcagcttataagacgctttgactttggtcaagtttgactaagtttataaaaaaatatattttcaacccaagataaatttattatgaaaatatattcaattattattgatttaatgaaactaatttggtattataaatattcttatatttgtttataaacttagtcaaacttaaagtggtttgactttgacctaagtcaaaacgtcttataacctgaaacagatggagtacttctcaagagaagcaatgttctctttctgtatagaaaaaacaaaataatacctattcaacatacaacagttttgggtgaaaagcttttaaaaataattatagtataattgaagtgtaatctgcatgcgaccccggctagcacaacataggtcaggagtttgaccctgcctcgcttgcgagctgtgtaaaaactattttccctctcgcatgaatcatgaggcaatccgacggtcacttataaaaaaaaaaagggaacattttttagcaattcccaaaaaagcacacatagagtgtttacaatctattagattaactatagataaattggagctagtagttggctatactattaaacttgctctaggaatcttgtggtggcaggtatgcatttccagtgcctcgtcttcctacaaacctactagtttattgtctagcttacatcgagagccaaacctacaacaaattctcatgcattggccagcctcttctagcaattcagctgacagcttcagttctctaacgatactaaaaggagctttttgttcctagctaattaggccaacaccatgcacaagcatgaagaccttgttatatagtatcacattgagtatttaagttagggccaggtatgtgcactacatacatgttcttgatctgatgacataagtatgcataatcaatacagcccaatgcatgtaagagtaaggctaataatacagccgacctgttggctataaggttctttgcagccttctcttagcctatctatataatagttagctctttataattaatacagggcccacttgtctctttcacagatttttttggttcttgtgtctaagccggctgtaagtttacagcccgtttctcctctctctcctctcttttctcctccacctcagcatttagccagcttatagcctactattatacttgctctaaggtggatagaattattacatggacatgctgctaccaatatccactcatcattcatgtctgttaatttaccacctgatagcatatagtatatagcaacccttttacatacgtaaagcattacaacgttagagatggggctagatactggtggagaaaggggctttactcctggttcgtaaccccccttagtcccgatttttaaaccgagactaccaatccgggactaaagatagaaaagatcactatctttagtcccgggtgaaaaaaccgggactaaagatagagataaggtcagtggaggaagaggtgaagagataaggttgcccgtctcctcctcctcgatctcgcagatggcagatgcctcgtactctccgccacgatcttttgttccggttggtattaccaaccgggacttttttgttcccggttggtaacactaactgggactaaaaatagatctttttttccggttggtgttaccaaccgggactaaaaatagatcaccaaccgggactaaagattaaaaagcagctctaaacttttgaaccgggactaaagataatctttaatcccggtttttattgcaaccgggactattgtggattttggctaaccgagcaaagatagtttctccaccagtgagataatggcttgaatcactgagttagggttgatggcttgatgcgtttcttatatttgatagattttggtcgatatgttctgatgctcaaaggtgttggcttgcggaaaatgtgagtacattaactagcgtttaactgaaccagcaaagcctgcttctggctcttctaacattttctggcacactgtgatgtgagtatatatatatttgcacatctgtatttctggatatttcgataaaaaaaaagacgagatttggagggagagacgtccctccaaatattatttaagaagaaattatgagcgtgttggggattgaacattggaccttgagattgaaatcacccacccgttgccactgcattatcaattacatctctttatgttttgctactgaacatagaactggtttctgtataaatttcagatccacggcagtatttgttttctgacatacacggtctagagttgaattcaattggatccatttatttgaaatcagtcctaagttttcctagaagtcttaacagctttaaaagatcatgtcaccaattttttcccctactattcttaacatttcttcatagcgccttggcgatacataattgttatcaaattcagagataccattaaatttgattcagagaaactattttatttgctgtagatatgtcaaagcgtgatgtgagacatcactcatccaattataagtcctccgtccgagcacaatgggagataccaaataacatatgaaaatgcagaaaactaaaccaccttgccgccttgttcattctcctctttaccttttctttgctcgtttgcactaaaatgtgtattgttgggaaaaacgtatttaagctcccctattgccttcactcgttgtaaaacacggacatttagctagcatataaaagaattgacatccactactacgaaacaaacttacgctggtagtcaaaattaatttttgcagacggccaaacaattggccagagaaaatatgcgatcttcataggcggagatttgacaaaaataaaattgattttcacatgcggctaggttgagctgaactcctatgcaaattgattttcttatgcggcaaggtttagccaaccactaaaaaagatgattttttggcaaaaaaaaaagaaaagaaaagaagaaacaaatcgccaaatcttcttttttgcctgcaatttttccaaaaccacaaatttcttaaactctggaccagggaaatcgccaactaaatttgaaaatgaacttccttaaaaaaaattgaaaatgaacatgaacatcatcagtggcaacagagcatcaacatcagcagatcactcagaacaagactgcaaacatcaacaggggtctcatcgttatggtagcactcattgctcctgttgtaaagatatttaattatttgccactcttacaagtggtagtttagaatttattagacctatatgccatagacatatgaagttccacatatcgtacactgcgagtgacaaaattttgattgtcacaaattaaaagtgataaatagttaaatgccctgttctaatagtaaccctagtcgcaggaagacgaatgaagctagcacaatgcggctgccaagggtggagacaacgtgggggcggggaggtctttagacccccctacctcctaatagatcattagagtccccataatacccccttagattaattctaatccatatatttatagatgagagactaatatagattttgtttgaggttgttagaaggcttaaaaggctaagaagtcccaataattcctaacccaaccctaaatctatcttagttgcttttagtcattttggtttagcctctgctataattttaacctgcctccgccactggcggctgctagagaaggaattaaatttgaaagtatactatttatttatttttttcataaatatccgagatgtaaaatttttagcataaatatatcgtcgtcgctgattgaaagagcgaaatcgaaacgatatcgctaacccgttaagcgaaaatgacgacaacgtgacactttgtcacggtctcgcagaatcatggcgcgattccgccggatccgccacggtatcgcaacagtaggtcgcgagaccggcggtctcgcttcatcaccttgcgagatggcctgatatgactcatgatcagtggacgattaacgggtgattaacgattaattaattactaataatgttagttaaaggagtaatagtaattaattaattgctaattacactaattaatttattgatagcgagagtacgcgggttaggtaagcgaagtcgcggtgcgagaccgagcggtttcacgcacacctcgcgcgacgtcgtgcatagtaacgcacgattttacgctttcatttcacgacaatggtatatttctgtaaatatttttctaaatgagcgtatttatacaaaaccaatgaaaaagaggtatattttcaaatttagcgaaaggacagatctgttagaggttacatgggattgcttttaccactattccacacagtcactgcaacttgggaactaatgcttccagttaagagaaacatggcaggtggcaatgtggcatgcagaaatctgtgcagtggacagtccacctcgataccgtgactccccatggtagaatcctcaccagatttgctataagcacgctccaaatttttggttttctattcgatggcactaggatttcgagtgcgcagcctgattgtttcttagacttgagttcctggtgcctccatttcttataggtacgctgattagtgctgaaatatatattctccatgtctttctaataccgttatatgatcgagaccttttaagatattccattgtatctctgtagtggtaacacctttgataaatcctagccattgattatttatgtgctttctaattaaaatacatgtggcccattcaaataataaatgacagcaaacacaaaaggaacaggaacagtgggcaacagcatgcggccggcaagtttggtgtacaatccattttatattttatatattaagttttttttactgtgcaacagcttggttgggtactaaatcaggtccgttcataggccacgatctaatgacggcaattgaccggtaccaccaggtaccgttaactctgttatgcggtaccaaccaaaggaaagaaggtgggaggataaaatcgtattttcgtgatgtaaatgagccattgtcatcttatgcactttcttttcagtcgaggattcgaaactcaaaccctagttttgtaatgtcaaatcgctgaggtgcccaaagccggaggtgagcaatcgatggctgcataggggtttgtgctcctggagacccttatagtggcagtggtggcggcgatggtgctcttggagcccctcgttgcaggaggagtggtgctccaggagttttccgtagagacggcgacggcactcccggagttgtccgcaacgatggcggttaccccatcgtcgacgtccgtggtagtggagagtttgggtagtagtcagcgatgcggtgagcgtgtgagggggaaaacgattgtggtggtgtcaaacttggggtgcgatggaggaatatcgcgcgttggggtagaagattgcatgagacttacttacttctcacccgattataccctcccagattccatgcccatattaagttcggtacctaggggtaaagacttcctcaaatgtacaaaattattgcccactatacttgggtttcatcattcttgtcatcttgtgggaaccatgcgcgcatgcattaaatggataaacttaaggacacttctttgaatgttacttatttatagtggatctaaagtctatgtgcaataaaaaatacctatgttgtttgtcacgagaacttaaaacaatggcgtttgcaattaacccatgatctgtcgtgcccgtttatgacaactgtaaatcttacctgaatattcatttcttaaaaaactatccgatgtgttcatctgtttttcttgttggatgaccgaattatagtaactatttttttatggaaattacagcgggtgttgacaccagcctaaacttttattaataatggtaaaagcatttacatgagaagggttacatgggaaaggggggggtgctgaaattatgggttaattacagagagattcagcgaccaagtatggagctgttgtttgcaatcaagagaccacaattcaatttggggttaataaatattaaactggacaacatgttcgattagaagtcatctagagaccacaattcaatttggaggacctcagttggagagtacatttgagcattaggtgaaactgcagctagggcactcagctcctccgcggcctaccatgagtgtgagttccgcatactgaaatcagctttccgctggaacgatacggcagacatcgccggcgatgcagccatcgtggagtttttggctttgtcttggaaggaatgagcacttggaaacctgatttctgtctagatttgagttcctggtgcctctcctttccctacaccaattaatagtgttataccatccatgttttgcacttttgctactaccgttgtagaacatgagcttgccgagatgtgttatttatccctaggatatatgtagcggagatatgcatttacgcgtatgctatattatggcattctaacatttcgtacaagaagatttggtatattgtctaatgctaacaccaactttttagggtggtttaaaaatgattggtaatgaatagaagttgattttgttttgcatttcaaatatatggtcctattcataaaaggtgggcaaactaatacgtccaagtagtgaaagtttgcgagagtgtcaatttagtaacttgtgatggtttcataatgagtgttaaagagatcattttctctagttttgcacacatactaaaatcatattcatgtgcatttggtgacatctggattcattgtattggaagcttttggagactgtgatttgaaaatttgtcgctagagatgccgtgagtaacacaactacacacaagcaagtgatcaggatgtggttcgctgtcttaggctctgagccacacattagtcacattgagtggccatctagacctcaccagccgcttcgccgtccaacattggccattgaaggctagccaaaagtagaacttgcaattcgctggtgcctaggttcgccatagttgcttccagtggtggaaggtttgcaacccaagtagtaagaaattaagcctcgtatgtcaggccggcatagtactgaaggtcacttgtccagcgccagatcagtcagatcctctttgctttggctgaggatcaccgcttcgactagcgaccagacatggagatattgagaaatccatcgtttagatatacggagtatcaagttacaacattaggtaatgtattgtttggttatcatacttgtgaaggagatgcatgaccatcttgccatgaggatcagcaatacttaaattttagttccctttgcctccctttcctattgcacttcatcagttcaccgtgaaatacaagacattggttatactagcagagctacaatgctcatgagctcaccctgctgctgtctttcccttgtactggacattttggcacacgttgtgcgccctaccagatagcaactgtgtgtaataattaaacccaaacaaatcaattcattttatttaatttgtgtgtcaaaataaaaatgtgtcgaaagtaactatacaaaattaatatcccataggcaaaaaaaataagtatcaagtatatagagcacaccagattgcttaaaatatttttgctagtcactaagcaaagaaaaactttaatctattggaagttccaatttccagataaatttgtaggggaagacattatttacttttaaagcattataacgagagcgggcagtgaagatacagattttacaaatggggacaatttcgttcgtgcccctacttttatcttcagtattgattctgctcccgttttttagggttttcgtttttaccctcgtttttttaaaaacgaaacgacatattgcccctactttggatggacaaattaatgatgatgagtatttgataaaaggacatttatacccttacttcatttcttgttgcacattcactagtacacaaaagatttttccgtgtggaggctccgctcgtctgcacccaggtgtctgcgaaaatctatattttcgtgtgctagcggcccaaccttacgggataatccatctttccgtgcggtcgggttaagtggatcacatgggataatcgaattaccctgtgcaatcaaattatactgctcgcacgcaaaaaaaaggaataaataaataaaatcgaaaaccctaaccctaaccatagaatcgcccgctgctgccgctcatggtcaccgtcgtcctcgcgtcgtcactgtggtcgcgccgccaccgctcccgtcgttgtcgtcgtggtcatgccatcaccactcccggctgccaccgctcatggtcgctgtcatcctcgtcgtcgccgacgtcgtgctgctgccgctccagtcgtcgtgccgccgccgctcccatcgtcgtcgccgtggtcgccaccgccgctcctgagcccgtcgctcttggctgctgccgctcctgagcccacctccgccgcgaccgtctgccgtcgccgctcttgggcgcctccttctcctcgtcgtcgtcggtgcgacacggatccggccggtcgcccgcgcgcgcctcttgctctgcgagccgggtgcctcccgtgccctgtgtgcttggtggggaggggaggagctagaggagaggagaggaaaggcagagagagagatgagtgattgagggagaataaaagggaaaaaggaagagagaagatgaaaaatgtgaagtgagtgagagggaaaagagggagtgctatttgttggcaactttttttggccagaagacaattacgatcgggacacctaaacgccttgtggtgataaggagtcgccattcacccgatctagccaaacggccaaatcaagatgggttttgtagaaaacgactaaacctactagcgaagccgatttagagattaaaatcagcctctaggctgatttagatcaatatgaggataactactcgtcttgtgggcaaacggaaggtttatgggacaaacctacaaagaggtaatcgcattctcgcagcgacggcggacgatttacggcgcaaactgacgaagatggactaaaactagaagaaagtagaaaacatggctaaaagtaaagataaaagaacaattcgattgtgttcgggggagagagagatctcaatcgaaccggacttgtcccttaaataggggttggtcttgcctcctacaagtcatcctccacgtccaactcgagatagaaaccaatagaaacccgaaacataccttcccaagcaaggaaacccgagacctgatgaaaacagactcaggctcgcactcttccagtctgaccagccacacaccaccggtcagaccggccatcaagcaacggtctaagcagccaacatacggcggtcaaacaggccttgtggaggaaaatgacgatttttccaaatattggcaataattccttaatttgaacctaggtgtcaaatttgggtgtaaacagtattttcgcgtgcggtactgcggtccacttaagaggcctgcacgcaaaaattaattttcgcgtgcgggcctcttaagagtccgcatgtgaaaataggagcccaatttttacagacgcacacgaaaacggcccttctgggaaaattggagctccttgtccaggaaaatattttgtgtactggtgatttctccctcattttgtacatatagcatggaacttgagtttttttttgaaggttcaaatataagaatttggaccgaatgtcaataatattgaataaatttggacagattcaaaatgaatcatgaggcaatccgatggtcacttatgaaaaaaaaaaccagggaacgttttctagcaattcggaaaaacgcacacatagagtgtttacattggggaattggttgcacatccaatctaaataaatcgataaaaaattccaaattaataacgccctcatgaatgacaaagaagcaacatctcgctcctggcacaatgtttcatgaatgtcggataaaaaacagatttgctgtcaaccacattgtagaaaacagcgccaaagttgtcgagaatatgtaagtagtcccaggaacaaacattggtgtacgacctcctctgcttcgacgttgcttcgtgtaatcttgcacattgtatgaatcctctggtggcaggtatgcattcctagtgcctcctcttcatacaaacctactactttattgtctaggttacatcaagagccaaacctacaactaattctcatcattggccagcctcttatagcaatttagctgatgctatagcttgttgtgcaaaggtcgggattctattccattacctaaaaaggagcaattcaactgacaacttcagttctctaatgatactaaaaggagctttttgttcctgactttaggccaacaccatgcacaagcatgacgaccttcttatatagtatcacattgagtatttaagtttgggccaggtatgtacactacatgttcttgatctgatgacatagtatgcataatcaattaaaagcacatgtaaagtggatagagttattacatggagatgctgctaccaatatacactcatcattcatgtccgttaatttaccaccttatagcataccaacccttagagcacccgtaatggtaaagtaatgtgctatctataaaacatgtacatctcagcaatagactagattaatagtataccacctcaatagtatatctacacatgggtatctatagctctctaatccattgcctcgtttttctctatagactatttccaggttagtagatagctttgctctctctcttcatttaatctctttcaagtaggaaaatatgctgacatgaatctcttgtagagagcctatagataactattgtgggtgcccttagcatacttaaagtagtactacagcgttggagatggggctagagaattaatggtttgaatcaccgagtttttttttttttgagaagatgcatctcacactcaattaatcttgattgtaattcttacagccacaattgaagtaatactccgtacaatcttgagcaactgaaagccaggtagaaaaactactcaaagacattcctgcctgagctaatctatgagcaattttattcactgatctcctaacccgaacgacactaaagctattgaaaggactcagcttcaatttcagatcttgtaccagatccataaatcgatctactaacttccttctgagcaaccatcctcgttacttccaaagaaccaggctcaataattaaggtagatactcccaactaatgcaagatcagccgatcctgctacaagctagtaattccaaggtggtagcggcctgaatacttgggatgatactgtgctactgccggcataaaacctcactgtcatttcgcatgaccacctcactgct

SEQ ID NO: 13175 - DNA, 27940 bp, Oryza sativa
atagttttacatatttcacaaaattttttgaataagacgaacggtcaaatatgtgataaaaaatcaacagtgtaaaataatatttagaaacgaagagagtattacgtctacaaggttttgtcacgttgcatccactatttcccccacatggatgatagatgcacatgaccagtgaacagagacggattcaatgtgggtgtcgagggctcaaggccacctcccaaaaaaaacaacctggatccgcccttgttctataattaatcaaataaaatataatcttaacttatactttacatatttataacaaatttttaaataagacgaatggtcaaactttatgaaaaagtcaatagtgtcatatattttaaaaagaagatagtattatacaattaaatgcgtttagacttacagctgccattagtagttagttcgttggtacattaggttggccttgaccagagatgaaactgttattgtataatatcaggcaagcaactgtgacgaaatcaattaagggattttgtgtcaaacgtataatttcaccgcactactagaaaaaatgtttttgtaggcggtcaaaagatattttcgcaagcggtcaaaccttccgcctgcttctaaacgacggtaaaaatccccaagttttactggcgggccaaagcatcgcctcgcaggcagccgttgggattttctcagatgatacaagcgttatagtagccccgtctgcaaaaatactcatggtgcccaaaaacaatttcccgccagccccacccttccctaggtttcaaatcacaaatcacaaattctcacaaatctcatccaagaaacagaatccaatcacaaacatccattcatcaacacaaaacattggattcaaatccacggcaatcaacatgtaaacttagaaaaaaaaaagaaacaacatcatcgtcgtcgccggcaaactcctttgcatgcggtggccgccgccacccccctccctcctcaggccggatctaggagggagggaggtttccgccaccgccaccgccctcccctctcctcgtaggggccggatctaggagagggaggggaggggagccgcgtccgcaccgccgtcgccgtccgggcaaccgctgtcgccccatccatgccgtcgtcgccatccacgtcgtcgtcgctccccctcctccagccagatctaggagcggggagggagagagggggagccgccaccaccgccgtcgtcggcccatccatgcagacgtcgccgtccacgccgccgccgcgtcccccatgtctgcatcgctgctgtcaccgtcgctccccctcctccagtggggagggagagagggggagcgccgcactgccgttgctcccctcctccgatcggattgggagggaggagaggaggtgagccggtggggaggggtggagaggagaagagaattgttgagggagagggagttaagaaaatgagtggtgtgaccggtggggaggacaagataaggatgacttaaagatttttttggtaggtacgatttttgcaggcggaccacataaggtttcgcctgcaaaaatcatatttttctaggcggagcacttaagaagtccgcctgggtattttcgcaggcacttaagtaggtctgcctggaaaaattgattttcgtaggcggatgatgaaaatccacctcggtttatatttttgtagcggatatttggctcggagggtcatacccgtctgcgaaaaaaaaaaagacccaacgtcggtaaaaatgctttttctagtagtggcaagtatcatgtaaactttttttttaagataatggataagtatcaggtaaactatatgcggcagtaagaaaactcttcacagttgagctcaaatggattggatggcagtatggcactacatagtaggaactgcaggagaacgacgcgtcgtcgtagcttcttcacataaggaaatcagtataccgcaactgctacagtgctacctcacttcaccaagattacaatccacaacttcgaatcgaaatcccggtgcctccctcttctattggacatggttgtacatacgtctagtattatagacgacgtgtcattgtcgatcatctcctccggttggcagcagcctgattgccaacaattcaacaggagagattatatatatatatatatatatatatatatatatatatgtttcatgagacacagaaacggatatatatgttgcatgctctacattatttttttttcatgaatggaaggtgtgtagtacattttttttatttgcgcagctaaacgtttggaacttagggtagaagaaccggcctgaattattttttatgcctcggcctgaatttctactcgagtttaatttgcccggctagcggccacatccggcccatcattcatgtcatttcgtttcccctcatatgcaacttaacttagatctggttcatttaatcctcacgaacaagggactgaaggggatttattccatacataccgtggtctgaaattgttccccctcaatcccctgcaatcctcttcaatcccctccagatcgaacaaggccttataggagaaaatgagatatcaacataagctcaaaaagaaatttaaaaaaaaaagcaaagcgaaacagtatgctcactagctacccaaagaaaatagtgcattagagcatctcactaataatccggtagctcaccaatttttatggcggtaaagctagatgcattcacggacaggaatggatttagccataagagacgccgcaatcggttgaaccttcaagtttcaggtcagctgggcgcatggaaagacaagggaggatgcaagctcagatctgctgaatgctaacatacataaacacatgtagtttatgatggtaggcaagagatataacatccatacagatagttctttttaaccagacaagtgagacaactactccacactatgttcttgcttgtaacttgtccaaccaagattgacgttactaacctcgagtcgaaatcccgatgcctccctttcctcttcctattaacacacacacacacatatatatatatatatgttgtgtcgtatctctctaaatttccaatccagttggtacataagttgttccgaggactatatataaccgctgaaacagatattgctacattatttaatgtatctaccctattcatcatgacacatgtgccgttaatggtcaccttcagtttgattgttggagttagtgaacttcttttttatttaaggttttaagaattaatattttaaaaataaaccctctaagagcaggtacaataacaaactataagccagctataaccacatatcgagaagaaaagagaagagagaaaagaaagcgggctgtagatttgtagccagctgcaacacagactctaagacgttatgtgtgtataagaggtgggaccgggtatgaatggtgtagtatatttttatagttaactattgtatgactggctattagattagctatatagatgatttggagccagtggttagctatacaattaaacttgctctaaaagtttattttcaaattcgagcctttcttttaccacgccagtacaccagcataacatttacatgctgccacgatatttatattgtcacaataagcttgccacatatatatactggtcaagacccattcaattggcacgcgtgacaatcacgcagatatactctagtcctattctgcaatgaagtccctcatatttacatcaaagtgcaaattcgttattttcagtttatgactagatatctttatatagttgtgtccagcggcggattcaccgcccggccagcgcgggcaattgcccgggctttgcatgcggcgtgtggaaggcatcgaggatgatttctctatgttaaaaccgaatgattagctagctccttgacaaagttggcaggctatatatacgtacgtagtagtagatgatttctggtacaagcaggagtagcatttgccgcactgtaacatgcaattaggccgtagccactagttaattaccaacttgcttgcttcacaatggatggcataattcattcactaaagtactggagtataggtatacaaatcatcgctttttataacaaaatcatcctgtttatactagtgaaaatttacatctatattgaattatgtttttattaaaaatttgttgtctttagttgataagtaaaataagcatatcatcattacatgagtggtaacgggtttactatttttcttatacttgcccaggcttcacaaaattcctagctccgccactggttgtatcatttcgagaaattattacaatgtagttcatctatgttgttgagttccacacaaagaaatctacaataattgagtataacatatactcctgccatctcaaattatgaggcttctaagttgtttacacggcattaaaaatagaactttgacaattatttcttagaatatattatcaataattaaaaaaatacggagtaagcattatatggaagtatttataaatatgaatataatagtacaaaatgcataacactaacatatactccctccgtcctaatatatagcagcctaataccggatttaacatatccaagctatgactatgaatatgggcatatgcatgatcaaattcgtagtactaggatatatcaaatccggttctagattgctactccctctgtttcaggttataagacgttttgacttgtttcaagtttgactaagtttatagacaaatatagtaatatttataatactaaattagtttcatcgaatcaataattgaatatattttcataataaatttgtccagagcttttttctataaacttggtcaaacttaaagtaatttgactttgatcaaagtcaaaacgtcttataacctgaaacgaagagagtatatattaggacggaatgagtactgtatagttaatttagttattagtataaggttacaaacattaacctttataaaattgtatgcgtgctacactttggaatgaatggagcgagtacattatacgtgacaaggaaatagatcattactatttacatatttcaaattcacttgcatttatgggccaaaagaagtgtgtaccaccaacccgtatttctgcgcactcaagggctatgttttgaacacctgcatctgcatgagctgaaattactcgcacatatcgacctaaaataagcgcactaggccgaaattacacactcctgggcaaaatatttgtgaactaccagctgatgaaagttactgttttcacgggctgaattctcttgtactcgcaggctgggtcggccttaggcacactcgtgggctcaatctacgcactcatgggccaggactagacgcatttgcaagtggaaaaagttcaacttgactccctcaacatatgtgaaactaatttgtattcctcaatttctcgcatgtcgtattacactagcaaatgctggaaatgaaacttcggtcttgtaaaaaaatagcatggcaactaaggagaacagctatggatgcacatctggctgcaatcttctcccagatataaagagtacaaatacagtatatggcctcatcagataagcgaaaaaaatgtttattttcaaaagaaaaggagtaatccctattcatcctcgcaaattttatcgaggatatataaataaagacaacaacaaaaacccaaggtgcagtccatccaccaatcatcacataccgaatgatcaaaattaattggcaaaaataggcatcgcgctttttctttacattcttccctaaaaagaaaacaacaatggcttgaagaacaggtggatcaggctcagttggagagtcagcttggacaatgcggttggatggacggagttgaagggaatcgggtgaaggtacataatcttcaaggagcatataagcacatgcgaatgaatgttgaagaaagccagatgcttttattccccttgcaaacagtagagctggcggatatttcctgaagctggaaatggaatacagaattgttattagttgttcaaacagagtattgcaaaatagaacaggccatcctttgcgtgaacaagaatgagtgtcaacactgaaataggataaagattttttttttcacagaaatcactgattgagtttaccacttcagcgaccagtacaactcacttaataaactacttttatgcttatatccagttggatgaacaactaccaataacatacgtaaataatcgtatccaacattttaatatatgatagattagttaaataatcaagcctctaatcacgataagcaatcaagattcaagcttctaaccatggtaagaattaaaaattgcacttccaggtatccctataagtcctgcccaaatttagacaaatcaaacacttacaggggtccagaactccaataccattgttggactatacacttggcagtgaaagtgatagccatatttgttatttaaaaggtggtcaagaaatggggctgcttggttggcggcttggaatgccacgccacggcgtggctcgccacaggagtgtggcggacgtttcgtccgcctcagaaaacactgtagcgtggcgaaaatactgtagctatggcattcaatggctgggatccaaacacaccttaacatcaattgaatagtagctgatgtagatgagaagagtacattataaacaattacagccccatatccataagcaatcaccagttggtaactactgcacaggaagttgcacatggcacatttgtctaacttgggatcataattggcccagcataatatctgatcacattattcatgtgctcaagtaccaccaattactttaggataacatgagcatcaaatactttaggataaccatgagtccatggattaagaaaaaacagccaaaccatgaaaagataatgttctgagtctaaactaataagacacacacaagtttgaaaaaataggcatgcaactatgtaaaccttaatactccctccgtcccataatataagcgattttggagtgacacaacctagtactacgaatctggacagggttgtatcacataatcccttatattatgggacagagggagtatatattctctaagatttttttttttttttgaaagactctaagcaaattttatcaataggtgagtattaccgtatagccagtccttgaattgggcatgaagggcagatgccaattcttttttccgagtatcatcaagctccaattctcggatattcttttgaatatcttccagagaaacatgctgaaattgtacagaaaggaatcgaacttcagaaataaatatgataatcaagagcatgtcagtgttttatcagaaagcataatttacatgatctgtgctcttgagacttttaacccccaacttgcagtaaataattgttagatttcataatcttgatcaatcctgctcaaactatattcacggaacatccaccacaactttttgctatgaatattgataataaaataggcaaacaatggatgcatatttttatggaattcctatattgtccacagttacatcagataaccaccctaactagcaagcaagcatctcactaaataagccctttctgattaacccattgttagaaagaaatgaaaattgtgttgcagcttgattgtaatgcatacatacctttttcctttgggaggcccaataaacttcaggcaaggtaaatggattatattttgtaggtccttgtgcctcaaaccaactgggaatctgtacagaaaattaggccccaatcacatttttgttacagagaaaaaatagtgattcggggattaaagttttgagctgcatcaaatgctgagcaatagggatattcttgatttcctactagttacaaccaaaaaatgtagcaaaatggcttcatcaattcttaccaaaactgatttggatgagtcaaagaaggcaaaagaaaaaaaaaacatgataatgttaatgcagatacatccacgtattcaggcaggcacatccaattcaacttaatctactaaagtactaatgaaacgtgaaatgaatactactggtcaaccacaccaggccaaaaactaggtaagcaggtgcagcatgataacataaaaagatgatttgaagggtttagtgactccaaagtcttcaactcttttacatctcttttgaactccattcaagttaggcctcggaccatgtacaactagtaagccccaaaggccgattagtcatttgattgcttgctacgtcacacatgtcaacattacattggacacataacgtgtacaaaaggttgtcatatgccaacaaatgaaaagctgaaatctgctcagtacaagcagctaagattttcactaaatccacgtgtctttgaaattgggaaagacaatcggagaagggtaacatatagttacataccaaaaagttggtgaatagatcaggatctagacaagtagcagattcagcttggacatcagaaacccctgcaggatgagataatgaatcatgtggatcaacaactcccagcacaaaaggttggtcccacttgttgatgttagaatccacaccaacttgcaccaaatgttctcccaattgtggataataagtattgaatggagcaacctgacaaagcaagaaataaaaatttatttgatgttgttgaaatacaaagagaattacattgaatcaaattaagtgtaacttccatgtttttaaagcaaacttgtttctgtgtgaatgaaccaaaatcaataaatcaaattataaactcgaaggtttgtctgattccttaacacttttgagggaaaactaaatatgtggtccttcactagaaatggttccttgccaactagcaagtattgccaaataaccaaaatgacataggttaaacatgcgctagtttcttttagcatctcaaatgatgtagtcgccttaatttgatgggatggcttcttattggttaacaattagttatgaaggatatgaaaacattcagatatcagcataggtttctgttaagaaacttgaacatcctgtatgtctccatgcttccttttttttttcctttttgattgtccataaagctatttatcctttatagcaaccagatatgtatatacaacagtgtacatttgtccataagatataaatagttgattagaaaaagatatactcacttgtaatttatggttgtcacccacaataagcggttggtgatttactcccaagtagaagatacattcacgacaattggcgatacaaattcgctttgaagctgcaatgatttgcactcgttcacaatgctccacttttaccacctgatcgcatgaaaattgttagaactacaaacagaaaagagaaaagtgtctataggcctttctagaatgtgcatcacattaagttgtatatctgcaagcacattccacaataggtcattgtgatgctatatggacccaaggtccacccacatgtcaataggcatcagtggcataaaatggtttgccctttggtagagcaaaattctaacaaagtgtgttggttgtcgaaacatcaataaaaaaaattcaagggatctcatactttttcatgttcaagctgaaatattgttaacaaaagttgtatgatatacataccttaccaacagcaccaagaacgatagtagtgtcagaacacccatagacagtggcatatttaacaggagctaatatgtagataacagagtcatggcagttcaaaacctacaaaaaaaaatttcatcaatagtaggctgacaaaatctcgactttcaaataagagtctggagtaggtagtttctgttttttgaattacaacacacagagatatcaataacaaagtaaggctattccgccctctagatgtttatagtactaccaaaaactaatagatgcatacctttattgaatgccctttgatatctgatgcttgtttcactacagaagttttggagaaaccctccaggaaagttgtatttcggtagtgtccttgattgtttggaacagcagttccagttggtgaactgctatgaattcttgaatttgtgacagcctcagccattgtcacatcaggatcagatgcactctgttggctgttttcctttgctgtcaatttttctgctgtattttctaatgaagcagctatattctgcagaatccaatcatgaacctgagcagcgggaacaggtgcagcaggcatgtctggatcagaatttgcaaaaaatgtagccacttggcttaaaggagtcccttcagaaaactgaaataaaaatccgagatgctcaaatgtctctgctgtcaatacctgcataaaaagcaatgtgcataacagttagggtccagggaatcttgagactaaaaataccataaagttgaatatacttttcaaatggaataattaatcctacatgacttaaagtgcccagatttattgggagtttgaaagtagtacacaacgatggacctatacatcaagatcttcaatattctattgatccaaaaaattaaaaagtacatttcattgcagaaattagcctagaatttactttgtcagctgcttcctgaacaggcgatgaagcttccgtacccataactgttcatatcatcatatgaatatgttatctgactattcattatttctttttatcacacagtggagggccctttccagtcctttatttgcttgataaagctttgagttataccccctcctattccaaaatgtgattccaaatgcaggtccatttgatctttcctaaatgtatgctgtttataacttccagtcttccagcacctttttcatcttcccttccatgtttgctcttgccaaacaaatgctactcctctcacaaatagataactcatcttttcaatgtggcaacaaagtcaagtcagttagggtgtgtttagttcacgctaaaattggaagtttggttgaaattggaacgatgtgacggaaaagttggaagtttgtgtgtgtaggaaagttttgatgtgatggaaaagttggaagtttgaagaaatagtttggaactaaactcggccttattttctaaattcttgtgcacaggtttaaaaggacttatatttggaatcaagaggacaaatttaatcgtagttatggactcatgggcactgaacaggaaacaattatatgtttttttccacaaacaactacatcagaaaaggacagacaaacatttatacaatagctatactaaccatagactcatcgccctctccatcaacagaatctgccaaaagactcagaatgttgaccatatgcttttgcagataagataattgatgagcttcttcatctgcttgtgaaggcataaaccggcgactgttactgcgtacaagctgcatattaacataaacaatgaagattaatattaaaaaggcccttacaagtaacaaatatagaaactgttggtctctgcactagcaggagtaaagcaagtcgcaagtgatggcaaagcgctattgtggcaatcatgaaaaggagcaaactggaacagtcaacattcaacagtcccatgcttgcataactcacagagtcatgaaaaagagtgactaaaagagcccttcggcctagccgaggcatctctagtcctaccataggactcctacacgacatgatagaatgatacaataatacaagtaaacagcatttcaaaggggaatatgaacagaaggtgagatggaatttctaaaagcagggatgaggatgaatatagagtagatatcaggataaattagaaaaggaaataggtggaccaagggtcaagcttctcacattttaaatttagaccttataacagtgacgtctgcaaataaattgtggcaatagcagcacattttgtgctgaagtatttttatcacaactattacaacacttaaccaacacatatttgcagtctatgtgaatactgaatagttgtagtcatcatatattggaagagcatattttgaggtataatattacaatccagctacagagaaaagcttacaaaattatgaatcagcttgagcgagcaatgtagctaccaggcaacctgatgattaattgaattgttttgaatgccccactctctgtgaccccgagtagccacagactggtgtccagtactatcataaatattaccagtttaccattgcacaacatcaaatattccaatggatatggataaagaaaaataacactgacaagcgaagagaaccattatcaaaggtttctcatgttcttgtgaagtgccagtagcattgtaaagttgaagcttttgtcagttcttacaatgtattcgtacaaaagcaaatatcttttaggaatcaaacagcatttcagactaaagtttttttttggggccagtccttaaataggaatcattcagctatggacatatcatgttatttctaacttatagtagtgatcccacaattgcattcctcagttggcagaaacattgcccatctctgtacgataaatccatttgaaattacattgaaacgggtcactcggtcgctcccaaatccaacgcaagtgatcataatcggctgccgcaaaccactgtgcacacaaagctaacagaacaagtgcccaccagggcggcggcggaagagggggagggggaggggattgatcgagacctaacctggatcggggagagcgcggagaggtagccatcgaaggcggaggtggagggccacacgtcggtgaccgcgggcgaatccttgtgcgcgcgcgggacgaggcgcttgtaggactggatgtagaggaagaggagcacgtcgcggaggtcggcgtcctccgcctcctcctccgcggggagcaccgcggcgagcgtcccgagcaccagcgccgccagctcccgcgggatctgcagcgcctccgcgagcgccgcggcgcccacccgcggggccgcggaggcgtctccgtctcccccagccgcggcgatgaggcgctccttcgtctgggccagggtctgcgtcagcgtgccctccgggaacaccagcttggggatcgggaggagcccgtgctcgaacgccacccgccgcggccggaggaggagcgccggggaggcggcagcggcagcggcggcggtggcgggggtctccgcctccgccgccgccgccgcggcgtcgaggggctcgtcggccatggctggatagagagagagagagagagagagagagagagagagaagagtggagatctgagagggaaaagtggagacggtgaaagggacggcgacggcgagtctcgtcctcgtctcgtgtagtaacatttctctcgccttttttttaattttttttgtgacgggtaattcgaggggtcgagaaggtgggaggctgtgccactgacaggtggggtagataagtggggcccacatgtcatgctcaggtaatgcgaggtactcgactcccacggccatgaatgaattcagcccatttatttctcgtcaactaaaaaattgggcccaccgacttccatactacaaattaggcccacttaaatcttgtcaacgaattcagcctgctcaataaatgataacgaattcggcccaccgaattcccatcaaccatttcagcccaccaaagaggaagaataaatttgtcctgcctaatcttgtcaacgaattaggcctacggatgaatttggcccatcccagtaaatcaatccagaccactaacgaccactaataggttgagcaggaataagtccattttctctccctcaactcatggccgtgtatgattagcatccctcaaccgcaaaaccgggtataacccatcccccaactccgaaaaccgttacaaatcaactccccggacggttttggaggcggttttatcctacatggcaattgacttgcttacgtggcagttgacttgctgagtcatcaaatgggacccacatgtcagcagtctccacctcatctcatcttctccctcatctgttcccctttctctttcatatcttcctcacctcaccttttgaccttctatcagcagggcggcgacgacggcgcacgggggatgaactcgtcggctggccacgcagcgtgcgggggagcgactcggctcgagcacgcagaggaggcgggagggcgccggggcatcatctgagagggggtcgtgaggacgaggcagcccctccaagtcgccggccatccgcgcgtgtggaggatctcgccggcagtcctcgcgcggggaggagcacgccggccgtccgcgtgcggggaggatctcgtcggccggccgcgcgcgggggaggagctcgccggccatccgagaaggaagccactggggatgtcgccgagcgtcgggttgtactgcagcatgaggacggagaggctctggcacggggacgacggcggcattgcccgcagctgtgcatggcggacacccgctccgcgttgcgcgcacgttagaagaactccgctagcttgtttgctgtttgctcgtgttcttcgacgatttcgtggtctctgatttgttctgttcgttcccctttcttgtttcatgtgatcgccggtgtcttctctgaattcggcaaccaccatgtgctacttgtcttgccgttgatcttgctgctcgattctatcgcctcgcctccgcttcttgatttttcctttcccgtttcttgaagggaatcatggtgagggagaagagatgagttggagactgctgacatgtgggtcccgcttgatgactcagcaagtcaactgccacgtaagcaagtcaattgccatgtaggacaaaaccgcctccaaaactgcctggggagttgatttgcaacggttttcggagttgggggatgggttatatcgggtttgcggttgagggatgctattcatacacggcgatgagttgagggacatctggacttattccggttgagcatgcttaattcctggcaaaaaaatcgatccacagattattcggcccactaaaattccaatcaacaaatcccgccacgaaaaggcccggaggaattcagcccacctatgaatttagcccacgaatctcccgtcaacgaatttggtccatgagtgaaattcggcccactattttaccgtcaagaaaatcagcccgccaaagccacgaacgaattaggcccacttaatttccatcaaattcggctcagacaattcccatgtacgaatttagcccacttattgtacgttagaaatatatgcccatgagaaaattttggcccaccaaatttccgccaacaaattcgccacgtatgaaattggcctacttctttaacgtctatgaatttggcccgcaagtaaattttgcctacaaatgcctacttgtttcacgccgacgaatctggcccgaaagtaaatttagcccagcaattatcttcgaagaattcagcccactaaggtaaaaaaaaaagtctttacctatttcccgtgaaagaattcagcccaccaaggaaaaaggtcttttcctatttcccgtgaagaattcagcccatcaaagaaataggcccattagtttccacatcaatgaattcgaccccaactaaattcagaccagtgaacacccaacaaatcattaggcccactaatggccacaaatgaattcggcccgctaaattgccaagaatgtattggactcaaaattgaatttggcctgcttaactcccaaggatgtattcggcccaaacatgaatttgacctacttaacatccatcgacaaattcggcccaccgataaattttgtccacttaattatcatcgacaaatttgactaggattaaatttggcccacctatttcaagttaacgatttaggcctatcgctgaatttgacccagttcattctcatcagtaatttcggcgagcaggcgtatttagcccaccaattacccatctgtgtattcggcccaggaattaattttttcacttgaacaaatttcagcccaagattaaatttaacatcgacggattcgagccattactgaatttggcctacttaattctggtttataaattgagcccacccgataattaggcccaccctgtcccatcgataaattcagcccgaaggtaaattgggcccacctttttaacgtcgacgaattcgggcctcccatgaatttggcccatcaacaggatgtttacacaaaagcccttacattatcacgaaatcgccaacgacgccagcgccgccgccgtcccccgtccttccgccacatcgacggcgatgtccccgccgacggcgatccttcccgctctccgcctccgccgtggaggtgtcacgatggaagggcaaatccggcgagcaaccaccgggcctggaggttgtgatgtttgcggcggcggcgggcggagcaactgacggcgacggggagacgaggcggcggtggaagagaagaagacggagataaatattgggattgaggatttccgttgaggtgcccatggtttggggttataattactcttctgtttctccaagcaattctttctctaggccgaataattatcactttaccagtcaagtcagtttgaagatttcagtcaaatttatagtttcgctcaacaaaaaatgtttaggtatttgatgaaaatttaggcctttgaatcgagtctctgatttacaacagtagaagagcatatcacagctctgcattgatttagtttttactcctgtcaagtaagccataagattcttgattattggcaaactggccaaattacttattaagttcagttggaggtttggtgagttctgtccttttttttgattctttgtgaagattacaagatcctgtgaatttgatacggcacaagctgcctggacaattatgtgtagagacaattgacaagtcatactgaccgctttttccccgattacaaattcaaagtctaacactgactcaatgatttgcttcaaatgtttcctcttttttttttgtgaagtgcacgagcagtatctaaacttgtgtgggtgtatcatctagatccctaaactctcaaaatatatttttagatcttcaaatttgtcttgggtatcatataagtccaaacgggccatgtactttactcttttgtttttctttttaacggcaatttgcttcaaatgttactatggttcctttacctatttattaatttcttagtgaagtgcatgcggggggtcatatccttaccttcaggctttcagtgcaggtacaaatgcagctgaaatgttcagaaaggttggtcagcctgaaagcttcagtgcttcacacggttgatgatacaatgtggctgaaactccacaggtaaattattttgtgctgctagttattgtacctaatcaaccaggcaatgcttggccaatccagagtaaagtattgtgtatagtatttatatattcatctttttgaaaatttgaattttcgaccttaaatttggagttgatttggggttttttttcatcgaagtttatttttcagcatttgcttttagatcgctaagaacacgtatataaaagttttatttacaaattatttttcgtttgtaaatatgccgtttcgcttattccccgaataagcgaaacgatgggtctgttagtttgttagctgggcaagctggcctgtctgtggttcaagttctaccactgatgactgattgcaaccatggtaataacttaaggcttaagacttgactacttaaggcttaagacttgactgtaggtttctgagactaaatatggcaccactcttgtggtcatgtgtacaagatattaaactactgagtaatacagtggcttagatctgtagtaaatttgaacaactctgtcattgacaaaaattctgttttagtgcccaatgtcaaagaggatatttgtcctgatattgacaaagaaagttccaaagaattgaaacacattacttcacaacagatagacttctttttttccccttgtggtcgaagcaagaaaataagcaaaagacagcccttaaaagattttttttattctaattatggtgaactcagcacttatcagtgcttctagctaattcaatcattttctcaattactccgcatcaggaattaatcatagttcagtcagtctatgtccatgtgtccaaaaggatggcttttcagtgctgtttaaaggaaattgagacaacaagaaaattggcctgacgaattccttagcttgaaactttagtctagtcaagaagatatgtaatgttgaacagataccatccaatttagttggttgcttagtcagataaaaacaagtaattccgttatacttgtataagagtggccttttctgtcattttctcgttctcctaggaggtcttttcattctcttgaccaaatcttgtgaattacaatattataattatataacacaattaaggtagagtgaaatggatctctctgctggaggatgacactacacctaacctagatatataggccaaaacagtaggttgaataacgcaacttatactgtaacctaacaatgtgtcctactagaaaaatagtcacatgtatgtttaggaaaaatctcctaattatgtattgcccaaatccatttattttccactttttgagaatattacatgaattttaaggacgaaccgattaggatccatctgcttgcccttgctgctcttcatgattatacaaaatttaagtagctcgacacaaaagaaatagactatttgttaacaaagcaacaataaagaagttcaaggttatacaaatcattggaaatttggaatatcacctaatcaattgaatccatcaattcaagtagattcaaacatagagtggaattggaccgactctataactatgtttcttttaaccaaatccactttcagaaatattaatatatgatactaaatgagaagggtaaaactgctccaaaactgtctgattcacagagtcttttttacattttttttctttcctgtccgataataagtatgtctgctttccaagttttctttaaccactggttcccgttccatttcttgcacaactactcctctagccaaaagtcatcctttagcttctggtcagaagaacagccgcagggcctgcttggaaggggattaatttgagcaagtcagcaggcaagtttgggagaggaacaaaaagtttgcgggtatcgataaattcatcggttgatcatagaagatcagatgggaaagaagcaggagatggatttggattactaggctgtcagataccatttcaagatgggtgaatcatgtctgaagtgattcagaaggaaggttgaagcactgctgtttagtttaaggaagtatttttcatggcttatccttccacctctggcatgatccaagcttcttcctccctccatggcagcatcacgtaaaaccaacaatttcttccctcaacctttgtcttgattatctatttcatctagtcttgattctctatttcactaaaacaaaggacttgtgtatgtccatatttgtaaaatttaatctatttccctactgacaatactgcttttaatcatgattaccctgaaatggatctctatttcattaaaataatggactttgtgtacgttattgtttgaaaaattaatttatttcccttctgacaatcatgcttgttttctcaaatggattaattgtgatcaatctacgccctttttcaccttagctacttggagtacttctgtttttgttttctcatgcatatgatgattttctcagactaaggtggcattttatataatgattgagattgcgaagatcgcttaagaagttttacccttcccccacatgtttaattcttctctgtttttagttgtttaggggggattaattgattgactaaaagtttttttcctgcagaaaagaacccatatttccccctcccttttttttttgtttttaagcaatgagtatgtttaacttttgcacccttttccaacatcaatttgttcatttctaattctatggaccacattcagataatcagcttaattgttcctttctaattccatccccccccctcttttttgtaaagcaatgagtatgtttaactttttgcacccttttccaacatcaatttgttcctttctaattccatggaccacattcggacaatataccattaagaaaaatcaagctctaaatcagtcgcagtagagctacgtactaaatgcaaaatagagactaatggtatattgtcataatgtgtaaatgcagaagaaggaaccctgaaggatatgacatgccatctgatttggatcaagctctcctcctctactttgatggccaggaacaagataagccatctactcaagaagaaccccacaaaccacttaattttgtaaaaggtcgatctactgttaagagtattttgtcatagtatattacaaacatggcttgaagaaaatcacaaagaatgtcatgcatacattgatttctgtgatttgacttgctttagcttatagctagatgtgtaagattaggaatggctaccaatcttctcattccctttcttttccttttggtcattatagtcatacatgattttattagctaattggagaagagtgacacgtaacaaacatagctgatatggtcgcaggatcttgctagaagattgcaaccaaaaagaacatattttttgccccacttttttgaagatcttggccacacgcatttgaaaaattagcacagatatatatctgggagacacatcagttgcatgtgtgcatgaaagcatgcaagcacctgcctacaaactatgtaaattactaagtcataatgcataattactgaacttgttcatgtgtgcatgcagagactctcaacatcttcccctcccagccaatggatggagagccaactccaacaccaaaggtatatatgttaatatgtgcacatatgtatctctagctagctatcacaatttaagcgtgttgttcacaaggtgccagttctcctcttaaggcttcgatgtcagcgccgcccatcgccggcttttccaggagatcgccggcgccagcggcggcagatggcaggccactcaccctaggcaagacctccaaggcagcattcaaggttttaacttttttacacacgtacgcctctgtagttgtccggaatttttctcggttagacagttgtatcatttttttaccccatcatatgggtggcgttctagtctttggatagatggcttttgatcaatcttgtgttcccttttagttgtgtatgttgggtgttttggctgtgtgcactttcgtggtacagaggctatgagtatactcagacttttgagttcaataaaccttccattatctaattaaaaaaggatagttgtatcacattggtataactgggtgagttaaataaagtttccattatcttagatgttactataattttgtatccatatggcaactagaaagaaggtggcagtggcagcggcggcgccatggcagcgtcagcaagttcagagctcaaggggcccaagacgccggaccccaaaacgctgagaaggctggcgcagaatagagaggccgcaagaaagagcaggctaaggaagaaggtgattacttactatagttactactattactatataccccattgattaaccagctcaatagcaagctaagctagttaattagtactagtactcttgtactaatatcagtcaacaaatgaacaagtagtcagccctcagaagcctaaataaacaaaaatctttggagctagcaagaaaagcaaagagatggtggaagtagctagtgaagttaacctaccacctaatgggagttgtgtgttagacacatgcatgggctttgcatttgttttttctttgcagaatctgataccttcgcttcatattatcatgtgtaattaatccttaatttgttctctttttatttttgtctgtgtgacaggcttacattcagcagctagagacaggcaggatcaggctggcgcatcttgaacaggagatacaattcacaagagctcaggtgaaaattaataagcagcaaagaactgaatcatctcacagaggacggatttggtttgggaaatattaattactactcgcaatttataaaccaccaatatttgtaggagaatcgaagtttctactactaggcaaataatcaatatctaaaattaagaacaaattatctcgaacgaacaatttgtgtttgtaaaaaaaacaatttataagttatatgatgtgtttctgtatctccctgcagggtgcattctgcggtgctggaattctaagcccaggttaacactttcgaactagcatttaatcataataaagagatttacactgctccatctcacgttaaacttaacacgcctagcaacaatagttatttgcatgtcttggtgcaaagaccataagtatttatatatgtcatatcatctaacaaaaatgcatttatatatacattatgtgagggcgtttcagacgctgcattgttcaacttggagtatgagcggtggcaggaggcacaccaccaagtgatcagccggctccgggccgctgtggaggagcaccgaccggatggcgagctgcagccccatgtcgatgaagccatgtcacactatggggtgctgatggctcacaaggctaggctggttggtgctgaccccctccacctcctctccggcctgtggaagggcgccgtagagcaatgcttcctctggataggcggcttccgcccctcggagcttatcaaggtaggctacttctcttctgtgaatgtttgaattttttatagttttatatcagattcatgctttctttttaaaatagtatgaaagttttgttggatcaatcagacggtccaaatcccttacaaagtaccgtacatgacatcttttacaatggtctatactgataacaccccaccaacaagtaacataccacctcacgtgctaccttgatccatctcaccaacatcgctcatgggccttcctctactgcaaccagttttctcctttgctgtttacgaaaattgatttttcataagtggtacagtactttaagagtatccctgtttttatagtcagctgccataaaactaccgtttccacaagcagtcacagagcaggatttttttaagtccacctgtaaaaataaataatatgtaatgcccgcgaaaatggtttttagtagtgagcttcctcccctctcctgttcatatatttttttaaaagagacattaatttgctaaattatattaggaggcaagcatctttttatgtacaagacgtggcacacccatagaggtgtgccttgaaaaatggaagaattttcttaagcagctgtcccgataaaataaaatgttagctggagatgaatctatacccacgtcttaatgtccaaattcattaaaattccacatacgcttttcaatctacctgtcatgttctagatgaaggtcaaaatttactcaatactttgcctccatatattttcctcgttacaaaagcctgattgaaacttgaaaggggcagcaaaagaatttgccgttaatttgaaatttcacaatttctttgttaattttgcaatttcggtccatacctgtattgtgaagcaaaatttaaaaccttgattctttaaagaagcaagagcaggctaagaaaggtataacgcataaatgagcttgaatactcttagaaaaataattacattcaagtaaatatatttatttgtgctagtttggatattgagagcagtgtactataaatcagtcagcaccttcttctatttttcttttttttttcccatgagttagacacattaggtacctaagttgacaactaatgcaaaaatagcagaaatacagtttaggtacccaaagtttctttttgctgggattacccaaagttttacgggatattataggaaagcacaaatttaagagcacgttatatttacgggattttacccaaaattgtacaaaatccatacgttccaaattaagctaggagccctatatatatgtcttggagcacggaaaactattgttctggaggaggatatatagatgctttgttcgactgattaaatgctacagatagcatatatacgaaatcacgaaataaaattgtgcactggagacatatatatgttccaatcatcaacccaaacaaaacatttttaagattatgtggcactcttgaaatcgacaaaataaaactcccaatggcaatggtaatggcccttgccacctgccgctcagctaccaaagtaattactagtagctactccctctgtcccataatataacaatctagtatcggatggaacatttcatagtacaactaatctagataggaaggtgtctagatttattatactatgaaatgtcacatccagtactaggacgaagagagtagttaggtaggtgatgggcagttaggctttggaattcttcatggattgagaagtagagatgcgtacatgcgcaagcgtcgatcaccagatggccggggttggtggagatcgatatatcgagcaggtagaggtagccgatcgatctagctacgtttgtgtcacattctcgatggagacatcgtctggaaccgttgatagagatgcattttagttaggacccctgaacatgcgtgttgtcgctcgttaatttctttcgtctaataatctaattttgttgttaaaataactgaattaaataacgatgttgcgagtattccatattttaccatgcgaaaagataaaattttcatttgattagatgaacgagaacagataagtagtacagctacatgattttgtttttctttctcttttttaagatataaattgaacttgaacttacacatatctatggaatgacatgtggtagaggaatctataaatattcaaaatatttcctgactttaattttgtcatgattaattagtttgaagatatattttacttttcttcttagcaatttcataaaagagcgtggtgcgcaacaaattaatataactcgataaaaagcccttaacattagtcctataatcaaattcaaaatggatcatacatagcatttggcgcaattcatatgttgaattacatagcatctcgcacaattcatatgttgaattaatttttaggtatagcttattagatacttcctccattttaaaataagcaaaccttgtaaatcttttctgaatcaattactgcatttatgcacaggttgtggtccggcatgtggagcccctgacggagcagcagctcgccgccgtctacagcgcgcagcaggcggcgaggcaggaggagaacgcgctcgacggcggcctgcaggcgctgctccggtcgctctccgacgtcgtctcctcctcggacgcgccgtcgtcgtcgcagcagacgccgccggtgatgtaccacccctccgcagccgccgccatggctgcggcgagcttcatggggcagtacggcagctacagcaacctgcagctcgccatggacaagctcgccaacctcgccatcttcctacgacaggtaaatcaacaatcctttcttctagactttttaagttaatttctctgagcactgaagctgatttgggttgggaaattattctaaaactctcgagggatgtcctctcgttttttttgcatggtctcacgtagttatgaaaaaaattaaaaagataatttgtttacaagaaaattaagaagataaattaatatgtgatatattactccacaaacatacaattttaagttgtatgttcgtagagtgatagcatactacatatcttcttaaaaaaaattaaaatcttttatagttatttaagtgacatgcaaacaataagataacatccattcgagagtttcaaatccaccctcgatttgggttgcaagttttcgcatcggtgacgacgttgtgcgtgtatgtgtaggcggatgaggagaggatgcggacgctgcacgcgctgcggcggatgctgacggtgaggcaggcggcgcgctgcttcgtcgccgtcgacgactacttcggccgcctccgcgcgctcgccttgttctggaccaccacccggccgcacccggccgccggctagaaatcaattgaatcggcttagcttaggttattagccacacacgcacacatgcaaagagtagctaaggctatatagcgacatgtaagagggagacgaggagtagatatatagctagagagagcatatgcaccatcttaacgatcaaaataaggttgtatgtgtattcgatcgggaaaatagttttaaaaatagactcgacgtgttgatcttgattcttttttttactttttgaatgtttaattttaaaatgaaccttttcaaaacttacttccagaatctaaactttttttaatcgagctaatgtgcttggcatgacaaaacaatactgacatgtcactcgtagtgggcgtgacagttttatcttgccaccctagtgaggatggcgtgactaaataatattgtcacacttgtcagatcgtggtgatagatcttgaaaataataaatttcaaaaagatcatatcttgaaataaattttactaatgtttaaaaaggtttaaaaagttacaaacatcattgatcttaggacttatttggattggaactaatctttacactagcaactcttgaccttaccaaatttggtagcgtagaatttgtacgtatgggtaaaagattcatagaaaatccaccaaacatccatgtggcattattgaagttgtcaaaaatttagtacggcaaaaattaacctcagtggaacaagcccctttcttaatctaaaaggagatggtttgcaaatgtatcgaggaaattgcaagtatcattagctttaggccactgatgccgcctcgagtaaaagcccaaattaacagcatcctgggcttggcctgtaaattataatttcaatgggctggagttgcagatgttaattaatttgggctgaaagctataccaactttcttccaggccacatgctctcaagaaagaaattaagaagaaaaagaatccagaacggctagatgcagtgtgttcctgatgtagaggatcttgcctctgaccaaaccaagctacttactgtatgcttaagactacagaacaatgatgcaaccatgaaatcatctgcatacaccgattagctatgaccgatgggcttgattagacctcggaatccatattagtttcattttagataatagaagctttattaagactcagttacatacaccaaaatgatacattctaactgagttcacccccggtctctgtatagaatgtacacagccaaaaaactggacctaagaagacttcctcatcataaaacacagaaaccagtggctatcaatctgtagactagaaacacgtaaacatattagtttcatgctgagcctgagaacgatgcaagatacacactgatattgccggtggtggtgaggcgagagaatatattcgctgctgcctttttgacacatttgcagcttagccagtggatgcatgcatgcctcctctgctcggaataaaggcaacttccgtctgcttctttcttaagcttattctgcaacgcatgtcatgtgtctcatgtctactgtattggcattctggttctctctagcttccagaatttttcagccactatctcgtgaattggcggctaagaacatctatgtgcaatctgtgtatcgttctgttgctgctagctagtggaaatggattctgaatttctaactcttacaggatgacctagtgcatgcttttacttctaaaaatgtaacattacaacaaagattaacattataccccccccccccccttcattgaaaaatataagacatatttcgactatttgattttgagtttttataaacgattaatccaataatatttaat

SEQ ID NO: 13176 - DNA, 4154 bp, Oryza sativa
tcgcccgcgccggccacagagctcgtcgcctctctcgccggccaccgcgctggttgcccgcgccggccgcagagctcgtcgcctctctcgtcggccgccgcgctggtcgcctctctcgccggccgctgagctcatcgcccctctcgtcgcccacgccggccgccgagctcgtcgcccctctcgccggccgccgcgctcgtcacctcgctcgcatcgtggtggtgaggggtgacacgagtcacgcaactcgcttgcccggctcgcccgagcctcgagcggttacatccggccaaatcagccgaatccctctatccagcatctggagggaatattcatctctgggctgccctatcccactctcgcccagcatccaaacaccctccaaaaagcggcggccatgtcctatccgggtatatcccaccaaccaaacacaccctaacttctttcagaccagaaactttaatcgctaaaatcaagcggcaaacagctactttaagtaaaatcagggaaacatttagcttctaataatcctaacatatccaagatcagctaaaccttcttccaatcacctgcgctagattttaagaagcaacctaagcaaaatgataaacactctgcagtaatatttacatataagtgcttcatctagtgtcgtaggtaattgcaaaataaacatgatggttggcatattcaaacgaaacagtgagagtctgcacacctcttaaatagaagcatggtacaaagatgaaatattacatgcttcaatgaatctggatacagaaagaatgtccagtgccaattgtacagaaaatctgcataattaaaatcaatatataaaggcaagatttagaggaatgaagtcctatataaagataaaatgaaaggccactgaatcctaaccattaattttctggcttcctcatcacaccaaaccactacaacttttagtttggaacaatatttgctagctgcttcattcagcagcaagcagacagcagtaaacaatagcccaccaggcagcaaaacgaatcgccccgatgttgttgacggctgtgagagtggaaggatcaagtctatagccatctgacatagaggaaaaaaccagatcaagactatctcacggtaggcaaagcgagtaaaaactgaagaaaagcaaataaaaaggggaaccacctcaatggcgaccgaacctggcatcctcgagcttgtttcccatcacaggccaatgtctggttcttgagtgagtgtgtccttgccaaatgctcccaccattggtccatgggtcgcttcctggccgaggctaccgtcgtcgcagctccgtggagcccaacacaaaacagggtaactgctgcaacgggtggcgaggagaaacgggcggagagtgcttgagggtgcggcaggagatgggcaggacatggaagagcgtgagggggaggccgtcgccggcaaaactccatcaccgcacccaaatccaacgctgcgccatccagtccctaaatccccttgctctactgggaggggggtgatggagggagcgccaagaaaggaggagggtacgggagagcgtgaggggaaagccgtcgtcggcgaggagaagccggggaggtaaggcaaggcggcggcggcgcaagggcaggggaaaggaagagaaagggcgggagaacagtgatgggtagggtttcaggggaatggagaggatagaatagggatgttctcttttgcagaaaacacccttatttcccttttttcagagcgcggtcctatatctagaatttcgtctccttcacgtagtatataccaagacattgagggctgttacgaaagagtacaaaacacaggaacatagggtgagggacgtaagagtaattatcaagttaatcgaggacttttttgcaagatgaccagttccaacgcggggcgatgtggataccaccggaagcgaacacgccagccaaaaaaccgcaaaatcgctatggtgcgaagcgaacacgccagccaaaaaaccgcaaaatcgctatggtgcgagcattctgcgatggtctttaatatctccgattgtctaccctctaccccgcagcttattagtaacctcaccaagctggcagccaaaagatatatatataagagcggtaggattacacaattggatggaaatgcatggcatggtggtaagactgcactacgtgcgtgtcgtagcttctccacgtcagggaatcggtatacctacctcacttcccccagttcgatatccttgacttcgaatcgaatcctggtgcctccctctcctattggatatggttatacatacgtcgtctaggattatgaaggacttgtcacggtcatcgattggcagcctgattattgcctacaattcaacaggagggtatctattcttattttattttgaggaattatatatatatatatatatacatatatatatatatatggtaaatttgtttggtgctccatggtgcccgggcaccattgttgaaattgagtatatacccaattcaaatgagtatgaaactttttcaattacttaggtattaacattaactactttactaacttgtttaaagcaagtttgaactgaatttgaacttgtttttgttagattttgattctaggtatatagcatccatacatataattagttaggtatgtaatcatggattgtgaaataaagttaaatttgagttgttttgttgataagtatagggtatgaatcaaattattataactaggtatatactcacaatttgaaaattttgaaaaatttgagtgattttgtgcattagataccatggtgcccgggcaccatggtgccccatatgagtgtcctatatatatatatatatatatatatatatatatatatatatatatatatatatatatatatatatatatatatagagagagagagagagactactgaaagggatgtgatgcatgttctatttatcatgaatgaaaggtaagccgtccatagtaggtacaactagtttgtcacattccttgttactatgctttccgcacctttttacaaatatagaagttaaacctcaatgaagagatttgtgaaatgtgtgatttttataaaaaatattcagtagaactaaattattcatgtaaaagtcctatatattactagggaccttaaataaacatagtatatttctgctacaaaccaatagatctaatgatgcttttttttatcagcatttaaacctaaaatttaaatcccattaaataatattacgggctataaaaaatgggtgcgccaaccggcgcaacgattttctagtatttcgtataatcctggatgagatagctaccgatgggcctaccttttacaatggttcttctgttattagcagcatgatctgtgttgctgagagacaagcacgatcatgaacttccatggagaacattacgtcaggttcacaccaaaacagctttgctctggcatgcctccatgtcaacttatctcggtactcctgttgcagttgttccatacacgatgaaggaagaacacctcgtcagtattcctgatgtctcctattcatacccaacccgagattacatgcttgtaatcagtttgccctctcgatcgtttacatcttcctttgtcttattgtctatgttgtttttcctcttttcttgcatactttatatgaagggaataaagatattttttttgggggtcattcataacgtagatagacatgtgtgtgttacttatcgccggatgtagataggtaaatgtgctactcccttcgtttcaaaatatagtatttactaacattctctttccaaccaatcacaaccctccaccattcactttttccacctatctccactactcatccaatcacaaccctccaccatttacttctacctactttctaaataaccgtgtccaactctaaaacttcttatattctaatacgaacgaatgaagtagctcatggcctacaagataatccaccggctgtatatcatctctccatgggcaaagtgcattcgtggcagtgcacagtggtggagccaaaagccaaaaatttctcaaaagtatggctcaattgatgtagttttcataggcttgtcttctttgttctaaattttcaaaatttggtgtgttcaatggg

SEQ ID NO: 13177 - DNA, 955 bp, Oryza sativa
tccgtgctggaactacagataagcacttggttgattaactacaagactgacaagtactgggataaggttgcagcagaatacaacagtgcaacccccggagctcggagaagggaagtgaagcatttgaagaaccgctggcagaggatgatcaataaggtggcacatttcaatgattgttggtgccgggtcatggcaaaatatcctagtggccagtcagagggcatgcaacagatggacaaaacttggctgatgtataataaggaagcacatgtgatgtatctcgaagaagcgaagcataagttcacctttggccattgctggaacgctgtttgggaccaacccaagtggaaagaatacatctcttctttctccgcaaaaagagtgatgcgatctgagtccggtggttacgtgtcatcttcggaagactctgaagatatgcaagaaggaaaatgcttagtggatcctctggacatgcttcccaagaaccatgaagatatgacagaagtccagccgtctgtctcaaatcaaaagaagcaattagaactattgacagctgatgcgtcgtggcctattgaatttcagcttgggaggcaccaattgatgactggaacatcaaaattgaacgaacatcagcagggggtggcagtgagggatgaaatgcttgaaaaagaatcgggcccacaagattttgaggtgctagacaatgagagagtggcaagggaagatgaacctaaaaaagaaacacagcctcatcaaggtttcaaggcgcgaaaggtcaatcggaaacgtaaaggcaaggcatcatcttcttcatgtgaggtgcaggaagacatcaaacatgcattatatcttcagaccatgcttaacaatgatcgtgagaaaatgtcagaggtacagctccgcctctcgaaagagcagcttgaattggccagaataaagcaggatgaagcgaatg

SEQ ID NO: 13178 - DNA, 671 bp, Oryza sativa
gaccgttccggcgatgagggtcatgtcctcgccgtcgagggcgctccgcgggccacccgaaaggggaggcctgcgagcgacaaaaagaaagaggctggtactcccagcaaggagcgccccgccggcaggtggtgctccgtccacaacacctccctccacgatctcgcggactgtcgcgcagtcaaaaatttggctgagcgaacgaggaagtgggaggaggacaggaggcaggaacgccgtgagggcaagtccccggcggttccttccggcaaacggcgaagtgaggccaagcagaaggcccccgctgttgacatcgatgatggtgatgatgacctaggtttccaagaacctggggccaccattgccaccgtcgatggaggagcgtgtgctcacgtctctcgccggagcttcaaggctatgaagcgagagcttctggccatggcccctactcatgaggcgacgcgtcgggcgcggtggtcggaggttgctctcactttcgaccagaccgaccacccaccgtgcattgcccggggagggcaggttgcgatggtggtttcccccaccatctgcaacgtgaagttgggacgtgtcctcatcgatggaggagcggccctcaacatcctttcccccgcggcttttgatgccatcaaggccccggggatggtgctccg

SEQ ID NO: 13179 - DNA, 627 bp, Oryza sativa
gtataaaaggaggaccttgcccacagagtacagggttgattctggcgagattgagagcctagaacaagggagagtttggctcacactttgtagctcattcatacacaaatccacaaaaacacaggagtagggtattacgcttggcagcggcccgaacctgtatacatcgccgtgtctcgcgttcccttgctagcagacaatctttccacatacagagagagcttgagatctcaccctaagcccccggccgaaccggcaaaggggggcctgcgcggtctcccggtgaggagccacgagctccgtcagatagtgatattcaaagtatggccgttggtttatttgcataaagctagtttcacaattcttttcacaagcttattatctagcatagactagtccagttttaattccagtatttattacacagcaacggttcttttcaccatccattgtcttcccaaagatggcttcccgttactggctgtaatggttttctggggtttactccttctcgtctctcgagaagatgatccaccagtataaaatcatcatgcatatcccatctcattcaatttaagaatttagagtctagccaagtgcaatacatgtcctgatgctcaatatccc

SEQ ID NO: 13180 - DNA, 576 bp, Oryza sativa
agtggtggcctcgcggtccatcaagcccctctccacggcgccggcatgttcttccagcgccatggcacgggcctcaagggcctcctcgcgccgccgggacgccgcttcggcttccgttgcccgccgctctcgcgcagcggcggagtcgagaaccccttgggcggcgtcgagcttgctcttcagctccgcctcccagcttgcgtgctgaagacggagggtgtcttgcgcctcgaccatcgcggtggtggcgacgagggcggcctctcgctcctcctccacctcccgggcgatctccgccagcgccgccttgcgggcttcgagctccgagatgtggcggcggtgggccttacggcccacctccaccatggcgtccaccgagcgccgcccctcctcgacacgcgcccatgcggcctcgagctccgctcgttccgctcgcaaggcctccacctgggcgctaaatccatctagcaccgcggtgtttgcggcggccaaggcctgcataatgggctcggcgctcactgggggggcgagagaagaggagaaaagccgccttggagaaggggatcctctaaagtc

SEQ ID NO: 13181 - DNA, 3816 bp, Oryza sativa
  unsure (1)..(3816): unsure at all n locations
aatgctagaaagtcttataatatgaaacggaggaagtacaaatttagttatgcttaatgtttctatatacgttatctctaacctttatccctccatgcagatgaggataatgatgtatatgctgaccatgtggacattctcttcgttcaggatgaggtacatgtatgaaccgatgaaacaggtattcctatgagagcaactatactttacgaaatgacataaatccaaacaacacgttttaatttaaattttgcatattatgaaccgttgacatggcacaccaccaagatgcacatgaaaaatattaggagaagaaaatatttatcagatgaacagcgacaagatatttatgaagctttacttgcaaaaagtatcaatggcaaaatagaaaggaacgcgacaaccatcgttgcaaatttgttcaatgttagaagaagggttgtccaggatttgtggacaaaagtgaagaaatgccaagcagcaggtatcaaagttgacattacatcaaaaaagtccaagaaatgtggctggaaaagggttgatagagattggtcacaggctgcaacaattccattgaaccagcggacaactattagagatcttgcctcagctttgaatgttccaaaatccacagtgcatagagctttcaaagaaggcatccttcttcgtcactcaaacacactgaagccttttctcaaagatgcaaataagaagctttgcctgcaattttgtgtgtccatgctggacatgcaaacagtacatactcaacccacttttgatgacatgcgcaacgttgtgcacatagatgagaagtggttcaacaacactaaaattgctagggaggttttacttgtatggtggagaggatgaaccggtgaggttagttcaaaataaacaagcaatagacaaagtcatgtttttagcagcacttgcaaggcctagatatcatgcgaatagaaattgctactttgatggcaatctaggtatatggcccttcgttaagaaggtgagggaatctatttgctctatttgtgttggtttgaaatcattttgaaactaactttccatttcatcaatgtcgtaggagccatcacagaggagtagctagaacagaccgagggttactttgatcacaaaatctttgacaatttccagggatacaagtagagctttcttgattacgaaagtgattccagctattgtctcatgttggcctcaagaagatattgggcagaccatatggatataacaggacaatgcacgaacacatattgcagtagacgaccctgcatttgcccttgcggttgcccaaacatgactagacatatgaataaaaaattagcccctaaaatcccctgatatgaatgtgcttgacctcggatttttattttctcttcaatgcaaaacattcctaaagaattctaaatccatggaagagattatagaaaacgtgcaaaaggagtacagtgagtatgacgaagatttggttaatcgggttttcttaaccctacaatcttgcttcatagaagtcatcaaagttgatggaggcaacgggtacaagatacaccatatgaacaaggatcgcttacaaaggcttggcatgctccctactagtcttacttgtgaacttgaactttatcaaagtgctatgcagtctttaagttaagcgaatagtagttggaacaatggttgtttagaaaggctattttattttattgtgatgcagcctttttgtacatagagttgtattatattttgcaagtactgtatgcaaaatataagaaaatacatgcttaccctaccaaccggcaactctctctctctcgtcgctgcatcccgtcgctttctctcttcctctcatgcctgtcgagttctctcccaccaccatcgccgctgctatgcgttttctcctcaccgcctcgatcgtgaggctccatgccgacctaagacggacacagtgtcacccacacgaaggcgtttaccacccgattctggtgctcgatattaattccagtgtactttttatgtgtcatttgtttatcctctctgatgcaccagacccaacatcaattattgttgttacaaaatcttgcaaactagttacctctacatatcaattattattgttacaaaatcttgcaaaccagttacctctatgtagtataaaataattgctcggtgtataaatgattgcttacagtgtgactaaaatttacaacatatcctaatacctcttgtattttgaaacctcctgcaagggcatactaatgaagcataaatactaccagctttgttttttctagctcattaagttggttcataactataataattggtcatatgcatcatatgcatattgatgtgttgtacatatcattgcatggctaagaccctgtttagatggagctaaaattttttagtccctgttacatcggatatttggatgataatttggagtattgaacatagactaattacaaaacacattccataaccttagactaattcatgaaacaaatctattgagcctaattaattcatgattagcctatgtgatgctacagcaaacatttgctaattatagattaattaggcttaaaaaattcgtctcgtgaattagttctcatttatacacttagttttattattagtctatatttaatactccaaattagtgtccaaacatccgatatgatagggactaaagtttagcccctggatccaaacaccacctaagcttatcatactactctaggcattaagtttggttatctagaattcaacattgaactctctctctctatctttagtaatgtaaaataaaaaaaacagaatgagtatatgcatgtcctaccaccaatcctgacactatttaaggaattatttagctccattattctctcttttagttttcatgacacatgagtcataatattggtcacaagtgacatgtatgactttacgttgtaacgctaatacacagctgtcaacttcatatactcctataaacgaaacggtgtgaaagcgtgtcaactagtcatctccatccagacatcattagtaagaagctaaatattctcgtgcaaaaattcgaatacatatttatcacatttaatcttatatagtataatggtttgcttcttatttcctcaatacgctaaaattatatttgtgtaataaaagttcattgaaaaatatattaactatttttttataaaaaaagtatttgctaacanccaaaactattgagttttgacacatccattctcataaaacgagctaaaaaaatattaagttaaaatcatagcataatactaacaaggcaacaccaatatttattgattgagcataaggtgagatgctgtttttttttctttttttaacaaaaaaacgagtaaggttcactataaccaacctaacacgacaagaaaaacaagataaaaaactttaaaaaataaaaatgctgcaaggagcatacatagcaattagtacatgttgatgcattgaaggcacttcgtgcgatcagatattaagcataacgagcaaaacataatatagtatcacaccacaaggtaatcttaaagctatagttaatttgttttgttgtagtagcaccaaaatatgattatactagtttcatactacaatatcaagttgacaactagtagtaaccgattctatacaacaaactctatttcaatacacaattaagcatggatatgccaatttagggagaagaagagaggaattacggattcgacaatgcgttggattgaggcccttagggctaatatgtagtaattacgagaatatcat

SEQ ID NO: 13182 - DNA, 4979 bp, Oryza sativa
cgctaccttgcaccaaaacagacagaccattcataccgtaccataattagttgcagctttgcaggggccatcatcacacaaaagctttaataaaggtactcaaatacaaatcaactataagtctataacttttcctgggtcctttggcctaaagtcaagaatgaaggcccaaaagagcaaaacaacatcacaatgtatttcaacacattgacaaactaaatgtccactagcataaacacaatcaattcaacccacaaaaagataaccaaaacctgcactcgaaaaatatcatattaatcatcttattgagcagtgatcacccagtacaagatagttgtcttttctaaaaagaaagatagcgagaatgaatcgcagcctcacatagagacagatatactgcagttacaattttcccatttcaagcagcaggatcgcaggcagaacacaataaataacccatgcaaaacacaagagtttcatgctgtgaaataaactctgatccgaatctacacaattacaaagcattccagcatttttaattcacaattactcaagagccagatcataagctcacttgctcacctgcttgttgtagatgttgaagtagatgttgaagaggtaccacagcccgaacagcgcgccgagctgcagcgtcttggcgaggccgctttcctcctcctccgccttggcgtccccggccgccgcgccgcacgccacgtggcgcgccctccccctccccgcccggtccggcgagatcggcggcggcggcggcagcagcagcagccgcccaagcgaccgcgccgccacggcggcgggccctcgcgaagaggaggcgatgccggcggcgaggggccgggcatggagcaggatgggacgacagctactgctgccggggcccagctggagcggcggccgcgcggggcacggccggacgaggccgaacgccgccgcggcgctctgcatggcggcgggaggcgagaaggttcccccgggggaaggggaggccggaggttctagaagcttccggagtgcgtggggtggagagcttggaggaggaggaggtggtggcgcggcggggaggtcgagggggaggagaggtgagtgagtggaggggtttggtgggatttagcagggggcgaggtggaaggctgagccgacacttgggcccgcatggcagtgagtgggcggatctaccaaaatatccaagctggctgcggttggtgtctctggcggcttgcagttgcaggaagggggttatggagagagccgattatggagttggtggagggagtttcacttgtactcaaggttccgattcgtatccattattttaccatgtttcgatcctaccaaattaaaacgatatcgatccacttagtattctaatttttaatagtatctcgatccaactattcattactacacgatcctacgaaatcttaggtggtatcccgattctacgatccctacgatactataaaatattatttgaaatagcatgatttgaaaataatgtaaataaatatgcccaagtttatataaaaatcagttaaatatatcaaaaccaatgtggtttctcttgataaatgtctcgatttgtatgacattgtcggagggtgtactcctccaccagggaaccgaaaggcctatcttttttagttcggccggggacggtgattgtagattgagaggttcgctgtcaagtgtgaagaagagggggtgcgacccctcgggggaaaggcaaccgtggtttatacaagttcgggccgctgagaagcgtaataccctactcatgtgctatgcttattgagagggagagattacaagatctccttgttggagtagaaggtgttgatgatgaggggcaagagactgtgctagtcaaaatggatcatccctccctcagtaggccaggacctccttttatactccatttgtccctaaatatttgacgccgttaacttttctaaacatgtttgaccgttcgtcttattcaaaaacttttttgaaatatgtaaaactatatgtatatataaaagtatatttaacaatgaatcaaatgataggaaaagaattcataatttcttaaattttttgaataaaacgaacgctcaaacattttaaaaaaagtcaatggcgtcaaatatttagagacggaggggttaccacaggggtccaccgagcctaactagggaggataatcatactaagctcgcgtctcgttgcttgacttggaaggcacttgcatgccttgctatagcgtggggcccatcaaatccatccgcctaacacgggggatgcgcccgtcacttggcatttaatgaatgaggaggtcctcattcgtaccgggaagtgggaaccctgccctaaacgggttaggcaaaccgtatccggccctgacatggcaggcgcactactctagccacgtcaatcatcggtcacagaccggtctgacgaaccacgccgcattaaatgttgcgcgcggagcgctcgctcagaccgtcttaaatgttgttaggtgggtgctaggagcgcccgtctggcgcggcacacttggcgccacgcggagggggtgacccgaccccgggacgtgtggggaacggccgccgtcctgcctcgggccgaacccccttgggggaaggccacgcggctaccgggggcaggcccttcctcacagcctgggtaacccccgggcccatatcactagcagacatatattattaccacatttttatatagaatggctatacgtaattaacataaatattaactaaacttgaaaaaaaaaaagaaaatctcatagtatcccgatactacgatacgatactactttgagcaaaacgatactacataggataccgatcttgacaatcttgcttaaactttctccgtcccacaatataggagattattcccattttagcagaaattaaggtgatgaccaaaagactcatataaccctgaaaaaggtactaatgcagtgaaaaacagactaatagaatgtattcttgcagtaatcaaagcactgcaaaagatacatattgagaataaacttatacttcaattaatgagaatgccagacacatctctagcaatgtcagacttatctcaagcgtgagatttaattgcctccactattaggcaatttttgccgcaatttacacaaaccctgatttaaacatacaaatttgaatcaaaaggttataaatactcccttgcctctttgctctaaactttccctcccagcctcttattcccattctcacaatattgccagcaacccaattgaatctcatcatgcacatccaccaatccatgccaatcgatcttaattcatctccaatagaagtggaggaagatgaacttccttacttcaatcaagaatttaccatacaagttgtaggagatgtagaagtccctgttgtgcatcaagacgatgttgctatagaactccgagctgtgcaacgagaagatatttgtcgaaacaagatttcggcaatacaaaaaggggtggctatcaaaaaggaaaagtggatgggtttgaagacaatgaattttatataggtttaggcctcctcgatgagaagtaataccctacttctgtccgggattgatctgccgagtgtgttattgataatatgatctgggataaaagttatgccccaagaggcaaccggacccctccttatatagtggaaggagtccgtattacaaaatacatcccatattcctaacagaataggtgagtaaagataaaatacaatcgtagccgactaggaccctgggtatttccttgatacacaagttagaaatttaactcgagtcccttaaagatatttcatctacatatggtaccccaatacccagtcagatatacatgccgtgtgggtatggggtatccataatctccacaatattgttatagaagcccctgttgtgggtcaagaagatgttgctgtccaggaggaggtcgaccactacccttttgacctgaacatggacacaggtatgtcagtttgcatacattacatgtgaagtttcagccactttgacctactcttcatctccctgctcccattcacattagcaccaatacaattgcatctgctactacagcacacccactaatccatgtcatcctatttcagtgccaacagaggaagatgaagaaattcctgacctcaaccaacctgttgccattgaagaagaccaagtccattgtgtgcatcaagatgatgttgtccaagaagaggaaaatcaaggcgatttccttctcaacttgatggcaggcatgtcatcttcttatttcaaaagttatatactccctattggagtttatagcaacataaaacagtcaaatgaatgacataggaagaaaaatagaatatggttaaggaaatgtactcactgcactgatgtgaagatagatggttattctatacttgcaatgcaagagttgtcctgaactcaaagtgagctgcaatgagtttaaaacgagctgcaaatatatctggccaggattgattcccatttgtcagtgtgttgatcctacacagaagaaaaataatattaggattgcgattagtactagcaagttcaagctgttcatcattagtgtattactgtactacacattaccctcaatatgacagtaggaaacatatacatgtatccataaattagaaattaaaaatttcattgaagtgttaccttgctagcttgatgttcaaaatccatcatttaatctactcataccttcaataatgtcattaagtaggagtagcaaatttacatatatatatatatatatatatatatatcgtcaattataaaactaatttcactagactttttggcacagaacactacagttggagtaacacactgcaaaaaaaaaaagctcataagtcaaattaattatgaagggattgctaattatactactacctccatttcaggttataagactttctagcatt

SEQ ID NO: 13183 - DNA, 1567 bp, Oryza sativa
aagtaggttgatgctgattgagtagaacagtttgcaaaacaacgctgttctattaggcactacactacatcaaaataaaaaataataagactgaattgtatcagtgacttgatgatttgatctttacatagttcatttttcagtaactagaatcttcctatgagctaattatgataagttcaactgggaaaatgcaaatgtatctgttacagagtaaagactgctcgcgagtgctaacttgctaactgctcacatgaactgtctgaagagataaggaaggcatgcaaagatgacaagaatggaatatttttgtttataagaatcatgcattaaatccctttgaatttgatttattcaaattacacgcaatagctcatgcgaagagttagcaagtaataacccaaagatgtgtgaactatgtattccatgttttatcagttgtaaattactaacttcacctttttgccatagattcaataatccaaatgtcacatagatacaatattattgtgttaaaaacataaacatatatatgccaaatacatcaaacaccttacttatgtcaatgtacactatgtgattggccaagaaaaaaaagagcgagaaatgagacataatagcagagaaacacataagcccaaaatgtttggcataattgctcctttacagttcattttattaagcttggattcaaatgatagtacttgttacataccagttgaaggaagcctcagtaagagatgccaatgctacaccaccaacaatcggaagaagtgaaagtatcacccaaactgtaggcaactgccatgccattcaattattgaaagaaaacccaggtagttctctcagatatacataatatattgcagcaatcaacattatataggacactacaagttacctcgccaaggaaaattgcagagaggagaacagaaaagaaaggttccatagctttgatggtatgtgtgaatgacacagcaaccttccccaggctcatgttagtgaaaagattgcccatagtatggaccacagctagaggaaggatggcaaagagctgaaaaggaaaacacaagagcaacagatactccttgttaatacaacccatttaaacaatgaaagtgtgtcaaacaatatcaaagatctacctgtgcaccagaaatctttggtctcctaaggataccagtgatccacatgaacaaagcaacgacagtaccaacagcaaattgaactgttgtaatgtttattggatatgggaaaaccttcaggacctgtcaaacattataacagaaaacaagagttaatagtttatctgcgaaaataatcaatataacaatatagcatatcctgcaggaagaacaacacaatcaaaatacaaaatgcttttagaaaagaaaggctgtatgatgataatcaagaaaacccatgcataccaaatcagatttgtatgatgaacagaaatgcatctagggaagtttagtaggaagattatataatctctagtaactggaggtactgactgcaaggcagaataagatagaagaatgaatgtataatcaaaggagataaa

SEQ ID NO: 13184 - DNA, 9586 bp, Oryza sativa
agaattttggagaacaatattgtagagaatgtaacttagtgcgtagtacagaaatgcgaggttaacgtagttattgttttcatcaggcacaatgtcaaataaggtcacattccagatagttcacggtgaaggaaatattagatttggtctagatggtgttgatctgtcagattttgtaatgacatctaagggcatcgataggcctgcggagagaacatttcagtcaatttatagttggttgttgagaggatttagaatagaccaagaagtctacacaatgtcagtatctgttgtagtgagtcgtgcaacaaaaggttatttttgggaactaatgccgatggacagcactgctgcttggagacggtatgtggaaatggcttttgaacggtcatggcccctcattatatttgtgtcggtacaagagaaagatacaaatgtttcaatgcaaaccgaagatgtggagggtcctagcaatgcaggggatgttgttggaccatcgatgcaaaatgaggaaaatcaaccaagggaggagcaggccatgggcatggcggatgaggggagagagtcggtataattgttaatgaaatggagagggaagattcggataatgagcaagcggaggacgacgcatcatttgatgaggaaggtgatgtaatggccactgattgggcaaatgaggacttctctggacttgctatatcagagggtgatcatgtaccctgggagtataaggagaacgaggtaattgagggtgctaggtatgctcataaggatgagatgaaggaggcagtgaagcattgggtagtttccttgcagagagagtttagggtggtcaagtcaacaaattatgtgtatgaagtgaggtgcatgaaggaagactgtctgtggcgtgtccatgcatataagggtaaatggaatgattattggaaagttagcattgtgaccgagcaccagtgctacttacaaggggtggagaagtatcaccgaaacatcacttcaacttttgtggcaagtgagatgtatagcagtgttgttggtaacattggctttgaaccaaaatcaattattagccacatcgagaacaaattcaagtacaccataagctatgcaaaggcctggagagccaaacaaaagattattgagataaggtatggcacatttgaagcttcttatgataatttgcctcgtctgttagccaccattgcccagaggaataataatacttactatgacctacatacatttacatcggctgatgattgaacaaagagtgtgctgcaaagagcctttttctcattgggtgcttgcatcaatgcttttgtgcattgtcgacctgttctatgcatagatggaacatttttgacaggtaaataccactggcagtggtacctgctcgggctaccactggcaggagccccagttggtcccgtggacggtgtttttggctggaaggaggatatcaccgtgcgcttcgagcacgtgatgcgccttccacacctaggaccgcccaacacccttcccccgtactctaccgtcgggcctagcaaggcttggttgctttagttcactgtaagtaaataacttgttattatcatacatgcttattttgcgatcaacagattgttttgtactaacatttcattcttaattgtaggcggatcttctccaccctgacgctgatgattactcggtctgacgctcccttgaggcgtacctgttgtggttgttcgggtgggtgatgttcactagcacccacgggcacgctgtggactgccggctggtccactacgcacggtccatcgcggatgctcagccacaggacatgccgcagtggagctggggttctgccatgctagcagccacgtaccgtgccctctgtgaggcgtgcacgaagaccgacgcgggagcgatcttcgctggttgccctatgttgcttcagctttgggcagccgagaggtttgccataggtcgaccagtggtggacagcgaaccctacggggttggtcgcaacgcgcagtggccagaggacggtcccacgatggggacttactggtgtcgacgtggggttagtgcaactttgctgcgtcataagtttatcagtcgtcttctttttttatcatcacataacatgtctaattccgatcatgtttattgcagcgtcgttacactcacgtccaggtgagacgaggttaccaggacttcgtgtttgagtttgactgtctccagccgagcgacgtcatctgggagccgtacacagaagaggccgtcgctgcgagagcaccgctaggactttcgtccttgtgcacacgtgaccaggcttactagctcaccatcctgccgatggtgttcgacattttcgtcgagcctcactgcccgcagcgtgtgatgagacagttcggactgaggcaggtgtttccgggcaacgtggagccgaccgtcctccctgccgacatctcgtgagttcggattgttcatttcaaaatttttatgctaattacttcatcgagccatataatttacctctcttcataggttgactcgacggggacagctagcaggcgcactttgggctccacgtgtacagcagtacgttgacgactgggtgttagctacagaggaggtgatcaatgagctcttcccacacacggaggagaactaccgtgactacctccgttggtaccttcctcgcactcgtgcgcgtgtgaccttcactccagacaccccagagccgcatgttgccgctgtcacggacgcgtatcccacgcaccgtgaccgagactacttcgtgggggtacgtcgaatttgtattagttcttacaattatttcatttatcttgtataatataggacaattactgaattttttatttccatcttgcataggccgatgcttcacgggatatcagtgccgatatcaccgctgtccaagtgaggttgaacagaggtttgcacttgactgacgttgagcagagggtgaccttcgaccggatgcaggagaagatgcgtgcggtcatgcgcgtcttctcctgttgcagcgctgtggacgtcgtacctccagctggtccggtacaaccacggcctcgcgcgcctaccgtcggagcaggacctcgacctacggcaccggtttcgcacggtacttctcagcccagaggtttcttaagttttgtttctgtttttgtatgaaaacatcaccccgtcgtaacttgatgttccatcctcgcaggacctcgtttgccttcgagcgcccctagcgtcggagcagtgcgtcctacagcaccggtttcgcacggtagtgctcagcccagaggttagttcatttttgtttcagcttttgcacgaatacgtcaccacttcttaactgcacgtttcatcatcgcaggacctcgtctgccttcgagcgcgttcgcaggcacgaccggcgcttccgcgagctccgcaggggcattcgccagcgcttccggcgcgttcgccacctcttcgggtgcgttcgccagctcttcctctcacggagcgtcgatccctcgcccacacggtactttaatttttattaatactattaaatacctgtatgaaactgatggtccttgtccagtaggatttccagccgggattttcggtactggtgcctcttcgtctcacgccggtaggtctggtcctactagccagttctacgatgatgacttgcacggtgcgcacgaccacgacatactaggctcctctcagcttggaggagctccagaggcgcacactcatgagcagccagaggtcacacctgtacaggtaggacgggttggtcgtgccataccaccggatcgactcacatactcccaggggcacgttagggcgcagggtaggagggacaggggtaagaggcctcgtcagtagtgttctacctcttcagtgcttatgtgaccgtttcttttgtcttacaaacttgtaaagcagtactacttttgcttttactactgcagtactacttgtgtttctctcgcctatatagttattttcattcatatggtgctagaacaacttatgctcacaacaacacactttcggcgcttcacggtagtgtcagatccactagcgcgcacagtccaccacagcacacatgaaaagcgccagctcgagtagttactatcaactttcggcgctgcctgctgacataaagtgaatcacacccgcgcgtgctcgtcttgtcacatctaatgaataatgtatctcattgagtgcacatatattgcactgaaaacgacgctatataattgacaagctgaaggcaacctcttcatatcttatttccaactagcacacaactaacgagaatggaagcgccattccttgagcgtctcaactggcgaagagcgatcctttcgctggttggtttccaccatggtgtgaccgtcctttgtgcgattgtggggatggatgcatactcaagtcttcccccatgatacaaactcggggcaggagattcttccaatgcacgaactttgatcaggtatgattcatctattcgaagttcaaatggataaaaaactaacttcttcgtacacaattgtaacatcttacgcagacatatcttccaatgtgcaacttcatcgagtgggtagacatggagaacccacaaaacgacggaacacgtgcatacccacgtagtgaaacaagatcggactacctaaggcggaaggatgagcatgaacgtcgaattgctgctgaggctttagaatggcaggtaaatcccctaggactctccacgtgccgtgagcgtccggagtgtcgttgtggtgaccgttgtcaggtcataaggtccgtaaggcaccgaactcgaggacaaaggtgtttcgtgtgtccaaacattgtcgacgatgatttcgtggtaattacaactattcttttcatcactcctcagtactatcattaacttaactatccccacaatggatgtacataggaggatgcaaggaaatgtcaatttgtacaatggattgacacagtcagagttacttccagtggcgggccgataacgcaacctgaaccgaccatatagttcattcatgctttgatggagtacgaacgttgggtggaaattgcaagcttagactggaggaacaatccattagggttacctaaatggtccgagcgttcaaagtgtgggtgcagagatcgctgctaggtggctacctcctttgcagaacaaacatttggaaggagatattttgtctgccccaatgtagacaacgatttcattgtatgtctaaccgtttccaaaatccgctatgatttgcacaaaatttctacccaaactgaataacattagtattttttcagggcaatccaacgatgtgtggatttactcgatggatcgacaatgtcactccatcatatcatggccaaaagataacagagtcagaaacacaagtagagtatcaacgattgaaggaccacgagaatgcaatgcatattgactgacctagaaggggccgataggttaccgcaggctagattcgtcgggatcgataaatttgtaccgtgtatcgatggcacttcttatctatcttatcattaaaatatttaattatggtggtgaatttttgtatgcgtaagactaaaaaaataataaaattgtatttcaccaatcttggagattttaatcttgtatagttttcaatacaaaagatttgataacaattttctatttataaaaatatctatttctcaaataaagcacaatgtaaaatcgccctcacccagggcggcaagggggccgcctgcaaaattccaggccccccgccgcctatttgcaggtggccccccgcacagtgtaaaatcgccctcccccagggcggcaagggggccgcctgcaaatttccatgcccttctcgccgcccatttgtaggcggccccccgcacagtgtaaaatcgccctagcggagggcagcaagggggccgcctgcaaatttccttgacggccgtcgcccgagagcgaacggccgtctgccacgtcacattcgccgccctctgggaaggcacccaaagggcggcgggcgagtacttctgtcaatttttgaaatagaaaattatttttgtaaaacttttaataaaaaaattaaaaataaaaaaaattatgtgttttgccggcgcgcactcttccgacaggcccacgtgactacgtaaagcccatgcaacaggcccacgtgacttcgtaaggcccatgcaactagcaggacgtgttttgattttctttttccatggatttctcaatcacacgcatgatttttttttcacaatttttttctcagcgtgaatttttttaatcacgtgcacacgaacgcatagtaaccaatccgtcaagataatgatgataattaagataagatttgtttttttaaagatttttttaagtaatagattgaagagaaatttatacgtgaagtcaaattctgaaaaatttcaatctagatttgaaaactttcaactcgaaatttgaatttttgaagtcaaaatttgaaaactttcaacttatcatctcggacttgaaaattttcaactcagatttgaaaattctcaactcgagatttgaaaactttcaactcggatttgaaaactttcaactagagatttgaaaactttcaactcgtatttgaaaactttcaactcgattttgaaaattttctactcgattttgaaaactttctactcgattttgaaaaactttcaactcacaattcaaaattttcatatcaaaactgaaaactttcatatcaaaattcaaaacttaaaattgaaaattttcatctcaaattggaaattttcatatcaaaattcaaaaatttcaacttgaattttgaattggaaactttttactcaaatttcgaaatctttccactacaatttagaactttcaactattttaaaagctgtaactaaattatgtatatatggtttttctttaaaataatgctaatgatgacaattaacgctaattacttaattagtgggtgagccttgcgtcgacacggaaaaagtgtgcgctacttctcctgctcgcgcgtctgtgcgaagtagacgcccccgtaatcatacagtggtttgaacatgatctcactggtctttgcgagaagactatgatcctttctaaattgctttaaatttgttttatgttgagacttctccatagccttgtttgataaagcttctaactcttagaatctcaattttttcaatagcggaacaagtggattttttttccagaaaaacacatgggaaggtagagttaccatttcctaacctccacaaccctaatacattttagagttggagctatttcatgtcctaaaattttaaatttgtataagaatgaaacatgttaatatataagatggatatcactctcttttcctaacctcataactccggattcgttccatatttgaagctctattaaacatccatggacatttcatccattgaacatgagaaaaatggtgatatatattatatcggtgcccatcattgctaaaaatgttattatatatataatgatgatgctctctctcgtggcccgatcttctgctaagggggataactctcgctttgatcgagtgcgatgtttgcgacgtggctaccaaccagaacaagtctaggacgctatacaatcgctacaccacgaacgatgtcgtaccaaccatgacgcgcggttgatgatccctgcaatgcaaacgagagaatactgcaagaacaagataagatgcaatctaaatattgcgaataggtgattaagcacaaaaaaaatagttgtgattgaagtggtagatttaatcgacccggcaaatcaacacaccaactattgggggctctgaatctatggtcgccgactaatcgagcgaggactagagagaaggtgaatagcacttggcaaaattcaactaaacaaagcccaattgtttttgaggatgtacaaagatatttatagagaaaaataaagctagggttaagtgctaattcgtggaggtggatggagacatttccgagatgggcctagtctattacaaggcccaaggcccaagttcggtttcagcaacaacactgtcttattttgacgattcccgttgactcagaatgaatttggatatgagtctggatgcgtttgaaaggtagaaagataagctttccatcaagtctaagatcacccaaatcggagttggtatgaaggcgctaggtccgtttgaagtcagtgctgtctccggaggccgaactggattccaaaactcattggactttaatatcttgtagatcctccattcatccgatgtattctttagcaatggtttatatttctcatgcttggttgtatacatatacttgatggtcacatcatataagccagatagattagtttggaacatgtgtgtagtttggcatgaaatgccaatattacacctcgagcttccttaaactcctccaaatggtgttttcgtaataccgtggaacctgaaactaattttctgataggcgacaaataaaatgatttttaaaattgtacatgtcaaaactttgaagatgttgataaatcatcgtctatttgtacaaagttgatatagaatcaaagcgaacaccctgtcgcccatggtggtggaagaattataaagggatcgactttcttatatcgaaagtctggcggtatacatgaagaagaatatgaaatttgaactaaaatcacaggatttaatttttaacagagaaccatattccaaacttcttatttttaaggaaaacccagacaattctttcgtgcaaaagcagcatccaataggggtatcccagcgatcaccccgcgctctcctccccctatagtccctcttctcccctttcctcctccccttcttctctttctacaccacaaaatttttaaaaaaacaaaaagttagaaaaatttatgtatagaaatactatatataaaaaaattgaattcaaattcaattttgaatcgggtatgtaaatttttgacttataaactttgggtctataaactttaggtgtataaactttatagaaatactacatatagataatatttgaattcaaattcaaatttgaatcagatataattcaaatttaaatttgaatcaggtatgtaaacttttgacttataaactttggatctataaactttaggtgtataaattttagatgtatagaaatactatatatagaaaatatttgaattcaaattcaaatttgaaacggatatataaactttaggtgtataaactttagatgtatagaaatactatatataaaaaaatatttgaattcaaattcaaatttgaatcggatatataaacttttgacttataaacttttggtctctaaactttagatgtgtaaacttgaggtgtataaactttaggtgcataaatttactaaaataggaaagtaatgcggtgccaaaaaaaggaaaccaggtggagggaggaagggggaggggatcgatcgctggcccccatctccagcgatcgatcgcccattaggatcgccgcactgtacacacctctccttccttccttcctcctcctcttcttctctt

SEQ ID NO: 13185 - DNA, 12218 bp, Oryza sativa
atttccaggtttggatcaatgatgattggggaactggtgattggcatttcagtgtgaaaaaaaatgatgtagaattttgagttcattcgtttggtattcgtgattggtcatggtggactagatatttttgagatttatgcttgttagacatggtgcatgacataaagtagttaaaataactaaaatgtcctgttgccatcaccgagtattgccattaggattgaaatagtctgtagaagaagaaacaaggaaaggaaaattttgttccatttgttggatgttctatggtgttacagacttggcatttcaaagcctcctctcactctccctctgggacatgtggttctctagtccttggaccaaggttaagtagtgctgttcaacctcttttctatgggctggagagaccctgcctgagtggctgctgttggggttttgagtgggttggctaaccggagatccctagttataacccctcgtgagaatactctcacctaatcgtagctaggattggattttttttgggacggagggggtatgttgcttcacttgtcaatagaatcttgctcagtagtcaggaccaatgacattttttcctagatttagtctggttgcagcagagtgttaacttcaagaagcttcagcccttctattgcctgcttcttgttgagcacctccaatgttgcattagtggtaggatgttacacatctaccatgagaacaataataaaaatactgatactgagatcctagatgcctggtagatgaacagcctgcagaatgcactagccccacttgttgactacttgcaaaaccagtctcaggattgatatttctcctttgcctttgtttttcttataaaatctcattttgtatgcctggtttctgatgtacttatgtcttgtggcagttccacatttaactatccaattaatttaagctgttttggaccaaaatatttgttgcggtgcttcttttggagtaattaattttatgtacacaactgcctatgaggattactcaaatcattatgcctatgaatagctcaagatggaatatggatttagctatctacacaatattttcaaccatctacaaattggagctgcttatgttcaatatgcttagtagttgttgaatatcatgtttttatggggtatatacacatgttgtgtgttgtgtcagtactgtcatacatgagttggatactttgatttattcatagctccatgtaatatgatggcatctgatttcttgtatttctctgtggttgtttgtcttttcgaaattcagctagttttttttaatcacatttgagatatcttgcagatgagaatgctgattgtacttttgtgcttgcagggacagtacaagacaagtcgcacaaaacagaaaatcttgtgatagtttaaatggcttcaaagcttcaagccttttggaaccatcctgctggccccaaaaccagtttgttatctctttgtgctactgtaacaatttgttggcaccactgtttatcttaggtctatgattattgtttctgatccgaaaataattattaccctgaaagcttgctacttcctgtagtcatgaaaacatgttcttttggacatgtctcagattctcaactcaaactttcaagactttaaacatcattatcttttcaaatattttgatcggatgcatgaaaatagtatttgtctagaaaagtacttacacaataccataagtttattgggttttaaaaatatattgcaatagaaatgagtggtgaaagttgaattatgtgactccttggataaccaaaaacacatgtcatcatgactggagggggagtacttcgcactgaagcatgggccagctcaagtggctcaatactttttttttttgcatttcaattttgtgtgatggttatctaccagatggtgcatttaacctgttatttgttgaccttcgttgtcgcagttcatttctgggctccgacatttaaatggggtattagtattgccaatgttgcagactttgctaagccacctgaaaagatatcctatccacagcaagttggtatgtttaggttacccaaatcactgtccttcagatatcagagccatactagtttgttatgcattattagtatatgtttatactgttgttgtggcatgcagctgttgcttgcactggagtcatttggtcacgctacagtatggttataacaccagtaagccctttgtacttatctatcaagagcaggtttaaactttgcattgtactgattctttggctacctcctttgcaaaatacccttaatttcaaatatgcagttgtatattcattcaaatagtcaggatatcaattcaggtccatctcattgctttgtattgctataatgttgcagaaaaactggaatctattcagtgttaacgttgcaatggccggcacaggcttgtatcagctttcccgtaaaataaggtatgtcaatatctaagccatttccccatttcattatttgacgacttctaagagcaagataatatggtttttgttgatctcctttgcaggaaagattacttttctgatcagaaggatgatgttgcatcattggaaggataatgatgactgacatgatgaaaacccggcccacaacctttgagcgatactcaactcactctgaattgcagagacgcgtcgttttctccaagacaggaacctgtcgtttgtttctatgtttctcttgcaccaatttatggatcgatctggaatgttacatcccaaaaaaaaaaatcaaataatctttttgacaatctctgcgaataaatgtgcaaatacatcaagtagtctctcctttatgtttctccgttgtttattcacatgttttgctaagaagctgttacagcgaacaatctttctgtttgctatctgaagttactacattgtaacctggctttcagctttcagattaccgtaccctgtctggtaatcgaatgattaaagtttgctgtgattttctgatgtgttgcactagcagcaagcctgaaaggcgtgtggaggttgaggctttaaatctttatagaaaaatatgaggtctctaggcatgagaccgtgcgcatttctaataaaataatggtgtaaatacgtcaattcatgtcagagtgttgctactattttttttcttctcgtaaaaacgaaagtgcatttcatcatgcgaagatgcaatacttttctagatagtttgaactgcccgtgcaaaactaggtgaaatccataaccaatacctgagaatttcaaagctccaaaagttgcagtataacacagtattaacggatcgtagtttccattttaactaattcaaactcaaaccaatgtatcaaccgaaatattcaaaccaaaaacatagcagacaaagaaaaccaaaattgttttttttcctagaacacgtaggagatctgtgtaccaaaatcgttttttttcctagaacacgtaggagatctgcgtatcattttattaagatagagaagaaaatgcgtacactgttagagaaagactctgacacccgcccactaaggatacaacagaataccacacacccaaaggaagaaaaaacacacaaactagtgcattaacagcccagccctaaagagatcacggagcctagcagctcctgctaggcaccaaatagcgccctcattagcgatggctcagaggacatcggccaagcatggggtagtgccattaaacacacagttgttcatgtgcttccaaatttaccaagctaccaaaatgattaaagagtttagccatttcttctcattagtaggtaaaccccttaccgttattgaccaccaattagtactcctagcagtaacctgggttggaaagctagagtaaccaagccgtttcaggaccaaacaccatacttgtcgagaaaacacaaaagtgattaggatgtgattaatagtttcctgagctatcacataatggacatgtaggcgggtgttgaagtcctcacttgtccaaccggtccgctgtccaacaactattattaattgccaaccatataaacaatttgaattccaaaggcgcccaactcttccaaattcttctccaaggtgcaaaccttaccgtcccaacaaagatggcctcatatgcagatttagaagtataaattcatgagtttgagagcttccaaacatgttgatctgggactcgaacttgtaagatcacccctttgaccaagtcccagatctaaagaaactccacaagaacctgaaccatcaatggtccgttaatatctgttacccattttttgttgtccaaggcttgtaccaccgtacaccgcctaacagtatttttggctatcaacttagtcaaattaggagctatctcactaacagttttcccttccagccatctatccatccaacacaaggtggattgtccatctcctatgcaagtctttaccgccatgctaaataactcacaagaaacacgaggcacctggactggtagaccgtgaagaaaaaaaatcgttcacccaaaaagaaattacaccccccgggtcgcccttacctttttttgcagattacaactaccccgcggtaaccgccaaaaccgcgtaaaattcacctccaaaaatttgaattcaaaaatcggcggttccgcggttctggcacggctaccgcgctgtttctggcgataaccacgatatttgcttgattatcgccggttgtgtagcagaacacatgaaattgaaaagacactggaaaatatttgaaaatacacttaaaatgtgtgtagaaattggagataattggaagaatatataggatacttacaaatctagcttttgtatgtgaaataaaaaaaattcggtatgacctttttctattttatggatttcgaagcaattcaacatttcgtagcataataattacaaattagcattacttgcacattactaccatattttacaggaacaacaaatgacccattatcattacaataaatgtatatcactaaacacgagcatatctactcacccaacaaataacatatcaactttacaaaaacattttctgcatcactagcaaaccatatttcacctattcaacaatctttacatctcaacaaacatcaatctttcacaatgtatttgacctaaacccgatatattttttctttttccaatttctaaactattttcagtttgccctcagatttgaatttttcttaccctattttttaaaaaattcttcactatctgccactacaaatcaagaactacatctatgatttttttcaattttttttagaattttcaatttgctcaaatttcatccaaaccatggcgcggaaaaacgttaccgcgccctagcaataagcgcggtaagcacacaataaggtacaaaacctccccaccgccggtgaagcaattgccaatctcctctctctccattcccctctccagactgatgactatgtggctatgtggagcatccgaggctaagctttgttgcgcttcctccaggttatggaacaggtataccatcaaataacttcgagaaacgtcggttggtggcattttgcaacggcaaaattcgatatccggagattgcttgtcagcttgaaggcgaagatcatctgcctatgctgctcagaatgtggacattcacctatacagaggagaatgaccattggtttgttgagttatgtgtcaatctgcatgagttgtgcaataatgggtgttcttcatgtggatttactcagcagatagtccccaaactaggaattatctatccttagaacccgacaattgtctatctattttgagcagacgatttgatgtgttcaccgcaatgctagtaggatgtgtgcattatctgaccgatgacaatgcacactacttttgcttatcttgcttcgtacaggcttggtcagcacttcctaaaggtatgtcaaaccacctagttatatctatacctatataaattaggcactcactcttgcttatcttgcttcgtacaggcttggtcaccacttcctaaaggtatgtcaaaccacctaattatatctatacctatataaattaggcactcatttcgagctcctacgttaagcaactagaaaattctagacattgatatgatcgatcgtattgttgtgaccatagatcatattaagagtccttgttaaataaatcatgcaattagaaatatccaaccgttgatttgttgattgtattatcatgtattcatgtatattatgtttagagttgttaaataattattgtaatttgaaatatccagctgttgatttgttgattgtattgtcatgtatatcgcttgtttctatttgttacattcttagtatcctttatccagttttatttatatattcatatgattgattcatcagcccattatatggtatgaagctgaaccacataaatttttaggatagccaggtatgaagctgaaccacataaattttcaggatgtcattggctatgtaaagtattcatcattcggatagtttcaacaattacttcatcggtttatgatttatgctaaaggttttgttgtcaaaagacaactgcgtcacgtcgaaagacgtggttcactcggtgagttgttggaatagtaaagcaatatattaattggtaaaaaattttgggattcccccattacatggccctagggggctatttatagtcttagtacatgctaatacccactagggtttagttaatacaggggaatttacatggttacccttatgatagggacattagcgtgggtattgttgacggtcgttacagacaaatttcgaccgtcaatataactaaaataatggagaattacctattcttacaatgcatatttgttttcaaataatacagttccacttgtacttggaaaataacatgttgcaggaatttatcaaataaaataaagagaaagtggagaaaacctcactcctaagcaagcaaatggataaggagggcccacatgacaggtgtaaccaccgaaaaccaccttaactgccacaaccgtcattgggacccacctgtcagccaccctgccaaacttaggggcctgctaggctggcccaggttcgatcgaacctagggttcagccgaaccctggcagctgcggctccggctagccttacacgtggataggacagtcaacgagccgatctcgagcgagctcgtctgcccaagcttgagccatgctcgagccaagcctattgcaccttcaagcttttaggcaagctcggttcgagctcggctaccaagctcggtcataagtagtataagatattttttagtgataatcccttgataagtataattattttctagttaatcacactaataaaagagtaaaaaatgattaaaataaatatattgtgctaacacatgctaatttattatgtaaatagatactaatatatatatatatatatatattagttaattaaatcaataaggtaaacaaacaatataaactatgcatagttaagctcggtagaagctcgagctcggctcggtaaagctcacgagcttttgctcaagctcgggtttggctcgtttggagctcgagccgagctcgaatcgagcctagaacgagccaagctcgagctacttgcgagcttcgagcttttttgacagccttacatgtggatgtccaggatcgcttgctaatgacggttacatgggtaaaatagaaatttcgcatgttagtaaccgtcgtagcgagcctataaaaggaggagctcattcactctctcaacacactcaagcaagctcaaattcctcttcatactttagtattattatcttagtgctaagtggagtagaatagaatagtattcggagtcttcggaagagttttggtatggctctagtagctcttgtattcttttctataatactttcgatattaatgaaatactcttctttatatacttttggtactttatatagtatgagtattgttcttattttatatctatgtcataccgactgtgtgggtagcctatcagagaggtgcaatggtccgggtttaatgtctgatttattagttgctctatgtcatgtgcacgggtgtagactgtagagtagtatttagtaatataagcatggtgcttagattattaaatatcattaattggacatatatgttgtgggacagtagaggtgggtcgctaatggtgacagttcagtataggtattcctccatgttagtatatattcctaagacaaattcctggggagggtactcctccgatttagcctcggttggacggccatgataggttgtcgtaaagaactcggcaaaccaaggtggtctctcgaagtaccatgagggcactgttaggggtattggccaaacaattgtatactagcatatataaattaggatttgagtgtatactagaagtataggaattgaatgcttcctaattcttcttccacttagttagaattactttattatgaggatttgattagctttgcttcgtgtcagtctacccctatatattaaacttaacccctgcttagactttgacaattacaagtaatatatgtttaaagtgcattagcaaagttcactcttattatcttcgcttgggattaaaaatacgataccttggaatacttctgtatgaaatgctacaatggtacattcgtgcacttgcagattacttctgtaaccataaatataccaggactatttctggcgccattgctgggaatcaatagttctagtaatgtcgttaagaaataccaacaagtatacaatgtctttcatattcatgggccctatggcgttcttcttgggccggcccattagtggtgaaaggcctccatgggctgcagggcctcccaagccataaatatactaggactatttctggcgccattgctgggaatcaatagttctagtaatgtcgttaagaaataccaacaagtatacaatgtctttcatattcatgggccctatggcgttcttcttgggccggcccattagtggtgaaaggcctccatgggctgcagggcctcccaagcccttagctgaaggcatcttctacttcgggcgaaggcctcttacttcgccttatggccttcacccttagtggtgattcggccggatggtgagcttgatggcgaatccttcggtcttcgtcgcctggcttcgctcaggtgcttcgccctatggtttcgccctaggatggtgagcttgtggcgaaccctttggtcttcgtcgctcggcttcgtccaagagcttcgacctaaggctttgccttaggcgcacccttggattcagccgacgcctgatgagtttggtggtttggtcgaaggccctcatgacatgcctccaacaggttttaactgtcatgcataagaggttaggcattggcattaactacattggaacttcaatgccttcatacgttctagttcccctttagtgaatacgatgagttttgaagctttaaaatagtcactagtcagtgatacaatattatggtatatcgtttggtacataagtagtttttggaatatttacaaaacttgaaattcaattaagtgttttttcaatgaatttgtttcaccgactttccatcatgaagatacttcaatccaagggacttgtccatccttgcaacctggcaattgtttatatattttgaggacatgcttgtgggatttgatgtgtccactgtgatcctagtaggatatgcgcgttatctgaccgataacaatgaacacaacttactttgtaccagcatggtcaccacttcctaaaggtacgccaaaccaccagtttatatctatacctatataaattagacactcgtttggagctcccatgttaattaacaaaaaaaatctagctgttgatatgattaatcatactgttgtgaccacagatcgtattaagagtccttgttaaataaatcatgcaattggaaaataactagccgttgatttgatgattgtattatcttttgtatatcgtgttaagagtccttaaataaatattgtaatttggaaagatacatggtgactagggattctaatttttttcttgcattgagagattaaaacatatgtggggtgtggtgtgactagctatgtatcaacaacaaaacaatttataaagagtttttatcgttaatgttcttttttttcagtcgtatttttgtatacaaggaatgtcattgctaaacgtgaaatttttgtcatagctataggactttgggtttcaaaattggttggaattcctagtctgacggtagcacacgctcctactactgcaacaagtttgatccccagcgccaacgagtatcaatgacctcactattgttttcaatatgaaggttatttcaagcttatcttacttgcaaaatattactattccaaaacctgcatgttgtgtagccatgaagtttggtccacaaatatgtaaacatggcatacaagagaaaacacaaaatgaaatgaaatacaagatttcatcttagcgatacatcatgccatatattcatattttggaagaataatgtaagataagccatctcagcaaagccttgccatgttgagaaccgtgaggatggattgtcagtatagaaaaccaaatactttatacaaaagttcgtgggcttgatatgtagttgtcaagtcgatattgactataccgctaagtttgttcgagttcaacaatttaccatcgatattgtctttttctataatataccagtgactttatcaattgttctacaatacgccattgagctggctcatcttttcaaaaataccaaaaatacccttagagacaaataagattaacaattgatttatcttattagaagtttcaaaaaaaatatgaaaatttttatgtggcctctttacacaacatggaagtttgtatacaagtttcaagttttttttctagtatatttattttctagaaaaataatattttttatgtggtatatgagagagaattttcttatatgagagataatagcgtaaaatatcttatgtagtgtatgaaagatgatttatgttaaaaaaacaataaaaaggtattttatatagcatataacatataagttatatatataaatgtaaaacttgaaacttctataaaaatttccatgttgtgtaaggatgtcacataaaatttttcatattttttgaaacttctaataatataaatcaattgttaacctgtatgcccataagggtattttgggtatttttgaaaagaaggttcagccctaatggcgtattgtagaacaattgataaactcaccggtatattatagaaatagaaaatgtcaatgctaaatcgttgaactcgaacaaactcagtgttatagaatagattctctctttgttttaaccaccttgttagtttggaaacatgcaaccactcgcttatttctctcagccgcatccctgaattattgaggcccctttcattttttctgaattatacgacacccttttgtttcttttatatagcttcatatgcatggttattagcttccaggtcctatactttatttagttaactctacatagcagtgccttggatgtgtccttcatgttttttagataagggaataatttcatcaaaatgaaaattggtggatgtccttgttgtgaaagaaacatatctttcctaatattgtacaatagtgcacattaattatgaattaaactagaatatcaattattacgacaaattatttattctaagctacacaatccacatcttctgctatcttacctctggttgctggtctattgttctgaacatgtattgcctatttgtcttgcatgttcataccatgtacttccacaaacagcttccatgtgttccttcctttactggatgtgttatttcttggctgtgatttacttttgatagtatgataggtcaaatagatttatttcacattgtttttcttgtttttcttatttgcacatccaattgccagatgtttctttctcaaagacaacaatttttgttgcccaaaagcttatgatggtacaaaattggcccaaacctaacgatgggccgctagcaagcgagcgagagtactcgttatctctatataaaatggtgcaaggagatgattatgaatttgtgaaaccctatcttgttttctgtgacatcccggcccaattaggatgagacctgtga

SEQ ID NO: 13186 - DNA, 5679 bp, Oryza sativa
aaagttttgctaaatctggtaatgccaggactggggcttgcattaacgattgtttcagggcttcaaaagcatgctgctcagctgtgcaagtatactctctgtccttttttagcaattctgtcaagggttttgctatcatcccatagcattgaatgaatctcctgtagtaccctgttagtccaagaaaacctctcaactgttttaacccctttggaacaggccaactttgaacagccttcaccttggctgggtctgtagccactccggcactccttgtatgccaataatgtgccccaaatactccaagtgctgctgggcaaaggaacatttgctcattttgacaaacaatttatgcttatgcaacacagtcagaacctctttcaacatctgcacatgttcctggagacttttgctatagatcaatatatcatccacaaagaccaagacccccttcctaatcagatggttaaaaatagtgttcatcagcccttggaatgtagcaggagcatttgttaatccaaatggcattactttgaattcataatgaccttggtgagttctaaatgccgtcttatgctcatcctcttcctttaaccaaatctgatggtatccagatctcagatccagttttgtaaaccattgggcacctgccaactcatccaacagctcctcaaccacgggcattgggtacttattctttattgttatcccattcagtcccctgtagtccacacaaaatctccatgtcccatcttttttcttcaccagtagaactggtgaggcaaatgggctcacacttggctgtatgatgccctggttaagcatttggctcacctgcttttctatctcattcttctgaattggtgagtacctgtagggcttcagaatgacaggcttggcctaggactctagaggaattgcatgatcgaaatccctctttggtggcaactcctttggctcaccaaacctgtccttgaacctgtgcaacacttcttgaatctgtgagggcacctcactttggttctgctgttcttctatggtacacagctgaaccacttgagccactgccccatccttcatcatcccattaaactatttagctgacatgatcttgcactgatttaactggtctttcaccccaaatagcataatcctgttgttcttatgactgaacctcatcttctttctcttccaatctatccacattggactgaattcctctaaccaatccattcccaaaatcatatcatagcttcccaacggcagcagcttgagatctgtcacaaatgattgtccctgacaccaccactcaaccccaggagctacttttgcacaggtcatcttgcccccatcagcaatggttatttgtgacagggttgttcctcttattggtaggttcaatttttctgctaccctttcagccaagaagttgctagtactcccagaatccaccagaattaacaaatgatgcttctgaatcaacccttccaatcttattgtcttccttccagaagaacctgtcatggcacattctgatatgaccaattcttcttcacttccagagtctccctcttcagcctctccctcatttgcatctctaatctggaacacctcaagcagctcttccaggatgtgaagctggactgactttgggcatttatgtcccggcccccacttctcaccacacttgaaacactcccctcttgctcttctagcagacttaagtgattcaaacctgtcctcccatttcggcttctcctctaccttcttaggctcctcaggggttggacctagaatccccttccctttgtaacttggcttcccttgaggcttatatggctccttgaatacagtcttgctgtaccccttcttgcctacttcattcagcaattcttcctgcgtttttgcaagagatagagcagcatcaaccgttcttggtttatgcaacttgatcgcaattttaatttcagttttcaagccccccacaaacttagtgacaaaataggtctcatcataccccttgttatacactaagactcgatgcataagttcctcaaatctagaatggtactcctccacacttcccatctgcactagcccatctaactccttcaaatgctcctgatacttatcccttccaaacttactatgaaccgctacatagaattcagcccaactctccacactatgtagctcttcataggtctgcaaccatagagctgcattcccagtgaaatgcaaggttgcaaaggctgcccacgactcaaaaggaacttgatacatgtggaaatatttttcacaattggttttccaaagcttagggttatctccatcaaacctaggacagtcagttttgggcaacctagttcccccatatctaaaacttccatttacaccatttcccctctctgaactttcacccaactcgaaaggaattggagagtgaggaaactgtcgtttacctctgcccagggttcgctcttgagccgcaagggactcaacagcagccccctggtgttgttcttcgacgcggggccctacgggcgtcttcatgttcatcggcgtcgacgcctccagagcggtgacgtgcacttcgatcccctccatggacttgttcagctctcggatcccattgtcgacgcacggaatccacttctccatcccttgaagagacaccaagatgttgttgaggcttgcggtgagatctgccaccttcgtcgccattgactcggcatctccttccgctacccccatttcttcctgtagcagcggatttgccttcttcctcgccagaatttgggttgatcgaacggctctgataccagaaatgtcacggctcatccaatccttccggcgtctcacctagattgatgtggatttgacgaactcgtgaggagatttcggtggaattttggggtagagaggaagaactcgagctgaggttggaggagaggtagttgggaatttgcttttctcttctttgatagccagcccctgactcagaggtctgtatttatctagttacaacccaactgcctcagcccatatggccgacccaatacatccatctaatggcaacacaagtctaatacacaggccaagcctaacaaatatgagttgtgccacttgtaacatgctcaccgatctaattttttgcactgtgcatagttagtatttgaaggccagatgattcgatcgattttttagatagggaataagtgctgaaattttgtgaaattttaggagaaggctttgtgcttggtcttatatgtttggtaaagttttcagaaaattttaaatcgggtgacgaaaatttgtgaaattttaaaagaaagtgtttttgcactttttacctggccttaatttgttcacttttttgcgtttcatttttttgaaaacaagcaagcacataacaacatgacaacactgagcataggagattaaaactacggctgttacagctaggatctatctgttctgtaccaaaccatgcaaactagttctgattatcttgaggatatgattgatgacgaatcatatgattcctgtaaacctgccacacacaggcccttacaaaatacaaagctccacgtttggtgaaattttaccaaggagaaaagatctcgcagctgtagcagcgtgctcgaaccttgtatcacgaattttgttgtcgatcttatcttcatatagtactagccacccagtcgtgcttcgcgcgactctgagtgcttgcataacctgctagtaagagtaggcaattgaaatgaccttgttactgcccattcattctcatccgcaaaggcgttggtggggattgcgaggctccgaccgtagtagaggaggaagagatgttgtcggcgtccggtggcgttgcagatcaggagtaggagaaaaatgttgattagtggttgaactcactagtgtcgtcgatgttcttgacagggttgttttgttgttgttgttctgctgctggtagactgcgatggtggtgcatgactgcgcgtggagatggcaatggcgttgagctgttggtgacgttgatgcagcggcgcgtggagatgtgatggtgttgggatatgcggcgatgatgcaagggagcctctattgatgtggactgtgctggagattgctggagatggggggatttggatagtcttcttctcgttttttatcccctgcctttttctgctaccttccggatggttcttttttaaaaaaaaaattgtttgactaagctactttgactagcgggaactatgctgatagctattggtgtattatcctaatgatctaacggtccacttttcttcccactatcatcctagggctattattatttaggtgacgtggctcatcctcattggagagagcttgctgctttcacatatgtagatttgagttgtctctatagtaacagactccagcgcagggacattttccacaacatctttaagaaattcaagctgccctctctcccctttatacccagtgatgtgcatgttcttcagataactatattcatgttgctcgagatggggtgcaacataacccttatccgaaaaccatacatgatgagggcaaccaaactgcaggttttgaaacaaaacagtatatgatcagcatatggtatacatggtcatatgataaagatttctccaataaaggagtatgatcggcacacaattcagatttttacttattaatactcaagtcactttgcttatgacatagaattctgcatccaaactcaaaacaaaaaacttgatatcactacggtaacttcatctgggctttcatccttgaaataggtagtagtagatgataaataaaaataatgctgtgcccatcgtgaaatagtattatactaatgacttcatattgcaaatcaaatgcctgaataataagtgaaaaaaaattcctgaaaagtgctagatgaaaagaaaaggtatgaagcgctgaaggtttatcctgtgctgatatctagacttctaaacacagaaacatcatgcagatgactgagaaacgtgctaaaaacaagagttacaaatgaaaacatattcgcatgagtttgtttagcacactattccatcgtggaacaataaaaacggagacattggacaacaccatataacttgaaagcaaaaaaaaaaaaagacagaagggccacttgcgaattagatggatatcaaagatataagagtgtgtatcttgcacaccagagaagtatggcagagaaggaatgggagttacttacatggacctccaacttttcaatgaatggagctgccctaattaaggaaaccgcgtaatgtatcttgttggcatcttcagtttttaagttcattaacaactgcagatgcctaagattggaaaagctgtgtcggttatccaacagccatcgtgcctgtaaaacaaaaaagaaaaaaaaatatatgccatcaactagatgatggtagatacattaaaattgcagcttaattcaacgattttccaagagcaaacctctatttgttggaaacaaacatgcaatgtcagattccgcacgattggaatccctttgagaagtgttgcaacagcatcctggaaagcagccttgaagaaccaaatgtgtgcattttccacatgagatgtatttaggataataggaacaaattaagtgtccgtcaaatatgaaggtat

SEQ ID NO: 13187 - DNA, 3635 bp, Oryza sativa
aacgcgggacctcaacggtctgtagctccaaaacacgggactaacggtcccgcggctccaaaacacgccaccatggtagcaagtgattttttttaccgtgtcggtactgcttagtactgttttgacactatgtttgcactgtttggaactgttcacatgttggttcccggcagtaaaactgctggaactaacatgtgaacagtgtcaaacagtgtcaaatagtgtttcaatagtgccaaaaagtattaattcgatgtctaccgcggtggcgtgttttggagccgtgggaccacgatggtcccgtgttttggagctgccggaccgtcgcggtaccgcgggacgggtatattttcgcaaatccttcccatgaaggtatatagacgtaaattattgaaagaataagtatattcgcaaatttttttcgagatataagaaggttagagatcatatctcgatgcaacagaaagaactatcaatatgcttgtctccgcaatatactcagccatagagccggtccatatcaaccttgctgtaacctagtgtctctactcaatgtggactaaccttgtgacggggccaatgtctgcaaagatggtatttactagtatgtgtgtgatgtttctttgcttatcgatcttatgcacaactttgttgaaggtgtcctacatgatcctcgcgagggtgtctcctgtcactcactccgtgggcaactgtgttaagcgtgtcgtggtcatcgtaacatcggttttgttcttcaggactcctgtttctcctatcaactccctcggtaagtccgccatttcatcttgatctctatttctgacccattgatttcttccattgaagctcacacgttttgtatgacttccctctggtaggcactgccatcgcacttgccggagttttcctgtactcacaactgaagagactgaagcccaagcccaaggctgcgtaactgaagcatgcagttgccatcttattgtagcagtctttccaagatgaattgtcgtagcacacgtttggaaatttatagtgcatttagtgtagagggaagctgaacatgttcacgttgaagctaagtgtagtaggatcatgtatgtggtctaactcttacagttaaagcagggttttgaagtacatgagcagatttccgtgcgtgttgttgcaataaagtttcggcttcaattaatgcccatcaaaataattattattctagaacatcttaaatttcatgcaaacatcatctagaaaatataaagtatttcaaatcatcttcctcacattattttgttaacattgtaacatttaacatttctatgatatttaacatatatttatcaatgcattctgcaacaaagcgagggatattatatagtatatcacttgtttttgtgccattcgttaataccgaccgtgaacaaccatgtcactaagactacagtgattatgttagaattacacttcgagaggctccctcttatgtggattttgtggtgttttgttttggcctccacttatgtttaacattattttgcgttgatttttgtatggattcttttgagtcttgactgtctgtaagatgagaacaattgattattcataaatcagtcgttgtaatgattttcataattgataataataataatgcatccacataccaagggtatataaccatgaaaaagaagaataatgccaggtatcatcgtttcttctgttttttccccacattgctgagcaagtgaattcgatctctttggccactgcacaacccgtcaaccccttatcatcatttttaagaccttcaacttgtattcttgtccctcaaatattgagtcttcaatgtaatctttaatactccctccgtactcctaaaggaagtcgtttaggacagcgacacggtcttcaaaacataactttgacttcttttttcaataaaaatatttattgaaaagtgatatatgtatacttttatgaaattatttttcaagacaaatctattcatataatttttatattttcaaactcaataattcgagagttattcatgatttatattcccaaggtttgacttaaacattatcctaaacgacttcctttataagtatggagggagcatttttccttgccatcgggggccttcatctcttgcaattcaatggtgtttatagagagagattgttcatacactcgtatacccgtaaaatttaatcattgtttattaatgattgattgaatctgaatatgttgctatcattacttcattagtggcacgagaatattgtcacggctcgtccaatccttccggcgtctcgcctagattgatgtggatttgacgaactcgtaagaagatttcggtggaattttgggatagagaggaagaactcgagctgaggttggaggagaggtagttagttggaaatttgcttttctcttcttcgatagccagcccctgactcagaggtctgtatttatctagttacgacccaactgcctcagcctatatggtggcccgatacatccatctaatggcaacacaagtctaatacacaggccaagcctaacaatttcccttcccttaacaaccggcttgaccccaagctggtgcccttggaaaacgctgacgcagttgctgaagattttcttaggttgccagttcttccggaagccctgaccattgtaccagcccgaagcgtaccgcagcacaacctcgcttgattagttgttgacgcagtatcttctctgggcgacttccatctgcttcctccagacactgcacagggaggtcagaacaaacttgcgtacctggagcaacagctttcttgaggagagaaacatatacaactgggtgaatctggctctcctttggcaactccaagcggtatgctacctttcccactttatccagcactttgtagggtccaaaataccggaaattcagcttgtgacatgatctgcgcgccactgatagctgcacatacggttgaagcttgaggaacaccatgtctccaacctcaaaatgtctctctgagcggtgtttgttagcttgatgcttcattctttgctgagctctggtgagatgctagtgtaggagatcattcatgtgagccctatcttgtaaccaactgtggacatctggtacagtactttggccaagatctgtcaccccaaagtgatctgccttcctggcaaatagaacctcatagggagttttgcccaaagcactatggaatgaagtgttgtaccagtattgagcttgggataaccactgagaccacttagtgggacaagagtgaactgcacaccttaagtaagtttctaggcattggttcaatctttctgtctgcccattggtttgagggtggtaggacgaactcatatttagtttgacatcagccaatctaaacaattcttgccaaagtgcactggtgaatactctatccctatcagagatgatgattctaggcattccaaacacctcataaacatggcgcataaacagctgagccactgacaaagcagtaaatggatgtgtgagaggaataaacctggcaaatttagtgaacttgtcgattaccaccattattgtgtcaaatccccctaatctgggcaagccctcaatgaagtccatgctgatg

SEQ ID NO: 13188 - DNA, 2240 bp, Oryza sativa
gagcaagaaactcatggttaaaaaggaggtaattgtgaatatataaatgtgttacaaaataatgttatatattggataggtggctttatgtgtgaactatttattgtgttgattatcttgcattgctgtactacttcctaatccacttcattattcctactcaagcaggaatctcttgacaacattaatcttttctcaatcataactgtgatgtcatttttccttttggcccctgttgccttcctaacagaaggcatcaaaatcactcctacagttttgcaatctgctgtgagtaatacacaactcaattcatttcactggttattagaaaatacaaaaacaaaataagcacctttctcacctttcatgatcctaatgaaatttctgactgatttcctgacacatgatgtagggtctgaatgtaaaacaggtgcttacaaggtctttacttgctgcactttgtttccacgcgtaccaacaggttagtcatgcatgctgtcgttttttcatgtttggtcatatacatgtttagttgggatagttgatagttctgtttatggttcaaatgccagaaagtgcatattttaagtctgttggagttaaagtattcttcttacagcactacattcaagtgatatgaataaccaatcccttctagttatttcgtggcttaagttcatactcctatggaaactgaacgtctaatacctaatttagaacccaggaatttcctgccaaaattgatacttccgtgataaatttctgcattagaaacagtgcctaaagctctaaaggaaaaactgtgcagattttgatctgtacttgtggagtcatggggtcgaaatactcacatgttctagataatttgtttttgcagattttctgcacaaaactaatgcatatttgcaagattgttgaaaaattagaaccattttggcagtagcatcaattccatgtaggagaagttctgaatcaccattgagaatacgataaaatttcttctccttcaatgtagtgaatgctattgcactagagtattttctgatcaattgatttattagtgtagaacttattttgttggtatggcaggctggcagctagcttgttttcacttcaagtggcagttggattccatggcatcatgtcctaattgcatttgtgtacctgcagtacttgtatatagaacaaactctattatggcagcagggagagtgaatagacataaggactcgtagggatgtgaacggtcatgtcatgcaatcttgtcctgcatggccggaggtcggcatggtagccataggggaaatcccttttcgtattgctttataccctactagctaaatgcccttgcattgcagcgggttattcaagataggaaaaaaataaaataattttatcccttgttgaaaaaaaattaagcttctacttggttgaaacaagattcttctacaaaaacaaaaagaaaaatgctatagttaagactatactccctccagttctcaaattcttgatgttttgggtgtggaaccaaaggcctctaattcttgacgttttggcatttggctgtgtgcatcggaggtgattgcccctgcatgctgcatagccattactgatcccaatagcgcagtagtacaattaatatggataaaacagggattatgccccctaataaatctctccttggtatatgtgattcactccaaaacgtcaagaatttgataaatcgagggagtatttctcaatatgagacataaatccatatgcttttcagtacttaaatatagattgatgactccatccgtgttaacgaaatgtctatttcatatgataatgtgtacttattaataaattttgttgtataactcatttagaattagaatagaagccttaagatgagaagaagcaaagcaatagaaatttaaagagctgcaccaaacagagtattggggagcaagagcagttggagactaactaaacaagtacacaagtacataaagtggtagcatagcactcacatgtgtaatagttacatcatggcccacacgttagtgttggtggtgatggcatactcaccaccatttgtacaagctatgccaaccttttacactcaggtggcaatgtacataaggaaactagagataaaatagcgatccaatctaaacaaactaggagatataaggaaaactttttttgcaaatatacttattatttcaataatttacgtttatatacatgcatgg

SEQ ID NO: 13189 - DNA, 3455 bp, Oryza sativa
cccaagaggaagggggggggaaaggacttttagggattttctttttataaaacctttttaactttgtttatttcttctcaattattatttgtgctctgaaaattccactaaaatttgagggctccttttagaccaaggagaatttaacaaaaattctccgggccacattcgaatttttcttatacgtattttaatgtttgccaatttcttttcgaattttaattaattctattattccttttagaagatgatttttattttgggatgaatttatcaggacgtgacagggaccgagcgcagcccccagtcccgcagggggtccagccgcactccgtcgtcccgggggcggaccgtgaccttttcttccccgatccccgcgagtatggagccgctcctgcaggtgctcgcccccgccgactccaccgtccgggaggggctcaacgcccaagttcaagccctggcggacgagcgagcagccctggaggcagaatgggcgcagctcacggcggaccgtgcgcgggtggatgagggacgccgcgccgtggatggcctggtggagacggggcgcaaaatgtgccaagcccggctggcggagatccaggcgtgcgaggagacgctggactcggtcatgcgggagacggaggaggagcggtaggcggcgctcatcgcctcgagcgccttagaggaggcgctaggcaacatccgcctgtagtacgaagcctacgccaagcacctggcgaaaagggctgaggatgcccgcggggtcctcgacgctgccgcggcccaagagcggcgggcataggaggttgacacctcgctgcgggcccgggaggtggcgcttgaggccgagcgcacccgctccgcgcaggagttctgtcacgaccggaaataacccaacgggcgttccttacgtgcgtgcattattccttgtcccaggaggcaaggtacaccaaaagttgatacaattcagagtttaacaaacggaagcgtaaatagataatttattacatgggcagcgaaggcccagcacacacaaagacaaacgagaaacagcggaagactagggcgacgaccacaggcacttgacggcaggcacgagctagacaccaaagccttcatcttccagaggctcctcttctgggtttgggaaaaattgagcaagactgagtacaaccaccgtactcaacaagacacacccacaagtgcagaataaatgcaagggagtacaagggagttatactataaagggttagggttgcagtaaacagcatttaaagatatttagttgctcaaagctattttgtaaccacgattctagaactatacattattatttatcaaggccgtgaacccacacgaacctgccttaacccaaggcctacgatgattcagaccgaactggcaacccgaccctgggtcccagctcgtcccaagccaacccaggccaaccattccacattttagttgttaagcatgttttaagaattaaaacactaacttgggtacattgctcggcttgcccataaccgagggcgcggctattcgaatagattttactctgatcagaggtgtacatctttacccacaagacacatcttcctcacgtgtaaccacgtgccacataccaccacggtatacagacggaagacgtgacatagttttcaacccatcctagccatagacaagagtaccgacccaatcccacctacggccggaacccccgggacaggcaggcaggactgagcccctagcagcaggacaccggccctgtgccatgacatctcgactaccgggccgcagctcgtgtagccttcatttgccctggagatgtccatcgacccccgacttcgtccatctccatccgtgtacttttgtttataaccagactgagccacaaactaagccttacccactagacatgtggaagtacggtagtgctttgcaacagaggcccgaagaccggtccttatatggccgaggtgctactatcaaaaccatgcaccctgagcccagcctaaaaccattttggggattttgaatagagggggcggtgtgaatccaattccacaatactccaacaattccaaagtgtccaggtgatatgaatatcccaaagtctagagttgtaaaaccgcctaatgttacctaatcaattagcgaagcatctacctaaaatcatactagtggtaccatgagtagagtgtccactagttggggttttgtttattctagggtgaacaaggaaataataacaataacaataataaggtcataacaaaggtaaataggcatggctagataaaacagtgataacgcgggaatttaaataaagcgataatgcaataattttaaagcaacataattttataaactgggattcaatatgttcaaagatgatgtgacttgccttgctcgctttcccaaacgtcggcttcaacttccacgaagagcggatcttccgaagctgcagcgtctacacgaccaacggaaaagaaaagtcttttactctaataaactccatataacaagcagaaacaaagcacaaaaatgggttcttgacttcttaaggaaaaattagagacttgaacggtccaattccgagttcaaatggccaagttatggccatttgaagtttatatgctctttaaatgaatttcttcatttaaattttaatttaaaatggatttattgcgtcagccgaggggagagggcgcgcagaccgggtccacgggagtggggcccacgcggcagcctcacggtccacggtggaccgggtgcacccggctcacaccggccggcgccgtgggtcccatgcgtcagccgcacccgagggcgcgggcggctgacggccgggccccacatggcagccgcgggacgcgcccgaaggcggccacgccggcacagccgacgggaggcggcgcgcccgcgcccctatggtcgccggcggcggccataggcacggcggagcggcggccgagagaggggagggaagggggaaacgaatcggcggtccacggctcaccccgggtcgacggcgacgacgggaacggcgaccggagcggaggaaggcggcggcgcggcacgggtcgacggggacggcggcgttccggcggtcggcgaccgaaacggagaggtggacgaggtcggcgaggttgcggcgaacccgaagaaggcgacgccgaagcgggagaaggtccggggcgacgacggcggcggaccggagctcggcggtgacggcggagagagagagcgacggcgcgagctcgattccggcggagagagagagcggcgagggtcggaaacggcggagggaggcacggggagtgtttatatagggttgggagggggagagagcggccggatgagggggaaacggctgcggaagatccggccgccattgatgcgccggcgagatttagggggaaagatcccgaacgaatccgagggagagagag

SEQ ID NO: 13190 - DNA, 15857 bp, Oryza sativa
ccctgatgaaaatcactatgcatacgtggaggtcaaactacgtccttacatatatgactttgggagcttctcaacttttggaggattcactatgaacagcatgtgtaaagggtatgagagtggcttaatagtcactactggagaaatgatctttggtgggtcggacgatttccacaatagtcccagttccaaaaagaaccgggacaaaagaggtttattagtcccaatttattactccaacgggactaagagataccaaccgggagtaaagatcatctttagtcccggtttggcctctgatagggcatgtcaaacccctgttggggggctagggaactaaagatcgtctcatcaaccaagactaaagatattgcagatctttagtttcggttggtgttaccaacagggactaaagttgtacaactttatatactccttcttcctcctccagcctgagccattgctacaaaatgaagctttgagggagggaggtgctgccaaaatttttagcaattttttttggtgttaatatacaaatttgaggtctctaaaacattagcaacttcatcctcctctattttttgcttagcatttacatttagagctatttttttacacatttttccatctagaaaatgtgatggaagatgatgagagagaaagtatgtgtagggaatatagaatatagacaatttgtttatttcgaattttataaatactagtttgaataattacatataattattgtatgaatgtttaattttaaaactaagttaatttaaaattaaaataagtacaacatattaaatatttatttacaaatttaaatataattaaaacatgaataatatgtggtattattatataataatgattgtatgaagaattatattcaattattatatcattatttaatgagtttgtattccgtgaattttatatatttatgatttatatgcatttcatgtagatggatcggcaatggatgtacgtggaccagcggttgaaagagtttattggcggcgtgcattattttttgggtgtggccaatgataacaagcataatgttttataagctgtccatgcaacaagtgcaaaaaacaaaaggtgtattccactgcacgaagtattcattcccacctgtttcagtgggggttcatgcgtagctacaatttttggacctcgcacggagagttaggggttgcaatggaagaagatgaagtagaagatgagtaaattacggactaggctcaatacgggggatttgaagaaaacacaatgggcgaggccgaggtggatgttgaaggtaatgacggtgctgataaacttggtcaaatgttgcgggacgtacaggaggactgcgaaagtgaaaaggaggtgcagaaactggagcgcatgttagcgaaccacagaacatcgttgtacccaggttgtgagcggggccacaaaaagtgggtaccaccctggaattcttgcaatggaaggctaaaaacggtgtgagtgacaaggcattcgcgagttattgaaactcgtaaagaacattcttccagaggggaaaaaattgcccgaaacaatgtacgaagctaagaagacagtctgccctctaggtctggaagtacagaagatacacgcatgtccaaacgattgtatcctgtatcgcggtgaggagtacaagaacctggaagcatgccctatttgcaaagcactacgatacaagattagacgagatgatccaggtgaagttgatggacagccttcgaagaagagaattcctgctaaggtgatgtgatatttccttataataccaaggctgaagcggttcttcaggaacaaatcacatgctagaatgatgcggtggcacgcagaagaacgtaaacaagacgggatactgagacacccgccgacgggtcatagtggcgaaatatcgacagaacatttaaagacttcggcgaggatgcacgaaacgtgagattcggtttaagcacggatggaatgaatccgtttggagagatgagcagtggccatagcacttggccggtcaccatgtgcatctacaatctccccccttggctatgcatgaagcggaagtacatcatgatgccgattattatttaagacccgaagcaacctggtaacgacagtgaggtgtacctaagaccattcgttgaagatttgaaagtgctatggaggaaagagggtgtccccgtgtgggatgaggacaagcaggagtatattgaatcacttttttgttctaaattagatatgcatattaaatctctcgttgtttctccttcagtgtgcaaagcgggatcaggggactaacttgtgtggctactatgtatactagtatatgcactgcctagcacaccaaatcaggactggctaggacctagaagtacataaaattattcatccattaattattgctccattagcttattggtttcatatatataatcccatttttttcaaatgactgatgatttacatgatagagaacctcacccatgatgatttcataagggttgttcaacaacaaatgatgggattcatcaacaagcagattctcgctcccacaggagaattatataacgatggaaagcctattcatcaagccggtccttcttccgatctcacgaagtcgtagtatatgacaaaaacaaaaattacaaagtccgaaggaattgtcatacatgtatatatttatatatgcacacatgcatttacttttgtgtgtacttattttggtaatatatgtgtatatttacttaggtgcaaactcatattttgttaatatatgcatatggcctctacttacttaagtgcatatatgtgtatattatatgtatttctacatatgtatgcaaattgcatatatatgtgtaaaaacatatagtacacatatatgcacttaaataaatataggccatatttacttaagtgcatatacatatatgtgcatatacatatatatatgcatagatacatatagtgtacacatatatcactacaagaaatatgaccttctgtgacgaatttctcgtgacgtcggagctattcgtcattagcacatttcgttttatgacgattagtatgagatggggtggcttagtgacgaaaaaaagatgttcgttgttaataccaactagaaatcgtcataaagtattgggacatcatgaagaatattaatttgtcatatatttatataatgcattaaatatattaaaagttaaagcaatttaatcaagtgaattaatgaagaaactaaaattttcatataaaaatcatggccgaaaatatttttttaatatcctacgtgggctaaattatactctaaaattttccgtgaattttagaagctcaataactaattttaataccacaaagtttatttaacctattaaaataaatagaaaacaaattaaaatcactcacttggtccttgggcctttttcggcccaagtattactctctccctccctcaacccacagcctctctttccctcttgggccgacttccccttcccctcctcgctcttgggccgccagcccaaccccttttgcttctccctcaccgaaaagtctattttgcctctctcctttcaattcaaataatttttcgggtagtaaatgatttcagatgaaaacaatgtcaataacaaagttgtataacttatcaagatctataacttttgttttggtcattttgctatatgactttgttttaataatttgaatttgaatatcaaattatgacaacttcaaacaacattttcaagtactaaatgatttcaaatgaaaaatttattaacaacaaagttgtataactcattaatatctacaacattttatgtgtttgtgacgtaaatgaaacgtcacctatcataagatctcttgtagttatgtatatgtgtaatatatacatttttatattatgcatatatatgtatttaaacatatatatgcatatatgtataggcagcacacagcacaaccaaattaaaaaaaataaaaaaaatatctttagttccggttgataacaccaaccgggaagtggctgagccatctttagtcccggatggtgttactaatcgagactaaagatggagctttactcccgggtatttgaaccgagactaaagaccaccatctttagtcttggattctccctcctagttcgctacccgggagtaaagggggttgcgaaccgggagagatgaggagttctccagtagtgagtgttacactatgaacaacatgtgtaacttttggagcttctcaacttttttttggcttatgtgagatataggtatgactccactactaaatttaggatattaaatccaccgacttatgaatcatataagccaataagggccttatcggatggcatgaagctttggctgatcagctaaatctgccaaattcaattcagccaaagaaaaaccattgtttggcttattttgcttatatggctggtgaaggattttctatggctggtggtattgggatttttattttctgtgtatgttcactagagagtttccataattagccacgactgatgatccaactcccttgcgggtcccacttgtttggctgaaaagcctcagcccaagcctcagccaaacaagccatccgatgagaccctaagctaacttaaaacctaagctaataagtctaagcctaaataacgaggctttatatagttagcattgttacatttgtgattattgtacttgtgaaagtacatgagtattgattatatgtgtcgaggaatgatcctctctagcgggtgatcgtgagacaccccttttgtgagttcggccgggggaaagggcgcgttgataaggatcgtatgtccgcctagagtcttccgagaccgcgcgtgagagctgggattatacaggttcgggccgctacggagcgtaataccctactcctgtgtgtgggatttaggatggagtgttacaaaggttcctaaactccagggagaactctaactcttcttcccctggggctcaggctaactgagagtcgtcccctcctctcggtgaggaaggtcctccttttatagttcaaggggataccacatgcaccgcctctacctactccttcacgggagggggacccacaccgcctgggtcataccgccattcgtgccttcgcccggaagctaagcagccgtctgtccttgagtgggacccagcgtcgtcccccgcctgacacgagggacgcccttgtcattcccctttaaaagaatggagacttttggcggttcacctcacgtggagggagctcctgacggtacattgatgggatggagcataactgcccccactttgctgagcacagggtggaacgtgggggcaccgccgctcgtccgatcggatgtgaccggtcacagaccggtcacaatccggtcaatcgggcagtgctgcacgaccgccctcaccgcattaaatgtggcgagggacggttggggcaccgcgcattgatggcggtccagcttcgaccaccgccccactcactcccctgccacgtggcggccggatgagggcctcggggagaggcaacccgagggcccaaggggcgcgacgtggcatcccgaggccccctggctgcctcaacgtcgtccgaggtgcggggggagggcaaggctgcatggccgcgtggctggatgggaaggagacttccctacacttcgcatacccccgggaccatatcaccgacagtagcccctggaaccgcgtcggacagtggtcctctgagggcggtctagcgcggtgcctcatgacttcccgtgccatgactgtgggccccgcggggagtcaaaacggccgccgccggctggcccggctcgtgcatcagccatgatgacgacttgaccgctactaattgcgccactcacggtggtacttagggcgcgaaaatcgggggctctgccagaccacacccagaattatcactcgacgtcgcctcgactcccccgcttcttaggcaagcgatgggactaacggtgggcccgcctagccacaaccgtggtcatcgcacgccccgcgccgagtgcgccactggcaggcgcattaaatgcggggcgcgggattagtggggcggacgggacgagtgggcgcgagaaccgaggaggcaaccacagcggcgagaaacgaggaggcgggcgcgggcgaggcgtggataaaaaggaagagaggcagagagttcgtctccttcctttcgctgactccacactcgcatactcacaccttagcccccagcgcttctcttcctccatcgtgttccgtgcgccaaactcctcgccgattcccgccggctatcatggcccaagacgctggcaacgccgttctcccggcatcgcacattacggcggagaggcaccttagcctcatatgcaagatcatgccggaggatgccgccgtgagggcaggggagacgcggccgcggccgcggtacctggagcggtccgtgcacctcctgtcctttgccatggcggggttgatcccgccgctctctaggttcttctacgaggtcttggatttctacgagatccatgccttgcatctcgctcccaacgctgtgatgacgctggccatgttcgcgcacctgtgcgagatgttcgtcgaggtgcggccaacgttgtgactgttccagttcttcttcgtcccacagctgcagcaaggcgcggtggtgggaggatgctacttccagccccggccaggagtggcggggcagtacatcgagagtcacctccgcaagaagtgggaggactggaagaaggactagttctacaccgtgctgctggaccaccagcgcctccggccccccgctgatcctcccgaacgatctacaggctggctggcggtctcggagctgggcaaggagtacgacgcggtgcgggatcgcctcaggggcctgcgaagccggggcctaacgacggcgatggtgttcggcgactatttccgtcgtcgcatcacgcctctccaggagtggtcccgcggcacgtgggagtataccgggtacatcgaccccatgcgcacccaagtgggcgagcgctgggattggggcgaggaggacgcgaagacggtggttcggcgggtgctgggcctggacaccatcgaacaaatgctggttctggatgggatcctccctctctgcagtgaccccgaccgagggaatatcctggctgtgatgacggctgtcggcgctggtaggggtcggccccgccggggcgccgttggcggcggtggcagtgacggcgtaggtagcagcagtgtgaccgcgggtggcagtcggaccggcggctccggcaggggtggcagctccaggacgcctgatctgagccgtgggcccggggggactcggccgtcgacccgaaagggaagcggaagatgtctgagtctcagccgccctcccccccccacccccccgcacggagggggagccgagcaaacagtcgaccgatcaccaatgggccataaacgccccgccgcgcctgaggcagggcggaagaagaagcggctctagaagatagggcagacagagccgtgtcgggggagcttcgtcgagcctccgaagtggacgttcaaacgcccccttcgcaggtacggtcatcaatgcccggcccgatgctctccatccactttagcttcttgcttcttcctcttttttactttcttaacgcaactagggttctcctgtagcgagattccttcccaaggggcctcggcgttcgaacacccccaggggtcgaagcccgagcgaccgggacagccgggatctggctgatccggtgctgcggagcctttgcagccccccggcgtgcggcccgcgggccgcccgccgggtccagctccgagtccaccacggccgagaccgccccctcgagggaggagggggcgcaattcgccgtgggcgatagcggcaccgaagcacccatctggggcgatcccgagggtgcaacctacgaggagcgctgctcgggagcggagaccgaggcaggacgcggcccggaggtcgagacgggacgcgcaccgggggccgaggtggggcgtggcccggagaccgaggctgggcgcgggcctgagcctgaggccgaggctgaatcggctcgggggcccaaggcggagggcgacggcagcaaccgttctgctctgcacctggggcgccctccgggccggccacgcggaagggggactgtcgcgaccgggaaaattgccttttcccgaacgctagtgtattaatccccgtcccaggaaaagccggggtacaccatacaaacatgatataaaagacacatctttattatatcgataatatttacattattacaaaggcacttagggcctgacaatcaaaaataaacggcagcggactagcgggcctacggctccatcttcacaggcgctcaactggggtataagccaggactccacctaagacatcttctccaaagcttctcttactgaagaggggaaggattgagcaagaatgagtacaaccacagtactcagcaagccacaccggcagatgcatgattaatgcaagggaggtacaagggaataataatatagggattaagttttgcagtaaacagcatttaaaagtcacttagttgcccaaagccattttgtaaagacgattctagagctacacagtgttattaaacaaggccgtgaaccctcacgaacctgccttaacccaaggcctacgatgatttggaccgaactggcaacccgacctgggttccagctcgtcccaagccaacccaggccaaccattccatattttagttgttgagcaaattttaagaattaaaacactgacttgggtacattgctcggcttgcccatatccgagggctcggctattcgaatagatttactctgatcagaggtgtacatctttacccacaagacacatctttactccgcattccatggccttggaacccgtcgtaaagatgtgacatagtttccaacccatcctagccttagacaagagtaccgacccaatcccacctacggccgggatacccgggacaggcaggcagaactgagcccctagcagcagggcaccaaccctctgccgtatgacatctcgactaccgggccgcagctcgtgtagccttcatttgccctggagaatgtccatcgacgcccgacttcatccatctccaatccgtgtacttttgtttacgactagactgagccacaaactaagccttacccattagacatgtggaagtacggtagtgctttgcaacagaggcccgagcttcatccttatagtggccggggtgctacttcccacaactggcatgcacccaaaccccaccgaaaacaggttttaggggttttgaaagaggaagagaggtgtatgtccaattccaccatcaaccaataattccatagtgtccaaatgatatgagacttcccaaagtctaaagttataaaaccacctaatgttgcctaattaaccagcgaagcatctacctaagttcatactagtggaaccataaatagagtactcactagttggggttttgtttaacctagggtgaacaaagtaataataacaataacaataataataaggtcataacaaaggtaaataggtatggctagataaaacagtgataacgcgggaatttaaataaagcggtaatgcaataatttaaatcaacataattttacaaactgggattcaatatgatcaaggatgatgtgacttgccttgctcactttcccaaacgccggcttcaacttccacgaagagcggatcttccgaagctgcagcgtctacacgaccaacggaaaagaaaaggcttttactctaataaactccatacaacaagcaggaacaaagcacaaaaatgggttctttacttcttaaggaaaaaattagagacttgaacggtccaattccgagttcaaatggccaagatatggccatttgaagtttatatgctctttaaatggatatttacgaatttcttcatttaattttcaattaaaaaatcctatttattgcgtcagccgagggagcgggcgcgcggaccgggtccacgggaagtggggcccacgcgtcagccccacggtccacggtggactgggcgcacgcggctggcggcggtcggcgccgtgggtcccgcgcgtcagccgcacccgcgggcgcgggcggctgacggccgggcccacttggcagccgcgagggcgcgcccgaaggcggcctcgccggcacggccgacgggagggggacgcgcccgcgccccgatggtcaccgccggcgaccaccggcgcggcggagcggcacccgagagagaggagggaagggggaaacgaacggagcggtccacggctcaccccgagacagcgaaggcggcggaaacgacggccggagcggaggaagacggcggcgcggttcgggatgacgagggcgacggtgctccggcggtcggcgggcgaaacgaaggggcggacggagtcggcgacgacgcggcgaagccgatggaggtggcgccgagtcgggaagaggtccggagcggcgacggcggcgaaccgaaggtcggcggcgacggcggagagagaggtgaacggcgcgagcacgaatccgacggcgagagcgagcggtgagcggcggaaacggaagagcggagcacgggcaacgtttttatagcgccgagagggggagagcgcggccggagaggaaggaaaccggcgcggagatctcggccgccattgaagacgccggcgacgattgcgggatgaatccggacgaatccgagggagagagagagaggggaaaacgggggaaacgggagagggaatcgcggggaataattccccccacttcaatgcgcgcggggacggcgggatgcggcggattcgcggcggcggcggcgctagggcacgggcgggcggcgggcgcggcgcgaggtcggggatgacaggtgggccccacccgtcagcgagggtggcgggcgggcccgcctgtcagcggcgcgcgcgcgggggaggagccgatgggccgcgggggaagagagagagagagggactgggccgagccggcccaagagggaagggggggggaaaggacttttagggattttctttttataaaacctttttaactttgtttatttcttctcaattattatttgtgctctgaaaattccactaaaatttgagggctccttttagaccaaggagaatttaacaaaaattctccgggccacattcgaatttttcttatacgtattttaatgtttgccaatttcttttcgaattttaattaattctattattccttttagaagatgatttttattttgggatgaatttatcaggacgtgacaaatccaccccccttacaagaatctcgtccccgagattcgaggaggctagcaagaagataggttgggcggtcttctcttcttgtctgacttcttccgttacgtcttgacaaacttccagcaaaacttcaccactcggaactgcttggcttgacctcctgttgcggatggaatcttctcttcacctgacttggaccagggtgcaccttttggctgactcagactaggttgcggtagtgcagtgatgcttccgttccagaacttcttatgattcatatcttcggagtcaacctcagacaagtcaccacttcatgtcatgcgtcaacactagcttgtcattactaggataccatgcttgtcatcataaggatatcaggcttggcgtttccttccagcttaccaccatacgctttagactatgatatcccgcttactacggatatcatgattgacaacttgccattaactgtctcatattggctttcctggtctccagtgctaggtacttctgctattcgatgccagggtcaaccattctaactataagttatgcttcccaagagaaccaatttatcccgcttgacatgctttgacgtcttcccgaatgactttgctgctggacttgttattgtctgatcgtggtcctgccagacctgaagcttcgttgttggaggtgattttaatctgacctctgtagactatcttcgatcatatcacttggttcataactgggaatagctcccacgaacaagcaacgcagattcactttctttatgttcagtttacttcccattattatcttcaggttgtcctcagttagcattcaacgtattcctttacacctttaaccttgatgtgttctttcccattggatcatctcccaagacatggcattacctggtaaccggtgcttgcacttttcactccgtgtagcatctgataccgagttgaagatttcactccttgccttcatagaaacatttttacctagatcatctcgcttacttaatgacaaggtgactgttgcggggcaattactatcaggggtcgtccttgagcgatgcagagcatgtttctgtttatcaatcacctttcggcctacttctttcatgctagagaacatctttgccaatctcttttatcaatcatctttcggcttatctctaacaggtggtattctttaatgtggattgcggacgcttctggggacgatgaggtcctttggcttgctgcctttcagtgaaaccttgatgtggtgcgtcaaaagctgcactgactaccttcagggaaatacattgcctgctatctgtatctataccactagggtttaattgccgatggtcatctttagtgcttcctcgagatggggagcatccaaattgttcttctgccacatcacctttgacctttttctgataccagataaactaattaccaaccatcgactattatgttctcaaatattgatgtctcctggatctccttaactgttggcaggtatatccgatcttatcaatgtagaggcatggcgggtacccttaggggtttcctccaacaatccttatcttgatctgtaaaaggcgtatccaaactcctatcctcaactactgtctcgttggctttttaacccaacacagtttaattgtttttcttttctatccacaggttggttattaactcgaggttagaatatagttcctctgacacgagaccctaggtctcctttgtcagtaaacaattatacacatgatcacatatccgcatctttcaaacgaatcctcagggaacttgtctgtattacacatttctcccttattacacgaatacaaggcactgccttaaacaaaaagggaaggtgcttatcatcggtacattgtatcctcaacatgaatcatctctaaacatagcaagctcactgtttacagacatgattatatttatgaattacatgattgctgcaaactttcgattacaccatgataagtagcgaactaaaaaccacaaacatggctgctcattttgattctggagagatatagctggcattgttctagtgactgcatccttgattggttctgtgatgatgtgacaggactgcataatgctatcattcacaggagaagcttccttctgattgctggttgaagcggatgacggtcttctgcttggtatcgccctccggaggttgattgcccttggctcggcctggagtaggtcggggagagacacaacttcttccatctacgacaattctttgctgaggctgtcggtgcagagaatggttgctatgatttattgtcgagtcaggtgcagcaggaggagcattggtgcattgtttctgctatgggttctgattaacacgaggccttacgggtacggcgtttgctccagtgaccacaatacgattggaatgtctgcttcgtgtaaattggcggtaatgtggaggtcgattttgccttggttggggacagtttttggagtaatgcccttcttcactgcagttgtaacaaacaataactttcttacactcgggttcttcatcttgtacttgatttctcagctgctgtattggaacttctaaaggtacaacgcagatactggcctctgtcttgtcagctggtggctggggctgaaattgagcattgacaccttgtggtagtgcactcattggagttggagctgttgcaacgcgggctataggactgcttcgggatgcatggatgacaattcgttgaggagcaagcttctgattgcagggagttgcgtggactgacgtgccggcagctatgtttctcggttttgggcacttgtcggcgaaatgacccattccttgacaattgaagcaacagatgtcttcccggactcggcattttcttttctcatttcgattcctctgtcctggcactggagttaggctgaaactggaatcttggcgaggatttgtgtttccttgatgcttctctccgttggaactggcgggttggttggccatcttcttcgttagcagaaaactgaatcgacaatcttttggtacatgatcagttccttctcaaaggaaacaagtgatcctgctcgttggacacctgtcgggtggatggtcttcctcacaatgaacgcatgtagaggcacacgagctggcaacatgaccgatttctccacaacgagagcatgccttaagttctattttattctggttaaaaccttggggaggcttcgcaccttcatcatctgaggagacttgatctgaatcttcactatcagacactctacctccattagctaaaagatgctctgtcaactgttgtgcacctcggaaggaatttcttctctgatgttttgtcattcctggtggaggccattctgtgctggtaatgatcatcttacggacttcatcttcggttcgcattggtgcttttcttttctgctgaggacagttccttgcatagtgcccttgctcatcacacctaaaacagatgatacttgcttcttttgagtcaacatgtggcatggcatgaggggccttctgggatgttggcggtgcgctgacttgtggtgtgagtgcttggactgcctccaactgcacttgaggttgcatctgactcgggttcaaagttggcatccgatgctgctgtagtatttctataagcaatttgttctggttaatcaggtgttggaccactgccgcacaactggtgtctggtgcttcattcactcgggagcttgaggtaccaatgtcctgacttctgaccttattgcctttctcattgtcagccatctgttgcaaaggtttggagagggagagagggaaaacaaaggggagagacagattagaaactaaggataggaccttaacagatctaagtcttttgctgttatgatgtatgttaggcttattctgcaagttgattaagcaaacaacctagcatggttacatcacaccccactgatgcaaaccacgcgctacacacacaagcaaggaaacacacgactaacgactctaccctagagggtggcttaggttctgcgacgggttctccaagatcttcactcctgcttcacagctggcttcactgcttcctccacttcactagcagatcctgcagtcttctggagcttcggcaaacaactgacgatgtcttcttcttcgcaaagctgaccatctagtactagttgaaaatccgaagaaagaaaagagtaaaccttttgcaaatagcattaggggaaggagaaaaagaggaactttcgcaaatagttttatttataaaatatgtccttaggttttatccacttggcttatcctacagtcgagatggctctgataccagcttgtcgcgaccgggaaaattgccttttcccgaacgctagtgtattaatccccgtcccaggaaaagccggggtacaccatacaaacatgatataaaagacacatctttattatatcgataatatttacattattacaaaggcacttagggcctgacaatcaaaa

SEQ ID NO: 13191 - DNA, 14323 bp, Oryza sativa
  unsure (1)..(14323): unsure at all n locations
aagaactctgaatcaaatctaacatagtttcttctcgaattttagcaaggattgttgttttctttaagaaaagtattactgatcttctgtaaaataatgcgatgtgtttatttgttatccttactaatgcatgtgtgtttaatatgtgcttacacatgaacgtctcctgtcttgtatagatgatactcggtacattttcatacattttcaatcatgccttgatctaatcatgctttttacttatttttcttttcaggttgaagttgcattgtctggcaccggtgtaaaagatgaaggtgctgaatcangtacaaatggtaacgggctgaaagtcttgcttcatggatgatcaaacaaggtatgaatcttacaaaagaacanagaggagagaccagtaactcatcaaatctagatgaaaaacagaagtcaaggatgagaaaaaacaggactcaaaagaagatgagaagagtttacaggtcagtttgggaatgaacataaaatctgattttactttaagatttatttttctgttcagagatacttatgttattcttttattgggtaggatgaatacataaaggcttattatgaggccttaagaaaaagacaggacgaagaagaagcgaaaaggaagatacagcaggaaggggatacatttgcttctgcgtctcattctgaacggcaggtgggcatgaaatccaaacgagaggatgatgatgagggtgttgaatgggaagaagagcaacctgcaggtaaatttatgattgtaacaacagtaaattgatcttttaggcaatgtatcatatgcacacagtcatcttggtgtactcatgcactcaatccagaccctccaatctctatccaaaggataagaatgaagagtggtactttttcacaaaaccgcccacaccaccctagtaagtttgcatataacccctagttttattctctcctcttccgtctatgtccaggttcaggcttctcctttctatctttctttcttcccaaatctgtctttgaaacggtgaaacctcctccttcctcttcgcccctcttagtgcggcaccgacggcatctcaaatacagcccacgctctttgatccttctgtttccctttgtccatgttcttctctttctcgtcctaacattaagttaatcctaatcctacaaattaatttctatctctctcacagcagtggaatcagtcgcggcattgccattgcctcttagtttgtagctagctatatatggcacatacgagagaggccgatccgttgatgccacggtgccattcttcgactaatacttatagtcttccatatagcaaaaagcaagcccgtgattagcagcattgtctccctttcttttgggtttgagaggtgattgaagcatctttcctattaattgaatgcaacagctttagtttggcttggtcaagcgtgtacttgcttagaggatttgaatcgttgtggaagccacacgaagcgggaggagacaacgcagatagatctgggaagaagctttggacctggacatgaaaagagagaaaagaacaaaggggttatgtgcaaacttaccagagtggagcgtgcggttttgtgaaaaaacaccacttttcgttcttatccttaggattgaaattgaagggtccagattgagtgagtgcatgagtttactaggatgactgtgcacataggatacgttgccttggatcttaattctatgtttatcaaagctgcaacattgaactgacttaatatttctgactattcacttattcgctgatataatagattaatagccatatcatgactcatcttagtaagactgccataatttcttgcaatgttgatgtgttaacacaattttatatatgcatgtgttgggtgggtgggtttggggcatcctatccatatggcctttcatcttggcatatgcttttggaatatttcgatggaagttcatacgctacatatttcttatccttgatgtgtctgcttttgattatatgctttagacatttgaagatgtccttttatcaagtattatgtctaattttttgaactaatgcagggaatacagctgagacatacaaactggcagatttgaatgttgaagcccaagaatctggtgatgaagaagatgaaattgactgggaagagggttaaaaggcagtcacaaattcgttaaagtagttcaatttcattccaggaattggatgatgagcaatatcaccaactgaacaagaagccaagaaaaaggcatgaaaagcattgccaccaaagaattagtttgtatggtttgtttgaccaagggaacttttcggaagtgaagcgttttccttttaatagcgaaaacatttcccaaccccaggcggcattttctccccaagatccttaaaaagctaccatactgtaaagtattatgctattgacatcttcaagggccatgtgggtggaatttattgtcgcaaaatcagctctgttttcagtgaatgatcttttttttttttatgttgtgagactgtacgctatggccataaacatgccatttttcagatgttcttgccatgacctgtatattatgatggctatgcgctagattaaatttctgagattaatgaattgatttactccaagattaataatatcaatggtagtttgcctacttgtcagcatgcaggtaactcgatgaacgaatggatgtagctagtatgctgcaccgaaatctcgtgcccaaactgacgtttgttttgtaggattgacacgagagcagtcagtaattaagcacgtaaacgctaaaacgcattaataatattcatccgttccgttcagttgttagctgttatcgatcagctctcttttacctacttaagctagtttaattactgtagttaataacacccaggtacttgacaccatacatatatacattggatcaacacaccacacgatcgagcacaccaacggcggcggcagaacaccaccaccgccggcggccatgatctccggtagcatcgacgtcctcgccgtcgccttcgccgtggcagcggtgatcgtcgtcccggtgcccgtggcggcagcggcggcgccggcgagactggacacgtacctggtgcggatggtgaaccggatggagaggaagatggagttcgactgcgacgagtggcccgacgattttgagctgagggcgaatggcggcgacatgaacgtcacctacgagaccgccgaccgccccggctacgactacctcacccccagggtctcctgcatatggtcgtaagtagatgctctccatctgtcataaaataaaataatgtagttagattattgacagaaataatgtagttagattatttaaattcgtagtagtataatgtgtaactagatttgtttatttattttaaaatggagatagtattagatatagacacggctactccaacttacattaattacttgatcgatcattacaataaaatcttttgagggacgatccgtggttcttcgaaagtaattgatgttggtagagtgctatattattttatatctcttcatggttttcgggatgtcacttagtttggccaaaagttttatttatgttatgaaagtagtatttttaacttaaaatccaaattatggtttctaactataactccaaatctatttcagattcaaatctctaccaaacaatcttatttaagatttcgtttggcacaactctagatcttaaattcacactgaatttagaccttataagttaaattaaattgatttaaattttatattccttctgaagtaaaaacaaaatgattcattcaaatattatcaatatactcatatattcaaatcggtgaatttacgaagctaaaaatattactatatttatctacaaagttaatcaaaccttatttctatatttattttctatatttatgaacaaacttagtcgaaccaagaatagttggatctaaaacgacggagggagtatcatgtgactcgcagatacgaggggaactacatgagcagcgtgataatctgggacgaggagaaatggccggagaagaaggcgtgcctggtggggggcggcaggagatgcgagctggtgttcgagaacaaggaggaggtgctggtggtgacgacgtcttcgccggcggcgccggggacggggtcgtcgaggagggtgctgggcgacctggccgtgaaggactgcagcacgcactggtacggccacctccttccctggggcgccggctgcacctaccccagccacgaccacgcctacgccggcgccgtccacagcacctggaccgccgccgccatggccagcacgatcggccactgatccatcgcggcaaaaaaaaaaaaatgttgcaagaagatgatcgatcaccaggaggaaatatatgcagagctggattggtttgaggcctaaattacgcttaccaatatttggcaattttaatagtgtttagtgtctatttgttttgaagccaaattttggcatgcctaagaaaataggccatttcatagtgagcttagactattttggcttcaatccaaacacaattttgccttaccaaaattagtcataccaaaacttgccaaattttggtattgacaaaatttgataaggcctatttagaccacaaaccaaaccaacccgtaaatctctctagctatctctcacgcagatcacgaaatttcacggaacccccgatcgatagtagtaggtataataatggatcaagttgttgtgtaaaacataggggattttaatttggtacgtgacgtatgacgatctctattatactatggctttagaatttcacaagtttcgtccctgccggcagaaagaacaagtatctagtgtgttggtttttccttgctttctctggcacgttctgataaaaaaaaacatcatatcaaaacaaggaggataggcaagtaaaaggttttttgcgaatttatggtttactttgatcaggttcattactccaccccgagatcatcatagtagtcgccggcgccactgccaccaccaccaccagtccgccaaggtttacaaaacaatacggttatcatggttatcacgtgcggtaacattctcagtttttaaaaccacagtaaaccttgtagtaaccgtcttaccgtggatcggtaaccgcacccaaaaacggtttggtgaaccctagctgccgcctactcgctcccgtcccctccacctcagccaccggagaagatggggcgccggggggggggggagagatgaggatagggagtgggagtggagtgatgtgaggtggagcaaaggagaggagaagagaagttagaatctacaaagtgccaacattgttcaggaggctaaagtgctactgtctggagagcgagaagttagaatcaacagtctcccgtagtcaaaactgtgtaagccatttcttgacaaataagtctagagttgattcagtttatggtttttggatgggtgagagttgtaattttatctcgtaacttgtttgcgaggacgctagttttgagtaatatattttccccttccccgcaaaaaaaagggagaggagaagagaaaaaaaaaaggtgcatgtgagcggagaggaggagaacgagaaaaaggtgaaagaaaagtagtgtgtggccggtgcaggaacgcgtggggtccacttgctcttcacattgctccataagtggttcgctttgcaataatgcacgtattatcgttgacgggtctcttaatagatcatctgtgaaaatagttttttcatgtggtccttgagccatttccggggaacgatttttacatgcagaagtagttttggtccacctatgatttgcaatttgaaggatcttgtccggaaaaagacaattttgtagttgtgttagttcaatgggatcgagctaactttggagcatacaatttagatatacagttgccattagaggcgatttttagcgtactaattatggtagtagctaggtctcgatacaaaattgcaaacagcttcctggcatatcctcgggctcattttaagtatccgttaaattatccagtttaattcatagcactcaatattttactaataaaaactgcgtggaatcactcctatcttgttttaaatgtacgatgctaataacatttggacatgacgtttgaccattcgcattattctatttgtcctctattagtccctgagtcaacatacttaattaggacagataaattttgctataggacactacgatgacttcgtggttttagctctagaacacatcaaaagttaatctttaggggaagacgctctcaaaatgtgattatttgctgatggacaccgtagacattaaaatattaattttcggttgataggagagataaacatcgtgaaatgtaaaaaaaatgccccttgacccacttgtcatattctcacatttcactccctctcacactccggccacaatacctcctccgctcactgccgatgaccaccaaggccttccctcctcacctcctccgtctccgccatggcggtgcgagtcggctcccttatgcacgcggccgctggcatggcatgctccctcgcccgactccccggcgcgtgctaaggggcaagggcgaggcgctgagtgtcgtacacatgtcgtcggctccgggggcctctgcctcccgccatggcaccacaagtgatggagtcagaggtggttgcacgagcgctcgtgttgctagtggaggcgcacctgggcggccgcgctgctattcacctcgacagtcttgctgttgctgctcatctgctctgtcgccaagagccgtcggccctaataagctaccttcgagcagagaagatggaaacaaagaacggcgccaacgaggtggggaggagagcggctcctgctgggcgagggggagggagaacggcgtcgaccggtgggtgaggggagggagtagctggctaaggggatcatattgaataagagagatggaaaggggtaatttggtcactgcgtgtcaaaaatgtgagtttgctctcgtctagttagcactaaaacataaaataaatgggctcggtgttcactggcaaataatcaagattatagtggctttcctcaaaagtgacttcgtgtgttgtctcacagctaaaatcacaaagtcgtaatatcctatagcaaagtttaccattattagtaggcaaattttgatagaggacaatgtgacttcgtggtttttgctctaggacacgtcaaaagtcaatctttgggggaatgcactatcaaaatgtggttatttgctgatggttaccgcggaggactactgggcggagcatgcaattcataggccagagttagcagcgtcggctgatgcacccatgtttcgagttggtgcgtcgacggcgtggcaggaggcttcgcccgcggatctgccacccttgcgtcctccaggccgccacctcgatgctagctcctctgctgcgtcgatgctgggaagggaggaaggagaggaagagaaatgaggggcaatttggtcactcgcgtaaatgtttaggcccactttcgcctcgtcggcacaaatacactattttaatcggtgcagtgtccgttggcaaataactatgtttagagagtgcttttctccaaaagtgagtttgtgcggtgtactacagctaaaaccacgaagtcgcggatgtctttgtagcaaaatttgcctaggatttatcccctattagtaaaaaaagggacagatacgatcatgaaaaatatgtcgtcagcccatcaccaaaaacgtaatttaatagaggtatgaaagttatcatcgagatttattgtactacctccatctcataatacttgttgttctagattgtttagcatgtatcaaggttaggaaaaaagattatagtaccccttattaaataatgtatattgcatgttggatgatagttgaggtagaataggccttttttgacaaattggtccttgtagaaaacttattttgaaactagtccctaccaaaaactagagagtcggctcagcgccaacaatatagctgacctgatgtggattcgaaccttggtgctagggtacacaagcaaatgaacatacaattgcaccacaagtacattgcttattaatcgccgtgcatcagtctaattagcgtgtacaaggagtcagcgccaaatgcattggcgctgaggccctgccacgtcgtgcctcgcccaccacgctggcacgatgttagcaccaaccgctttggcgctgatagtttttggcagggactaattttgaaataagttttctataaggatcaatttgtcaaaaaaaagggtagtataggatgaaatttgaattggaagtgggttatgtgttactgttttgagataacttttggatgctaggaagatcggtattgtgggatgaagtagtactacataggtattgtgtagattgatggcaatatcataggagtatcatctagattatagtagtatatatatcataaaggttgaccagactgtcctatgatgatgccataaatatatcatcacattttatagtggttcaattgatgtatcatgatatctatcgagaaggtatataaaggttgaccaggattgtactatgatgatgccataaatatatcgtcacattttatagttgttctatgagtaaaatacatggccggtccttaaacttgtggggcggtgtcagggttatggataccacatacctaatagtagtcgactaaatctcggcagaacccaccatataccatgtcttatacgggaacaaccttcggatataggaggagttccgcataaggaaggatatgaatagagttctacatggaaacgacaaggactactcggattgtatccatattgatctccctagttctacttggacaagggaacacctataggtataaatacaaggccccctaggaggagaggtgacacggaacaatagatcaagacaaaagatcaacaaacaagccaacacgccctccaaatatcaatatcagagattagcttagacaaaccctatccggtacctacgggggccggcaagaggggtcaagcactatctctgatctcgacgagttcgtgttcgaggaagaagactaccctgtcgtcgactacgagttggttatctagccgtcaagtcgactgacagccagatatgttatcccacatgttgtatttgtgtgatccagatgaataaagagcaacaccagtttcggccaacaggatgtagggttattacctgataattcaagagcccgaacttgtataaaaatcctcgtctccgtcttttttactacagtctcgcatatatcctagtaccaacgatccccatactatgcaaataccggaatcgcgacatcaaacgttgacaggcggtatcacttaagttcataaatttagaatatgcatgtttaggtctacgatctcgttttaatgtaccatcccggtctaatccgcggttgaccgcgtcttaccgccagcgcagtacatttgcatctgcccccctccacaaaacgtaggcattaatatcatccctaaacaccatcatgtgataaaacgatccataacaaagtagtcttcaaatgtgaaatatgcagtaccattgtgtggaattacagatagcgcagtagcaacctcagaggcttgatttaaaatgcagcaaataatgttgatcgaagatagctcaagtgcctttgattaaaacaacaggacaaaccacattgttgatgcagtagttgctcacacttctgtagaacattctgtagaacaaaaccaactcggaatttgaatcagaaaccaaaaaaagatgatttatattgcagggtctgtgtcaggttccagaaatcatctctcttgattaggctaggaataagaatagtatcaaacagtgatgtgtgttgtcgaagcgacaactgcatacgtcgaaagacatggttactcaatagtagtcggaaaagaagtgaagtgtattaaattgagaatttttcttggggcccccctattacatggccctatgagactatttatagccccattacaggttcttactactagggttttggttatacaggggaatttacatggttacccttatgaaagggacatttacatgggtacataatgtaattgaggttcatgggcccttgatgggccgctaggcgatcgtcggcccaatagcccctaggcttgatgggcctgaatagcttcttcggtcctcgcgggggcgaacttgctatggcgaagtcgtctcccttcggcatatactcttcgccctacatcttttgcccaagaggcctctggcccggcaaggtacccgcgcgattccccgcctctcgccgtccttgttccatagccttcgccatgggggggagggggggcttcgccctgactaaccttgacgtctcgggcttgaatccccactggtcgcgtggtttcggcaggttttgtcgaagggcctgatgccataccgccaacaatgtgattacatgacttttcaagcctggcaagcacatttttgacagaaacaaacacagtccttggttcaaattcaacccacgatacacaggtgctggttctctatctgctctaaagttgaagtccatcaccgccgcgccgacgatgtagccgccacgcgctggccctcatggagcccagcgacgctgcctctccggagccctaccacgccgatgcccctcgcggagcccagcgcctcgctgcctctcccggagtcatcgagatcgccctactcgctgctctctcccttggaagtggagaagaatgcaatggatttaggtttgcaacagtgcctacgttttgtggaggggaaggatgcaaatatactgcctgcgtggcaggcggtcagaggtggtcaaccgcggattgtaccgggatggtacattaaaacgagatcgtgaatctaaatgtacattttctaagtttatggaccggtcatgtattttactcttgttcaattgatgtatcatgttatttatctacaaggtattgccaagattttgtgggcaatatcatgggcatatcatccaagtttattttttttcctaaagctattcttaattgccagtattttttttatagcaaatccctttttatatcatattattctgatgtatccttgattttaaaattttagatattttcatggcagtacacactctctaaacattgttcttgccggcaaaagaattgtttcaactttcaactttatatttgtaacggtggaatgctctgcgcattgctgaagacgttggaacgatcgatgagcgtcttggccccgacgagccgttcgaagttcgccggcgagaagtacgccgagccccacgtcgaccgtgctcggctcaccgacgacgacggcgaggacacgttcccggcgagagcattggtgccgaggtcgaggtccacgtagttgacatacgcggcgcgcgggttcttggacacgtgcggcgccatgtacgcgtacagcgcccgcagccacgccatgcgcgcctcgccgccgccgccgccgccgccgccgtcgtcgccggcctcccacgtcacgccgtactggacgctgtacaggttgccggcgcggtgcgggaacggcgtgtcgccgctcccctcacgcgccatggcgccgccgtaggggtcgaggatcacgtaccccgccggctcgccggcgaggtaccggaggatcgccgccacggcgcccctcgcgatgggcgaccgcacgtagtccgacttgctcttggcgtagtgcttcgtcctggaggcgcggctggtcagctcctccgtcgagctcagcccggcgaacctcgccgccgactccacccagctcatctccgacatctccggctcggcgaggcccagctccgggaacctctcgctcagcaccgacatggccagctccttggaaccaagaaccagccctgtgaaggacaccgtcacgtttccatctcgtgatggcgacgacgagctggcgccgccgatggtgaggaagacggagaggtaaaactcgtcgggcagagctgagccgacgtactgccaccgatgcactagcccggcgatggcgtccaccgaaccggtccttttcggcgtgaacgccgtcaaggtgttcggaacctggacgagccggagcttccaggcgtagaccacgccccagccgccgccgccgccgccgcggatcgcccagaacacgttctcgcccatggagctccggtccaggaccctgccgtccgcgtcgacgaggatcgcgtccagcacgttgtcggcggcgagcttgaatttgcgcgacagcagcccgaacccgccgccggagatatgcccgcctgctccgacggtcgagcacgacccagccgggaacgcaagggaggacgacgacgacgcgacggcgtagtagatctcgccgagcgtcgcgccggactcaacccacgcggtggccgacgcggcgtcgacacgcaccctgttcatcctcgtgaggtcgatcaccacgaagcggacgcggtcggcgtcgtcgccgccgtcgccgacggtgtacgagaggccctcgtagctgtgcgcgccgctgcgcacgcggatgcgcagcgaggcgtggcgcgcgcacagcaccgcgctcgtgagctcgctccggccgcgcgggagcacgacggccgccggcctgggcaccgcgccggcggccgggagcgcgaaccggaggttctggatggagaagttgagcagcgcgtcgtaggccggcgacccggcgagggagaagttgcggacgccggtggcgaggaggcacgacggcagcgagcccgccgctgctctgtcgtcgcaatgctggccggcggcacacgcctgtcaacggtggcggccatgtcgaggacgaggagagcaaggtgaggaggagggcaagaagcagaatggtggtgttgcgcatggctgatctcactgctgtgctgtgcttaagcaaagaggaagtctatatataggaccttttttttattaacgatatacccccttcaattttattttaattaacgttttagacaataacacggtctacaaaatatacctttgaccttatttctctattataatatatataactagtatggtggcccgcgcagattgcgcggctagcatcattatattttctctcatataatagcatatatgttttcttattatattattaaaatatattacaatgacaacataattttaaattttgcaataactttacgaaactactaatgtgtaatattcatattgtattttatataagtgttagttattaattatttttaatatcaaattttagttatttgtaaattatatatatttctatatgaactctagacttgtcttttaatatttcttttttttaattctgaatttttattatttataattgtatttctatgtagactctaaactcatctttcaatattctttaatttttaaattttaatttcaaatttcagttacttctaaattgtattcctatattgactttaaactcttcttctcatgtttttcttaatttcgaattttagttatttataaattgtatttttatacggactctaaacactactttttattttattatgtttattccgaattttagttagttttaaattcctatatggaatctatactctacttctaatattccttattttttaattccgaatttctatttttttctgaattgtatttctatatggactctatactctacttctaatatttcttatttttaattctgaatttttgttatttcctaattgtatttctatatggactctatactctaattctaatattccttatttttattccaaatttcagttatttcctaattgtatttctatatggactctagtatcctcttctaatattccttattttttaattccgaatttcaactatttctaaattgtatttctatatggactctagtctcctcttctaatattccttattttttgattccgaatttcagctatttctaaattgtatttctatataaactcatctttcaatattctttattttttaatttcaaatttcagttacttctaaattgtattcctatatggactctatactttacttctaatattccttatttttaatttcgaatttcagttatttcctattgtatttctatatggactcttgtcttctcttttaatattcctttttttttaattcctaatttaactatttctaaattgtatttctatacggaccctagtctcctcttgtaatattcccttcttttaattccgaattgcagctatttctctattgtat

SEQ ID NO: 13192 - DNA, 11571 bp, Oryza sativa
aatataattacataaatactatagaacaacctcccatccacacgggatgactaaataaccatccagctgcacatcttatccatatcagtaaatcacgtattctccttcccctcccccctctctttctccatctccctctatccctctctctcccccttcccccctcctctctctctctccccccttcaccctcatggctcatcggtggtgggcattatgcagccatcggtccatgtggtcaaagacgaccagtgtgctaccgtgaaaggccgatccactcgaggtggagggatcgtgggcgtgattcttgaggcttcttcgaggtggtgacaaatcagatcggcgagctttttgttggttttttatgtggtttttaagcatttgagaggtgatttctcaggttagtttagctcattgatttgagttagctagccatattgaaggattttgtgtgccttttcctatactcgattacttgtttttaggggcaatggaaacgtgtaggaatgttctggctatgggggtagtttgttcttgtttttattagattttttctagagttgaaattatttctgttgatttttcttgagttttcttttgatagatggatgtccttttagatatctcagtgattctctaatagtatcatgatactatagtgtatcacgtcggtgatatcatgatactcatgtatcagacgtgatacctaacgatatcataggtgatacctacaagtatcatgcttagtacctgggtaccacggtctagtacccaggcaccagactttcgataccaagatctggtacctacggacccgatacctggtacctaggtatcaggtatcggatctagtacctataggcatagttattaagaccggaccggtgaatgaaccgcttgagctcttggttcactggtttagtggtcggaccagtggttttactggtccaacctggtttgattagtaatatagaataaatgtttttctactgtcacgagctgtacaatggtcacttggctagcgcgtggtgcactcaacccatgacctgaggtcgaatctccatccccaccagttttctttggattttacgtgcgcctgcgttggtgccaactagttgggcccttctctcggcccattaaccgaacttggctggttcaaccagctcggtttaacctccggttcatacaaaaaccacccgggttaaccggtttcatccggtccgactgcatgcccgaccttttcaggggaccggaccggcgggggtcctggttccagtttttacttggtatcaagtcgaggggagagacgatcgacatgccactagctcttcttctcccttcctctcctcgatgccgagaaagggagggagcaagggagagcgttgctgcttcattgtgttcttcttctcccttcctctcctcgatgccgagcaagggagggagcaagggagagcgtgtttggtatcctaggtacttggtattaagtcgaggagagagacgatcgacatgccactagctcttcttctcccttcctctcctcgatgccgagcaagggagagcgttgctgcttcattgtgttcttcttctcccttcctctcctcgatgccgagcaagggagggagcaagggagagcgttgctgctttattgtgttctacacatggttgtgcaggcatgtaaagaaaagagaagggttcattaaatgtaccattctaacggtatcccgtaccgtagcagtcatgtataattatctatctattatatattaaaactttcaacaaatgcttctaaaccatcacattgtgctataataaattagaaaaataaaaaatattctaaggaaaaaaaaagcaaaacatcaagcccactaatgaaattggtactgatacttttcgtccatccggatgtttttttggaatcagataggttcggttggatagttccggatattttcggattcggaaatgaattcggattatttttcctcgaaaatagaaacaaatacggtaagtgcactatccgttggaaagtattcggaatttttgcggatatccgcaaatcctatcttactataaagttgatggccactaacttctaaaggtcaacatgaaagtgtgccacatcatcacacactagaaattattatctagagtactttaaattacatgcaagtgtaccacatcatcacccactagcaattattatctagagtattttaaatatcatgcaaatatgacatatcatttacaattttgttgtatttttagaactcaatattcaagcaatgtcaaatcattatctccacatcattttatattatttaaacatatacttttaccatttttagaaatgtataacatatatacatatcccgcagtaaagagcggggtatcaaccagaatattatataggttcaggtcgtatatatttgctggtggttggtttttttttttttagaaacacagtacaaacgcaggcgctcacaacgtgcgcacactcacccctatgaacgcacacacgcacaccctacccctatgagcacctccggaagactgggccggcatatcttggacctccggaagactgggccggcatatcttggttttttttttgagaaacacagtacctccggaagactgggccggcatatcttggttttttttttgagaaacacagtacaaacgcaggcgctcacaacgtgcgcacactcacccctatgaacgcacacacacgcacaccctacccctatgagcacctctggaagactgggccggcatatctacgcacaccctacccctatgagcacctctggaagactgggccggcatatcttgagactgacgaagtcaccacaggcgcctcgctgtcgacgggtacaacgcctaccactgaaagaataattagccgtaaatacgagcacccgtgtcaaatctaggatttgaacccgggtgggctagttccatcacaaggaacctaaccagttgagctatgctcacttcgcttggtggttggttttttattgatttaggaagatggttttaagggtatatgtggacctattctaggcctctatgctaatgttgtgtaacgccccgattttcgttcgggattaaaaatcatttaataatgcattttatagaaattaaataaaagttaaatcaatttaatcaagtgaaatattgagggaattaaaattttcctttaaaaatcattggccgggaatgttttgtgatattctttgtgccctaaaatactctctgaaatttcccgcgaattttcggagcttaatagctaattttaaagtcacaaagctcattgcatcaatttaaataaattgaaaaccaaagaaaagctccccttccttccttgggccgccttcggcccatgcctccctcctttttgggccgctcggccgttcccctcctttccctttgccaagtccgcatcacctccctcccctctctccctctggctgacaggtgggacctgtgggccccgcctatcatccccgagctccagccgggtcggcaaccgccgccatggccaccgattttacccactcctctcgccgaatacgcgccacctcacccaccgcatccaccccgcacgcgcgcgcacgcccgtgcgaccttctcgcgcccgcaaccaccccactccccctctatcctcgcaaaaaccggccaccaatctcctccacgtcgccgcccactccatcgccggttgcctcctctcctgggctcgatcccgccttcccgagcctataaaagtgatcctcgtgctcccctcctccgtttccccctcctcccgagctccccgcgcctccctaccgccctccccacgctgctcccgcgcaccgccgctttccgatgagctccggccacccgccaccgctgctccacccaccgccgcgccaatccgccaccaccgtcggcttcgcggcgccgtgccgcagcccggcccctactccatttcccctctccgcctccggaacaccgccgcttcgcgcaccacctctctccgccgccgccaccgactccagccgcgcgccaccaacgctcccaccgccgttgtgctgcgccgtttccattgacggcttctccgcatcaagctccaccccggcctccactccaaacccacaaaaccaccaccaaaacaccattccaccatgcatctgagccactgccgcctcccgtcgcgtaaaaccggccaccaccgccaccctaaccaccgcaagggcaagctcggccaccacctccccgtcgatggaaactcgctgaacgttcgcttcccgtgcaccgccgtcgcttgtcaccggagttccgccgcctccctccgcctcgagcttcgccggccgccgcgttgcgccgccaccgccggtggccatccggctaggccgccgccgccactgttcgtcgctgctcggccggccggtctaggccacgcccgccctgccctgtggccgcccgtggaccggcgtggtcctggtccacggtgcgcccgaggccgcggtggtccgcgtccaccgtgggcctcccccttgagccgctgacgcctagggcccgcttgtcgatgccacctcctcccctcggtgacgtcataaatgattaataattgcctcataattcgataataattgtagaaattgatttaaatggctcaaaacttctaaattcatatctatttcatgcgaactccgaattgagccattcaacttgcaaaattcatataaaattgagatctacatgtttgtttactttttatgtactatttcattggtgtttattagagtttttcctcattttgcgtgccagcgtgtagaatccgttgtttcggaagatcgcggttgcaaggaaaagtgttcagaagatcgtttgaagaagcaaggcaagtcacacattccccttgagcatgttgatcccaatttacaaatgttttaccatttgcaaataaatatgcatgttttgctaattacatgggatcagggtttacctatctgcttgcttgtgccatgtttacttgatatctgtcctttgtcaaccttgggtaataaatcgactagctcaggttacttatgtgacctagctagaactatatgcttagccatgcttaattaccactagctcagttgatgtgataattgcagtattagatctttttagtatcagaacgacctgcgtgctcgagacacctgaccatgttgcattggtcgtaattatccaactaaaatacgactgaatggtgggctgtgggtgcatggtttcgctggtcgcacctatggcaattaaggaccggttcgcgggatgcactggaagacatacagcgcttgccacaagcgggaatgggtaactgtctgacttgaagtatagctttcctctagctgacattcctaggcaagagtgggcgtgatggagttgggtcggccggggtgttcggttgatcggcttctggattcaccgtggcatgagaggggactgcccgccgccttgcgaggagtgggggtgaaacctgaggtgtggtgcgattggtcaaagggggttatatgaagggtcttgtcacaatcactcgacatggtgatgtgttcatcatgggcgcatgatgatgcggtgacatgccggtggattgtgtcttgtgggtacagttgtgcacctctggccagagtaaaactattcgaatagccgtgcccgcggttctgggcgatcgaccagattcaccgtgattagtctcacacttaataaatcgactcaatgcactgtagttcaggtgtgttggttgggcctgttcaacatggtgttgtgttgatcagtagagatttaatattactttaattactcaacagttttattgtttgctcaataaaatattttacaaccgcctttatgcaaatagccaggagccattcttgaatccccttgcacgtctgcatcattggtgtggcttgctgagtacggtggttgtactcagccttgctattattcccctttttcagaagtgtagtgcttctgagctgaagacgaagttaggggactaaggctcagactccagttgagttttgcctgtggagtggagctgaagccccgctaggatcgtctttttctgctgctgctgctttcttttcggtgtgaggactaagtgcctcttctgtaagtattttatgctttatttacatttagaactgtatattacttgtcgttttgtataccctggctggtactggactgtgatttaatacacaaaatagtctgaaaatttagggctaaatttctgggcgtgacatgttgttgggaattctaatgagggtaattggtgggtgcatcgaggaactcatcatctctagctcaatggtgtagggagcaatagggaaacacctcacacccgatgttgggtgttgaccatgtactaatatagccaatagtatgtacaagatcctcaattagagccatgttgacgattattatagaccaattttgaccgtcaatataattgaaataaaggagaactagctatacttgcaatgcatatttatttttagaataatctatttacacttgtactttgaatatttttttgtttgcagagattgctacgtaaacggaggagaatcgacagaaaataactgaacaatcaatcgcacgccatcgagaagtagacttatgggtaaatggaccgacattttctgagtttgtatccgtactcgatactatccgtgtccgacctgattctgattataaaatttgggttaggatatgggaagggtgagatccgactgaacccgacccattttcacccctagctgccagggaagaaaagagataaagacgcatgcaccacaattttttttattttaattttgctgactaggatgccatatcagtgaaaccgtgcatccatactgctatgggacctaaattgtacggttttgtatagtttaggggtgaagatttctggtattgaggattatgttggctggtgaacttaatccattttttttttatctctgacagcatccgaaggagcccataaccaaagcagcccaaagcccaaccgattgacggtgccctgccgaagtgccgagagctcgagagacgaatgcaaaattaatctgtccgtacggctgaataatccattcccccttccctttcctcccccccctccgatccaaccgccggcggcggcggcggcgaccggcggccagagcgagctccgtcccgatccggcggggaggggcctccccgcccccacgcgctaacctccccaggcggcctcctcctcctcctcctccgcagcgatgggctccatggagccgttcaaccggtgagtcccccctccgtttcgcacgggccctggaaactctaaccctagcgggtggggggtgatgagatgtgcccccaccctcgcctgcttttcgtcgctgacctcggccgatcgtgcccgctgatgatgatgatgatgcaggctggtgaggctggcggcgcgcgccttctacgacgacatctcgatgaagggcgacaaccagcccaagacctcccgcggggacaaccgggggatggctgtcgtcgtcctcgacgcgctcaccaggtgattgggtctgcttcctgaagattctgtggggggagaatttctgtgttcgcgaattcgtatacctaggtctgggttgaaggcgggggttttcctctgttggtaggatcgtgaggggcgagtggagttagtagaacacagttcatttgggtccatccggaaatgaattgataaattggatacttctaatgagcacacttagatgatattgttgctgctgcttagggacatctcgatggatgaaaatggtggaggtgtttgcatgaaccagaattcccccaattggactgttgtagttaaatttaacagtgatgtgccacagcaattttatttgagttttgactctttcttcctttgactggttttatatgttttttttaaaaaattggaggttaaagatgataacaattgttaaggaattctgtactcaggaactgcaaatttactaatggatcaaggataaaatcctagatgtcctcttttcttggttgttaagacatgtagattggagccaacgaatgaaatgtctaaatccttataaaacattctttcttaagaagtttttatccacaaatctttggacctcagcacttcagctacatcatgtttgatggattgttaattttatttattagtcctcatgttttccatccacttatttgtgccttcttttccatacacattgatactatcaactgatgccttttatgcaaattacattgtcttggtataaaatggtttttggctctgaagttatgcaaaagctaatatttttccaccaccagacgccaatgggttcgagaggaggatttggctaaggcattgaaactccactcaaagcaattgcgccgtatcctccgattctttgaagaagagaaactagtgacacgagatcaccggaaggaggttagttttttattgcggctattattattgaagttccactatatctccattgtctttttcgttttctagggatggacatgttttaactgacatctcctgcgacccaatgaaaaatatttttgttgtggttcattttccttttctaattttaatttttttactttgttgctgcagtcagcaaaaggagcaaaaatatacagtgcagcagctgcagctgctggtgatggtcaatcaattaccaaggagggagaagagaaagtaaagatgcatacccactcgtactgttgcttggactatgcacaggtagttatccactggttttatctagatgtttttcatgataaataccattcagattgaaggcattccctccacaatatagggccagtaaattgttcttttccttttctagaatgttttaataaggacgagtttagtgtagatgccagggagtgggatactgttatttcaggatacccatgcaaagtgttgaaaagttagtgtggtttagcatattttacctatgggggttgaatactgtttaatgttcaatcacttattccgagtcaaggtgtgtgaacattgtggataataaattttctttagattttttacatttagatagattttttacatttagatattgcttgcatgtactagaaaatcagtgtttcatcatcagggttcatatgcaaatacagtttcttcgtgtgtaatctggctgtagtaactcctataaatgtcattctctcataatcatagattcatttattcgaatttttggtgtagttgctacaatttgaatccacgccattaggaacctaataagttgcataatactccctctgttccatcttgtaaggtgttttagttttctcctaagtcaaacttctctaactaacatttataataccaaataaacactatcaaggcatattttatggtggatgtagtgaaactaatatgatgttgtagatggtagtgcgtttttctataaacttggtcaaagctagagaagtttgacttaggacaaaacggcaatatggaatagacaatggagtactctaagaaacagtacaattgtagataaccaaggcctacttggttcatgtggtgattatattcatttctacttgtttctagagacacaaaaccaaacataagaaacatgtgctaacaaaaactatttttgtggattgtttagatcaattgtgcatcataaatttcggttgaatggcaatttatgaactagtttgtataaacaatataacataacataacatacaagttaaccttgtcatacatgtccattaaattgactttaccacacttttttgtgcatgctgctaatggcatttacaatattactaagtttgtagtttttgtttacttctatgttgcaagtatttgagttattttattgtttgaagtaatgaaggtctttgatctgttgaggactacaactacaaaacctaatcattctcattcatctttcatcttattctgtcatcatatttgaatcgtgtttgataagatgcattttttttgaaacacagatctgtgatgttgtaaggtatcggatacatcgcatgaagaaaaagttgaaagatgaattggacagcagaaatacaatccaacactatatatgccctaactgtaagaaaaggtactaggtacaattatagttcttttgatgctaggcacaaaatcaagttacttaaccttgttttacaatatgcaggtattcagccttcgatgcattacagcttataagctacaccgatgagtacttccattgcgaaaattgcaatggtgagctagttgcagagagtgacaagcttgcttctgaggaaatgggagatggtgatgataatgcaagaaaacgccggcgtgagaaactaaaggatatgcagcaaaggatcgatgtaattatatttttattttacaatgctaagaacattttcttgtgagcattcaattttaagcacttttaatgcaacttatatatataatggttcaactagtgcagaataagacaaaatgtttttgatttacaatctgcaatcatactgttggttaggccatgattccatgctttttttttggcacaacaggaaatatagtaagttatctgcttgtggtctttctggatgctgttgaaattattctttttgtttcttcattacgagtttttgcttggagaaaattacttgcatgcattagtatgctagatgttcatcagacatgaataggtgaccatgttagtaacacttatatgtacatcccattatgggacagtttacatcgtgagttctacttcagagttgttaatgctttgctataaactacagaaattaaatatacattagtttcaactttaacagataccatgatatatttccacagtaccatctaaacactgttgcttcactggtttgcttatacaacttatgattgtagatgtgtctacaatctgcttaaagttcaatataaaaatctcttgctgtttcagtctattcaacaaatactttaatgcggtagacaaccagttcttttggatgagaaatttagtattgtgatcttttggattaaaacgatgtgccctttttttagtgaagagtcttttcttttttgctgataatgagtagtagtctgtcaatattttcgtactaattgggaaatccatgtttgttagtcttgatctactggagtttggagttatttattttttttacaacttcgttatatttggttcaggaacaattgaagccattgcaagcacaacttaatagggtgaaggatcttcctgctcctgagtttgggtagcttacaatcatgggaaagagctaacattggtgcttttggaactgctgaccctagtgttgttcatgatctcgtgctaggaacccacaagggcagtatggtacaccaatgccatacctcgtaaagacaaaggtaagattatttttataatagtagtttttagtattgtttgattttttattagtacgcaatcaacatggcgcgtcttgaagcttcctgagattgtaggtgggtcaatcatgtcaggtgatggtggatctaacgggcaa

SEQ ID NO: 13193 - DNA, 723 bp, Oryza sativa
  unsure (1)..(723): unsure at all n locations
cgtgattagataggcangtanantgcannnncncannnnanagganncccctannggnggcctgataccagccatcttcagcttatcagggtcaattggtcttgtaaatagcattactggctcctcaggatcccgcatttcaggaacctgttaaatcatgatccaaatataaacatgacaaataaaaaattagatgagttgccatgtgaacctaaattttagtttcactatccaacaactatctagagcaacagaaattgtgcctagcaagcccatcaatttctggctgttctttcagacaaatttgggaattaggggtgaaagaagtcaaaatagataggaaaatgctcaaaaggttttctgaaccatatttttatgagaattgaaaatggtaacaaatgaatatgatgaggaaaaaactgcgttcattacccccgtaggaacctattgttatacatcaatgcccttcgggttaaagaatgcaggtcctacttttcagcgtactactcgaatttctttgggtagtcaaataggacgtaatgttgaggcgtatgtcgatgacttggttgtaaaaacgcgcaaccaagagaccttactttcagatctagcggaaacttttgagaatctccgctccgcccgcataaaactgaaccccgataagtgtgtgtttggtgtacctgcgggtaagcttctcgggttcttggtctctgcccgaggcaatga

SEQ ID NO: 13194 - DNA, 551 bp, Oryza sativa
atatcgtcagcgcacagccatgttcccacgacgcgctcacccccggcggaagtggaggtaggtgtgggctgtcccatcggagcgtcattcggacagcaaccgtgctgatctccgcccattcaagagaaaaagaacagtccagtttggaaagagaagggtgcatgtggtatccccttgaagtataaaaggaggaccttgcccatagagagaggggggttgattctttcccagattatgagcttagaacgggggagaagtcagctgaaacttgtagctcattcatacgcagatccaccaaaacacaggagtagggtattacgcttctcagcggcccgaacctgtatagatcgtcggtgtctcgtgttttctggctggcatacgatatttccacatacagagagagtgagagcttgagatttcaccctaagcccccggccgaactggcaaaggggggcctgcgcggtctcccggtgaggagccacgagctccgtcaactttacacatagatggttctttctccataatacttctttgaacactaagatattgtt

SEQ ID NO: 13195 - DNA, 630 bp, Oryza sativa
  unsure (1)..(630): unsure at all n locations
cgacttcccgaggagcttgagaagaccattaaggcatcctctacggacctcgcccggagggcggtcgaactcggctggcgagttaccaggcccgggatcccaacttctccccatggatggcgctgtaggaggatcctcccgggaccgatgacaatgcgcgcgcgcgggtcggggatgctgctgaccacatcgtcaacggcttctagggctcgggccctctgcttgcgttcgaccacagctccgaccaggaaggcgacaccagcagcgaggacggtcttggcaacaaggccggcgacccgggcgcatattaatgagcccccaagcccccggcactcttatctattttcttgttctttcttctaaggccttcatgcctcttttttgtacaatgttaacttaatctgcaatgagaaatgatgaaaaaagcttgtgttagcattattctgctatatatatgaggtgaggatgaactgcgccatggtccttttgcgacttagcttggaataaaggctcgagcccaagtccccgtcctcgaatggctcgcgtcggtgctagtgactgatgagatccanctgtcgagactggcctggcaggcacgtcgtgaccctagggtatgggtgacccgattgt

SEQ ID NO: 13196 - DNA, 1563 bp, Oryza sativa
aaggttatgacattttttttttatcaggaggctatgacaattttcacaagcaccgtaatatagaagactataagaagattctgacctaccttgatttttgtaaaaagagataaaattcaaggtgccgtgcatatattttctatctatcttaccagtgggcttgcctcttttgaaacacttaaaataatagtattcagtttgtagtttggtactgagtttaataatctaaattctatgctattgacagtaaatatttaggcacgataaagagttattcatattcatatactatgaaatagtttctggattttgaaaatagagataagactcagacagaaaataatgtgatcatcttaccttctttgtgcgttcgagatcagattcgatacattttatcctatcccaagattccaagagggagcgctctttctccaagggaatctctggtggcttgttgccaagctcatcgaccttaccctcgagcctctgaagccgctcgatgacaggactgatgcggtctacactgaaagtctccactgctggatgatcatcagaagttggttcaggctcagctggaggcaatggattgtcaacccgcatctcctgctgaccatatgctatgtggaagaaggcaaaaacttttataatcaaggccagcagtaatctgaagaaacggcggaaaaatccttcatccgtgttctctttaggtacgactgttcggcttctgttgctcgaggaaataccgcctctgttgcttgaggaacctatacaaacaaaaaacactgaacagactactcgaagcaaatagttaagaatggttctaaggaagaactaaggtctaagaatagtaagttcaatagcttgttctttcattaatgcatagggatgtttcaagaaacattaatgcatagggataagtataatgctgtccttgcttaacacagacataatattcacaagggaaagcttatccataagaattacaaaggtgaatagaatcttgtaaggggagaataaaaaaaaaacagatttgctgaattacataaaatgacatatgaagactataaataaacatacccgttgcatatgatgttgtgctacctccaaaaggccgagcttgagctcttacttctggggcactagttttatcaggcatcgctcctcctctaccatagtcaacagttttgtctaccacaacaaagtgatcatcgcagctgtagtaagctgcagagtctcgtgctctgatctgcatctgtgtagaatataagagatttcgtaaacactaagaaaataatttgcatgggcacatgaataaacaagttcatgctacaactgaataagggaaaagcttacttcttcacgaactggagctaatcgactacattccactggccttctcatcattggagaactgagatcatcaacatctgaacccgactccactgttgatgtgtcactgcttctaccctgtcatgagtacatgaaaaaaaaaacgctattaattgtcaatgtgaactggttcatggagagcacaatgccttcattcatgttttagaatattca

SEQ ID NO: 13197 - DNA, 4888 bp, Oryza sativa
taactaaccaaccacgtatgtatatgtgaatctctatgcatccacatacttaatggggctattgggtgcaaatgtatgggcggatccagaaagaactaataggaggggctgaacaaactatacaaaactatagccccctcctctaatggatgtatgacaaaaaaaaattagtgggagcttaatgggggctcccatggttgcaacgtcggtagttggggctagagaccctgacacccccatggcagatccgccaaatctgttctgtacaccattaatgggattgctaaaattatcacaccacatttttctctcctatacgtatgtatggttctatctctcagatctcttttaatcagataataaatcacttctaatcctgattctctttagtgtattacaaaaattacaatataaatttgaatcttacaatgtaattacagtgtaagttttgaaatttatggtgtaattacaatgtaagtgtagataatttgcaatgcaaaaacgatgctattttttggtgaaaaatatggtgccaccaatatagctactccccatcattaattaaacataagtgagttaaatatgtcgactttatttctctatgcatacactgcattttgagtaaccttactctttgtataatgtgtccattttgagacatatataataagagcatctgatttgcagttagcgaggctgtcatattaagcactttatcatatcaggaggcgtgggaaatggtaatttctatactatatctggacacattttgattggtgttatgatcatactactacatgtttaggcattcaaataaccctctgagcttgacagaagttgcctggtgcaagataggctattcctcaaataataacaacacttaagtagtatgagtctgtgagattctgatgaaactacactaggcttgcttgttagttactcaggtcatatataaggagaaccatttccatagtctattatacactagaaactattggattgtgtttcttcagtatcttgtagataacttgatttgttttctgtatgcagtcgtattttggggcaaatgtattacatccgcgtaccatcatacctgtgatgaaatacaatatcccaattgttataagaaatatgttcaatatttctgcccctggtaccatgatctgccagcagcctgcgaatgaaagtggtgatttggaggcttgcgtcaaagcatttgcaactatagataaattgtctcttgttaacgttgaagggtaagtttttctaagttagcacatttcttattttgatccttcaatatgtgaaccatatataatctgaattcagtcaccaggctactttgatgatctttagcaagttccaaagaattgtgtcttctactctcaaataattttctagtgcctggaatcttgattttacacactttgctgacctttcaaggttaacattaatataatagaagcataaataagcgcatttaggatttactagtgattgtattgccataatagctcattaatctttggtgcagaactggaatggctggtgttcctggtactgcaagtgccatatttggtgctgtgaaggatgttggagctaatgttatcatgatatcgcaggtagatagtgttttgcatctctagcatggcatatgattgatgaagcttcatcctaacttcaaagcatgtgcaggctagtagtgaacactccgtatgctttgctgtaccagaaaaggaagttgctgcagtttctgcagctttgcatgtcaggttccgtgaagcattatctgcaggcaggctatctaaggtgtgtttatgatattttttttcactcttcatgtttattaaaatgttctatttccattgtgaactatccatttccaagatatggattgcatgataatcaaatgatggttataatagttctcgatgggtatctgattttcttttgaatatgagaaaaatactttgagagaactcagcggttttgattgacatagatgtgttattgcctaaacaaattctacatatgttacaaacttagcactctagtgggctgtcagttgtgtagaatactctctgttctacactataaatatgtaatgatgatattatgccctcgaatttggtggtgaagaaaaaaattacacttatgcgaagccaggggcagcatcagcctggggccaccatgtcaaggttgggctgcgtatgagtcatgctagagaagggcgtgtatcattacttctttgtttctttggaaagaatgagccaatatcctttagttatatctttggctaacaactgaatctaataacatactaggataacaagccttctaatatgttgaacaagatgagaagcctgatctaacccctgtagtgtgtaactgtatgctgctccagctgctgtcccacctgtggtagtctggtagacactcttgtgcgccatacgagtggctggcttgctgcagtgctggtacttaagcccaaccagaaaggtggtcttcgtgtaaacttccatgatataaagcattaaatccttaaaagcaacatcctgaggaaaaattagagctacaggctggaaatcgacctaagaggcttctaatatgaccatatcaaaccttattgtactaaaatgtaccgaagctggttggaactaactcgattgagggatgtatatgttctgtctgcttccttcatggttagacgtttagtgaatgctgcacaatctctccatgatgtggatatgatattgatctgcctactttattatttagatacgaatttatattttcaggtcgaagtcattcataattgtagcatccttgctgctgtcggcctgaagatggcaagtactcctggggtcagtgcaaccctttttgatgcacttgcaaaggtaatcccacattttaagttttgtatgccaaccatacaagaggtcttttcaagggaccagactaatttacttaatgatggacccaggcaaatattaatgtaagggcaatagctcaaggttgtagtgagtacaacatcactgttgtattgaagcaagaggactgcgtaagggctcttagagctgctcactcaaggttcttcctctccaaaaccacacttgctgtcggaattattggacctgggttgattggtcgtactctccttaaccagctgaaggatcaggtatatcatgctccatatccctttttgttatcataatgcacaaagaatagtaaactatatttctattgtggaacactggaacctcactaggactaagaacataagaagatgcacttacacttccattatcatgatatctatctaggtcactcttaccataaggctaattgcctaatttagaccacttctattagtattctagatttctagtgttacgttagtctgctctatatttttcaccatgtttgaagactctgggagcagccactcaccaactctcaagtagtggctatctgatttctgataaatcagtagatgagacacatccatcacatcttctggctggttggccactatccttcccatctccattctccactatccagctcctgcactgtcagttgccacattcagttattggtgccactcccaccagatggatcaatctagatatgcaggattgtatgcagatctgttcttggctcaatttactcctatacctgttattcctaggtgaccttagttccactgtagcaagtttctttgatcagggaatgaatggcatgtaccctccacagaaactcacaggcaatgtaacttctagttctagctctagagtacttctgtcacatctgatcttctggttgtaagttgttttctgcgggttcaatttcagttggatagaaatacatgagcaaaatataacaaaggaaacatttccatattctattgttcttagttgcctgttaatatattagatttgcgtatgatctctaaaaagggtgtgcggttgattgggttaatttatcttttcacagaaaagcaatatgtaaggtgctattttctctttgactgggttttcctattgcactttacacttatacttaattactctgcaggctgcagttcttaaggaaaatatgaacattgatctgcgtgtcatgggaatcactggttcgaggacaatggttttgagtgatacgtatgttaaatgaatctccacttccctcttttctttccaaattaaatctctggtgcagaacaccacaatagatttattagctcggtagctattcttgtttcgttcaaaacttccatgcttcaaaaagtgggcaaactctatttttggcccgcgaactttcatcaaagttcatttttcaccctgaacaatattaagtcttagggtagaatttgtccagttttgaaagtttaggggtgaaaattaactcgttttatagtttacggtgaaaattgaacttcaacagaagttcaagggttaaaaacggactttaccccccaaaaaaaaaattatgtacatgaactctattggtcaaattgtcatgtctgatgatagcatatgcaaatttgtgtcaaacaattgctttactttctattggttgccctaaaaacctgaccagacagaatattgcagaagggttgtagtcaagattgtttgcggatgttgctgtatgataagcattagtattaagtatttacaaaagctgaatgtttctttgtcctaccaaaaagttgattggtttttcatgatttctgactgatgttttctatttatatgctaatctacatgttcttatctgtatatttcttatgttctttctgtagaggaatagatttggcccattggaaagagcagctacaaactgaagcagaaccagccaaccttgacaagtttgttgatcatttgtccga

SEQ ID NO: 13198 - DNA, 2081 bp, Oryza sativa
gctgccgccccaatctcccaccgcatccgcctcatccgctccctccagtccgtccccgccgaccgcctcctctcccacccgctcccctccaccgcccacgcctgcctcgccgcccacctcctcgcccgcgaccgcctctacgcccactcccgccgcgtcctctcccgcctcgtcgccctccgccggccccacctcgccgcctccctcgtcgacctcctccaccgcgccgcgctcgcgctgggcccccgccgcagcgcgctcgcctccgtggtcgacacgctcctctccgtcctcgccgacagggggctcctcgacgacgccgtccgcgccgtcgcccgcgtccgggagctccgggtgccgcccaacacccgcacctgcaaccacatcctcctccgcctcgcccgcgaccgcagcggccgcctcgtccggcggctcttcgagcagctgcccgcgcccaacgtgttcacgttcaacatcgtgatcgatttcctctgcaaggaaggggagctcgcggaggcgaggtcgctgttctcgaggatgaaggagatgggctgcttgccagatgttgtaacattcaattctttgattgatgggtatgggaaatgcggggagctggatgaggtggagcagctggtggaagagatgaggaggtcggggtgtaaagccgatgttgtgacatacaacgcgttgatcaattgcttttgcaaattcgggaggatggagacggcgtacggttactttgctgcgatgaagagggagggggtgatggcaaatgtagtgacttttagcacctttgtcgatgcgttctgcaaggagggtttggtgcgagaggcgatgaagctgtttgcgcagatgagggtgaggggtatggcgcttaatgagttcacgtatacgtgtttgattgatgggacatgcaaggcagggaggcttgacgatgctattgtgttgctcgatgaaatggtgcgccaaggggtgcccttgaatgtggtaacatacactgtgttggttgatggcctatgcaaagaaaggaaggttgcggaagcagaggatgttttgaggatgatggagaaggctggtgtcagagccaacgaattgctttacactacactaattcatgggcacttcatgaataagaacagtgagaaagcacttggtttgctaagtgagatgaagaataaaggattggaacttgatatttcactctatggtgccctcattcaggggctttgtaatgtgcacaaattggatgaggctaagagtttgttaactaaaatggacgagtctggtctggaacccaattatatcatatatacaactatgatggatgcttgttttaaatctggaaaggtgccagaagccattgccatgctgcagaagattctagattctgggttccagcctaatgtaataacctattgtgcattgattgatggattgtgtaaagcaggatcgatcgatgaggcaatctcccatttcaacaaaatgagggacttaggactagatcctaatgtacaggcttacactgctttggttgatggtttatgcaagaatggttgtttgaacgaggctgtgcagttgtttaatgaaatggttcacaaaggtatgtctctggacaaagttgtgtacacagctcttctcgatgggtacctaaaacagggaaacctccatgatgcctttgccctcaaggctaagatgattgatagcggtttgcagcttgatctcttttgctacacttgttttatatcgggtttctgtaatctaaacatgatgccagaagctagagaagttttttcagagatgattggacatggtattgctcctgatagggcagtttacaactgtctgataagcaaataccagaaattagggaacttggaggaggcaataagtcttcaggatgaaatggaaagagttttaccctcttgtacagacagtgataccgcaactgatggtaaaacctgagctcatgtagtgttaccatctcaggagttggaactgtataggcatcagtaccactatgctgaaatttttttgatgcagcatagaaacatatgccactgattcagtacacttctcctgat

SEQ ID NO: 13199 - DNA, 2118 bp, Oryza sativa
tgtgtgtgtctgcgttcgtgtgagcgagcgagcggagctaatgaatgttgtttgtttcttgttatatcaagaggtggggctcttttgcaggtccggccgtcgtggaaagcggaattccaactctcttcttcctttcagccttatttcatcgggaaatttaaatatttgtcactgttaggtttgccaattatccaaatatccctcttacatttgcccttattttttcccctctaaagtggtggctttttaactatttgccacgtttgcccatgtagcatgccaacgtggcaacccggtataaagatcaacgtgggacccacttgttagtctcataactcccctttcctctcttcatccggtgtggccaaccctaccaacagccaaagcgccgccccacctaggtcgcacccccacgattaactccaccccttctcgtctcttcctttggtggtaactgccatcactgccgacgacgacgacgacgccgacaccaaattcccaaaccctagcttcaccctcggccttgccgccgcaagccgccatggcggagaccatcgacgacaaggtcatctacttccaggcggtcaccggcatctccgaccacagcctctgcaccgagatcctcgctgcccacgactgggacctccagctcgtcgtctcctccatcaccgccaacccctcctcccttgacccggcccccatcgccgagggaggcggatttggtcacgccacacccgtctccgcctccgccttcgcagcagcagcccaggattgcgtggaaactgatgacgcttccattctatgtggtctctggtggggttgggctcatcgtcagttcgatctgtctcgttgcctgggttgccgaagccatagctggggaagcacggcgacgccaagcgcatcttcttctctagcgacagcaccattggaggagtgggcagcactcggctataagcggggttggccgcacggaggaacaaaggaaggggggcctgtgagactcacaggtgggtcccacattgatttttacactggggtgccacattggcatgccgcatgaataaaagtggcacacagttaagccaccatcttagaggggcaaaaaaaaataaaggcaaatctaagaggggcaaatagttaaatttccctatttcaaccatcagtgttcgtgtcttgtactgattgttgggttgaaaatatttattgattaattttatgtctcaagataatttaatttatacatataatcaagctataatatgtggcaataatccactcaatgttctaaatcatacgggttactaagcaagggctaattagactgctactagttattttggttaagatattgttgtttctatgtgattcgataatgtgtgttacctttttttcaattcattcataaagctaaaaaatagttaaaacaaaagaaaaaagaatattttagcatggtcttatttttaattagaaagcttcccccctgagcggttgaaagagaagagtgaagtggagaggccagatacaacggtagctaggtgtaattgaggcacaatgagaagattggcaaagccacagccatagctggtacaagaagcagatgaaaggtggtgatggccagccaagaaacactgaagagggttaaatgacatttctttaaagtgtgggtcggatttaggtggaaggcatcgggaggaaagtggtgcaaggacgtgttgtgatcagagaagaccccattagagacaagctagcaaaggaggaggcccggatgtgctcccttcgttttatattttaagttgctttgattttttttatattcttttttgttttacagggtttataaaaaggatagcaatatttcctatacaaaacaaacatattatcaaaatatgttcaatgttatatttaataaaattaatttggtgttatagatgctgctaaatttctctaaagacttagtcaaacctaaagaaattagggtaaaaaaaaaaggcaaagcaacttataatataattcagagggagtattcaagttagttcagtcttttggggtgtacaattcaggatttggaatccatttagagtaggtttaatagttagctataagggaactataaatata

SEQ ID NO: 13200 - DNA, 9825 bp, Oryza sativa
cgggctcgacgacgccgcgtgctgtgaactgcggcggcggcggcggcgagggggaggtggagaggctgaggagggacaaggaggcgctggcgagggagctggcgcggctgcggcggcagcagcaggaggcccgcgcgcagctgctcgacatggagcgccgggtgcggggcaccgagcggcggcaggagcagtgcacggagttcctcgcgcgggcgctcaggagccccgacgtcctcgacaacatcgcgcgccgccacgccgcggcggtcgaacgaaagaagcggcggatgctcgccgccgccgcggacgacgacggcctcaccttcgaggcgctggcgctggccgcggcggccgacaccagccatagcacgggcggcgcggtgaccacggacatgatatggtacgagctgctcggcgaggagcaggcggagatcgacatcgaggtggaccagcttgtcgcctccgcctccgccgccgccgacacggcatcggaggcggagccatgggaggagatgggagaggaggaggtgcaggagctggtgcagcagatcgattgcttggcctcgccgagttcttgatgcatggcttgcattaggtagtagtaagctagccatgagcttcctctatattgttgtgtggcgtgttagtattagtagctgctttgctggtatgtgattgttagtatttatgtttgggaatggcttggtttgatataattcggattctgcgtttgttcttgcaggatccagtgatggcttaattaggagtataatggaaggaatgcaggaagtggatggatgtggtagctaatctgcttcatggattgatgtataaggttatgtatcaacacttcaccagtggtaattcatactacatattattcatcttcattgatgtgctacaatgaatctcttggaatttaatacattgaatatcttggaattgagtacttgtttaaagataaatcattttttgtctgataagcttgttttttttcttctatagaggaatgcaatggatgattgattattcatctctaggaaacacctggtgataacgaacaatggcgctcatgcagccttttcataagacttgtctgtttcatcttcaaagggccacagcaggcacacagtccatttcactgaagatcgacagccaagaagttgtctctcatgaacaggatccaacatcagtatcgctcagatttgttattctactattcaatgttctagcttatttcatggaacagtttcttatcttgattcttgattacgacaggtttgctatcgatgagcaaaagtggtgctctcagcatgaggctgcactgtccagatacaaaagtcccagcacctattgccatccacttcactgataaagcacgacgcaaaactcaagcttccaagggaacagggacaaatgtgtttaagtcatcaactaaacaacatggttacaactgttgtctgacaaaagcttaactgtatttgttacaagagagagacatatggccactacttgtcagcactaatgttacaccttcaggagaaaggtacagaagctatcttggcattgttatcagtcgtcatcgtcgtcgtcatcgaactcgtcctcctcttcctcgctcagctcttccataggctcatcctcttcgttaactataaaaccactgagtgtttcatcttcctcatcatcttcgtccccctcatctttttcatccccactattcttatttttatctttagtctcagttttttccttgcgaggtttctttggttcttttgatcttgtaacatactttgatctcttcacactagaacctcttgataatgaatctttatcgtcctcactctcacctatccaatcttcgtcttcacgctgcccctcattcttcttgttagcgcctttaccctttaatttgccttcctcatcatcttcatcatcggagcccttccttacttcctccagaaaccaattccaatcctttgggggacgaattcttcctttaggatagttgtcaaattcgtggcccattgataagaacccgaattctgcagccaaacaattactgtatcattcaacagggtggaagtattttcgatattacgaaaaacgccaaacgaaattatttatatgtccttcgattttgcaggaatcatcacaacttaattcttcagataaaaaaaggagtagagtataaccgaaatcagtagcactctttggtattttctatgaaaccaaacaggtcttgacatatactagcaatttagcaatgtgacattcttggttttgtacatctacatgaacatacctagatatccccacaaaaaccaacaaccattttgtatcctttttccttttgaatttacccttttgtacttcgcatcaacaaacacgagttaaactacacattagaaaagcctcgaagatgatgcaatggaaaggaaactagtcactgcaatgtagcttgaagatgactactagtatctaatcaactcatttctacagcattgtcagaaacaaaatttaactcttgtttgggttttttttttcttttttctctgaagatgaagatgaacagaacaaaggtcaaagctcacctcgaaccgggtcgatgcttgatagatcgaaattcaaatcctccgcttcggcatcggaatccccactgcacgccgcctccgcctccgccttcgactccgccgccgccttctagttggcggtgacctccatggcctcctccgcggttcgcctttccttctccttccgttccttcgtgcgcctctcccgcctcgccacggggtccagaacctccgcctccacatccccatccccatccccgcccttgctccttgtcctccgcaccgcccagaccgacaacggcgacctcagcgacagcgcaagcccgtccccgtcgcggagctccccggcctcaccgcaccggaacaccctgctcccgccgccgccgccgcccaccgagcgcacgaccacggggttcctccccacgacctagaaggcgaccctgggctcctcctcctcatccccgccgccacctaggaggcggagggccacgtggcggcgcgagacggtgcggtcggaggcggcggcgccgcggccgagcaccgcctcgggggagtcgccggagagggacaccggtggcgcggtgctcctcctcccgccgccgcctgctgcttcgagttcgagctccatggatgctaagctggcgacggcgaggtcgcccgagaggagagggacgcgtctctcaggggttggcaaatggtataggtgtccaaacgggcggcacggcccggcccggcacgggcacgggtccggcacggcccgtttcggcacggcccgttaggcacggctgatgaaacgggccgtgccgtgccggcccacgtgccgagccgccggcccaagcacggcccgtggatggccgggccgtgcccgtgccggcacggcacgcccgcggcccacgggccgttcggggcacggcggcccacgggcctccagtgcacagtgttttttttaaaaaaaaaagcaaaggaaatgtataaggaaaaaaaaattaaaaatggaaataaaatgtttaaaaaaaagtaatgatttactaatgttaaaaaatgaaaaaatggtatttaaaaaatggaaataaaagttttttaaaaaagtaatgatttgctaatgttaaaaaaaagaaaaaatggtatttttttgttgtgttgaaaaatttaaaaatatagattgtgattcattattttgaaataatttgaagataaatccacacttgcgaaaatattgcaaaagaatttgttaaaaatagtaatgacctttattgatgtttatatcattacaggatacaatgatacatgctgcctcgttaaaaactttgtcatgtaaaaactcataggggaaaatgagaaaaccatgacaaagaaaagagtacagctcaaaggtcagaactacttctaacaaaattctactggggttggtctggatccaggtagagttgctcgaactgggcggccaattcttggttgtccgcagtgtattgggcatgttgtcgagcaagctcccagtctttaacgcttagtagcatttcgacgtggtcgctgcgcagagtcgtcctccggtcttcgatgattcggccgcatagactgaaggccgattcggaggacaccgtcgacacgggcaccgtcgacacgggcaccgtcaacacatcccgtgctagttttgaaagcacaggatatgttatcttgtggtcattccaccacccgaggacgttgaaatcttgtgcttcgtggtggatggcgtcgctgtccaaataaccggacaactcttcggccacaacatgcgaagaggcgtctccacttgtagccgacgaactgccaccaccttggattgaacttgaagacgatccaccccaaatcctaccccactgtatcttcttcttacctgtagtggggataggagggggtctctgctggcgaacttcctgaaactttacttcatatcttccaaaaacctcatataatttacgtctaacctcagtataaaaagaactataatctacacctatagtatctccaacaagtgataaaatagcagacaatccccttaatttacacctaggatctaaaacaaaagcaagagcatacaacataggtatatttttccaatatttcaaatatttttgtttcatgtgaaagacaggttcagttagaacgtcatcattttcgtattctttaaataaagtagcaatttcaagaaggttgtgcaaaattatattagcagttggataataaacttgtgacaaagttagagtacaatcataaaaagtttctagaaattggtaaaatttttggacaattgcccaaacatgctcgttcagtactgaagacccgtcactgtttcttgggccaccacgtgactgaacaaaatcagaaagtaaactactataaggtaaaacaacttttaacattaaatacgttgcattccaccgatgctctgcatcggtggcaaacttacgagctttcacaccggccgcattgcaaaacctcttccatgcagcaatccgcgggttagaagcagttaaccacgcgattgcttgacgaacagcatcgatgtggtcacctaccctcttcatgccagtcttaacaatcaaattaattatatgacatgcacaacgctgatggagtagaaaagattgagcatacacacaaaataaaggttgcaatatttcaatagccctagaattagcagatgcattatctagggtgacagcaaatattttatcagcaagattaaattcattaattacttccctaattctttcagctatgttttctcctgtatgtgagacatctattaacctaagccctaaaactctcttttgtaattgccaatcatcatcaacaaaatgaacaactacgctaagataatcctctctagctctactactccatatatctgaagtaacactaacagagaaagtacatgtactaaacagttccttaagtgcagttgcttccttgtgataaacattctctaaatctctagttgatgtttgcctactcacagctttaaacctagggttatgagattgctgaatgtaatgttcaaaagcaggggactccccaaagttcaggggtaaatcttgcctggcgattaaccggacaagagattcccgagcaaccatgggatcgtactcccaactgcgtaccgtaccgtctgggtttaccataagttgctgctgccggagttgtattccttgcttcttggcacacgactccgcatggcgcttgaggtgacctgtaccaccagaagaacgagcagataaaatttgcctacatattctacaacgggctttcgatacctcccttccgtcggggcatgtttcctttatctcgtcgaagctttgccacacaccggaggttctcgatctcttcgagccggtgtgtgtcgaaacacttccgctcgcggttccggaaaatccttccgaagctgtctccgcctgaaccggtacctcctcaacgacagccgtatgaaccggtacctcctccacagatggtggagttggagccgatccggaggcatcgttaaaccccgacatgtagttggggtcgaaatcacccaaggtgaacgacggcgactggtatggaaagttcggatccattctgaaaatttaaaccgacataaacaaattttcgaatatttattgaattcacaaacacaatacaaataatacacaaatttgaatattacttacatctttccaaccgcgagctcttcaaacctctgcgatcaaactgttgaactacgaaactaattttgatttttgacaaaatttgagcaaattttgtcaaaatcaaaaaaaatgcacacttgagaacaaagagagcacttaaaacacttgagagcacaagatgaggagtgtgggatgaggagaaatggctggggttcatgccctatttatagggcgaaatttgagattttttggaattttttcgaaatttttatgaattttttagcctcccaacggttattttcaaatttgaacggtcaaatagccgttagtgccacgtggcgccttcccattcgaccgccgcccgcactgtccgcgcctgacgggccgccggcgtgccgtgccgtgccgtgccgcgggccgtgccgtgccggcccgctacagtagccgtgccggcccgcgggctcggccagcggcccaagcacggcacggctactcgtgccgtgccggcacggcccgttactgtagcaggccgtgccgggccgtgcctgctacaggttcggccgtgccccgggccgcccgtttggcccggcccatttggccacctctagcaaatggcaagcggcggcagcgagtgctgtgctgtgcttatgtgggccgtgactacgtgaatttgggccgggccgattttagtattcgaggcccacagtctgtccattacgtttcacgcttatgggtttctcattttcttttttttttctcccaacctataatactaaatcgcttttgctattttgcagtcgcctgcaaaattttaatccatcagtcgatcgcatcgaccgtcgattatgtgtcttgattttgtgcgcgccatcatctttcccttgctaataagcccaaagtccgcagcccacagcccacagcctacagcccacagcccacaaatagctctggagaaatccgtccgcacccgtgactcatctagaaagcgcttctgcttctcgacttcccctctcgagtagatagcgtttgtgtttttctcgagcagggggagacggagtcctgcgagcggaaggtgccggagattcttccaaggcaggaggtggaaggggaggcgagcgggggaggtgggctgtgcaccgcgagcggccgcggacggcgccggggaaggcaccgcgagtgtgccgtcgaaggcgagcgcgcttgagttgaggcacttcaggttttttcatctctcttttttgttcaaatctcacgccgcgacggcctgatcccctcagctccagattttctatcatgtggattttgtgagttgtttagggctggattggctaccatttcaagggaggggggggggggttcccgcgtagtttttttttcattccttgatgctttggagtttactgggtatatgtttttgacttgattttgcccaatgtcgagtaaagcatcctggatctgaaaccacatgatgtgtgtgctttgaagttttgttcggtgtagttggggaaaatttttttagggtttttactgcacatcgcgtatgatatagtcggcaggaggtgggctgcacctctgcctggttctaaaccttgccactaattattttctccctaacttcattttctcactaattattttcttttgatgtaaatcatttccccatctgtgaagaataactggatatatatagcccataaatttgcgaataaacatgcttactattgggtcattctcattatggagtactcatcagtcagaccatccgagctggatttagaggaataacatgcttacttcagttttttgctcccaacttgaaacataatgtatagagaaataggttttgtcattttctttagaaatagttataagcagttctgtcattggagacagagatagttgtcaatagttaattttgtctgaactctagctgcaattttgtagcagtttgttttgtagctgcaaggtacagtttctcatattcagatatgtgtactttgttaaaacctgacatagcagaggtacaagattcagaggtcaatatatttgtgtgccaattcatattatttctgttaatctagttcatatgcaggggcaagattaaatgcctcatatcagtcaaatgtaagtacaattttgtttagttttttttctcaaatacctcgagtaatatcaactcctttcagctttcttttttgccaaatccacacgccagtgcctctcctgagactagaggaaaaattaattcagcacaacagattatattttttgtcatttaatacctgaacacccagtttcctgaaactagctgtgaacctaaacaagactatatatctgagtagtaaagttaacaccaagctatggctagaggaggtcaaatagatattagcttaaatcattttactgaatttttttttcttcatgaaacatatgacctctgccgtggcattttagagaggggtttagggatttgctagcaatttgagctcaacaactaaccaatattttcattaaatccctacaaatgctcttacctttttgtccctcagcattgtcagatccatttttgtgcatagagggtttgagttaatcagtccattttagtggtcactctatacagggagatttttttgtgcttgtatacagaaaaagctatcttttgtttttgtgtgctgtgtattttttttaacagtagttgtgctcaactgtgacatactaagccacttttgcttccattccatcagtgatcaatctgagataagcctccctgaaaatgaactccaggctctgctcctatcaattatgtttaatctttttgagattaccagcagagcattgagagaggagagtaatcttttttgaaattatgtttttttgagattatctatgctagttgcactccctgactattgtagtagccattttgatttttcgtgcaagtcgtgtaataagtttgtgcaactaatgttttttgagcaaatttttccgtttactttgataaatagcgtttgtgttttaggaaaacatgcatacaactggggacttttttttggtagacaacttgttttcttagtaattatgtccaacttttcatttgtttttgttttttgcaacccatactactttttatgttgtatctttttttttctcatcaacacacgacagcaagcgtgcctctctttttttcatgtactgtgtttttcccgcttgaaccatctacataccagcagcattgtccaaatagcaaaatcaactaatactatacatttcgcgcaagttatgttataaatatatgcattttcaattattaaattgtgcaactaattcttttttagctgactactatacgatttttttcctaattttggttataaacaagcataacttcagactgattgtatgctcagatgtagtagctcactacgatttttgttttcagggagcgttggattctaccgggggggggggggtggagcttgctgcagggcaagaagagtatatttccttctgctaagattttgatttgctggtgagcttggacatgtgggtggttgaataatgtcatatccatccagtttgatgaacta

SEQ ID NO: 13201 - DNA, 6272 bp, Oryza sativa
caaatcttttttagggcagataagcaagcaaattctgacattccttttttccgtatttttatcttactgatctttactgaaattatctttgctcaactaaatactgtgttctaattcatatattaatgtctcaagaagtaatgaagataaagtttgcagtatgtggggtagcactgtagcaggacaatgtaaatgcattatgcattatcaacatttgatttttaatttcctgtgttactagaaaacttaaaagataacagctattggaaatctgccactttattatctgttatctagctataatgtctttaccgttctgtttgtgaaaacagtacaaatctattttcaccaagcaatctgtggcataagtaatttgttgttgtttcaggtttatcatggcaccattttgcccaagccacaagtgccagaagatttatgatgagttctctcgtgtctaaaaatgacaagatatctttccttatgttgctactacattagtctcataaacctaacaaggttgtgagatgtattactcctgaagaaatttattgatgcagcgtcagaaacagcatacagttgaaagtgacattttgttttcttatagtctgatcttcaataactgcagaataatatgagatcgcagatgaatctgatctttgatgtcttatcttaaccacagtagccaaaagatattctcttcttcaggaacctgttattttggcattctgaggtgataaggggtgataagagtttccctactagcaatgctgctggtttggtggtaatatctacacgagaagactgattatgaagtgagacaggttgatttgcatgcagttgtttctggtgttaacgcacataactgatggctgcaaagttttaccatctgttattcaagtgacatttatggaagtattgcgagccacagtgactccgtgatcaaaaaggtggggttgagtaccatggtttgcaattacggacctgttagaaactaagaaaattgtaattataagtagacacaaatgacgtgcttcaacttttgatattggttacaaatgtgacctgctcaaatttggggaaccattccatcctcccaatcatcaggtgagagaaattgattagtggagattgaacgtattcaagttttattactttctagtagctctctgactggctccctgtttgtgaggttatattaagttaagctactgcttttagtttttgttcgttcttcaccttaccactgcaatcttctgcttggtcagggttttatgctgaaagaactgaagaggtggtatttccagtgtgggggaggaacagttttgctagtagtgctttaagaaactggggatgatactgtagtatggccgtgcattttctggaagttcatcaatattttgaagaggtgatatattggagcactgcagtccgagaaatgatttttacggcctcggtcttttctcaggctttcagcctcccaggcaattgaatttattgaaccattagtcataaactaatactaacacacatagcacattcttaagaaatagatagaccttggtgttcgcatagactattgtattgcacagttttgtttccttaattattgattcattttccctaataagtgaaaaccgtattctttttcaccaatacaatgatgctaattcttttttttcccctgtgtaacatggattactgatcctccccaatacaatgatggctaatgcttatttcttttttacttccctctttgtaacatggattactgatcctactaaaactaacagtgacaaatagagtactattttcactgttttgttctctcttacatgatggctcatcatgtactctgcatcatcaggtagcataattttttacagataatatcattctcacatactgttctgctgatacgatatcattgatagcacttactacttcgcagtcacaactgtaacaatgtttatcttttccttgtacaaaagatccaaatgttgcaacaagtattttttgcaggtatctgcgcttgtctaggcgccccggggggggcccccgggggggaacccggttggggggacagacactttcttacggaacacgggaccggtgagcttgacgccgcgcctgaagctgagcaccatcccgaactggagctccggcggcgactccatccgcggcgaccggcggaacacgaagcggcggtagaggtgcgccatggccagcttcacctcctgcagcgcgaaccgccgccccgggcacgcgcgcgggcccagcccgaacggcacgtgcgcgtacgagtgccgccgccgctcctcctcgccgccggcgtcgaacctctccggccggaactcgccggcgtcccggaactgcgcctcgtcgcgcgacaggacccccggcgccagccacacccacgtcccctgatcagtttatatagtactagtgcggtttgggtttttcaagtttaacggtgaggttacagaggagatttataacgtgttggttaattgcctacctttgggagtgtgtagcctccgacctctacttgctccgacgtctccctcgcgatgagcggcgacaccgtgtagaacctcatcgcctcctttatcacctgcactttttgaagagaaattaggagaacaaatgtgtatttatgttggaaattgacaattcatcgtgaaacttgtaagttaatatcgctaatttatcactgaactttaaaaacaaaacaaatgtggggggtttatgatgaacactgagagttgcatcatgaaactagtaggttaaattagctactccctctgtttcatattataagtcgctttaacctttttaaaattattttaaatttcttgaaagtttgaccaaggttataaaaaatagaacatattttcatagtttctttattttgtgttgaaaatattattatatttttctatacattagttatatataaagaagtttgaaaaaaaaatagaaacgcacttataatatgtgactaagatagtaatcaacaaagtaatttagataatttaccgttaattagcgattaatacgacttataatataaaacaaatgtagtaattaagaaagtaattaaaagaatttacagttcgttagtgattaattacctggtcgaggtaggggaacttgtgctccaggtcgtctgccgtcgggaccgcgtcgggcgggccgaagcggtcgacctcgtcgagcagcttggcctcgacgcccgggtggccggcgacgaggtacacggcggaggagagcgtgaacgccgtggtggcggagccggcgaggaggtgctcgtaggtgagcgcgccgacgtagtccggcgtgagcagcgcccgcatcctgtcgctgccgccgtcgcgggcgttgagcacggcggacaggaagtcccgccgcgcccgcctcgcctcgccgccggcgcgctcccgcctcgccacgaccgcccccacgcgcgcccgcagccgctcgttggcgcgcgcggtccgccagtccgccgtcgccgggacgcggctcagcagccgccgcgcgggcccctgcagcgccggcgcgacgaggccgagcacgatggagagcgaccccgagaggtccatcttgagggaggtggtggagtggacgtgctccctgatgaactccgccgcctcgccgccgtcggcgtcggcgtcgtcggagcgcggtgctgccgccgcggcggccgtcaggccgaagtcgacgccgaacgccgcctggccgatgacgtcggtggcgagcttgagtgacaggtcggagaagtcgacgtcgcgttgctccgccgccgctatggcgtccgcggcgcgcgcgacgcagctgtgcatggtggggatgaggccggcgaggtgcgacggctggtacagcgagatgatcgtgttcctcatcgccgaccacctcgcgtccctgcaacgcaagcgttctcgcattacactatgatgacgcagtaatgttagaatttaattcttttttaaaaaaaatcgcacccatttcccatttggaacgcgcaaaattttcaagaatcactatgtaattgaaacgtttcctacaaaaattacacggaatccctgcgtctgaaacaaagcatatgctacaaaacactcacgcgtgcaaaattagtagtactgccatactatagtgttttgttgacatttttgcctttgaatggagatcttcgaagctccacacattgatttgcaccaattccaaaccatgatcaaacagtggatgatcactacttatctcttgaaacgctttgaattggaaaaagtgattatgaaatggatttgagctccatcggttggcctagtaagccaaagcaaaaaccaaaaattgaattttcgagcttgattttgaaattggttttatgatattttcaacgtaatttctttttagcgttgaattttaagtctatacgaataaatatataaaagtttcacctacagattaatttttaattttttttgttatgaccttgtgaagaagaggcccttctggtggagaggggagccggcgataggcgccggcaagctccggtttgcgatgctcttaaactgcctgatcccgacctccttgcacagctccgcctccgccacaatcaccagcggctgcctccccaaatgaaacctacaatccaatccattacaaaaaaaaaaaaaccatctccttcccaaacagatcaaatcaaagcaaataagcccagaaatttggaagccaattattagattctttttttttttgtccaatttttgttctgaatttgtgttacctgaagatgggcccgtatttcttggcgaggacggcgaacacgtcggggccatgggcggcgagcagcggcaggtggccgacgacggggagggcggccggccccggcacccgccggacgccccaccacggcgcgtagaagtagacgaccaccaccacgacgccggcgagccaggaccacggcagcagcagccatggctgatccctcgcagccgccgccgccgccgccactagagcctccattgatctgatctgagcttttgatcactcgtatgtgattcttgcaagatcactctccgatcgagtcacagccgattaattggttcttctttatatgagtgattgccactgcagattgcagttggccatccatagtgctgtgatgttgctgggaatttttttatgcaagagattgaattttagtgctgtgtcaaagaaatggggaacttggagatgatggattggacggccattgtcgcccacattctcctccaagtggggaagaacaatgccccggaattcttttcaataaacaagttgggaaggggggaaaaacactttgcaagaattttaaacaaggacggatagctgtggcatccaactgtacattcccccacgattttgtaaagggtatggtcgagttttttaagcccttcaaatttgctcaaaccaagcctttggattcaaggatttttggaggaaaagtagaggcattgaatccaagagaataattcctattagagatcatatttggtttgtaggattgcttcaaaggaatttcataggataggaaaaaaaatactccatattttggaggatttttagcatgatgtttaagctcatattttcaaattcctttgagagttccaatgcaacttgtgtatttttctctcccttcactctctaacaaaatcataatataatcttaattttcgtcggagctatgcaaacatcttttttgagcaattcccatgattttatttcttgtaggattcaacaagtactgataatctattcctaggagtacttctttttttctttcctgtgttttcaaaatcatgcgttccaaataagcccttctagtcgcgggatgaaattaggcaaaatccgtttggtaacatcgaaaaattgtccaaaagcttggttttaagttcagggctcggctgggccttgacaaacttacaaacagaaaattaggcccaatgggccttaacatccgaacttggaataagatcaccttgactccctcaactgaccaccgaatctaaatcgtatccctcaaccgcagtaccagaaatcttgactccccaaacttacaaaaccggtgcaatttgactccctgggtggttttaggaggcggttttgctgacgtggcgcctacgtggcaatattgaccgagtcttcgttccacgtggcgatgacgtggcacctacgtggcggtagaattaaaaaatacgcgtgggacccattagtcattcacacaaaaagaaatg

SEQ ID NO: 13202 - DNA, 3480 bp, Oryza sativa
  unsure (1)..(3480): unsure at all n locations
atgagtagcctatgtgatgctacagtaaacattctctaattatagattaattaggcttaaaaaatttgtctagcgaattaggtttcatttttgtaattagttttgtaagtagtctatatttaatactctaaattagtgtctaaatacatggactaaagttaagtccctggatccaaacaccacctaagtcagagaacagtagcacatcgatctgctgtccaccaagtatttctgaaatagctcagagattgtaacaaatacttttggcctctcatctatctcaaataaaaataaaaacttttaactaaaacttgtaggtctcatcaagagctgtaacatgcatataaaatttgtcttcatgcactactgcaagaacaaccataggtgtcaattgagaactggcaataggtgttggtttcccagtcagcaccaatttatcggcacctatgcaagagattatagatgccggttttagaactgacacatgtaaagattataggtgcatgttcttaactataataagcggcacctatgaggtacacgcgggacaaaaaagaaggctcgatttgagccgatgcatcgaggttctcctgttgccccaaatccaaatctcacatctcacaatcctcaaatcaccaaatcaaacaagaaggattcctgtacgaacaacaattaagataaaataaagaattgacgccgaaaaggacaccagagtcgttcctagccgctcagccgaccgccgccttgccttgctcttccctcccctgtcccttggctgcatgcactactgcactcgtactctatagatttctcgtttggcgacgagtggtaatgggcacggcggcggcaacagcaacagcagcaggtgaagacaatgacgaggccaaggagacgtactgcagaagtaggtaggaggaggcggatgcggtgggtgggagtggggcggcagggagcagttgaagaagatccatcggcccccaacctccacgtcggctagatctagtggcccacacctccacaccggcggccatagaggagaagtggaggggttttgtagtagcgatgtaacttcgtatgaaggagtgatgattttttttatgaaatagtattgctcccatttctatatgaaggttctcttaagaaactgcaattaaaaaacaaattttgtactccttttcttaagagaacaaccagcaagaatcgtttttcattggcacttttcttaaaaaacaatgattttcacaagtcctttcttatgaataacatctcaaagtagtgacagttattgaggggtgaaagggtaaaacaacaccttagaaatgtttatatttgtgtctatttgtaggaatgtatgcatttctaaacggatggggtagacaccatgtttgataaaccctgagctccactcgagacactcacggctatgattggcctgatctttcggtgaattgaagataactacgatttgggagaaatgttgacgacctgactacacccatacgagacgttgttgtgttgtgcctaaacgattaatacacctctccgtgggttgttgatcttgccggtgcagatcaaccttatccccacaagcaaatcaaagaaacgaccaagaccaagataaatcaatctaaatggcaaatataaattgaatacaaatgaaaagttggggttccgtaatgagcaaaccggtgatctaaccaatcacggattacacgacaaagtagcggagctaaactttaatctaaacaaaacccaagaaaccctgaagggacctatctatttaaggaggtgggaggacgaccaaggggtctttagggtcgtgctccgcctggttggggcgcaccccacatgagtcccacttgggcctggtcccagatgaagttacaagcccatagacccattcttggtgatgcaatacattgtttctgtgattgtggatgactgggatgaaatttggtgatgaggccagatctgttggaaagagaattccaagatgtttctatcaaatactcatagacccaaaatggagcacgtatgtacacttggcagccgtttaaaatcaacacggtagcaggtggctgaattagaatctaaaacttggtcaaatgatcttgatatgagcaacggttgtattaatagtttgcatggtcacatcaatgttatacgacaccttgttgaaataatatacaatttctctagaaaatatatatgtagtgtaaactacatatatagtagaaacagctgaaaacagccgttagatcgtaaaatagatgtatgagatttggaataaaagttttacttttgatgtcgtcgacaaatctcatatatccatttttttatctaacggtactttctaagtctcctctgtatgtgatttgcacggtacattttcactagctgctcgggctagtacagtgcatctttaagtaccatataagaaatttgtatgcgtggacttcggatgtttgttgtacattcagaccctttttttctatatttgctctgcagtatgatagaagatgctgaaaagaggggctcgatttcacccggagatacactaatcgaggcaacaagtggtaaccttgggattggtttggccgctgttgctattcagaaaggttacaaatttattgctgtaatccctaatagctatccacctgataagcagaagttaataaagtatttgggcgccgaagtaagaataactggtaagtgttaaatacgtacatatacatgcttgcagtatgacgatcactacggctggttggtacctttctgcctgtgccttagctacatcaaaacttttctagatcatattattatcttttactagataaatacatgggctttgttatggatagatatgaattatacatgacctagcattatttggaacaattgattgtaaggtttttagaacaattcatccctatagatgtctttgcatgatgaactgtattttaaagatgaaataatgttgaaccaatatatatgactatttgtaatataaaaggagtagttagtaaaacaaattaaatagagtttgtgaagatggtagattaaccaccaccaccattacattctttttagaataatatagatatagataatggtggtgtgatcctttcgaggttgctccatttcttaaaaacaacaacaacaactacctctagccacaaataaatgatattttagagagtaatttagtcaccaagacattgttttaattgttaattactagtataaaatctataaaaaatatagcaaagtcataatattttagaactactaaagacaaatntaatcaatgcaacaggacctgcttaggaggtctttacctatcacaggtatttacacctaattaatcccatgtttataaagattttggggagtttaaaaagcatggcacgtaaatgttgacattggatcaacaagggtgtttacaaatctctataaatatgttagtttaaacctagccat

SEQ ID NO: 13203 - DNA, 3389 bp, Oryza sativa
taattatagattaattaggcttaaaaaatttgtctcgcgaattagctttcatttatgtaattagttttgtaagtagtttatatttaacactctaaattagtgtctaaatacagggactaaagttaagtccctgatccaaacaccaccttagtactgtcagtattgcttgtggcgtacgtctctgctgggggaaaatcgttaataggaaatggaagttgaggggtggtaaaggttgttgtctattgtttgggtagtgagcgtgaaattatgttttagcagggattaggaattaataaagtttaatatatagtagcaaactcacctttttaatacatgggtagatacaaataaatggaaggaaattctcctgctaagaataacgaactccttataattcttatctctactaataccaagcaagggatgtggagaaaaataaaactccctcacaaccaatccctaccaaactcctaatccacttctcgtgccaaacaagctaaccgttggacaaatgtcctagctagtaaggccagtcacaatgggtgtttcatttgagtgtcatgcgcatttaatacagtgacaagtcagcaaaagagcaatatttgcatgaaatgggtaggagagagagtaaactcgtttcaccatggtgacacgagatagcgccgtttcccaggtcgctgaaacggggtgaaacagcattgagagttcatcgtttcacctccgggatcccgtgcgagcgctgctcttcgccatcttcgcgcgcatcgccggattcttcccgcgcgagtcccccatcttcccgcgcagcacctccatgttcccgcccccaaagcactggctcgaagctttttccccaatctcacctgcaaccctagcgccagactcagtccccatcgccccgtccgtcccataccctagcgcaagaaccacgagcggagattgcggagctggatccacaagtaggtggtgaatcctgtccatctgccgccgtccgccgtccagcagccatggatccacaaggaggtggtggatcccgtctgagcgccgccggcagaggagggaataagcgtgggggcaagcagctgggcctgaagaggtcgtcggcgcctgctccatcaccggcaacagctcagccaccgctgcctgcaagttcccctcctgaagctccatcgccggcaacagttcagccgcctactccatcgtcaagtcctgctgttgctgcccccagttcatcccctgctgtaccgatgtcaaccatgcccccatggccaccgcaaggagcaggatggggctctgtaccccccaattttgcttttctgcaaggaaaccaacaaggcccaagttcatggtattttctccttgtcacagattattcactgtacactatgatacatgatatgactctcttcttcatgcattagtaattagttcctgtttatgctcaatgaaatttgttagaatcagtatgtcagtacattggtaatttgatatatgcctgagtaatgaatagaaaaaatgtagtattcagtatggattgcagtaatactttgttagtgaaaattcagtattcagtatgcagtatggattgcggcttgtataacagaaattgaaagcaaaagattcagtttgcaatctggacagtgtactgtacaacatgtaattcacatacgtaaagcttgttaaatatctccttgtcagtacattggtaacaaatgctttgagtgtaaatgccaagggtatcatcctaacattggtatatatttttagccttctgtatggaatgcagacatggtcttctttgcaaccacagcaacagcttgccctacactctgtgctgtcgtcatagctaaccaaataacctgttagtactgatatatatggtcttctttgcaaccacagcaacagcttgccctacatggtcttctgtatgcttgactaaacttgttacttgacatatatgcttgactgaacttgttgcttgactgaattattccttacacatactgtagtacttgcttgactgaactatgtcaggatcttattaaaaaaaatctatgtcagcactgctactatgtcaggatcatcagtatgatgcttaagtaacctgttagtatgtcagtacttactatgtcaggatcatcttctggaacttactatgtttgattttcttatgctgccatcggtttcaattggatttgcttcttatgttttcaggttgtatcctacagaaggcttcgtaaattttctccaacagaactgtctgccgcagccacaagaaggtgaaaattttcaccttgttggtcagactaccaacacaatgtctactccaccaccaacaccccaagctgcagctaacaatacagtccaaattgatattcatgaagatgcaatcaatgatgcaagtgctaaaaagagaagtttgagatattggactcatgatgaggaagagagattggctagtgcttggttgaatgcttctaaagatcccattcatgggaatgaaaagaaaggtgatacgttttggaaagaggttactgatgagttcaacagaaaagggaatgggaagcgtacaagggaaataaatcaattgaaggttcattggtcacgcctcaaatcatcgattggagaattcaatgattactggactaaggtaactcaaatgaatacaagcggatatgacgatgacatgctggagaaggaggcacaacagatgtatgcaaatacatttggaaagccttttgcacttgtgcattggtggaagatactgagaaaagagcccaagtggtgtgcaatgattgagaaggacaaaaacaaggctgaagtggttgatattccagatgaacaaaagcgtcccattggtagagaagcagcacaagccgagcgcaatggaaaacgcaagaaggacagtatgtcagaaggaattgtcatcctaggggacaatattgaaaaaattatcaaagtgacgcaagatcggaagctggagcgtgagaaggtcactgaagcacagattcacatttcaaacgtaaatttgaaggcagcagaacagcaaaaagaagcaaagatgtttgaggtatacaattccctgctcactcaagatacaagtaacatgtctgaagaacagaaggctcgccgagacaaggcattacaaaagctggaggaaaagttatttgctgactaaggttagatatctaatctaatctgagctgcactattatttataataattaaagaatgctgcaatatttagttatattgtctgtatatctgtgctgcactatgcagtcagctgcatatcacgaatttgtcaaatctgagctgcatatctgtgaatggtgcaatatttagttatattaattacccagtgtgaatgatgtattgctgtcagtttc

SEQ ID NO: 13204 - DNA, 3340 bp, Oryza sativa
  unsure (1)..(3340): unsure at all n locations
taatattttgtaattagaaatctgatctatataaacattaaattgttcacttatttaagcatcccaccttgtatgactacatcaaatacagtccacacacacctcaacaaacaatataagattcaagcaagtaaaacaagtagaaaaacaacataagattctaaagcaaacacctcaacaaacatacagttatcaactgtaggactcttgcaacaacttaatcaagttgatgttcaaatcggcagaatctgtgggattgatgggtacagtaccatcatcaccacctctcctcgcggatcgtttgttgtaagcagacactgatactactacaaaatggcaaaacaccaatccttagtgtctaacggttttataagtcaatttttgagatttagctttgaagccataatccattatcagtggcttgcactaatctcttatgattcatgaacaaggatagttggagattaatgaggatgtgaatggtcaaatatatatatataatacacatcccatactagacaatatagttggccatgtgggccgcccggcacggcacggcccaggcccggccgtgcctgggccgaggcttgtcgggccgacacggcccgaccgacgcaccgggccgtgccgtgccagcccacgtgccgcactcacggcccaggcacggcccaacacgcctcgggccgtgccgggccggcccgaaggcacgatgggccgtcgtgcttttcctcacaataagtctaaatttcctccctcctattgggctgtgacatatgtacagctacaaaaagtctattttacctccctcttctttgggctggggtatataaatagctaaaataagtctatttaaggtccctattctttagacagttacatttatatgtctatttttagtccccatactttatgtaccgggcctggcctgccggcccatcgtgccgggccggcccgaccatgccgggccagcccagcgtgccggtggggaggcccaggcacggcccgacggtcgggccgggccagcacgggcccgacccaagtcgggccgtgccgtgcttgggccgggccaaaaaggcgtgccgtgggccgggccttcgggcctcgggccttatggccaactatactagacaagaaagatcggtctctcagatcgatggtatagctacgtagtcttgcgcaaagatctagacatgaccatttaaagcacctaacaaatagcttgatcttaatgacgaatcattacccattgattttaccctctattctcaccaagtttaatagtagagttaactatgagcttatagctcatattaaagttaacatgtataatagataagctataagtttatcaatatctttttcttttctctctgtctctcacctatgcatttaatgtttcatcttgaagtatgtgaatagcttgctcttgcatgagagcttttaaattctttctcctccacataaccttatagttggcttatagtgtattaaacttgctctaaggttgtatcaattaaccgataagatagctcttacaaacatttggatattttctttgtaggagtacgaaaagcttaaaacatttcttacatataccagctaaagttgagcatgtttttggttgcattgatcgtatggacttctcttttcaattttatgcagaaggtccatataggaatatggagaaaaaggtggaggaacttaaaaaaagtataaaaaattcttataatcttgatcagatggtcaatgaagcaaacgtagaggcacattataagtggacaggtattcccttcgaaaacctactccttttattcacagtacgttgtagttgtggttttttgcttagtttttctaattaattgtgtattgtaaggcttagtcccatttctcctaaaataagacaccttcttcttataaaaaatacgtcggcaacgactggcctaaaaaaatttatgattggattataaaaatattacaacacanattcgatagtaataagatatatatataccaccaacaacaaaacaccggcaaactgatggttatatctctcttttggaaacaggacctgaaatttggaaagatacagcaggcaaagtggatatttttgtgacgtctgtcggttcagggggcacattagcaggagtaggaaagtacctaaaggagaaaaaccaatctataaggatagtcgccgtggaacctgcggaaagccccgtactgtcaggtaattctatgtacgcatagataacatatttttttctctcccctttctagtaatatataaataaatggcatttaccctaatacaaaatcaccacaactaagtagcagtttaatttggctctgtttaggtggcaaagccagcaagcacaggatcagggcataggggtgggttttgaaacagaaattttgaaggcacataaacctattattacctatgaagtgaagacaatatatagtgaggatgccataacaaaagcgaggatgctggccagggaggaggggttgcttgttggtatttctgctggcgcaaatatagctgtttgcttggaggtaaatgctcccgatcaactctgttctttttcacttgtcttttattatgtcggcatggtctccaatatgtgaagttacttctctatatgtgtgaagttacttctcttttntttactatatggtctccaatgtgtgaagtacttctctacatgttcattgaagtaaatgctcccgatcaactctgttcctttttacttctcttttattacatataccagctaaagtttgcaccaacgatgatgtttcttatttcccctaatgaaggatgctcccaatcaacgttacactcctaattttacttaccaatacataccttatattatttgtaataatatgatcaacactcccctgttctaaattatttgtcgttttagttttgtactaaatcatgtgttccaaagtttagcaattagtttctaaaaattcatatagttgaacaacatgtgagctatatactagtatgaaagtatttcttatggtaagttcaaaaatatgaatattatgatgataaactatataaattctagaaaataaaagtcaaagttagaaatatttgacttcatacaaagctaagacaataaataacttgaaacagatatggagtaaataaaactgttcatgtggaccatgcgtccatgcctatctatgtactacttgtggatcgatcttatgaatattcgtggatgacacagcttgcggcgaaagaggagaacaaggggaagatgatcgtcaccatgctcccaagcggcgccgacagatacctaagctccgatctcttcaagtactg

SEQ ID NO: 13205 - DNA, 644 bp, Oryza sativa
tctatactctatagcagtgatgaattaagtggaaaaatcatgaagtggtattagccatcaaagcacaattgaaatgcacccgcagctaactggagggactaagctttcccaatcaaattcaaacaaaactagtatgagatgagatgatggatttggcatggggaacaatacctggttggcgagggagagggagtggtactgcatgcgcgggctgcgcccaatgtctcctaaaactactgccgctgcgcgcctcctcctccctgcctccactgccgtggccattgccactggccttcggagtttggaaatttcggacccgctcgcaaaaagtgcagataagttgaagggcctatttggtgcagctccaaatcctatatctagatccaccaaggatctgaaggttcctgaaaaggcatttagctaaacattagctccaaaaagtcctggaagggaggagtggatgaaaatgggcaattgtactcttggttattttgctgtttaccatatttatactcaattagagaatatgtttgtcaaatttgtttggaaatttcgcacaaatacaacagtgatcttttttctctaaaaattgtcaacagcacaagaacgtacagatgaaatatatcttagcgatcttatactca

SEQ ID NO: 13206 - DNA, 3647 bp, Oryza sativa
taatcatgttttatcatccaacaacaatgaaaatacgaattataaaaaaatttcatataagacggacaggcaaagttggacacgggaaacccatggtttgcctttttttaggacggagggagtacgcatgaatcttaacgtactcttaactattaaaaaaagtgactaaggctgtgtttagatcctggggtgaaaagatttggcgtgtcacatcggatatacggacacacatttgaagtattaaacatagactaataacaaaacaaattacagattgaatttattaagcctaattaatccgtcattagcaatatttactgtagcactacattgtcaaatcatggagcaattaggcttgaaagatttgtctcgcaatttacaagcaatttgtgtaattagttatttttttcgtttatatttaatactccatacatgtgtccaaacattcaatgtgatagggtgaaaaatttcaccaggggatctaaacagaccctaaaatttaagggtttttagttgcttgaaaactagacagcccaggtaacaacatgatgtttggtttgtcgaaccaggttgtgatgggccatcggtccagcctcgttccggatgaggtgaggtgatccactagttttgctcaaacgatgcaatcactatagctaggaaggatgactcgaagacggttaatacgagatgtcaggatgcaaacacaagtcagcaccagagacgaggcatcccatacaaatcatgagattgtatgatcaagcaatttactcttaacgagtggtttctaaatacaaaccaactcgataggattaaaataagagtgtaagtgggtcaacccacgaacccatttatagattaaatacgacaggttttagagaaatgggaaccaaggtccctatcacctgctgcatgaggtgcccatggacacattatcacgatactgtaactcatgtcgctatcaaccaaattcaagggactattgagatacatctaaagaggaacgctccaagagctccaggcgcaacctcttgtgggttgtgctcggggtgcatctgccataagcccccaaagcacagcccctcatgggttgtgcttggagtacaccttcaatttgcccctgagtacggccccccgcgggttgtactcggggcacatctacagccggcagccaagtacgacccctcatgggatgtgctcggggtacatctgcctccgcgctcgaccgccgagtgcctagaggagcatatatgcatggaccctacgaagcctcgcattgaatgcgaggcggtgtataccaacccggcgtgcgactgggataacacgtgataacacaacacgcgccaaccctgtgaaaagcctttatcacccctatgcggaaaggtgtgggctgtcaggtggcacggttgactgccataccacgtgtcgggcccacagtcatccagcactctcttccagccactggcgtggcctgacgaccaggctcactcgtcaagaagcaacaagaccaaacacatctaacccctgtcctggggcccatttgtaagaaacaggtcattgtatatccccttgcaactagaggtggaccaaggccactgaaaaaggggttgaactcctgagtagagccgatcttagaacatcttcatcatctccacaacgtccacactccacaccagagaaatcagctccctagaattagaacaaaggtataccaacatcttggaaacattccaacaaagaactcaaccaagaatataggagtagggtattacacctacgtgcgatccaaacttatttaaagttttaaaaccatcgcctctctagtttgtcgtcctcgtttcatccgcccgacaccatcgcctcatttccgcacacctattccctggccgagtctctaaagagggtgtgagtcctccctgctagaggagctcaggctccaacagtaggttatccacttatttaatttatgagtggggttcaccggttatcccacttacacctctagttaatagccattataagcccgaagacatggagcacgtcgccgttgcggtcatcggcagcagtgtggcagccaagcatgaccttggagttccagtagccgggccgccggggcaggggacccttgacctcccatgatcgtccttggcatgcatctggggactggaggtgggtccaacactcgccgacctttcggtgtcggtgttggttgtcaggaattccctccgctctcacatagtgaatcacaaaccaactgaaggttttttttttttttcagaatgggtacaggaaactggagaaaggttcagagagcagaggaaacagagttcggttctgcgtacagcttgttcaacaatttcgtttttcaccattatttatcccatccacaatctggagtctgttgcatgtaaacactagatctgcacattacgtcaatcatacaacgggaatcaagatgaggcactaaaactggaaaaaaaaaaacgctaacttaaacttgagcactaccgctagagtccgcctgaaccggtcatctctgaacatgcagcctatcaaacagaagactaacgccatgtttctttcagcttgggattattataatccagattattgggagtaaactgaaagaaacagacaacttattgaagtagcttattataatctggagcccagcttattataatctgataagctcatttaggtgagcttttttcagattattgggtgaaaaattacccaccatgccaccccactctctctttagacatgcaaacccaataatctaggctctaataatataggaaagaaacagctacccgcttattctagtacagattataacaatctagcttatagtaatctgactcaataatctagattataataatcccaagctgaaagaaacagggcctaaccaaaacatcaaaaataaaatttgcgcacaagattactgaagataagctatcaaattcaccccttgatcttggtgcgcctgaacctatatcagcccttcttcctcatctcctgagagcaggtacaatagcatgttataagtcagctacaaacatattttaaggagataaataaggagagagaagagcagcggctacagatttatagtcagctgtagcacggactccaagacgcagtatatgtatgacaggtgggaccaggtattaataatgtattatgtaactattgtatgaataagctattagatttatgaattggagctagtagttggctatactattaaacttgctcagaaaacgaactttgcccaatggctttgtcagaatgtcagtaagctcgtcctctgaacagatgtgctcaacacactccccgatgaaatggtagcgagtatttttgtgttctacatctatcatgaagcactgaattcttacaaagatcttacagagtagttataaattttcagaacatcacaactaggatcttcaggcatcagctctcccacagcaacctactgagccaaattccttgataagctgcagtgatggcagcaatgtattagcctcacatgaaaataatgccaccaccttctgtttctgttctccaacatgaacaaaacacctgccgtgctcttactgtcgcttgcatctccagccatattacagtcactgaaaccccag

SEQ ID NO: 13207 - DNA, 4127 bp, Oryza sativa
ctggggcaaccaatgtgtgttctcttatactaccatgatgtcatgaacaggcaacaagcccaaacaaatagatagccctgctgagaacatgtaccataaaacagatcatcagaagcaaattaactcgccgcaaggtaacaagcatcatcgctccgtttcaccatcgcctgttgatcatcttgccaagcttaactcgccacaatgcagagtgtacattactactggtgtcccagtgttgtagctgaacatcataagcacacagttctcctgacatgtgtggactctgtatacttttcattctgcatgtcagcaatgctgtttagatataatgtcgagctagatgtaaatgaatgtaccaccctgaaaatacaacttgcgttggaagttcgaatgagcggaaggctcacctagagagagaatatgggtacatgtatagaacaaacagcaaaacctggtatttaacctgttataatgtcagatgcccagccataattgtgtattaacgttgctggaaagaagaataaagcaacatcgttctgttctgatctcaagcatttgttttgtgtttgggtgattcacatgatatttgtctttttgttatttctgaactaagttgagtttgaacttgagatttggtgagaacgtatttcatatggatatctatctctagtattttttttcatgaatttacaaaaacttttaggtatgatttttacgagtttttaacacttagctcgttttcactggataatggcttgagttacatttacacatgaatgtactaccatgtttaatacaatttgcgttggaattcagttcgagacagaatgggtacagatatagaaccgacagctaaacctggtatttaaccgattatggtgtcagatgccataattgtgtgctaacgtttctggaaagaataataaagcatctctcacttctgatctgaagcaatgttgttgtatattctgatcacttttatgcaacgatgtataattctctgatacttcgaaacaccatttgtgtgattataaacttgtcactgaggcagtcttcctcttcttttgtattgttttgcctggtggtatactcttaatttgcctcatgaaataaaaaagaagaaaacatgacttggattttcatggactcaaggttgggacgaaaacaaggcaaccagttcgttaaacgcaaggagggagcatcttaaaatcctggagaaagatgctaaagaaacatcatattcaaatccagaggcttaatttactacgtactgataatttgctcacatttctgtaccctctcactttcagaccaggtaggcggcatacaatgaacttgcaacagaactgaacgtacagcatttggagactaattacaccgtgagaaaaacacttattgtagcatgatcacactcacattgccatcctaccttacaacagattactgcagccgagctgcatatggaggagatcaggagaagaaaacacaaacacttatctgaatctttttcttcataaacttattttaatctcttgacaactctgatgataagtgatatctgaataataatctgatgagtagtgatcagtgatcaccaccaattcatcatcatcatcatcagcagcagcagcaggcagcagcatgagcttattaccaccagccgtccaccacgcgggtgcacttgcccttgatccaccgcatgctgctctggagcgacaccttcaccttcccctccacgccgtacacccggtagccggccaccctccgccgccgctgcatctccgccgcgtcgccgagcccgccccacaccctccccttcgacgccgacgtcgacgccgacgccgacgacgatggccaggtggccgccgccttcttcttcttgatcttgctcgccttgccgctgccggcatcgtcgtaccagagaggaggaggaggaggagcagagtacgtcgaggtgacgtagtaggcgctgtggcacctcaagtcgccggcgccggcgccggccaccgtggcggcgctcctgctcttctcggtgtaggaggctgacctctccattggtgaaatgcaaatatgcaatggtggtgtggtagctgagagtttgtttgttgcaggaactaaccaggccaactggccaagaatgcatggatgaactgaatggagggctttgctcttaaatttgtagagggagactgcttttttttttctttttcatttttgtgaattaatgggaaacagtggaggtttagaataaggtaattttaccgtcctttagatggtatcagaaaataccacattttctagcgtaaattttggtacctttagatactaaggatcttgaggtaaaaaaaaaattagtgtcaaatttagatacctcgatactttttcaagaaccgtaaaatttctcttagaggaaatgtggttttgctttggccattgggtactgacttttgaacatacaagatatagcttgtcctaattttgtactacagcatttataagatattggcatgtttgttgagtgggaaatttatgataaactgttcaaaaatttagggaaaatgcaccccacctctccagaagggcatgcggttgtttcttcctcccatcacagatgcttgttgatttggacatacattttcggttaatttttcaaacttggagtattattttttaaaatttttattttggattcatggagataatattcacagatttgtcgtaaaagtactaaaatgggtagtttttctacctttaaaaattttacaaaaaaataaattattgaacaaagtaatattttgagattatatgtccaagactagaatagaagtattaatgtatacaacaagtaggaaaagccatctcattaccaacccatacatggcttgtttggtttataaccaaacttgaccaagtaaaagaaaaaggccaaaatataagtatttatagtaaaatgttggaatggccaattaattgccccggcccgaatagccccaaatgaaggcatagctattttttgtttataacttttgacaatagccagttctcttcattgcccattttttttggcaaggttaaaaatggaaatgaactaaacaaacccaatctggtcagtccctgcacggctgtttcaagtccgctactctgttgcctacatcttgggctagtaacaaccgtgccttaattcctggcttgaccggtaatgctacaagcctaaacaaatctactacagatatgttaatccccccatcccaaaatataaagaaattaaagagatgtgatacattctaatattactaatctttaatgttaggacgtttcacggtcctccaaaatctcttatattttgggacaaatgaagtatatcttatactaaatttactattaaatttgtagtattaaaatatatcatattttatactcacttcgtattttaatgtatgacgccgttgactttttaattaatgtttgaccattcgtcttattaaaagattttatgcaaatatacaaatatttatgtcatgcttaaaaaatatttgatgataaattaagtcacaataaaataaatgttaattacatatttttttaaataagatgaataatcaaacgttgataaaaaaataacgtcatacattaaaatatgatatggaggtgatattatatttgtttattttagaatagaggaagacaagctgagaaagagcaagcaaatatgctgcatgttgaagcatccgatcatttaagatactcctacttttcgtggtcgcatgaatgcctgctttttagggacgaaagcaactttgcgttttggtctttcctctcgacagtgacactggcgcgaaaatgttgggtatgcatactcgaaggactgtcggcaccgtcgcaccgatcaaaatcccgtcaggaaacttcgattattgtactaggtcttgtcttgtactcccaccaacttctaaatataaaatgttctaggttatttaagcaaacattaggattatgaacgatggattaaattttgaattgattaggtaccctgtatatcttattggctgaaaatacatgagtttgtgtgcaacatcgatttatgtgtgatggattcgctacgctagaaatacttatgttgtataaat

SEQ ID NO: 13208 - DNA, 3751 bp, Oryza sativa
ggcgaacccgacgacgccctccgcctgcgggcccgcgccgccgccgccgccggtgacgctcccgctccgcagcagcagcaggagcagaggcatcaggagcagcagcagcagctgctctggtaccgcgcgtcggcgcccgcccaccgccgcgtcagggagagccccctcagctccgacgccatcttccgccaggtaaagcacacgattcctcctcctctccttccccccgctgatctccatcgatcgatgcggcggcgttcgtggaagctccaccaaaaataaaagagttggaattactgtgccctctgctagttcatcaacccatgatttttgttctactaataagaaaaaataataattagttttcaaattgttattagccgtttccttgtcggttagcatctcgcctgccgcctgccgtgctcagatgtgaagttcagcctgccgcggtgctcccgaatcgtggctagattttcgattcacgtctgtgtgtgcttgggacgggcacaatttgtttcgtggtgatatatgctgctgcggattcgggttgccatcgttgctcgttttggggatcatggggggaaccagcggccgggcgccggacgcatgcgttgcacaatttcgcggtggccggcagtgcagagacgacagcgatgtccgaggataaactgttgctgttagcatttacgagtagcagggtttggcctttggcgtgtcagagtgaaacagtgaatgaccaaacaatgaatgggtcacttggcacgcaaggcttgtacacattaaaagacttggtactcgggttggttgtacagactacagactatgagttattgttgggaatgttacttcagatacagagcttccattgaaggccagcaaaatcttgaatttatgcgatgttggacatgtggctcccctgttcagagtggtccatataactgtgtgtagtgtggccttgtggccttgtcttctccagttcggggcatgccttgcttgtgcatgaggtccatataactgtgtgtgttgtcggctgctgttttttagttggatagcccctttccaccaggcattaaggcatgctacttggcaccgatatgattctttacatttgctactctaggatgtcagtgtgctgcaatgttggcacagtattggggcaacattatttaatgaaatttccttgtaagattggtggtgggaactgggaaatgatctgagccgaacactaggtccatacccgttgatctggttttacgcaaaactttgtatgcatgcttgcataaatctgaagatttgagttttaagactggcattccttttaatttagatatattcttgcaaatcaaatcatttttttcttttacctgacaaaacaacattacataacttaacccatgataaaacatttattaggatattagtaaattggatgtcaacttttattactctttcttatagctgacagctaatcttttttgttttttgttttttttgtagagccatgcaggccttctgaacctatgcattgttgtgctggttgctgtgaacagcagacttattattgagaatttaatgaaggttcattatcatttcttgctctctttattttccccagggagtagtagcatttacttattatatgcttttctcgacatgcctcttgtctattatagttctgatttaactcattctcattatctgtatttgccgctgcagtatggcctactaattagagctggattttggtttagtggaacatcgctggcagattggcctcttctcatgtgctggtagatatctactgacctaattctaatttgagatttgataaacagttgtacacctcctaaaacaatagatctgcaaattacagtctcactttaccaactttcccgcttgctgcacttatggttgagaagttggctcaaagaaaacttattagtaaacatgtaagtttgttttactttgttagtagttctttatatttttattgtcttttcattcaaggctccttcactattgatgtatcgtgtatgtaagttcatgccaaaagaattgcctgttgatttactgtttcaagtgccagtagacagttcatgattttggtacacctcttgcaggtggttattcttctccatatcgttattacaacatctgtccttgtctatccagttgttgtgattctaaagtaagcatatttcttttgactttgcagtttgtttgaatgcatctacttttgacattcgttgatctcttatatttgatggtatgggatacactcattttttgtcgtattcagagatatgctgtatttatgtggtatgagtgcaaaattaattcaggtttttcagtttcaaactttttaagagtaattttcactaatgtatatttgttacttaaaagatgactcatgcaactcttatctttggttatgtttgatgttatacgatatatctagtccacaaaatgttagttttcagtttgagtaaaacaatcagagtcatatggataatttgattccgtcttggaatcttaaagcccatttctttttaatagtcatcaactattaaataaaagtaaatcttattagttccaaattcttagaactaacctgagagatatcagcgcagtcctaccaccctgaagttgcatgtatgtggcaatgttgtgcaaatcgcatttcataatcttagattcagattaagtcatccttatttgtcaaacagaggcagttgagggcagaagtaacaagtacatgtcgcctttttgttgattgtaaagagattagatagttcttatatacttatctattttggcttcatgcattgatataccaagaaatgttgtttatgaagatattgttcttgcataaatctggattcttagttcatttacatttcaatctttcaggtgtgattcggcagtattatctggatttgtgttgatgtttcttgcaagcattatttggttgaagcttgtttcttttgctcatacaaattatgatataagaatgctgtccaaaagtattgaaaaggtaaagcataggtatatgcttgtatgtttcatttttcatggtttctgttcaaatcgttgattccgaacatagagaataatgcaaagcaatttccaaagcagtgtagattttacggatgtcagcaatggactgctagccagtagacttttgttgtattccttctacaaagactagttcaagctgtacttcctgtttaaacttgtttctagcgttcatccctgacaatatttgaattgcttgtgtagtgcaaattttatagcttagagctcttcactcacttctatcattgtggctatgattatttaataataccatattttattcttatacaatagggcgtgacacatgacatttctatagatccggagaacattaaatggccaacctttaaaaggctatcctacttcatgttggccccaacactttgttaccaggtactgttctttgccttagacctttggttcttactttctaaattctaactttgcatgatccattctttttgtcacatatatttacatttaactaaaaataaacttttccttatttcattcttgttcactatgcagccaagttatccccgaactacatatattagaaaaggttgggtggtccgacaactgataaaatgccttgtttttacaggcttgatgggttttataattgagcaagtgagcctctttacatgatttctcatggtatttcatttacatagct

SEQ ID NO: 13209 - DNA, 1004 bp, Oryza sativa
cccccgtgcgctatcgtcgtcgccgccgccacgacgcctcagcgcatggccgcctcccccgcgagtccctctactgggccgcctcctcgtcgccatcgtcgtcgaccccccactccctccgcacctactgcctcctcgtccacctcctctcccgcaccgccggatgccgccgccgctcctctcgctgtccccgcacgccaccggccgaaggggaagaaggggagagaaagagagagaagggagagagggaggaggaagaaggactgacatgtgggccccacatgtcagtgggcccacatttctttttgtgtgaatgactaatgggtcccacgcatattttttatttctaccgccacgtaggtgccacgtggaacgaagactcggtcaatattgccacgtaggcgccacgtaggtgccatgtggaacgaagactcggtcaatattgccacgtaggcgccacgtcagcaaaaccgcctcccaaaaccgcccagggagtcaaattgcaccggttttgtaagtttggggagtcaagatttctggtattacggttgagggatacgatttagattcggtggtcagttgagggagtcaaagtgatcttattcctccgaacttaacagctcaagcttaattctgggccaaattcaccagccttgctctggtgcccggcagcccggcccaacaatggaatccgaccgatgattctggtcgctcgctgcttcgcttgctcgcgggcctcgcggccacatccatcaaaccacgggaaagatccggccgcgcgctccttttctagcgcacgttagaagcttccaaagaaaaaaaaatcccacgcctccaaacgcccaaaatgcatctcccctcgccttcctctagtaccttccagaatgttccgtttccctcctataaattacaaaatcccaccttcttctcccgccaaaagcacgccgatggactactcgacggtgaagcacgaggaggtggaggtggtggtgctggatggagag

SEQ ID NO: 13210 - DNA, 553 bp, Oryza sativa
cggcgggaggagggagacgggaccgacaggtgggccccacctgtcggcgaccccgagaggagggaggcgggcggccggctattgggctgggcctcggcctgcggccggcccagcaaggaggaggggggggagaaaaaggaaatgggccgacggcccatttcgcaaaaaggaggaaaaagaggggaaaaagaaaaagaaaaagaaaaaggaatttccctggaattaaaattgcacttgctccattttaattggttaaaattatttctagagctctgaaaattccactaaaaatcctgttaatgaatttcgacatgtagaactcaagaaaaattccacatgtcaaatccgattattaattgcattattttcttagggttttctcctgatttcaccaacattttcttagggtcatttataaaattaaaatttggctagggaggaaaacttcggggtgtgacagccggggagccgtcgccggaggggagccgtccacgtcaccgccgccgctgctgccctcccccggcctccctccagccggatctgggaagggagg

SEQ ID NO: 13211 - DNA, 722 bp, Oryza sativa
atattactaaaagtgttaccttgcatgccactttatcaccaacagacaatgccttggaaccttttgtaaatgagcccatatgcagcacatacccagcaaatacttgaacattagttacattgaaagatccgaaagacccttcaattttcccagtgtcatatatctgatgcaagaaaaatcttgtcatgtttataatgtacggaacagtgactagcatacactgtgttgtttattattactaatgttcaattagaaatttatttgggaaaatatattgtatatttgcatgtgctcttaacaccaccaaatcacaatagctgaaaaatcattggaagatgtactaggatgaaatatcaggcataagcaaaagaatattgcaggattgggacagggtgtacaggttgctgttaagtactacctccgtcttagaacttatgggattttgcccatataatccctcatattctcagacagaggtagtacaagtgaaggactacagctgattgttaggacgacatacagttagactgcttcagattgaagggacaaagtagaacaaacaagtggggattaactacaagaggactactgcagctaattggcatgacatacaaatgaagaaacactgaagattacaacgataaagtaaaataaataacccaggaaccatattacaaccacatgagcattatatagtccacagtaagaatgttgtacctgac

SEQ ID NO: 13212 - DNA, 504 bp, Oryza sativa
gagaaggtgggtggcctgactcgtaggaactcaggcaacttggactgagggggagggggaccaaactgctggtgctgctgttcagcgtactgcatcatcctctggtgcatctgctggtgctgttgctgcatctgctgcatcatggctgccatcatctgagtctgatgcgccataacttgggcaagtgtcggattctcgggaagtggtggcggaccgttgccgggatcgccgttggggtgcataccatcaacgcgttcttcaccgttgctgccctcgcctgtcgtgcggttgccagtcctggtgttgaccatctggagggaagagcagacggggaaaagaagaaaaacagatactcaggaactaaactttattacaaaggaattaaaactgtaattgttctgatctgaattaaaaacacttaaaagagcaagcaaatatccttattaagacagtcatatcataggcacatgacatcgaccgtcgactgaccccaaacaagcaacc

SEQ ID NO: 13213 - DNA, 5608 bp, Oryza sativa
cttgagcaggagcagcagcaagccgccgacgccgacaaagaccgcctccgcacccgccgcggctgatcacgccaagaaggcaaacacggcggcggctggccacgtcaagacgccagcggcggcgccgaagacggcggcgtgcagcaagcgcaaggaggcgcccgcgccgccggagatggacgaggcgaagctggaggcggcgaggaagaagctgagggagcgttacacagaggaagagacggcgaagaggcagaggaagatacagatcatcaacaacgcgccggggaaggcgaagcagcgccccgccgtcgtcgagcagcggcggcgcgtggtccgggacacggtggtcgccgtggcgagccgtgctcctgtgcgttcctctctccggatgtaggtggtggtgtagttttagaatgaacatattattactcgggcactcagctctctgtactgtacatggttaatttatttcatcagttatctggaatttttcagagcaatgttggtggaaataaaactattcagttgtactccctccatactcataaaggaagtcgtttatgacaatgtttaagtcaaaccttgggaatataaatcatgaataactcttacgttgttgaatttgaaaatataaaagttatatgaagatgtcttgaaaaatactttcataaaaatatacatatatcatttttcaataaatatttttatagaaaaaagaagttaaagttgtgttttggagaccgtgtcgctgtcctaaacgacttcttttacgagtacggagggagtatgtaacaagtcaggttatatgaattaatagcaatgctgatgtaatgaataaagttcagttaatggtcaggtggctacactacacaacaccatgcatgcgagaaataagtatggaaagctttatcgcatcctgtttcagaagcaactcatgtgtgtattcagaagttcagagaatgtagtcttgcgattttgataaaacatgagcatgtctataactggttatttggctacaagaagagtaattttacagtccttgagagatatcgggaggtaccaacatttttagtttaagttataacacctcctcataccagagatactaaagttagactaaaaaatatgtacctcccgatacctcctcaataaccataaaatcactcaactaagaacgtgtaaatacgtggaactgatagtcagagccagagctcgagtgtgtctaccatttctttttggccatatcatgagcatgttcaggcctgaactattttgccataaccttggtatataatgtatgtctgcaagacaggatgacacatttggcaacctcgtaccagggttcaaaatttcgaatcgaaatttcggaaattttggccacccccgatacaaatgagcaaaccgaaacattaaaccctgcacggtactattcatgaacctatggattttatggtattttcccttaatttctaccttggaaaggttgagtctcggttatatttactctgatgataaatttagttttgtttctccaaatacttagaagctggcctctcaaaggctctggggcgacctatgtggtggtgtaattattgaaagaggtctggaacacagagtaataataatgtaatgaacaaaattcagctgtatgtatgaatcaggtggtgtgaactgatagcagtgcccatgtaatgaacaaagtttattaaagttcagttgtatgtggtttccgaaaatgctcatggtggtggctataacgagctcacgcgtgtgttcagaaattcagtgatcgtatgaacgagctcatgccttgagagaattaatgtacgtatgttctgcaaaaaaaaaaaaaaaaaaaaaaaaagaaaaactgggcacaactggttattaggccacaagcccacaacctgggcatgtattggctcaaatgctgggcatatggcctgggcatggaagcacatcattagccaacgctgtgtatgccatgtcgatgtgtatggctatctttgtggacggcaggtgccgagtaagacggcacgcaacagtaagcacaatgaagaatgacacacacgacaccaatataacataacatatggaacatctccgaattaagccactatgcacagataattaacataaagttacgagcacacgcattcggtataataacaagttaaatttgccattttgataaaccaatacgattaaatgtggcccgtacagaagcgtatcggtatttggtaacatcaatcaaccttttttgctttcacgtttcgacatgatataaaacttctgtaaggagcgaaattgttacaaagaagcatcaataggaaaaaaaaaagaacagatggaaactaggtatccaaaagttagaccagcttcattgaagctatctgggtagcaacctccatagcttcctttagttgagaggcctcagttccctgcattgcataaatttacatattttattgtgtgatataatcacaaatatttcacctcgggtacttatgtggaaaattcaagatttgaagggtacgattgctcacctggccctgggcaattccattcttgccaccacctccctttcctttgaggggcgcaatcgatggtgtcaaccaatccaacaccttcaagctgttagcagcgctgggaggcacaccagcataaatgactgccttattcgtggcttcatccgtgctgaatagcatgattggcaaatcctgtacaagacaaacccaaaagttcaacagcacatcctacacttgacaatggaaataaataatcttagaaatgcactctgttatagtagcacattttcccacttcagagtggttggcaccctagctaactagttatggacagcacctacatcattgatttgttcagcgcacctatgaggaattcacaactataacattgacatgagcaccaatttgtggtcgacattttagcaaagtagtagtggattttggctggggagacatgaaaaaaggaaacagtatcttgcatacagagtagaaaagaaaattctcctataaaacaaggcaagacgaagaaaaaggcattgaattcaaggctgtctctgctacgcattgttaaataatatagcatgtggggcacattgtaggaccattattataataggaagtaggaagtttgcatatagttgtctaatagatggcatatcaattcatttggataaacagccccatcgtttggcctaaacagccaaagaataagccaaaatttgaatttttgaacttgattttgaagttgattttgaaatgcttttaacgtaatttttgttaatgttggcttttaagtcgctacgaacaaatctacaaaagttttacttataaattaattttaattttctaataagccaaataagccattttgggtaaaatggcaaccgatgggagccaaagcatgttcttgcaacagtcagatgaaaacataagtcctgaccttctggtccttgactttgataactgcttcccgaatagcacttgtgtcaagacccacatctacatgagcaacacagaagcgctttccttcagaaagagcagtttgggcggcatctattgcaaacttcacggccttctggatgttctcctcgcccattttcttcttggccttcctaagttcatcctacaacatccaacagctgcaataagctccaaaatcaaccaataatggaataccaaatagccgaataccacatattgttctgttctttcaaggtaacagctcataaagaacatgtacagacctccaacttcgacacccggcctttaagatcagcttttcttgcagctggaattaaagctgtatcaagcttgctcttgatggaagcaatcgtctggtagaaacatcacttttagatggtgatccaatataaaatagatcagcagaaacaactccagtgcaatcaattttaactaccctttatccatataaagagtagaaaaataatatttctattggagaagacttacatcagagaatatttaatgaatatctagtgcattaagcaccaacaatgcaattgacaattgaaagatacaaacaagacaaaggcatataataccttttccaatatagctccctccaattttgatgcttcattgatttcagaatcaatagatgatgcatcctttatagcatcagaggcatgtttagcagtaacagctgtgatcctcctaacacctttagcaataccctcctcggacaacagggcaaatgcttctgcctcgctagtgtttttaatgtgtgtacctgatacagttaagtttaataaacataaccatgggaggtaatacattccagacagaagaaagtataccgccacacagctctgttgaaatggatagccattctttgctttcaggattggcaagtagatcttccactttgcgaccaactgatacaactcttaccggatcaggatagatctacaaatttcaacatgtgaaataaattacaggaaataatcaacaggcaaactttgtgtttcatcatgttatttcatgttttagccgactaacaaaacttacttcaccaaacacagctcgtagaccatttatgcgcttcgcatctgctaattttatttcacgtgcaaatacttccagtttgtcttttatctgttgattcactatagactcaattttccgcaaatcttctggctgaacaggtttccctgttacaaacaaacagttttgagttgcgtggctgagggaatacatgtgaagaaggataagataagaaccacataataccatgggagaaatcaaaccgtagcttctctgggagaacaattgaacctttctggtcaacatgatcaccaagtatttcctgcatttaaatggtggaatcatcatgagggtggaagataaaagtgcaaattttttcgataagcttaaattcaacatacccgtagagcaaagttcagcatatgggtacatgtatggtttggagcaatgagagcacggcgagcataatcaacctaccaatggcaacatgaacattcatatctgattaagcgaatatcagagatcaactaatttgatgtagagattgtattactaaaagtgttaccttgcatgccactttatcaccaacagacaatgccttggaaccttttgtaaatgagcccatatgcagcacatacccagcaaatacttgaacattagttacattgaaagatccgaaagacccttcaattttcccagtgtcatatatctgatgcaagaaaaatcttgtcatgtttataatgtacggaacagtgactagcatacactgtgttgtttattattactaatgttcaattagaaatttatttgggaaaatatattgtatatttgcatgtgctcttaacaccaccaaatcacaatagctgaaaaatcattggaagatgtactaggatgaaatatcaggcataagcaaaagaatattgcaggattgggacagggtgtacaggttgctgttaagtactacctccgtcttagaacttatgggattttgcccatataatccctcatattctcagacagaggtagtacaagtgaaggactacagctgattgttaggacgacatacagttagactg

SEQ ID NO: 13214 - DNA, 974 bp, Oryza sativa
ctgactatttagcgcaacatcaaacgcgggaccgatgactgacactatcccatagtacccatcgatcctgcaggccagttgcgcgccactgcgcgctcccatagagaggttgtgcgccactgccaaatacatgctgccatgcatgcatacgtcatgcaactgtccagcgtgagctgctgctggtcacgcgatgccggctgcgagatcgacgtgatctcgcacacccctagcgcggggtttatccggccaccagtgttagacttctcagtccttaatactattgtatttagctatcattgtattgttgggcttgattgtgtggtcttggcctagccagcccaaacctgagatgtataagatacccctccaggctggaaaggggatcattgagtaagaaatatcagaccaactacctatctcctcttccccctctgcgctgtttcttcctcttgcaactatgaaatctcgctgactcaaatcccccaaatccttgtgcggttcgccaggaacccagagttcgtaacaatttggtatcagagcacggtttgtgcacatcctggcaaaaaagaaatctcaacccacgttgacagagaggatgttggtggcggagggagagatcgagtcgctgggtgagcacgtcatcgagctcaccaccaacatcaacaatttgttgggtactatgtaagggctcgagaggtagatcccaactgtggatgcggggatcaaggatctacagagcatggtggatgggatcgtagcgcgggtgatgaacctcgaaaacaagcagtcgacgtcgtctaccatggcaacgccaccgtccggagggcaccgcgtggaagagtgttaccagggtgttgcattcggggccaatttggtccagaagccaaccctggtcgagggcaagccttcactccatgctacagctattacttttgagttgggagagtgtcttagcggggagtgggtggatctct

SEQ ID NO: 13215 - DNA, 1124 bp, Oryza sativa
ggataataaattgtagcttaatgaattgacaaggaggacattagatagagattgattcttggaaatggcaatcttaccgagacccattacctttcctttaccatcatctccaaagacaatatcttcacgacttccaccctcctcatcaagacttgtaaacatactcctctttcccgtcatatgattggtgcagccacagtccacaacccaacttgagccaccggaggagtatgcctacaatagaaatcaagcttgggatttaggaacccaaacttgtctaagtttgggtcccttgatgttagtcaccaaagcctttggcacccacacacaagtgcggtactcatcattgtaattcccattaaaataagcaaccactttgccctctgaatttttggaaattacatatgaatcatagtaaagaccctctggccggaacttcctggcattatacccggaacttccggtcagcccctttggcctattagaagcccggaacttcctgacaaaatgtccggaacttcctgtcttacaaggcaggaacttccggtcattttgcctggaacttctgggtgtctgaccagtgaggggacaagtcacctcacttgcttgtggagcttttccttctctcacaaacatcaagcattctttcccatttaccatcacacgcttagacacaggacttccaccagaaaacccgagcccgtgtccatccttgttaggatgagcggtgatgatcttgtaaagggttttttttgaatggtatgtcttcatgcatccatatttcaccaatgtgcccaacctttcattttctttcttaagagcttgcatagcattaacattagtagcataaaagttcaaatcaatattgtaacacctagcacaaccattgctagtagatgggttggaataattagaaaccacatttggttgagaagtgctattccaaaaagtgtcaaattgaacttcaagatctttatgacttttgtctaaactagcaaatttttcttgaagagtttcattgacatccctaaggctagctagagaaccattagccaaattacagctcattagctagttgttcatttttagcacattctttagctaggctctcctctaaggcaagg

SEQ ID NO: 13216 - DNA, 11033 bp, Oryza sativa
actgctaaaggacaccacaaaaataatgtaattggttgtaggacaccggaagcattattttataatatttaagaaaagcgtggagaaaaaaggataaatttgcccctgccggctctttctccacctagccacggcgcagggaggccggtgcaagcgcaggtgcgcactgacatggggaggcggcggtggcgagtggcgatgaggaggaaaaggttggcggctcgagaagtcgggaggggggcgaagatggagcttcgatgctcaccaggaacaatggagtcgcggatgggatgccaatgggaacggcgaagctggcggaggggccccgccggtgctcagggaggtcccgatcgacgcctagcagcggcgtcgcttgggatggagcggcgcgacggtagtggggagagcatggcatccgagcggcgagggaaagggggatcctgggtgctgtttataagtcgttggggggagaggaggagccaatggcgttggttcgccggcagccaaacggcgaccaattaattcgcacaacggcagtgattcacgggagtttatggggaaaacaaagaggacgggatggggagcaaccccctcccaattaattcagcgaaacggccggcagcgggggtgaattggcaccttctcctcctccaccaaatctgccaccggagtggcttcttcctctccccgacccagacaaccgcaaccaaccggtgacgtgatcatcaggctcgccgatgctcccattttgtcccctacccaacccccaaacccatcccctttgctactcaataattggcttctagttgtttttaaaattttacaactacagctttttaaatctgaatgaaaaactgaactatttgaatgagcttaaacttccccaaacggattccgaagagtggaacggaaattaagcaagcatgtagctgtgtgtgtatgacgtgaaacgagccttttcggcacgagctaccaaagttgcagttgacgtccccctttaccagttaccacacaggaatatatgcagattaaggttggtgatgtgatgcatgctcagctcacacgacacatatcggcatgtgcatggttgttgtgttgtgttggggttgggtgtatataaagctaggtgcagatagttacgctcactaagtcagtcactcatcactgatcatgtcactctggatagcaacgtatcctctgctgatttttattccctggaaaaaagctctacaactactgtactgatgatcatgtcatatgggccagtaaaacagttcagtgaatcattatcatatatcctctcagtgtcagtgcagatcatggatgcaaactgtttagtgctcgcttttcataagtgccgtagccaaaaattagaaagactaggattaagatatggcataatgcttccttttttcaaaaatcggtcaaaagataatatattggacgccgtagggttgtcatgtacaacgctgtcatgtagcctgcagccagttcacttgctgtagcaataaactgtaacgtggctgtgaaacaacgttgtataagacagccgaacatgccgattgttttctttataaaatttatgtggtgatttaatataattttaaaaatataaacaatcgtacgatttaaaaaatataaacagccgaacagccgggatgttttattccattatctaaaaaaatatataatttaagtaagattttagagacagccgtacgtagggttcaagctctagctattttagcctatctccgccactatttttcatgcttcacttcatctattctatttaaaatgttagtagtggtggtgtctatttccataccacgtacaccactattcgataattctttcccaattttattattggcttcccccacacttcaaaaccatgtattacttattcaataagaaaaatataaacaagtgcttattaattgatttgataagctagaaactatagtgatgaataattaatatgaatatgaattatacacattgtatttgatttatatagtggacacggacatcataagcccacatggtaatgttgttggtggtggtgggtttacgtatatttaaaatggtataaagatattacaatttgttactactactaagtcagtgaattaaattaattttctgcacactagagagggggctgaacctgtcgactcatcgatcggccggtagccagcaaccgattctgttgaacaactagcgtaactatacgagcgtgcgtgcacatggccgtcacgtcggtcgagtcgagcagtacacattgctgctgctggggcccgcgtgtcatccaaagcatggacaaacgaatggggctgaaatcaaagccaacgatggctgacgctgcgtacgcatggacggattaaaaaaaaactttataaaaagtggtggtcgtcatgtcatatttgcagctcttgcaaaagacccaaattttgttagggccattacgtgtcgcatcaaaaagcccatgatgattcaaatcgatttcatatctcttgtgttcttggaaattggtagggtttggagaagaaaaggacttgagagttgagactcgtgacttcttgatgagcacccttgctcccctagggtcgtctagttagttgcaaagttcacatcgaggaactgttcaacatagtactctagttatattgatttgcacagactcatcttaggaattgcttaattcagctcagatttttctaaacgggtacttcctccgctttagtggtggcttagaattttttttaaaaaaaagcgtgggcaaattctactgtggctaaccctcactcagatgcagatccaccgtccgatgactctgaagagttgtctatgctcattagatggatgtgctatagaatttaattattttctcaatgaaccataaaaaaaacttttataacaaaaacttggtaggttaggattcatctaggctttaaaatctttctagttcggtcactagcatcattcgatgccaatgacataacatgcttgtgttctcgtcgtgcgccagccaggccaggccgccaaggcgactgccacggtggtcacccgagccttcgcttcaccaagtactgttggtatttcttacgaccacagatacattctgtggagattatgggtaccccatacctacatggcatagttatccgactggctataggggataacttatatctatggaatatgtaacagatcatgacttgggtattacgtttccttgtatattatggaacggcctaaagtcctggtttgataagattgtaaagtagatttaggaaaccgataccgtattggttaagatttctatcttgtaaccctgccccccaacctatataaggagggcagggagcccctctaggggcatgagacaacctgatcgtcagatcaatacacactcggcggattcaaatccccaaacaggagtagggtattacctctcattgagagggcctgaacctgtctaaatcctttgtctccgcatccatccacttttaggtctcgtgcgctacccccttttattattgccgaaatcatgtttcgacagttggcgcgccaggtagggggtgcgtcgaattacctgtcgaaaagtgcgatggaatcaacttcagaagaaaccccgagatcaatctcatcaatttcgatggctcaaatcttcaatcgggtctaccgttccaatttaatctctattagattaatttttaatcattgtttgatttcctgatattttgacgaatttcatatactggatgagatcgaaacacggccatcatcgtcgcctacttgggtgcccttgccgtgtccgagtgctcctctcttcctttccttgcagatggacgtgttgcaggagcggcacaggccgccaggattcgattcctgtttgcatgtatgatggttgatgggctccgccggctacctccgatgatggcatcatgccgaaagaacatcgagttagctgttagttgccggggcttatacatgttgcatggcacgtcgccggctatcactcatgatccagcctcactgctcgacttgagtttttcgtttcaatttgttatcaatatatattagattgatttctaatctcagattaatttcttgctattttttgttgttgttcgcatataactacgcggcactattgaggcgattgatgctggtcatggactcgaggcgtctcagctttccggtcgatcggccgcgagtccactccgccggcttgtcctcgccaccgccattgctgatagcaacaacgacttcaccaccggcctgcctccgtcgccgccgactggtgtcctcgcctatacggttggttggtcacaccaccgttcatgggcgtctacgacttcaccgccggcctgcctccgtcgccgccgactggtgtcctcgcctatacggttggttggtcacaccaccgttcatgggcgtctacgacttcaccgccggcctgcctccgtcgccgccgactggtgcctccgcctacacggctggcctattatgccgccgctgttgggcgtctacgacttcaccgccggcctgcctccgtcgccgccgagtggtgcctccgcctacacggctggcctattatgccgccgttgttggatgtctacgtcctcaccgttggctcaccttcgttgccgtcgactggtgtttccgcttacacggctggcctattatgccgccattagtgggcatcttcgctttcaccgtcgaccgccttcgtcgccgccgactggtgtcttcattgttattgatggacgactttgttcccacattggccacttctgccatcaccaaggggaatattacaaagctaagtcatcatttattttattctttatatgatatttttccttttcctctgcctcactacaccaattggtcttccattgagtagtgagtcgggggctacagatgttatatcatatttttcataatatttatcttgattgcttgcgacataatctgagtacaaaagtacctatcgagttatggagttctatcgtcctatgctttccgtttggtttgccaatggatggttgcctttgggccgattcctagcacccgggggctcgttggatggaccgagtaacgcaaggtgctaagtattattcggaataaatcaaaagcatagagatgagataaatttatttgctgctcttaataattgcaaaagtacccgagtagtaaattctgatccgtgaaactttgtcccattaatgacgaactcatgtcactcatatgcatgtttgggaagtgcctaggccgactcccggtgcttgatggttatgactagtcggacagagtgtttaaacgtacagagtcatctgctcggggaaatcaaaattgacaagaggagaaatacatatttataaatattttaaaatacttgattttttctcgagtattatatttatatcagatactactcatcctatatgtttgttctgcaggatccagatccagatatgcataaaagggattcatggctttaagcttatctcttacgctccaggaatggatcagtcagtactcttgtctttggccgtgatcctctcaacaaaagggcagggtcttcgtcgccaaaaattctatctggatctggtttatcgttctaaattttcttatataaattagaattaattcacagatcactaattattatttgatctattattttatacatgtaccgccggccgccttcgtcgctgccgattggtttcatcgcctccacggttggtgtgcgccgctgccgttgctaatggagatatggtcttcaccgccggcctgcctccgtcgccgccgattggtgtcttcgcctatatggttggttggtcacaccaccgttgttgggcgtctacgtcttcaccgccggcatgcctccgttgccgccgagtggtgcctccgcctacacggctggcctattatgctgccgctgttgggcgtccacgacttcaccgccggcctgcctccgtcgccgccgactggtgtcatcacctatacggttggtcggtcacaccaccgttcatgggcgtccatgtcttcaccgccggcatgcctccgttgccgccgagtggtgcctccgcctacacggctggcctattatgccgccgctgttgggcgtccacgacttcaccgccggcctgcctccgtcgccgctgactggtgtcctcgcctatacggtcggttggtcacaccaccgttgatgggcatcgtcatctacaccgccggcctgcctccgtcgccgccgactggtgtccccgcctatacggtcggttggtcacaccaccgttcatgggcgtccacgtctttaccgaccggctggccttcgccgactggtgttttcgcctgcacggctggcctattatgccgtcgttgttggatgtctacatcttcaccgttggatcaccttcgttgccatcgactggtgtttccacttacacagctagcctattatgccaccgttagtgggcatcttcactttcaccaacaaccaccttcgtgcccaccgactaatatcttcattagtattaataaacaactttattcccacattaaccacttctaccatcaccaaagggaatattacaaagcgtaagtcatcatttattttattctttatagaaatttttccttttcctctgcctcactacaccaattggtcttccattgagtagtgagtcgggggctacagatgttatatcatatttttcataatatttatcttgattgcttgcgacataatctgagtacaaaagtacctatcgagttatggagttctatcgtcctatgctttccgtttggtttgccaatggatagttgcctttaggccgattcctagcacccgggggctcgttggatggaccgagtaacgcaaggtgctaagtattattcggaataaatcaaaagcatagagataagataatttattttctgctcttaataattgcaaaagtacccgagtagtaaactccgatccgtgaaactttgttccattaatgacgaactcatgtcactcatatgcatgtttgggaagtgcttaggccgactcccagtgcttggtggctatgactagtcgggcagagtgtttaaacgtaatgagtcatctgctcggggaaatcaaaattaacaagagaagaaatacgtatttataaactgcttgattttttctcgagtattatatttacatcagatactactcatcctatatgtttgttctgcaggatccaaatccaaatatgcataaaagggattcatggctttaagcttatctcttacgctccaggaatggatcagtcagaacatcaccaccggctcgccgtcgtcgccgccgactggagtcttcgcctatacggttgattggtcacaccaccgttgttgggcgtctacgtctttaccgaccggccgcttcgtccaccgccgactggtgtcttcgcctatacggttggttggtcacaccaccgttgttgggcgtctacgtcttcaccgaccggcttgccttcgtcgccgccgactggtgtctccgcctgcacggctggcctattatgccaccattgttgggcgtctacgtcttcaccgaccggccgcctcgtccgccgccgactggtgtttccgcctgcacggctggcctattatgccgccgttgttgggcgtctacgtcttcaccgaccggcttgccttcgtcgccgccgactggtgtctccgcctgcacggctggcctattatgccaccgttgttgggcgtctacgtcttcaccgaccggccgcctcgtccgccgccgactggtgtttccgcctgcacggctggcctattatgccaccgttgttgggcgtctacgtcttcaccgaccggccgcctcgtcgccgccgactggtgtttccgcctgcacggctggcctattatgccaccgttgttgggcgtctacgtcttcaccgaccggccgcctcgtccgccgccgactggtgtttccgcctgcacggctggcctattatgccgccgttgttgggcgtctacgtcttcaccgaccggcttgcctcgtccgccgctgactggtgtttccgcctgcacggctggcctttatgccgccgttgttgggcgtctacgtcttcaccgaccggcctgccttcgccgctgccgactggtgtttccgcctgcacggctggcctttatgctgccgttgttgggcgtctacgtcttcaccgaccggccgcctcgtcggccgccgactggtgtttccgcctgcacggctggcctattacgccaccgttgttgggcgtctacgtcttcaccgaccggccgcctcgtccgccgccgattggtgtcttcgcctatacggttggttggtcacaccaccgttgttgggcgtctacgtcttcaccgaccggcttgccttcgtcgcagccgactggtgtctccgcctgcacggctggcctattatgccaccgttgttgggcgtctacgtcttcaccgaccggccgcctcgtccgccgccgactggtgtttccgcttgcacggctggcctattatgctgccgttgttgggcgtctacgtcttcaccgaccggcttgccgcagtcgacgctgactggtgtcactgcctgcacggctggcctgttataacgccaactgatgctaccttcttcacggctggctacatcgctgtcactactaataggcatcagtatcttcaacacaagctgcctacgtttgccatggctgccgactggttccttcacttccatggctgcatgattctgccagtgttgattggccttatcttcttcaccgccggtcgtctcgtctactgctgactagtgccctcacctctacgtctggtttatacagctaccactactgatggacatcatcatcttctgtcgccgactgattatgccgtcgccgactggtgcttttatcttcacaactgcgcgtcttcactaccggtttgcttctgttgccgccaacttgtgttcacttcattacggcaatacaactttgtcatcatggtggagcgacttcatctttattatcttcggcaccggcaaactctattgttgctacttcgcaagttttactacttcaccaaccacgacgtctttgtgaacctcgacatctcggcatgcaatgccatgttattttactacaacaagtggctctccaatattcaggatttctacttggacatcttcaacacatatcttcaatcaagcaatgactattcgacgacaagaagctacagttctcgactctatgttcagttgtttcccaactaatcaaagagtcgggggctacacaaatacaaggctcaaaatttgacaaattttatgtcaagctgaagaaatcaattcatcaaccaacgagtcaactccaggagtcattatcttcatctttgcttcggaacagacattctacttcaacaacttcaaatatttcggtttagacgagttgggcaacaacatcaactctcctccaattatttgtcttcacggttggcctactacgcaactgccgatagaggatctcatcgttatcatcggctgctacatcgctattgactggatcaccgacatcgtcatcttcatcaacatcttgtcaagcctcatcaacatagcctactctgctgccgttgatgggaaacttcgtcatcatagtcggctatctctgttgccgctaatcatcattaccgtcggatgcgtttgtcgccgccgattattttcttcatcttcatgattggtggatttcgccatcaccgttgatgcacgtctacgtcttcatcgtcggtttgcttttgtcaccaccgactgttctttcgttgttgttgggcgcctacatcttcactgctagctgacctgactgttgccgactggtttcttcgcctccatggttatgcaacttcattacatttgattggtggcatctttactaccactgacatcttccgttacttctgatgagcaatttcgtcttcatgttggtcatttcatctccatgccgactgcgtcagctattgccaatagacaattttgactatgacagaaggacaagctatatgctcaggggctcatcaactcaagcgtgaggattatatctccaatttggacttgttccggatacattccacatggattcatagtcatgagtctattttttatgctcaaagactggaccaattattattccccgtaagggctatcaaccgaatacttgcgccagtcgggattcaattattatatatattttggagtatctcataagggataatcactcagatcagaagctattcatatgagctacacctggtctatatcacccggaagatttattactcgagagcatgttacatgcgtcatcctttaaagggtgtcgaaggcatattttttggtctaggcctaatatgtctgcaacccatattttcaggtgtggcctgtcacgttcttttagggacttaggcactttttgcttaggccaaagtgcgcgtgatcaagtgcccaataccttaaaatccttttataccgcagttactcaactttttaggagttggtacaatgcatcttaaaaggtgtcaaacagtaaagctttatatagctgccccgctgactttttaatatagtcatggtgctgtttgggtttttaagcaattgattggatacaatatcgttgctttttgccacgtaagtgtgcatttttattgaccaatattatggcttaggctgattatatattgtggtcatttttcaggcggttggtaaatcctttatgagtttatttactcggattttataccacatatgccatatatttccaggtgtggtggaaccatgtgtcttctagggacttaagcacatctgttaaagcagtgtgcgcatggcgtatgcccaatactttggaaatttctttattcacaacatacaagcttctttatagctgttttgctatgtgaattttcaatgatgtaaccaactttaggttacactcatcatattttacaaagcagtcggtatatcactcggatcatgt

SEQ ID NO: 13217 - DNA, 4005 bp, Oryza sativa
aaaaaacctggcgaaaaaaaaccgggtggaaaaaaaacaaatctgtccgacaaaaaaaaaggaaaaaaaaaggaaaaaataccgaaacgaatccgactacatcgacgcggtaaaaagagtttaaaaaaataaaaagaaaactgtcctattccaaagaaaaatgaattatatatatcgtggtaaaaaaatcgaccgggcgaaaaaagaaaaaaatagtccgatccgaaaaaaacaggagaaaaaaaatgggcgaaaaaaaaatttgtccgataaaagaaaaggaaaaagctgaaaagaatctgactccatcgacgcggtaaaataaggcgaaaaaaaactttccgaataagaaaaaggaataagatgtgacgcggtaaaaaaaaaagaaattacataaagataaacccccaagaggacccccggggaaaaaaatttataaaatacgagataaagttcgaaaaaaacggggagaaaaaaaaatctgtcctatccaaaaaaagccaaaaaggggaaaaatcaaaatgaatccaactccgtcgacgtggtgaaaacagggcgaaaaaattccaaagtaaagggagaaaaaaaatcaaaacgaattcgacttcgtcgacgcggtaaaaaaagggcgaaaaaaatccaaagcaaaaggaattatatgtgacgcggtaaaaaaaatcgatcgggcgaaataaaccgggcaaaaaaaaatctgtccgatccaaaaaaagggaaaaaatcaaaacgattccgactccgttgacgcgataaaaaagggcgaaaaaattgtctgtttctaaagaaaaaggaattatacgtgatgcggtaaaaaaaatcgaatcctattatatctagaaaggtttgacactatgtgaaagtggtgaaaaaaacccttcgtaaagaatgcacgagaaaaaaaattaaaaggacggaaaaaagcgcggaggaaaaaagtcaaatttatattcgtcgttttttagtccatttatatatcttctttatctctaatctaatctaatctaactataaaaagagaagtttctacagtatattaaaaaaggaaaaaatgcgcgagaaaataaaaacggtttaaaaaaacacgtgagggaaaaatgtcagaaaaaagcacaaaagaaaacgcgcttgaaaataaagtttcgtagttctaattttctgattgttatcgatatggttatgcatgaaaaacgtatattatcattacgttttttcacccgttgcaacgcacgggcatatttgctagtataatataaaaagcacgagttcatccccggtcctgtaatccatcggatccacagtcgcgtgggacccacgctttgcacggcggcccggcccaaagaaaacgcgcacgtcgcgcacgaaagaaaggaacgctgaaaaaacgctaacctccgccatccccacgccgcgccgcccgcctgacctcagccacgcacacgctgccctccccacgccgccgcgccgcccgccgtccccatgccaccgcgctgcccgccgtctaccgccaccgccccgcgcgcgcacctgccggagccgctcgctctaccccaccacttcctcacacgcggccgtcgccgcctcggatctgtgtgtcgccgctgtctactccccagccccgcgactactccgccgtccacggttcgtcgctgtcgcccgtcgtccgtggccacatagccgtgtgatcccccatccctatatccccgtcgcgccgcctcgccatatccagatcaccacgacgattcctccagaacgaagagctgctctcctttctcggctcctccgttgggatcgagaagctattcggacaacctccactccaaccaagcaccgccagagaggacagagctggggctgaggtggggagaagaggagccagccgccggtcggcccgtccgtcgctgcccccgtgctcccacctcctgctttcacgccgactgccactgctcttccggactggcagagcccaagcagtaggaggcaccgatgaaggtgatgaggacttgagatgaggcagtatgcaggcttgcaggtttggacctcttccctccgatgctatttcagtttgctgcggaaacccatgtttaattgaagatcctttccgttcagagatgcaaattaggcgttaatttcttcaggtcccttcttgcagcaggaattgctcaaatcaggtttgtctcgattcctattattacctactcttgtactcttgttcatatcttgtgactgaacagatgatcgattacttcagtaaattttgtgttacataactgattgaatgaaggttgtatgtatatagtggaacatgggttgttccaagatgaacaactgggttactcgctcagaatattatcaactgagattctcaccaaaccactgtacttaacatggagaagcaaaatattttaatgctggcctgaattaacaagctttacattaatctcttccagttattgtgttgttgcaacctatgctgataagtaatgtccctgtgcaccttgattcctttattacattggattattttattgcaatgtttacaacttaagggatccaatctgcattgtgccttgcacacatgtcacaaattagtaggttacatcttcctttaattttgatatgaatatagatgtcccttttcaaaagatgataaaaaactgtatggtcaaaattgatttaagcgatggatgtatttgttttaatttgctgtgagctaattaatactatgaatttcttatagctcaagttctggaagtttacaaaattaccagtcaatgtaaggttgtctcggtttagtgtctaaccttggccgttgcaatgtgtgtaaacaatatactactattaccattcaaggttatctgaacgtgaatatggaatgtacctgaagtcagtatgtggacatacctttgtcatgtttctcaagtcagtgtatgaacccttgcaagcactgcttttccccgtatttttatttctttaaaatatatatattgtaaaaacgtgccttgcacgtgcactattactagttataagaaaaacacagagtccatatagaaatacaattaataaataatagaaaatcggaattaaaaataaggaatattataagaaaagcatagagtccatataggaatttagaatgaactaaaattcggaataaaaataataaaattaaaattagagtttaaagtccatatagaaatacaatttacaaataactaaaattcaaaataaaaaaatatggcaagaagagtaatacagtttagaagtaactgaaattcgaaataaaaaataaagaatattgaaagatgagtttagagtccacatagaaatacaattagaaataatgaaaattcagaattagaaataaataatattggaagaagagcttagagtctatatataaatacaatttacaaataatgaaaattcagaactaaaaaaataaggaatgttggaagacgagtctgcaagccatataggaatataatttagaaataactaaaatttgatattaaaaataattaataagtatcacatataaataaaatacagtatgaatattacacattggtaatttggtaaagttagtacaaaatttaaaactatgttgtcattttaatatattttaataataagttgagaaaaaatatatatgctattatacgatagaagatataatgatgctagccgcgcaatctgcgcgggcaaccatgctagttccattatataaaaataagtaagcagctctttctttccttcttatttatttttcaatcttacatgaatagctacagttacgcaacatcaggttacttctgattattatgttgcaacactggaactgctactacacaatattgtcagattacctgaaattacagcgctttctgaaggttccacgcacactatatttatagatggatttttcatcttcaggtaccttcctacacctgccagtgtgccccctgttccagcggcggttacaaagat

SEQ ID NO: 13218 - DNA, 9879 bp, Oryza sativa
  unsure (1)..(9879): unsure at all n locations
gaaattacagcgctttctgaaggttccacgcacactatatttatagatggatttttcatcttcaggtaccttcctacacctgacagtgtgccccctgttccagcggcggttacaaagatatcaactttgccggctgtatccttccagatctcaggtcctgacattttcagaaaatgaacatgtgtatcatataaagcaaagttatggacagtagatgataaaacattgttgtgaggctgtgtttagttcacactgaagtttggaagtttgattgaaagttttctatcacgatgtgatagaaaagttgtgtgtgtatgaaaggtttgatgtgatggaaagttggaagtttggaaaaaaactttgcatatcactgaagtgtggatttccagaattatttaccagtccatttgaagtgtgcatctgggttcgctgggttaattgattggttaaaacagtgataatttggcatgaccttggtgagctcttccactttgtccatcatacccttgaatccacctgcaggatctgcagcaaaagaaaacatgcattacttaataacttgtcagaggacacttaatatgcaagagagagagtagtagtaactgatttaacataattatgtaaccaataacacaataacataagcacaagaaattcacaaaatttagtccataacagaaaatatgttttgtaccaaaaaactaaatgagaaatttaaatgcttgctgaatttcatctgagatcctggttgtcacctgttaatatcacttcagcacccaaaaacctcagtagcatctgcttgtcaagtgaatatccagcaggcataacagcaatgaacctgtagcctctctgaatagcaaccaataccaaaccggtaccaagattaccaccagttggttcaatcagcgtcgtaacaccaggtgtaatcaagcctttctcctctgcatcttcaaccatactgcacacaaaaaaattgcaaatttcagttaaggttaaccacatggcttgcatattcttcatcacataactgagtatatggtaagatgctaggaatggagcgaagcatagcagatttcctgtggaaaaaagggcatatataactgaagaaataatgcgatgtatgaatctgtgcttactcacccgagagcagttctgtccttgaccgagaaaaggggttggtatgcttccatctttccaaccaaacgagcttggatgccttctttcttggcgatgttcttcatctcaatcagtggcgtccagcctatcagctgtcaataataaagattaaccacaaacatgtaagtccctaatcatattagctccccaaaaatcctcaccgtgatctttcctcaccaaatgcatagctcaatgaagctctcaacaagaacactaacacacagtaagcaaacaagagtgttaatatgtgatccaaattttagtatataacttattcggtttataactatttaagtaggacttttagtcttttctgaatattcttttatttcctttatatatctctttgccgtacaggaagggtgtgacgttgttattcttctgcgtttgcaaccaactcctcgactgaccattactatgacatacctgagcgacattggaggcgatggcctcctcccccacggcggagagccgcagcagagaagggatccccgtcctcccctcttccacctccaccgccgcagccgccatcgccattgtttccactaactaagaattgatccatgcacatgttcatcttatataatccattgcgtcaaaatttttatataatccatcgcctcctaacagtttgcaaggcaaaacaaatcgaaccgaatcaaatccaccacgactgcacccgcgatttaattaatttcctcaatgtgcttctgcttcagcacgtggagaataaataaaataaaacgatttcagggtaggatgatcaggtagttgtccatggaaaatgtcaccggacatgtactagttttgaaatcacatctatcctgaaccaaataaaacgagaaggcaatcttctgtataatgggattatacagttataatttagatagaacacattcttctggaatcctggaatttgatctgcaaagatgcagcaacaagaaaagtacatttttcaacctacacgaacagcagcagaaatacagcttcagatatggctagactgatccttctgattattatgtcgacaactgttcccacatagaaaattagaggatttcctgaaaagttccacgcacattattatatttatagatggaattttcatattcaggtaccttgctacgccttcttttttcccttgagagaacgtgttttttctttccttaaagggatgtatcctcgtttattgcatatcatccgcataattatattttctaaaaaattgatagcatatatcaatatgtgatacaccactctacaaacatgtaggtgtatttcaacctatacaagttgaaacaaaaacaacaaaatgaattctaactaatacgtgcaccatcaacaattatacttattgtttttatttcaacttgtagagaaaggcccggggtcttcgcggctagcaacgcaagctgcgagctagctggtccgggttcgagcctcaccccctccttaattcaaaatcaatctagtccttcctagattggtcccatttttttttatttcaacttgtgtaggtcatagacaaccactttgccggcatattaggatatacaataaatttacaacacatgcacaaaggagcacatcacattatgctgaaattcttgctcttcctcaacaaagaagcaacaagaaaaatgtatagtgtgctctgaactatgaagcatatcttaagtaacaatatggaggaaaagtggaaaacacatgtgtacagtgcctgaaaaggagagcagctccaagacatcatcagaaggtcatattatcacattcctctctaacaggtgcaaagagatcagagttcatgtatctttcaccgccgctcgggaacattgtcacaatcattttccccttgttctcctctctgtctgcaatctgcttgagatccattaaattgggtagacagaaacacaattagagcagggtttatgtatacctagctaagatgagctgtttaccttgatgcaagcagctacatttgcaccagaagatatgccaacaagcaatccttcctccttcgccagcctcctcgccattgccatggattcctctgtgtttactgtcactacttcatcgatgacagatttgtccaaaatttcaggtatgaaacctgccccagtgccttgaatcttgtgtggccctggtgaaccacctgaatagaatcaagcagaaatattgtttaggcacattgaacaagaagttgaaagagaaggggaattttgagcagtatgtcatcaattacactttacagaagagcatgctaagatacctcatttgtatggtcactcaaaatttcaaacatatggcaggtaacaatatatatatatttttttacatttctacttagggtcctgatgaactacataatggcgaactgaattttctcaatctccatagataaacacctctttgataatagacctgtaaaaatgctcttgcacacaaatgttctactttagaaacttcagtaagcatcaactcttcctttcgttcttcttaactctcttgtctacactagcactcagaagaaaaatgcaccttgagaaagcttacactgacaatctgattattctacctcgaactactatttagagatattacaggggtacctgaaattacagggctttctgaaggttccacgcacacaatatttatagatggatttttcatcttcagatacctccctacacctgtcaatgtgccacctgaaccaacagaggccacaaacacatccactttgccggctgtgtctttccatatttcaggtcctgaagatttcacaaaataaacatgatgtatgatccctaggtacatctttccaaggcagaatgactggcagtagataatgaaagatagctgtaatttgtaaaacatggaaaattggaaatgtggatttttcctgaatacttaccagtccacataaagtgtgcctctggatttgctgggtttgttacttgattgagacaatgagaatttggtatgctcttcatgagctcttccaccttgtccatcataccattaaacccaattgcaggatctgcagcaaaataagaacaaacggtacttaacacttgtcgagtgtcgacggcacttgttcataagataaagaacactcattagttcagcataatattctttcaaaaaaaaatacttcagcataataattatgtaaatatgaaatgaacaaaatcatcccattcaactgaaaatattagttagggaaaatatttacttgaggcatttaagtgcttattggttttttaaccatttgtagaaactgggatccaggttctcacctgtcaatatcaattcagcacccaaaaacctcagtagcatctgcttgtcaagcgaatatttagcaggcatgacagcaataaacctgtagcctttctgaacagcaaccagcaccaaaccgataccgagattaccactcgttggctcaatcagcgtggtaacaccaggtgtgatcaaccctttctcctctgcatcttcaatcattctgcagaagaaacatggaaattgcaaatgccaaggcaattttgaaactctttaacactttttatagatgcttctcacataaacacaattttgtaaatatttgatctgactaaaaaatgtaaacaactgaagaaacaagtgcactatatcaatcagaaaactatgacgatgttttgcatgaacgcacctgagggcactcctgtccttgacagagcagagtggctggtatgcttccatcttcccaaccaatcgagcctgtacgccttcgttcttcgcgatgttcttcatctcaacaagcggtgtccatccaatcagctgagagcaaagagatagaaaccacaagacgtaaattattgctagatgcacaatccagattctgaatacaagaacgagaaaaatagcaccataataccaatcaagaaaaatgtccaaacaccacactggctgactggcttactactcaattaaggggaaacttgatccactaaacagcaactatcaagattttttgcaagataccgaatacaacaaactgaacctgtaatgaaaagcaacaaaatccactggttctcatcagttttgttttgttttgttttgggagaaaagaaatctgctcacctgagtgatgttagaggcgatgttctcctccctggaggagagcagagacgggatgcctttcctcccctgctcctgctcctcctcgcccggtgcagccatgtctggtccctcctctccgttcttgatttcttcccccatctcaacccagctgctgcagaaagcggcatttatcttgtggaattcggtgatatcttcttccgtcgccttcttcgccagcgccggccgtacgagctcagttaacgcctgatggagagagagagagtctctctccgctggtctgtgactccctgcgtgtgtgtggatggaatggattggaaagagatcgcctttttctgtgcggtttgtagttctgtcactggattatagcgtatgtgagtgacacgactataaactatatggccttatttagataaaataaaattttgatgaaaaacgttgcaatcaaatatttggacatatgtataggacattaaatgtggaaaaataaactaattgcaaagtttgcatgtaaattacgagacgaatcttttgagcctaattacgctaggatttgacaatgtggtgctagagtaaacatttactaatgatgaagtaattaggcttaataaattcgtctcgcagtttataagcggaatctgtaatttatttgttattagtctacgtttaatacttcaaatgtgtgttcgtatacttaaaaactttacacccaaagagctaaacacaccctataaagttgaggaaatgtttagttcccaaaaattttgcccaaaaacgtcacatcgaatctttggacacatgtatgaagcattaaatatagataaaaaaaactaattgtacagttcgcattgaaatcgcgagacgaatcttttgagcctaattagtccatgattagccataagtgctacagtaacccacgcgtgctaatgaaagattaattaggcttaataaattcgtcccgtgcgtggtttttaggcgagttatgaaattagttttttcattcatgtccgaaaaccccttccgatatccggtcaaacgttcgatgtgacacctaaaaattttcttttcgcaaactaaacacacccttagagggttaaagttaagggtgaatagtacactgactttggggagtttccactttccagccatctgattctcagatataagaaataactacaaaatcattgtattgcatgcctttgtctttacaccccaagttaaggtccttcacagtgctcctacatggaggagttacctactgcgccagctcggattcacgcgtacatggcgccgagacccacaccttcgcccggccgctcgcgccctaactgggagacgcgttttctcggtgcaaggagggtgcgtggcgaaggaaactcgcactatgaaagtcattgcttcgattcggcgcgaccttgcctcctcctctttctccacattcaccgccaagggaggagaagagagaccaatccacctcggcctccttgaccctcgccgctccggatccacgccaccgcctcggcctcctcaaccaccgcagcaccgctgctccgaatccgaccagatcgagacggacaaggaggagaggagagtcgctacccggcggcatcgtcatcgtctccgtcctctcgccggcgaagggaggaggggagagccgacggagggaggagaggagggcggcaacgacggagggaggaggggagctccctccgctgacgctgccggcgcggagatccccgagccgtgcagcagcagcagtaactccattgacttgggcgcaggcgcgggggcggggagaggtcggcgccataggggtcgggggaacggttggcgacgtcgacgacgacggcggcggggccgaccagagcgggcaccgccctcgctggctgcttcttccgcatagggagccggcgccagcggagggaggaggggagagctcgtagtcctcccgccgtcggctccagatccaagctgccgctgccgtcctctcaccgccgcttcttcattaggcctcgaagacaccgccgctatgtggccccgaggagatccggggtcgcagccatgtcgccgccatcatcgaatcgtccttgtcatcgattggatgtgaaaggggaaagtggggcgtgaaagtgggaaagggtaaaggggaaagtgggagagagaaggccggtgaaagttgggggtggttggattgggttcccgtgaaagtatttgtactgtgggagtagtggattcgatgtgtatttgtcctacgtggcgtataaggttactcaaatgaggtgcttgcactgctactgccctagagggttcgtttccagatagaatcaagaccgatacccttccggttttgtatataaatatggcatggctggtagctccatggatggagaagacgatcttgagattcaatgaaattttccggtgaaatccacaactacgctaaactccagggctcaatgcccccgcgtcagatgtataaaatctgttgttccacgtccaaattagaggggatcttttgctgatttgtaaatttaaacacgctgacgacgattctgcagagaatggcagttttgaaccacagacggatgcttgtggacagtgaacagccgattttggttaaatctcgaacagaaaatctagataacgacatcccgtaggaacgggatgacttaaaaggtctatgttatttccatcaaaacgattgtacacgcatacggcacgactcctaaaaatgaagatgaagatgaagattaagtgtttcacgtaaaacgaggtggtaataacgtgtgattaattgagttttaattattacaaacttgaaaaatggattaatatgatattttagaacaactttcatacagaattttttttacacgaaacacaccgtttagcagtttgaaaaacgtgccacgaaaaatccaaaatttcatccactgctagtagtggaaacgaacgtggcagggttatacaccaccacttatccacgctcgtgtgtccttcctccagcacaaggactccagatacactggttgggcacttggaccttgtgaatcacttcgggcatgcacctttgtaggcttgacttgcatcttctatataccatggtcatctcagtgacttgtttttaatttttcgttttatcctttttcttgctttgttttttttcttgagtgagacactttgagatttagtatgagtcatgtaaattacattggcactttttttttgcttgtccaacaaatggctagaaggctggacagtaagaaagaagcccatgttatgcttaaacttgatatttcgatggcttttgattcggtcgactgatcctttcttcttgaagttttgtgccatttgggttttgggagacgatggtgtaatttgctttgccttttgctgtcaacctcctccacaagagttttggtcaatggagagcccggcaaggaaattgctcattgtagaggcctccggcaaggtgaccccttgtctgctatgctttttatcttggttatggacgtgctgaattcagttgcagtgcatgcggatcatggaaatctactggaacctcttgctgtcccgcagacagcacaccgggtttctctgtatgcggatgatgtggtcatgttcttgcgtcctacaagcggggacctatctcttatcaagcagattttggagttttttggtcaaatttttggtctaaggaccaatatgacaaagagctcatgcactcctattcactgcttggaagatgatctggaagtgataaataatgagttgttttgtgaagtaaacaatttcccttgttcttatctcggacttccacttacaatccgaaaaccaagacagatttgttgccctctgtggacaaagtggcagataatttaccgagttggaaagcctctttaatgaacaaggcaggtcggcttataacagttagggtggtcctctcggctattcctatttatgcaatgatggcgttggatcttcctaagtgggtggtcaaggctatagataaaaagtgccacggcttcctatggaagggaagagaaatactaatggaggaaattgcttgatatcttgggatcgtgtgtcagcctttgtcctatggaggccttggtatcccttntaanaacncctttttggaaaactatggaggctttggtatcattaaccttgaaaagatggaatgggcactaggcatgagatggtgatggcttcaaaaaactgattttgccaggccttgggccggtttgtctattcatgtgcctcagaatgtccattctcttttcaatgtggctatcaaaattgtggttggaaatggagaaaataccatgttttggagtgataggtggctgcaaggtaaaacagtagcagagctggcccctaatctctttgccttgatctccaagatgggtggctgacatagtggcgcgggctttggaaaacaaaagatgggtggctgacatacatgggggactatctgttcaggtcctttatgagcacttgaccatttggtctttggttgatgaggtggttctgctacaagatgtacaagaccagcatgtttggtgatggcatgtacacttgtaaatc

SEQ ID NO: 13219 - DNA, 1317 bp, Oryza sativa
  unsure (1)..(1317): unsure at all n locations
ggccccattgattgcttgacgatcgatcgnnaagggcgaanncgagctcggtacccaatgtgtttggtatcaccttaaatttgttggtgtgatgctttttgtaatgttctatttttttaactagggcctgaattaattgtgggttagtcatggacttatggttcttatatgctctatagataatactggaccagccttgtcacgcacatgcgtatgctcatttctcatgggaatctcagtttgaatattttgttgctcataatgatgtgctggaagtctgcaaactcctggacagtattcctgacagtgtacttctagaagggattcttagagtgaatgtggacaattcacaagctacttacaacactctgtctgacgtagcaacccacggttataaaatgtacttatttgactcagaagagatagaacctgtttgtatggaaataccacatgtcaaagtgttcagatctttgtgtaatcatgaatcaacttcttggatgagaatgatcatgctacaggaattggcaaagaagcatatctttatgaaagagtactggcaaagcactactgaaattatacctatacttgcccgcgcgggcatgcttgttaatacttcagagctttgttcagatgttctacatggtgcataccaccaggattgtgacggagcattacacaaattagtcctacgcttctgtgtgcagtataacacaccaaacctactggacctctatctggactactgtaacttggctcttgaaaaggattctattcctttgctcaaggaagctactgtaagtttttgttcaattttagtttatgatactatttgatgttcaatagtattctctggaacctttgataatcacctacctaatttctcaattatatgaccaatacaattgtagactttatgaccagatgatatttgtcaataaactagattatttagtttaggatatatacttggtgacttagcctttacatgttttttttttttttaaattctgggcttacaatattctttagaaaaataccaaaaaggtcaaacttgccaaatctttcagttttactgtgagatttggcctaccctcctaagcatactccgtacaaagtgactttagttctcacttactttgcaagctcattctcttgaatagtaaaccaattattatcagaaactgctagcaccgttcgaatgagaacattgttgcattcacgaagcctgccttaatataatgcccaggattttattagcctgcagctacagcggattattccatctatctgactaaagatttgccttacttgccgata

SEQ ID NO: 13220 - DNA, 718 bp, Oryza sativa
atcatgccctcacattttgttaaatagcaagccagggttaattctggcccttttggttcattcgcctctcagttggtcaccatctttgtaaagactcaagaccagattatgaacatgttgacctagttatgagcattggaaaaatattgcaagattgagtatataaggaaattacttttctgggggacagcataaagttgctcattatgtaagatgccacatcgcgcacagtttccctcacctgtgcaatttaaaaacagtcatgttgattactatagccaggaaaaagaacttgaaagaataggggacatggtaggaatttgaccaggataaagatggttctgttctttcataaccagaaacctctactacaacagaaagtgccataaacgcatggatagaaataccagtaggaagacgtaaaaaatatgactcatataaggaaaaaaaatgcatgctgggaaaagtcttgagttctgaaaaaatgacctgaaactccttgacgagttccaaattcaacatatccatcatagcgacatgaccttttcgtccacctactaccatataccggccatttcccgtgtatcctagagtataagggccaagtactgcatcataagagaagagctagtcaatccctcataacttgttggttgtcatccgaaaagttaatagcagcaagtagatgaaaagtgctatctagcaattattccaaaaa

SEQ ID NO: 13221 - DNA, 716 bp, Oryza sativa
tagtttaccttgggtgctgggtgttcttgacgaccttctggccgtacttgcgccacttgtagccgtcgtcgagcacgtccacgtcgctcatcgtcttgaagcagaatctcggctcccgcaccttccgccgcgccttccctcctcctcctcctcctcccccaaccttcttcatcctcaccgcgccaacccccagatgatgctgcgccgccgccgccgccgacgtgttgttgccggcgtcgttgatccccatggcgcccatcgccgccgccgcctcgcccttattccccatctgcggcctccctcgatgatcgccttcctcgcaagacctagcacggcaataacgtcgtcgacatgggagaaaaggggggagagagagagagagagagagatcgattgggtgttacgggtacttaaatactcgcaattaccatggatgcggcggcgaccatctctgaagatgcgcggcggcgtggaagcccccaccattgtggcggcggacggtgggaggagagggctcatgccaggaagcctgcgccgctggtccgtggtgaaagacggggaccaagtggctgtatcctatgaatccattgtggtggtgatgatacaacgcgtggccgtgggaatctggaatgggaatgccactgtggttgtggcctggcaccgcctcgcatggagcaggtccacattatttaggccgaccacccatggtggcggcg

SEQ ID NO: 13222 - DNA, 1210 bp, Oryza sativa
  unsure (1)..(1210): unsure at all n locations
ccagcaaggggcattttcatatgttagttagggtttttaaccattatttactatcattcatatgcaaattataattgactggagaatttttaaaagtattaaatttaatatatttttaaaactatcattcatatattagagtttttcacaatttaatttactatctttcatatgctacttatatatgacgcatcgaatttttaaaaggtttaaatcatgcatgtggcatttacatatgttaattagagtttttagcatttaatttaatataattcctacgctaagtatatatgatgattacaatttttattaattttaaatcatgcagtatgtacatacatatcttaattagagtttttaccaatataataatatcattcatatatatgctaagtatatatatatattggaatttttattaattataagtcatatatttgcttattacgatttatccacttaatttattatagacaaaaatactttttcgaagtaattgtcattaatctttgtactttaaataatgttaatgcattaacttctattttataaacacatatgtaagcgaaaatcatatgcagtgctataatctttagtcccggttcttaaccctaaccgggtttaaaaagaatttcgaaatagcgggaaaagatatttactcccggctggtgctaactcccgcgcctacagctaatgcacattttctattcattaaaagaaaagcgccttgtagatgaagcattaggtaatttgatccagtgatccatacatggcccacaaccattgttcacaactctcccattttctcctcatcttcccccaagctttgctctttcttaccctacgacatggacacccatgtcgtcttcccgttctatcacgcatcataatggcgcactgccttattatatacaacgtttcccttccattcccctgtcctctttttacgccatccctaccgcgggacggccctaccctaattgctgctttcatttcttgttcgtctctttctttcttctacatttttcctctgtttcagctttaaatattaatgctgactgngcttctctttccctttccacttcttttgtttttatgatgacaacttttatccacctaagattcctccaatcactgttcctctggctcatggccactttctcggagctgtatgctcatctgacaggtccatctttcacacgttctcacg

SEQ ID NO: 13223 - DNA, 764 bp, Oryza sativa
ttcctgcagcccaggaatgaatttttttttggacggagggagtagtaaggggtgtgtttggttgggaggttttgggtgaacgggagatggcggcccattttttttttgcctgtttggttggtgggcggaagtgggattgggcggcccaaagaggaatatacctcgcagatgccggatgcaaccgcccgagcggccgggcgagcagggcgagcgcccgaggtcgggtcgcttcaccgcgcatcagcgacagccacaggtcaagaggcgagagcgcggcgacggaaggcgaggtcggcggcggcggctgcagcggcggaaggcggggatgagcgaggtcggcggcggcgcgagatgcgggcggaggcggcggaaggcgaggttgcagcggcggcggggagggccgaggtcggcggcggttgcggcggcggaaggcgaggtcggcggcggctgccgcggggaggggcgaggtcaacggcggcgcgagatgcgggcgaaggcggcggaaggggaggttgcagcggcggtggggagggtcgaggtcggcggcggctgcagcggcggggatgggcgaggtcggcggcggcgtgagatgcgggcggaggcggcggaaggcgaggttgcggcggcggcggggagggtcgaggtcggcggcagcgggggggagggatgaggttggcggcggcggcgaggaggggcgaggtctgcaacgtcggagaggcagagcacggcggcggatgcgaggcattttttttctttttcttttt

SEQ ID NO: 13224 - DNA, 753 bp, Oryza sativa
  unsure (1)..(753): unsure at all n locations
cggaaagtcgaaagatacactggaagcacgtaatgatctgaagcatatggaacaacgcgggaaccttcacccggaaccaaatgagaaaggaagccattacttgagtccagccagctacactcttagcaagggcagagaacgaaaagtatgtttggaatgcttggagagcataaaggtaccgtctggatactccacgaatatcaagcgaataataagcacgaaggagaagaagttcacaaacctaaagtctcatgaatgtcacgtgttgatgacacaactgctaccagttgcaataaggggtatcctttcagacaatgtgcgtgcaacaataacaaagctatgtgcattcatgaacgcaatttcgcagaagtcatcgatccggatagattagaagccctcagattgaagtggtgcatgtctcgccagttttgagtggaaatttcaaccttcattnttcattatattgaccaatttgcttggcaacctgggaaagaaaatcgcgatcttcggccctatgactacacacacaatgttcctttcagagagtacatggccgtcttaaaaatgatgttcttaacgcgcttattccaaagaaaagttgccaaggtatatgacagaagaaggattcaaatttcgtaaaattattgagacccttcccaaatgggggcctgaataacccatgaaggagactccgggaaagggaatctcccgaaggaagcataatgacgctgacacaaattattccgaaaggcc

SEQ ID NO: 13225 - DNA, 2210 bp, Oryza sativa
aagaaccccaacttcatggaatgaatgcactgttgtttttttaaaaaaaatgctagtgaagaaggttcaagctgtttgtctgctatatgtggccttatgctatttaaataagccaccttgaggccaacccacttggactaagcttgtggggtcttttggcttaagttcaagcacctttacactggctcctgctatgatgaaatagcatcccttgcattcttgattggtatcgcatataatagcacagatgcatgacaacatagcatgaagtgttcaaattcagactatagaacaataacatggctcaacagcacaaagacgaggcaagatacaaaatgacagaaacaacattttccaggaaggtatttttatatatgacgtaagatgagcatacctcaagggaagagtatagttcttcctcaacacttttttggatggatgcttctaaggacaaagcattagcttcgctataccctgcggtattgtatatataatctgtgacactgtgagtaaataactcttcggatgatggtgcatttgatagcagttgcattccaaaagggccctgatcatagattatggttaataaaaccacaaaagtatctctcaaactgtgaacaaaatcaaaacttatgtaaaccacatgtaatgaattaaattaccattgcatatcagtaattttgtactggtctcgattcatgattagccatctccttttaaagtagtaaagataacaaatccagcaatatttccatgtttatggaataaaaacctaaaacccaactaatgtcatggggtagggttacaaaacatacaggaaccagcacaaacaatatattggtggtaatgtggcatgtgaggcatttttgtttgttcactattatgtgttgtctgaagttaaaatgccacaaagcgggaaattttgggagaaaactccttttttttttcatgccaagatatgaacagtaacatgtctagggttatatgcatttttctaggcgggtcaaaccctgtgcagtaatacagtaaaggctatattacacaggacaaaataaaaaccaaggattaaattcgaaagtgttacatgctgttatccaaactaaagacaaacctgttcaaatagctgaactaatcttctaatagactttgggaaccaacatgggagcatttgcaacaatgaagtgtctcctccagctgaggaaaaaatgttatagcgccagcgcaaatactctgaaattggtgatttcccaaactctgaaaaggaaatataattcaatttctgtgtagcacatagaaaacaagaacattctaatataaagaagggaaaaaatctgtattttgtttaccattagttggagaacagtttaaacaaccatacccatcttgcccaaaacaagaagaaagaagggtcttccatagtgttggaaattgctgaaggtgagggcttagattctctaatgtgcactgagaagataccccacgatttctgttcacacttccagtacatatggacttctgaattggtgttgaagcatacatcagggttgctagagcagacatttccccgattcgttcagccatatcatcaacagtgtacagtatttcatctatctcaatagcagcaagattgttatgcctaaccatttcctgtgacagattccaaagtgcattacaaaaggatgcctcgtattcataacctttgaccctggagaagagtaaccactgcgcccacttgcaatcaccctgaaaatttcatgacagagcagctaggtgaggcttactcctactataagttataatgaagaaacaacagacaagcatgttaagaagcttaatcttacatctatgatgaaaggaagcatgccaagtacttcccgtaccacaactagagtattgacactattgaccataaattagccataacagtatgcatgtgtctctagtatcaaagtagctataacagcaagtctctactatcaaagtagctataacagctgttcctagtatcggcaagtaaggcaaatctttagtcagatagatggaataatccgctgtagctgcaggctaataaaatcctgggcattatattaaggcaggcttcgtgaatgcaacaatgttctcattcgaacggtgctagcagtttctgataataattggtttactgggtaccgagctcgaattcgcctatataagtagtcgatccatcccgc

SEQ ID NO: 13226 - DNA, 935 bp, Oryza sativa
  unsure (1)..(935): unsure at all n locations
taaaagagaaagaaaaaaatggtatttctagttggggaataaatttccccccaacgaccccttaaatcgagatgattatttgattttaagaaaggttttttggttttcaagacaaagaatgaacatggcaaatcacggcgcttccggtgttggtgttcttcttggggngctttaaattaaaaaccctggttttgggggttaacccatttctccagcacacctttgggccaagaaacatactaatacatcacaacgatgttcacgaaataagccaaaataatccntgttaattaagctgccagatgaatcaccaagaccaacgtgttctgaattgaaccaagcatccccctcctgtgcgtgggtgcgcgtgattcttctccacccccatatatatatatatatatatatatatatatatatatatatatatatatatatatatatatatatatatatatatatatatatatatatatatatatatatatatatatatatatatatatatatatatcactggtggagaaaccctttgtagtcccggttcctaacccccctttagtcccggtttccaaaccgggagtaccaaccgggactaaagatcgctatctttagtctcgggtgaaaggctgagcaatctttagtcccggttggtgttaccaaccgggactaaagatcgtgacctttttttttttgcatgcccctgttgctgcatggtttatatatatatatatatatataaaccatgcatatatatgtttcaatacatatatatgcatacatatatatatgtatttatacatatatatgttatgcaaatgcatatgtatatagatatatatatgaacaaaatatatttacattatagaaaatgtgtacacatgcatatagggaaccgagctcgaattcgccctatagaagtagtatacctatcg

SEQ ID NO: 13227 - DNA, 876 bp, Oryza sativa
caaaattgtgcgcacatgtgaaggttgccaatttttcgccagacaaattcatctaccagctcaagagttgcagactatcccgctgtcttggccgtttgcggtttgggggctcgacatggttggcccgtttaaaaaggcagtcggcggttacacacatctctttgtggccattgataaattctccaagtggattgaagctaaaccggttgtcacaattacagcagataatgcgcgagacttcttcatcaacattgtgcatcgatttggagtgcccaatcggatcatcactgataatggcacacaattcactggcgaagtttttaaagacttttgtgaagactttggaattaagatttgttatgcctcagtggcacaccccatgagcaatggacaggtggagcgagccaatggcatgatacttcaagggattaaagcacgtgtttttgaccggctaaaaccctatgccggcaaatgggtgcaacagctgccatcagtactttggtctttgcgaactacacccagtcgggccacaggccagtcaccttttttccttgtctatggggcagaagcaatgttgccgagtgaagttgaattcgagtctttgcgctttcgaaatttccgtgaagaacgctacgaagaggaccgagtggatgacttgcaccgactggaagaagtccgcgaagcagctttgattcggtcggctcgatacttacaagggctgcgacgttatcataatcgcaatgttcggtcccgtgcctttttagtcggcgacctggttttgaggaaaattcaaactacacgggatcggcacaagttatctcctttatgggaggggccgtttatcatctctgaagtcacccggccaggttcctatcg

SEQ ID NO: 13228 - DNA, 1247 bp, Oryza sativa
atgtatttccaagacattagacgaccaagctggagttattcagaacggcatcacttgagaagatgagttacctgaggatgtgcctggctgagcgtgaggtgatccttgctctttatctggagacccaatcactgagtcattaccaacttctggtccttgaaaagttgtctgcgctttagcttcaggaatctcttgatttagatctacatccgactggtttccagtcgggggctctcgggttgttgcagtttcagttgctgccgactggtttccagtcagcggctgatcactcggattggccttgtcgtccgaagcttgggcgccagtcggctgactttcggcagtcggttggctttcggcagtcggctggctttcggcagttggcttagcatctttggataaatttggctctgtggcagccggatcaggttcttttccagttggatctatatcggacggtttcctgcaaagtgtcctttcgatattcagcgtaatttctatgagagaagcatgtcgaaataaaatggtaccgagaggtttatacctggaagatgttctaatctttggcatttgacggccagccagttttttcctgggcatggtatgctttgggggtttattgggcgttcctttgtccccagatttgttgctgtcatcatcttcgtcgtcattaagcaccagctttctcttgcgagaacctgtctgcccagccggtttagaggtttgaggttgcgggtctgacctgattgtcggccctccgcttccctgaacggtgtgctggcgaggagatcggcgttgagcagttgggggatcagatttcattaatacatactcctgaatgagatgcttccacggttagctcactcaacatgaagataaaattatgttttggtcatgagttgaaggtttcagatacgtacctgtggaggcggattgaatgcattatatggtacaactggcagctgatgtgagtagctgacgacaatagcatttgagaagattttatacattctctccttcatgattttaaagtccagagagtctgggtcttcacggtttggatcatgcttgccgtcgaactcgaatgctgtgcgggatctctctttgattggagctaatcgacacttaatgaaatgccgagtgatttgctctccctgtaagccttgctctttgagcttcagcatgcgttccatcagttctaaggcttgggcagcttcatctccgatcggaagagagttccaagtatc

SEQ ID NO: 13229 - DNA, 6743 bp, Oryza sativa
ttgattctttattatttaatacgagtgaattgtggattcatgatcttacagttcatgtttataacaaaaagatgaccaatggaaggaatcccttgcataattatcataaccactttgctattgcaatagtgaggtatgatcctacactgcatgtttctactgaagcacatttacatataagaactatttattccagaatgacttagtacaaaaacacaattaggagaatgagacaatgagttaaactcgtaccgcaaatctgagaagcaagcacgatttcccaacaccagaatcaccaatgaggagaagtttgaaaaggtagtcgctgaaattgaccaaaagaaaaaactagtgttacagtagcagtacatagagaaaatgaaataacaattacatgcatacaactgctaccttcttcatttcaacacagtgttttatcacatgtagtaatgcactcctacagtagtgggaattatttacaataaaatgttatctttccatatcccaaaagtcaacttcccttataggtaactatcaaatcatggcatgaataaatgtcaatagagaccattgtattatttaggactcccttatatatgcaggtaaaagtaactgaataatgatgcatatacatctgctccaaaagtatgttgatatccaaacgggaccaatatgcctagtattagtacttgtggaagatatccaaattcaaaactatggcaatgtttttacacataactacagagcagacggacatgagctgatatgatacattggcacgcacataaggcaacattataaactaaatttcctggtagaataaaatccaattcccattccccaaatatgtatgagacatcagcaaatcatggtgtgatgagcgattgccgaattcccccttttgccattgacgtgataatgaggagatcatcgtcaacaaatataacatcccgcgcgtcgtcaaacccacgtgtgaagaagacgaaaaacgtagccaccaagttgagatccggatcgaaaccatgcgaagggatcccgctcagatccgggcaacctaaccaaacgagcagcacggcgaaaccgggggcggagatcacgaaccataggaaggaaggaaggaggaggtgatgaatgggagtgcttactactcgggattcatggcggagggagtgaccgccgtggatcggagcgccgccgctgcttcgacccacggatctggagacgagagagaaggagacggggggtggggaggtgtcgtaaaagtaggaaggattttgcaggggggcaggatgatgataaatataccgtccgccgcgccgactcggaactcggaagcgggcggcgtttgcttcggctcaactgctccacggacgcgtttgcctcgtggattttattttggatttgctacacatctaccagctgtgtaaaaacaaaaaatatgtactttctccatgcttaaaaaatttaatttaggtggtgtttttttctcttagagataaaaattaagtgttttaatgcaaaacgaggtaatattaacgtataattaattaagttttaattattacaaacttgaaacatagattaatttgatagaattctaagcgccaaacatgcatcagcccaggcccaccccaccccacgttccgtcatttcactcctaccgttgtcggagtaaacgatttactcctatcgcgcgccccaaccacccaactttattcgagtaaacgatttacttcgataataaaaacaactccactgcttccgatcccaccccacgtcccgcatcgtgctcccaccattatcggagtaaatgattaactgcgataaaaacaatttctctgcttccggtatatattatatttttcccgtacccaaccaaccactctcgcccctacttcatttttttccttttttttgggatctggatcgatccaccatcccaccccacagatcggcgacacaccatggaggaggaggatgacaccgtggtggttgatggcagtggccggcgacggttgaggcgaaggcacgcttcgggcctcgctgccggacgctaggtatcaccttaaccagcaaagaggtgttcacctgggccaatagcaacaaccagcggctgctccacatcggcgacattgatagaacaagcaaggaaatgacactctgatttgcatatgcatactctccttcaacttcacgcatgaagccctaattttttttgcaaatcaaattaacgtgcaatcttcaatattacctgatctcaattgatgggctgcacaggtcctacatttgcacatcgtgctccatgtggctggctgcagaggatagggtggagtccgccggtgatggaagttgtttgctatttttcttttgctcgtcatctgtattgacatgaacgagaatgtttttgcattttttcgtgcttgctagatgatgaatggctgctactgcgcaacgtcgagctcatctctataccacaccgctacatccttccatgattccatcgtcgactactgctcgccacccggttgccctctccactaccagtcacaagacatagaccgtgctcttcatccttatagcaagatccagcaaagccaccagatggatttttggctgaatcatttttttttctagtttgattcagctgtgagtaattttgtgagtaattttatcgcttgtgtgtgattgagccagtaatttttttcatttatacgattattttgtgatacagatcaacaatactcttagttttagatttttactcttatactgtatattgaacatatcagtaaaaatattactacactgtggctatgagatcatggctatatcgagaggaatgtggtaattgttttactcgcatagtcgcataccaggaaatctcggtttttactcttatattgtgtattgaacacatcagtaaatatattactatagggtggctacgagatcatgggctatatcgaaaggaaggtagtaattgttttactcacagaccatgaaatctaaacaatatttataatattggtaaaagaattactagcgttgtaagctggtagtaattcttttacgaccatctaggtattgcgtatggaggcattcatgcgagtaaatttgttacttttaaatgagcggatgtgggaggctcggagtaaatgaaaaactccacggagtaaatggagtaaatttgttacttttgaaacgtgcggagatactagaaaaacggaaaactcggaaagaaaaactagacagtaaatagtttactaaaacgcgaaaatagaaaaactacaaataaggaacgaaaaaaaaaatctagatggttaatattttactgggcccatggatgaagcacggatgagatggaaaagagaaaaaagaaacacggaaagtggagtggtaaagaaacgaaaaaaaacaaaccgaggaaatgtgggatgcggaggaaaagtggtgtggtaaaaaacaggaaaaccagaaggagagggcgttgtgcagtgctcaaactaatattccgcgctgtagagcaactttcatatagaaagttttcgtatgaaacgcaccgtttagcagtttgaaaaacgtaccacgagtattgaaatgtgtatctagaagggatgtgacacttgtctaattcgttgtatgacctctcctgggttaagtttttttttaaggacgggagagtacatcagtacaatattgctgcaaacaagaggggtcattaggttgcatgcaaatgtgtatagagtaggagtagcgtgaggaaacaacaaccagcgaataggaggcatgtaggaagccgcagaaaaggcgaagtatgatccattttccatcataacatcgtaatttagagcatatacacatttttttttgttcataggacaaaatttcagaaatcagggcatggcaatatcagaaaatgagttactccaacgattgatgcttatctattccttttgtttgatctcttgtatggattagtatttaattttttaagagttacttactccctccgtttcacaatgtaagtcattctaacatttcccacattcatattgatgttaatgaatctagatagatatcaatatgaatatgggaaatgctagaatgacttacattgtgaaacggaggaagtaccagattagacattttatatatatatccagatttgtagtattataaaatgtttaatccaatactatatttttacattttggaagtgagggagtaaatcatttctttcatgtccctggccgacctgatcagaatcgatcagatgcatgcatcacatgagagatctcagtcaccctctcactcaaacaagatttcttcaagctttgtaacctgatcagattacatcataggagtaccctacataaatattgaatcatgagagagagagagagataggcaatgagtacccagtttcagatcagaactgaaattccaaatgacagaaattagtcactgtttcaggaagtctgcgtatattccaagggttgctgccccttttgcatgttcagcagcagtttgtcatttgacaatatgctttgctgattcgatgcattgccctctccagtaacaggagaggaaactgaacatacaaatatctagcttagctagctagctacactcgtatgggcaatggatgccaattgcatatgcctctctgcagcagctgcaacgaaagcaaaactgttcttctcatcctgtacatctccctgatcatgcagcctgcagctacgtacgtgtttgtcgctgaccaagtatttatcgctgcatcatctgacgaagctccatttctgaattctgatttgttctccttgtgtcatgtgccctctggcgatgagccgacctgccctcccttccagacaattggagcaatcaccatccatactgaaagtgcaggtgcaacggcagttttgtcagtaatatacagtagctagtgcagatgtagctcgtgcaattgcgcggctagatattgttatactatctccgttttaaaatgtaagtatttctagcctgtttagtaaagattaaggtttgtggcggaaaaaagatttattttcacttgtatcattgattaagttttgaattggttaggctctcttcccaaaattctgattgtttcaaaatgcttggatttctgtgtgtacacacaatcagggtactataaatacttatatattatggtatataagttttgaaaactaaccatttttatattttggaatgaaaggagtacatggtttggttcacttactatacacgatcgccgcgagccattcgttgacaacccggacccaggtgctcgcccacccgacatcgatcgtccacctgacgcaatcaatcaaccggatcataacaaattgtaatcagttaccggattatggttacttgatctccttgaatggattatcaagttattaagctaaagaccagtggaagttgttatggctgggattattacttctccatggtttgattggcgttccagccgacgaagagcatagcgaagtacatggcgcccatggcgaacacgaagtggaagaagccgaacccgtacgggatgtcgtcgtcctcgggctgctcgctctcggccttcttgaactgcagattctcgagcaatttcagcatcaatggcgatatgatcataaccctgatcactgatgagttcagttaagtgacagacctggaggcacttggaatcgatccccgtagcgaatgtcgccgtgacgatgacgatcaccgcgatcacgaagctctgcagatgttggacatttcattcttcagatttatacagcagcagttaagcagatgatgacattgttcgattttgttaaatttcatttctgaacagttgattggatgattaccgcgatgttaacccaatctgcactcgttgcaacctcggctttcttgttgcaaatctctgtgtgaggctcactgttcatggcccaaaaaaaaaacaaaagaaccaaagttgtgttataaaatggattcgattccatggatgatcagatcacaaattcagaactgagatccgaatgaatctttcaaagaaaataatcacctcctgatcgctgtccagcagaggaacacgatgtagacccccatcagcccaggcgccaggtagccagccttcacctgaaacccaaaaccaatccaagaacagagcaaatgcagatttcagattcagagattcagacacgagaacacttgttccaatcgagatcgatcgatccggatagaagtaagcaaattagtcgcacaagaccttggagctgagcgagacgccggtcatgatctggacgaggacgagggtgacggtgatgaagaggatgttgagcttgcaggacggccgcggcgcgtaccacacgtacatgagcaccacgcccaggatggagcccacgtacgccgcgatcgacaccacctgcacctgcatatggctgcaccaccaccacctcaacccatgtcagacgtacgccgccattgcaggtgagctgtactcggtatttgatgtgacatatcatagtacttccttcgtatttgggcaccttttttttaaggaaaattaaactcggtaacttttgattaataattatactaaccatatatatatatgctaagtattatgcatattatatcattacattcatattttaaaatactttcatgtgatgctaatttcatatttattggaaatatatagcatggaataaactaacgatcaaaatatatcattg

SEQ ID NO: 13230 - DNA, 10047 bp, Oryza sativa
tgcttttaaatttttttttgataactttttaaatgacatgtataaaacgaggggatgtccctccagggacaaaaatccacctcacaaaatgcaagctgaatctgagactgaaatctgaattgaattgcaaagaggatacgaagcagccgaggctgacgcggaggacgccctcggcgccgaggcagtagccggcgccctggcagctgccgcggagtcgccggagctcggcgaggacggggtggccgaagtcgcggagcgtccaggcgagcaggttggtcgccaggaacacgaaggcgtacacgtacctcgccatcatcgggttcggcggcccgaccacgagctgcgcgcacgcgcagcacgtctcctccaccgccaccaccacgcacctctcccccctcgccgccgcctcgccattgccgccgccctcctccgccgccatgccgccgctgcccagcgtcatcgatccccaagaacgaacacctgacaagctcaactcctgcagtacacaacacaaaagaccatatgcaagattcatcaactgaattaggcagacaaagaaagaaatcgcgcccgcaagctgctttttcgcatcgatcacactcgatccgtgaccatgagattgtccgttagcgcgctatagctcgccgatcgagcacgcatgatcgcgacgtacatgcgtgtgtttcctttgcaccaaagacatgaactcccaaatgagagcgtttgtttttgtttgtccgtgtcttgctttgtaggcaagcccactgcaaatgcctgcagctttcatcatctttgactcgcattgaccattacataaaaacatcaaatccgtactagaaccattaactaactagtaattagtaactaacttatgtcactagtagaacaatgtttgcaagaaaagaaagcttgtgtttaataaaagaaagccgtgtaacggattacttaatcttactccttttcatcattagtatttttgggttgtgtgtaaatctgctcaagaatcaacatcactcatcatcaaagggttttcttccaaggcctgtggactgcatgcagaaggctacacgttgtgctgtgcaatttatctgtcttgacagggacatgaaagaacacatactaaacaaaaagaggttttcaaaagaacattgatcaattcttgatgacatggttggctttaaagcaggattaggacgattaaagatggacaaaaagagatcagcatagctccatggactgcactcactgaagaatgagaaggacacaacattggcatgtttctcattctgaattctgatgaccagcagcagccttggatgtatgtagaaaaagagtaaagcagtaaagctatgaaagcatattatgagatggtgtggaatgtggaaagcaaaagggtctggttgggttaaattcccctgagaaatgatagattgatagtactactacttgtgtgacgtgtgagctaagaatcagagaattttttttttcagatatttgattgcgttggtgctagtatcttcctgctatctcgggcacgctatttgccgatctgttatgaatttatgatcctggtttggaatagtttaaatattcaaacataatttgttaaaatctatttgtttcaaaacattggaatcgggagcaaaacacctagtgcttttaattccttaggcctttgtccttttgtacggttctttcttttttatacatgtaacttttacttctcctatattcaataaaattagcacatgttcgttcaaaaaaaatattggaatatgctgatctacagtattctggctgtcatttcatttcgttgcataacaatattcctcctccttttttgactatagttgtagagtactacacgttggtgaaccgaactcagttctgaataccagaatcttttcttgttggattcatccaggttaagtaaaaatctaattaatcctcatgttctagtctagaacttgagcagaatgaaactatctccttaattcgcctctatttcaatctgatttgcaggtggtgactaattaaacttggcaaactgacaggggttcaattgttcatccatctcacctagctacatgcatgcatccagcaaaatcaaccgaataactaattaatctaccattcaaatatatatcacaaatcacaaaggcacatattgatcgaaacttaattagaaagaatctgctagatgtagtagaggaaggcagccaaggaagactcccacgcaagaaacgcacacagcagctgcttgcaagcgaagtcccggcaggcatccggcaactcatcatcattaacaacaggagatcgagaagagataaatctaccaagaaattaagactcaagaagagattggatattacttacctccaccacgaatcgatcgaatcctacatgcaacagcagggatggagctacgccgaagacgaagaggaagaagagcaggaggtagcttcagcggccgccattggcgagagggcaggagggttttattctggcgggcatcgcatatgtgcgagattgcgagagtggaggaggaggacgagtggaggtggaggtggcgcgcggctgcgcggtgcgcttcttttttttttctttttttgttcccgccgcaaccaaaggagacaagcaaaggaagcaagcaaaagaaaaaaagcccgggaatttacctggcgggaatgccctacttggcagcgccgcccgtctctctccacaaacgccctgcgtggtctctcgttagacttgtgcccttgtccatgcataaatagatagataaatagataaaatcttttttttactgttcttgggaattgggagatgtgaggtcctatatcctctgcggttaccacacacgcatagtacgtggtgtttgtgtacataaccaaatgaagtatgtgtgctgatttcttcttgtgcctggggacatcagtttagacattttggacgttttctaactgggtgattttggattggatagattatgaaaccgaggaaaattgagctaacaaatggttcgtgggaaattgtctaagccaatactgaagtagaaagttcttttttaaaaaaaatcataaataatccatcgaaagtcaccgtttcgattatgctgatcataacaaccaaaaaatagtttataaatgaaaattttatgtgagtttttttatcagttcaaaagcaaatactgaaaaataaacaaactataattgagaaaaaaatcaagtccaaaaataagctttaaattttaaaatttaacagtgacttgtaagcggaaaagtaaactacgggagtgcatacctctattaactgtttagagcgtgccatttgtctgagtcatcaaactcatgatccatggttacatcatagagcaaaattcgggggttatttgacactgttgtttccacttatttactgcgagagagatatttactttgggtattacgacgattaaatccatcaagattaattcaagacaaaatacattacctaatactaacaaataaataacaaaaagatcctggcatttaccaactttcaggtatccttaccaaattatcctgacgatgttgggttggacagaatggttggctggacgaacagccaaactgcaccccagcctctaccagctcttgtacatacctgccacaacagtagaagatttttccaatccttgtcacgtacatgtacgcatgcatacaaattacaaaatctttgggagcctttcttgtgtggctctcttttgcagcacaaggtgaaccacacttgaattgatccctgcctgagaaatttcacacgaaaacagagagcattcaaaattttctcgggtgttccaaacacgaatattgagctactttgtgataatgccatgccctcctcactcagtatgaaaaaatctcacagactataactattcatctcccagagcatcatataaataggacctcgtcaaattttgcaccgtagaaattagaaatacaattttttagtgccgggcaagcaaaagagttgtgttcggctctaatgggttaagcaacggctaataagtgctataaaattgaacagagtaataaaaataatttatatgtcatccaaccaatactgaaaaatagaccacaataaaaataaacccctaaaatcaactaaaagttatgttttaaaaattaaattttagttgcgactaataagctaaccagcggacgaagacaagcttcgtatttacattatttttttctccgtggaatggactgaaaaaatacgagatacttcctccagaaaaacaggcaaatgaagtatcaccattcaccagtcagtgtatatatacatcctgtgcacacatgtctcatctcactcacccaatgaatctctctgtcgacaaattgccatcacaaaacgaatgaaaaagagatactatatgccatgctatcctatcttgcagccaaccagatactactactactacaacaacaacatggctagccagctatcctggagtagaagcagcacaagacagacactaatggcgtgagctgaaccgttttctcgttgatgcttgtcgggtaaagccggtgaggcttgcaaaccaagttgacccaacctgacctgacccctgcagaaagctacagccaaagcaagcaagcagaaattcagaagagattcaggaggccagccagccagccagccactgaagaagctgtagctgctgctgctgctgctagtgccaatccttatggtccatgagcaagcaagcaacaaccatcacttgcaaggaacaagaatcgtcacacacacgcagcaacaataacaaaagcttctcttcccttctcttgcttgcccttttggaccacgttgttcctcaacacgtcaaaggaatgtctccttgatctgctgcaaaatgcagtttgttctagtttattgattttacaagggaacaacagttagtttgaccccttggaaaagagggggtggataaatggaggtagagggtgctatctgctttgactatcacttggttgttaccacatcagatgtgcgagtgcggttagttggtgcagacacactcacacacaccccacgaatgcgtcccctgcacacgcaggctctgttcgttcctaggttcccaccgccctaccctcgttttccgcgcgcacgtttttcaaactactaaacggtgtgtgtttttgcaaaaagtatctatacgaaagttgcttaaaaaaatcatattaatctattttttaaaaaaaaattagctaatacttaattaaccacatgttaatacgaacatcgttttatgtgccaaggagcaacccctcctcccgaacagaggctaaggacgtgtttggatggtgccctgacctgagcgctctcactcagacaggtgcatccaaccacatgccaccaaaatcggacgcctgagaatcgtgcctgactcaggcgtgattctcagggtgtgaagcaaacaggccataaatctacaaggatgcgggcgggtgccagcttttccactttttactactactagctaccaagagaggcaattttgcctatgtatgcatgtgttgagtgttgagccaggaagttagctatattctggctctttccaactggcagagacaaatcttgaatctaaatttgataacccatggagtgttaaactagttaaccttgtttgtgtaagactaggattgatactcaaaaatattctaacaagaaaaacttggaaaaaacatgaagcatccatgagagttgagttgagaccatgagtcatctcccacaaaccggagaaggcgaggccaagttcaactctaacaatgctgactagtagtacacaagaatttggctcagattcgcacctagggtccaaaacaccgtgagtcattttatttggcccatatgacagaggaaaaaaaaaacacaggacttcaacaaatcccagtccctcaaatgggaattcaggccgatgtttgtcggcaaaatgatgattttcatgatcagattcagatcaaaagttcgtgcacaggatgtgattattatttcaaaacagaattcaacttttgttgtttcagacacttgacatattcttttagacaaccaattctgactaatattcgtttataaaaaatcagtaaatgttcttcgtcttttattattgatgttaatacagagtattcagagtttcagttaccatgaacagctccgatgggggcggcgtcggtgaagaacgcagcatccaggtgcatgtggaagacgagatgaactcgccggcgcacatacggcggcggcggcggaggctgaccgtggcgggaggagcaggaactcgcggagtcgcctcgcctcgggttccggcaccgaggctggggttcgtcacttcgtctaggagaggagagaagtttgtggttcatccagacgctccaccgcgagcccatccgcggcggccgtcgccggcggaagagctctagcggcggcggcgccgtcaccggagggaaggaagaaaggaggggcctatttggtagcgatcctaaacaacagggaccgaattgcaaaatgtttcggcccaatgggcctcgcaacgaccattcgagttgggccctaattgggccgcaataggctggactcctcgaagggcaaagcctaattaatttcccgtagttttggactaatcaccttcattagctgtagaacaaacctgtgtaagcggcaatctcggcggtgagatgcaaggatcgaatcaaacaagtggagtgcatgttcatggggaaatgggagacagtagaagaatcaagaatagtaggtatagtggattgatcactattggcatactgttatcaaagtgattgattcagtagcttcctttttatcctcttcagttcttcggccaacttgaaaggctccactgaactctgatgcaacagtgtatgcccaccgtccaatttcgattctcacttgttgtcttcacatttttaaaatttgtaggtctttgagagaacattcaaattcggtggcttgtgtcggttgctgttaactgtatgaacatttctggtagggttacacccttgttttaaagaaatcaaattcggtggcaaacatatggggatgggagggcctatttttaaactttgttttaaaaaatcaaattcagatatcttgagtataatttttataaaaaaaagagagaaaactaggggaacacagtagaagaacaggcgtgctagcagctaaagtagtgaaaaggtgcacataacggtcatctcggacacaaagcaagcgagatcagattcatcatcttcacttttttcacctcaaaagaaccaaaggctgaccaaccagtgtgtgtgtgtagtgccactaatcaccacagcttccaggagtaactaatttttaatcttaaccaaagccagtctcccagtcccaaaggcaaaagttaaacaacattataatcacaagctcttttcacttttcagcaagtcatggtttgcttaaacagttctgtattattatttggactgagaatctcgggctgtcatcctctgcttcttctgataccggcagatgttccaaccaagtgactaaccaatcaatgaacttaatcaaaagattattctagtaagtacttggttaacactgttagtctccagtgaacttcacatgttcacagtgcatgagagttcatctcttgcagacctgcagtgttaaacataatgatagtaaccagcaggaacccttctagaacaattctacatgagaaaatgttattggaacagatcatatttctggctggattcttcagaagcaagcaagcacatggcaagaaagccaggatatctgcacctcgactatgccttaatcaagacagagaccctggaaaccctaaagaaagtttgcaccatcctcacatacttttgtggctttgagagattctcttaagtgcatttacaaaagttaatttgaattttgcagttgtagtttcaccattctgctagcattctacataaaagatttgattaaccatttaggtagtgttttgagattttttgtggttggttttagagataaaaattcttcaaccattctagatatgcacattcttaaaaatgccaatcacaaactgctaaactagacagaaagtcagtatgagacagaattcaatcagaagccattgaaaattcagagacagagcatgtggctcccctattattcaggttgatggaatgtatagaaagcaggtcaaagtataaaatgacaagcaaaaccagaacatgtttcttttaatctttatactctgcaaagtgggtaaccactagcagcaattcacatcacaaaacagaaaagagcaggaggaaaagaaagaaggcaattgatcaaactagaggattacaacactagcaagtagagaacaaatccaatccaacacataagaagaacaactctcaagaatccatactaaataataataagaattgaatagccagaagtaattgtgatacagcaggaagaaatgacacagaatccttttgttctaaaacttatgtcttactactactgaatttaactgaactgaactcatgattctcatctatacaaccacatatatccctgcacctacaatcctctgccaaaccctcctgtccctctcaaacttttccttattattcacaacccaattagccatcaatcatatgttcccaaatcctccaaatccccacacccccaccacttcccaatccctttcaacaccacagcaacacaaactgtttcgatgctgacgccgacaaatcataaccaaacaaaattttgtgcaccttactacgctcttcacgccggtagtcatcaatcaaccaaccaagaacactagtagctaataagaacgataatgaccacgtatacttgtgtgcgacttccgctgctgtcgatttgccggatgtgaggagcaagagcggaacacatgcatgtttccaaacattcttcggagaaattctatcaatgcagcgggggaggaggtggtgatccatatggtacgctgtggatcggtggccatgagctgtggtgttgcagagggggaggtggtggtgagccatatggtactccatggacaggtggccatggcccggggtagtaaggtggtggtggtggtggtgacaatgctggtgttgcgccgccgcagggtggcggcggcggtggtggtggcggcagctccggacatggcggatgcggttgtggcgcgggtggtggcggcggcggcggcggctgcggtgggtggaagattggtgcaggcggtggaggcgatggtggcggtggagatggcggtggtggtgaaggcggaggcggtgatgtcgacggtggcggtggggatggcggcggcggcgaaggcgccgccggtgatggtggtggcggcgatggtggcggcaggcccgggacgaacggcttgcactggaacgcggcgcagttgacgggagggcgcgcgaagaacgcggcgcactgccgcagcgtccgctgggcggggcggttgggcaggcagttcctccggtcgccgtagcgcggcacggcgtgcgcgcaggacggcggctcgccggtgaagaagttgtacgcgaaggtgaagttcttgaggcgcggcagctcgcacaccgcctgcggtatcgcccccgtgagcaggttgtgcgcgacgtcgagctgctccaccttcctcatcccggccaccgccgacggcagcgggccggcgagccggttgaagctcacgtcgaacaccgtcacctctcgcagcatcccgacctccggcggcaggcaggagctgaggcccgtgttgatgagcaagatctcgttgagcgtcccggacatgttgccgaggctcgccgggaggcagccgccgaagctgttgtgcgcgaggacgatgacggagaccggcgagttgccgaagttgtccgggaggtcgaagcggaagcggttgtggttgaggaagatggcgtcgagcggccggtcgaacagctggcggggcaccccgccctcgaagtcgttgaagcggaggtcgaggaaccggagcgcgggcatgtc

SEQ ID NO: 13231 - DNA, 3308 bp, Oryza sativa
gtgcagaacgtcgaaggcagaggttccggagacctgctctcccgatcgccggtgcacgccggcgagcgggatggagtagtctacgagcgacggcgcagtacagagtaggaggcaaaccctagattgattttttgcgtatgttgcgtgaagacggcaggtcggtttatatagagaagggtcgcttgatcagggcgccggactccacgccgtttgcacgcaccggatctttcggaacgtttccaaaacaaaaacgaatccgaatttgcaacaaaacaaaactgcaaaaggaggctgcatctgcgcaagggtgaggagccaatttttcggaccattcgacgcgtacgtcgtgcacgcgcgccgcctgccctgccctgccctgcccggcccggccaggcgaggcgagcgagcgcgcgcgtgtgtttcccctcttctctccaccacacatgcttcaagcgactaggagggcatcctcccttttaaggaggtccccctctcctagaataagcaaggtggtactaaactccacatgcatgccatcccatgaggtgggcttttgtgattttccaaagaattaatcttcgagtgggctaaggcccattcattaattccaacaatcccccaccaaatctcaaaatcccactgagatttgccttttccaatgtactgtttatataccagcggttcgatggagaccaattaaggttgaacatccacctagaactccaagctacacttactcacaacttgaacaatggactacgccttgaattgcaagtcttgtgcaagcaagtttcactcaaagtcttatctggtactagaccgtctgtagactacccctcgggtggagcgtataagtcatactcctaggtctttagtaagcttcctagaagattcacccaaaatcttcatagactgcgaccaacagtcaagctcacaaaggtgagttctttcaagaatgctctgcaggacaacatctttgctaattaaagccaacagaactcattaaggcatagccaacctgccttgcagctcacgagagtatatgcatcttcacttggagagggtatatatattggtactctcctctagtttattaatggtttgttcttcccaggatctaattcacgggatctccgatcacatagactgggttaccaccatagtataactcacatgggtctcaaacacatctccttcgatgcattgtctatcacatttcgtgatagtcccttcgtgaagggatctgccaggtttctcactgtttggatgtaatccaacgttataactccggagtttcttaatttcctgacagacttcaatcgtcttttcacatgtctagacgatttcatattatccttagaactattcactttgacaattaccgtttgattgtcacagttcataaggatagccggcaccagtttttcaacaacaggcagatccattaatagatcacgcagccattctgcctcaacagtagcagtatccagtgccgttaactctgcttccatggttgacctcgtcaaaatggtctgtttgcaagacctccatgaaacagcaccaccacccagtgtgaaaacatatctactagtggctttgatctcatccacatcagagatccagttagaatcactataaccctccagtaccgcaggatacccagtatagtgaagccccaattccacagtacctttcagatagcgcattactcgctcaagcgcacgccagtgatcatctcccggattagaggtaaatcggctcaacttgctcacagcaaaggagatatcaggcctagttgcactagccaggtacatcaacgagccaatgatttgggagtattccagttgattcctagcaattctcttgttcttgcgaagcaacaagctaggatcataaggtgttggagaaggcttactatcaatgtagccaaagcgattcaagatcttctccacataatgggactgcaagagtgtaatcccattctcacctctaattagcttaatgtttaagataacatcagctactcccaaatccttcatatcaaaattttgagacaagaatgatttaacctcatttatcacctcaaggtttgtcccaaatatcagtatgtcgtcaacatacaagcacaaaataactccctcacccccaccatggcgatagtacacacatttatctgcctcattgactgcaaagcctgcagatgtcaatgttttgtcaaatttctcatgccattgcttaggagcttgtttcagaccatacaaagacttcaacaatttgcacactttgccttcttgaccttcaactacaaacccatcaggttgatccatatagatctcctcatccagctctccattaagaaaagctgtcttaacgtccatttgatgaacgagaagaccatgtgaggctgctagggaaagtagcacacgaattgtggtcaatctagcaacaggtgagtaagtgtcacagaaatcttcgccttctttctgagtatagcccttagcaacaagccgagccttgtacttttcaatagtaccgtcaggcctaagcttcttcttgaacacccacttgcaccccacaggtttacacccatagggtcgctctgtcacctcccaagttccgttagcgataatggaatccatttcactacggacagcctccttccagtagtctgcatcaggagatgcatatgcttctgaaattgacttaggagtgtcatccacgaggtacacagtgaaatcatcaccaaaagatttagccgtcctttgtctcttactccttcgaggagcttcactgacatcctcctcagagacaagttcatgtgtatgttcagtttgttctggtggtgtgattgaactgggaattatttcagagggttggttcgaaccactatgtgtatccttcattgggaaaaagctctcaaagaagatagaatcacgagactccataattgtaccaacatgcatgtccggtacctcggatttaactattaaaaatctataggcaatgctatgatgagcatatcccagaaaaacacagtccacagtcttaggtccaagtttgcgcttcttcgttattggtacattgacttttgccaagcacccccatgtgcgcaaataagaaagtgatggttttctaccaatccatatctcatatggtgttttgtccttatttctgttaggaactctgtttgacacatgatttgaggtcaacaatgcctccccccaccatgccttaggcagtcccgcggtgtccaacatggcattcaccaagtcagtcagtgtgcgattcttcctttcagcaatcccatt

SEQ ID NO: 13232 - DNA, 42979 bp, Oryza sativa
  unsure (1)..(42979): unsure at all n locations
attttaagatagtctagagcctcgtctttcgttttcaacaagtacacatagcaaaatctagtagcatcatcaatcaatgtcatgaaatatcgttttccaccattcgtcaacaccccattcatttcacaaagatctgaatgtaggagttctagtggtgccaagtttctctccttggcagccttgtgaggcttgcgaggttgcttcgattgcacacaactatggcacttagaacctttgacaatggaaaacttaggaattaaacacatgctggaaagccgagacattaagccaaaattaatatgacataaacgtgaatgccaaacattagcctcatcatccacactgccacaaatatggttcacagacttattgcagaaatcagaaagggaaaaacggaacaggcctccgcactcataacctttaccaataaaatatccatgtttagacacgactactttattagactcaaaaaccaacttaaatccgtctctagtcagacgggagccactaacaagattcctgtcgatagaagggacatgctgcacgttcttcagctgcacgatctttcccgaagtaaacttcagatctaccgtgccaacaccatgaacagaagcatgtgacccattccccattaggacggtggaaccccgtgcgacctgataagaagaaaacaatgagatgtcagcacaaacatgtacattggccccagtatcaacccaccaattagtagattgattaactgaaaaaacagtaggtaaattaccatatccgcttccatctccagtgttgccaatggtcacattagcagacttagaagtctgccctgcaggtgccttcatccccttgcgctgtggacacttcctagccagatgaccaacttggccacacacaaagcaagtcctctcatcctgattaggattgttgttgttcttcttctgcttcttgaagttggtggtctgctgagctttgtattttcccttgctcttgttctgggccttgtgcacaacattggcactggactgcccaccatcgcccttagacgcggcatctttttcccgagctttctcctcaacatcaagagacgctatcaacccctcaacggagtattcctgtctcttgtgtttgagtgcagtaccgaaacttctccaagatgaaggtagttttgcaataatgcacccggccacaaatttgtcgggtaagacacacttaaggagttcgagttccttagccatggtttgtatctcatgagcctgttcgactacagaacggttgtcagccattttgtagtcatgaaactgctccatgatatacagatcattgctagcatcagtagcaccgaatttagtattcagtgcatcccacaactccttagcgtcggtcatatgcatatacacctcgaccagacgatcgccaagaacgctaagaatgcatcccacaaagagagtagtggcttcctcgaattgcttctgctgttcagcagtaagaactccttcaggtttgccagtactcacccagaagcatttcatagctgtcagccacagagtgaccctgatctgccatctcttaaaatgcacaccggtgaatttatccggcctcagtgcatcggcaaaaccagccatagtaaaatcacagtgcctataataaggtttttggattgttgagattatagacatataatgatttaatctattccataaataaatcatgacattacagatgaaaactagcatgaacgcatcattagatctacacatgtaaactacacagtataacatgaacagatcaaatatgcgcaacatattgaacacgtaccgaggtgacggaaagaccggctgcttggtcgaaacttttcgcaagtgtctacgaaggcacgaaacacgcgagcgaagaggaaggcgagccgtcgcgaacgaacagggagcagtcgcgcgaagcgcttcccaaaaaccttattgcagaacgtcgaaggcagaggttccggagacctgctctcccgatcgccggtgcacgccggcgagcgggatggagtagtctacgagcgacggcgcagtacagagtaggaggcaaaccctagattgattttttgcgtatgttgcgtgaagacggcaggtcggtttatatagagaagggtcgcttgatcagggcgcccgcacgatctctactgcgcgtaactgaaccggataagtcgcgcgtaacttatccggactccacgccgtttgcacgcaccggatctttcggaacgtttccaaaacaaaaacgaagcgcaagggtgaggagccaatttttcggaccattcgacgcatacgtcgtgcacgcgcgccgcctgcccggccaggcgaggcgagcgagcgcgcgcgtgtgtttcccctcttctctccaccacacatgcttcaagcgactaggagggcatcctcccttttaaggaggtccccctctcctagaataagcaaggtggtactaaactccacatgcatgccatcccatgaggtgggcttttgtgattttccaaagaattaatcttcgagtgggctaaggcccattcattaattccaacaagttcctctcaaaaaaaaaatcatatattagtcaatcaaagggtgtgtttacttcacaccaaaattagaagtttggttaaaattgaaacgatgtgatagaaaaattgaaagtttgtgtgtgtaggaaagttttgatgtgatggaaaagttggaagtttgaataattatcttgaaactaaacacggcgaaagataaaaggctgttcttgactaaagtcctctatagaaaacatgattataaaaatataggaatatggagaaaaaagtaagaatataatatcatatttattttattcctttaggattttttaaaacacaagaaagttttaaaattgatgtttgattagaatacatgaattttaagacataggaagaagaaaccttgaagtgatgcttattttcctttaaaattactctgcaatttctcatttcatagaatttaaaaggaatggtaaaaaaaaatcaatcatctgtttcaactttccagagatccatataattgttttccataagcgctctagaatttctatgtgttttttttttcaaagggtgccctaaatgcctggaaaacaacacgtcctttaatttgcctaaagcgaaaaggcaaaaatggggagcagaaaaagaaatccttgattcgccgaaagctacaaaggggaaatagagaacagaaaagaaaaaaaaaagggagaaaggagggaaaatgaaaacgtttcggccacgcgtacgtaggtatacccaagagatatagccagtgagcctttagctggagtcctacacgtatgtatacatcgaatctccctttcacgcaccaattccttcggtctttcttgccgtcgctctcttctcagttcatacatgcatacacatacgcgtagctagctagttagacgtgctatatatatatatatatatatatatatatatatatatatatatatatatatatatactccctctgtactcgtaaatttagtatttaggacaatatttaagtcaaactttaggaatataaatcatgaataacccttaagctgttgaatttgaaaatgtaaaaattatatgaatatatttatcatgaaaatactttcgtaagagtatacatatattacttttcaataaatattttttatagaaacaagatgttaaagttatgttttggagaccgtgtcgctgtccaaaacgactttctttatgagtgcagggggagtatactcactttgatgatttgatgatcgcgtaactgcccacacaaactcacttcaattcaagctggtcttacagggcttatttgatttggagaaatttaaatccatatgaatgggaaccgtgaaagaatagcaatgtttgcatacatcaatccataaaaattttccaaaaggtttaggtggatgaaaaaattgctatatttttctctgtacaactggttggaaaggaaaattttctttggttttccagtgcttcaatccttttttaggtgaaaaatatggcgccgtaaatatagctactcccccgtttgtacagtaattacacatgtgtaatttagagacttacatatataattttagaacttatattataaatacaataaaattacatatgtaatttagggacttacaatgtaaatacatatcgactatttttttagtaaaaaatttgaaaaatatggcgtcataaatatagctcataccatccggtaaatcgaaaagcactcatatgaattaattattagaaattcaaatccttcggttttcctccaaaacgaactaagtcccttttttttccctacacgaattccctcgctagaaaagcttcttttgcagctgattggcttacctagaatagcaagcatatacggggcttggagcggatagaattggagcatacagatatatacaaaaacgcgtaacgcgtagtttgttgcactggcatcgtgcatatatatatatatatatatatatatatatatatatataacatttcataataacattttcagagacggagaacggcctactcgctttccctgtaaatccaagcagtcgagcacgcaagtgttttgtatctttgctatcgactttaatttgccgtgtgcgtgcgttcggtcctgttcgtttatactacaaagagtgaataaagttttgagtaaacttttgaaaactgtaactttagtcacaaaattatttgtttgctgcaacattagcgacatatgtttcagtttgctgcaacaatatcgtgggaaattatcacaaaactgtaacttttatatgttatatgctgctacagatgttaaactgctaaacgatgtgtttcgtgtgaagactttctatataaaagttgttctaaaatatcagattaatctatttttcaagtttgtaataattaaaactcaattaattacacgttattaccatctcgttttacatgaaacatttaattttcatcttcatttttcattttcagaagattaaaaacaccaccgaagtagataagatgagaactagacgaatggaaaagacgaagttgatttagggtgtgtttgaggagaaggggattggggagattgggaagatacgcaaaacgagttgggccattagcatatgattaattgagtattaactattttaaattgcaaaaatggattaatataattttttagagcaactttcctatagaaattttttgcaaaaaacgcaccgtttagtagtttggaaagcgtgcgcgcggaaaacgaggagctttctcacccaatgtcactggaaagaacacagccttagtcgcacgtaaagcgagaaatataactaatatataattatttaaatattaatcattaacagtttagaagttggatatatttattttaacttttaaaaatatttttgtgtaaacttttttataaaatatatcgtttactagtttagtttaaaaaacgtgctaatagaaattaagagttagctaatccaaaccgaagtctagatcgggcccgaagcagatggattgctttgctttgctactgcatgcccatccgattgcgtgtagaggagggcaagtagctgcagcgccagctaagctgtgcgtcgtcggagcagctccgaaaactgttggcaatttggcatgcatggcaagcagggagagaagaagaagaagacgacgagcttgcctagcgagtagcaacaaagcagagcgcgtgcagcaacttcctatccagctacaattgcagccttgcatttaagcaaagtaggagttagcaggccggtataccataccgctagtgctgtaggagtacatgcttctgtacactatagctagaagcaacagtagcagtgtagcacagtgctaactgctacccaactgaactaccgagcaccaggtttggtcagggttacgctgcctatatatataatgaaacaaaagccaatggacaaggccgtgctcagttccatttcaatttttttaagtgtacggatacacatttggagtattaaatataaactaataacaaaaataaattatagatttcatctgtaaactgcgatatgaatctattaagggcatctccaacagagggccaaataggttcctaaaaattattttttgggattttggttaaaactaggcctccaacagactgtcaatcacggtcctaaaatttaccccctcctaaaatcggtgccaatctcatcagaatttgggaagcggtacgccctcccaatcccaccaatcgcgccaattttttttactgtccgcgccattttttttccgcccgcctccttttccttcccgctccttcctcgcgtcgtttcctttctcgcgagaaacagcgctcacgccgccaggctagggttttgggagctcctcgcgctagctccgtcccgatccgccggccgcccgtcgggggactaccggcctgccagccgtccatccaggggcagcgtcgccggccgcccgtccaaggcaccaccacctcgctgtcgaccgtccatccaggttgtcccgacgacaacgtgtgctgttactgattcacttcgaggtattttcagagaaacaactttattcttttcaagcttgaagttcctgtactgatttccccacaccggcaatcccccacacagccatctagttcatagagatatctcccaattttttgatggagatgcaaagctcctcccttaaattgtttcccaaatcactgccacatacctcagttgcagcacttatcttctgaataatgcaatcaaaaactgttgtcctgtcctcttcaaatgatttccaatggatcaggcatcggtagatgaggtatgcggcaataggccttgcaatagagaaacccatatcttcagatatgcactttatcaacaactcatggatattcagaaaaatatagaaaaaaatgttgaggcacaacacctgaacgaattgtgatactgcttcaaaagaagttcagaattactaagcatcatacctgttgctgcttctcagcttcaggatcattcaggcgtcagttgagaattgttctcctagattgaacttaacttgtgttaaatcaggaactcattttacgaatatactgatcaaatataatttgaggattatactaacatggatgtcacaaaagttactggcctataccaattgttaattcaatagtgtttgcttgcgtttgtgttcagtcagatgcattcttcttcaggttgtatagcaccctaaattaactaaacaatgagcttctatatgtgcagggttttgtttgcttgcagcagtatttgatgaccttttcttagataatttaagtgtttgatgacctgaccagttagctgctcattggctagatattgctattagtttctagtattttctgaccttaactttttagccttttgtaatggattcagtgaacatatgtctgaattaaattgcagagtcccaagatgctagtacttctacaaacgtattagtagtactgttcttatttgatcactaaattaaacaaacatgtactatttgtaggtcctattgataatggaagaagaaggattctatactaatttgatgaatgagggcaacgattccttagattgggatagtttgagtagtatgcctgtggaggatgatatgagtaaccagcttgatgagaatggcatgagtagcgagcctgtcacgcagcagttcccaactgctgagaggactaccgtggctagaccaaatcaaaaaagatcgaagaattttagcgaacaagaagataagatacttgtgtcggcgtggttgcatgtaagtttggatccagtgctaggcacaaatcaaactcgtgctgcatattggactagaatatatgagcacttctacaaaacgagtaaatccacaccagatcgcagccaaaattcacttatgcatcgttggaaaactatacaagagaatgtcaacaagttttgtggacatctgagccagattgagggtagaaggcaaagcggggttagtatacacgacaaggtaatacatagttatgtagcttgtgtttttatgttactttataaataaaaatgtgatgtttgctaactacattcaccatacttgacttgtgcagattgctcaggcaattgctgtatttaaggagttggaaggaaagccctttcaattccttcactgttggtctctcttgcggtcacaatctaagtggcatgataagatgaagcaaataacatcccagaaaccctgtgccaccaacagacagaagccaagcacagatggttcagcaaaagctacacccacaaatgatgaaactaccaatcatgttggtgaagataatgaacctacagagaccgaagagccaaagagaccgatgggtaagaagagagctaaagagcagttgaggcgtggtgaaacatgcacagatgcttttgatcatttgtgggagaaaaaaaaagaagctgatgcagagaagaagaaggagagagatgagaggcaccaaaagtcatatgaactagataagcagaggcttgagttagataaaaaaaaggtcgcgaatgagacggatgagatacagttgaagaggatgttagaagaagagagaattatgaaaatggacatttcttccaagcctctctcacagcagcagttctacaagagtgtacaagatgagatcatcgctcgtcgcatgaacagttccggttgataggtttgtgtttcataacagtttacattcagttgagtgcctgtgttcatgcatatacttgttcttgtgtccatcttgttgaaatgctgcctttgcacagctgcactacaccatctgattcttaaatatgttgcatgatccactacaccgtctggcaattgtgtctattttgtgtctctaaattaggtgggtttactaagtctatgcaatgcaaactatttaaattcagaattgtctattcagtacttgggtaattccctcatcctgctgtcagtaatgcttctgtctttgttgctgttgacagagtcagaagcctcatatattttgaaatttgtactaatgatcggtcatcttgctgacaagctgatgcatatattgcaaattatatataagctgaactgtacctatgactaggttgacaagttaaaggaagtgcacttttattaattctcctgtactattcttaaaccgaacagtacaccatttattcaattcatgaaaaacaaattaagatgatttggcaaatcctcacatatgtatattatttattacatggaattcaaacatataaataaaacctcaatatttatccggataatgttgccacaagtgctccactaggtcttcacgtagctgatagtgagtttcgtcgtcccttatttttttgtgcatctggataaaatcatcaagatcaggtatttcatcgtgggacactctgacattttctcctccctctgggaaccgttcttcccaatcaacttctccctcatcttcaataatcatgttatgcatgataacacaagctttcatgatgtatcccagagtcttttcattccaatgtcgagctggccctcgaacaatggcaaatcgagcttgcagaaccccaaaagctcgttcgacgtccttccttactgcttcctgtgctttggcaaaatatttcctcttgttgccatgtggttctggtatggtcttcacaaatgtggcccaagaaggatatatgccatcagcaagataatatcccatcatataatcgtgtctatttatactatagttcacttcaggagccttgccttcagctagctttgcaaatagcggggatcgatgaagtacattgatatcgttatgagacccaggcataccaaaaaaagcgtgccaaatccagagatcctttgaagcaacggcttctaaaattattgtaggctcgtgcacgtgcccttggtacataccgtgcaattctgtagggcagttcttccacttccaatgcatgcaatctatggagcctaacataccggggaaacctctgtcctccccaagttcaagtaatcgagttgtatcgttctcattgggtgatcttaagtattcatgttcaaaaacttgtacaactgctttcacaaaccttctcaggctctctatagcggtactttctgcaataccgagatattcatccaaagcatctgctgctataccataagccaactgacgcattgctgcagtgaccttttgatgacaactgaacccaattaaaccagctgcatttctcttctgcacaaaatagtcatcgtgatcctctactgcattcattatgcgaagaaacagaggcctgctcattctattcctgcgaatcataactaatgagacatgcatatctatgcatataacaaaaataaattatataaaatttacttatacaaacctgcgcctgaataaaactgggccataggtaggattatcagaaaagtagtcttggtataatctcaagtgccgtgcttctctgttgcgatcaatcacttcatgtcccatgactgacccaccatgtcttggtgcattgacagagtgccaatagctatggacgatttgtgccgtggcaaaaaaaaaatcatcgtcatcgtcagacgatgattcatccacgagctgttgaaacgaggagcgaggtcgactcatcttggatcaaatcaactgccaaaccattattcatcacaataaattaagtttttccccttgcgacgttgtcagatcaaattaaaaaaaaatgtgattggccttccgtttttccaaatatttattcatcatatcaaattaagtttttttttccatcaagacattgtcagatcagaaacataaaaaaaggaaatagaacaaagtaaaaaacatggttgctagcaaaattttgctactcacgcactgcacaagagcttgtgcctgtcaccaatcgttgctgcttgctgcagctacctgattaagtgaggtgctaacgtcgccggccctgacagaggaagagctctgattgagtgaagtgctaacgccgccggcgctgacagaggaagagctctatgtgcgtctatagcactgtgtccttcgatcaatttcgtatatcgctgcgtctgatatataacctcgccaacggtatcagttgcgatctcgcgcgcgactaggatgagcagccatctccttccgtccgcgtgcgtcgcgtcgaccatgcccattcccctccgcatccgcacgccgcgatctcctcctcgcctctcacgcgcgacgcgatctccccctccgctctcgcatgtgattttaacgagcaggtagaaaattagttgggaagggcccactaatgatgatgtggaaaaattttaaaattttgggaaccaaattttagtcatctcttggagaagagggtgtattttaggctaaatatgtttttggctgtccccaatacaggatttttgggagtttaattttagtcatctattggagatgctctaagcctaagtaatccgtcattagcaaatgtttattgtagcaccacattgttaaatcatgaagcaattaggcttaaaagactcgtctcgtaaattagtcgcaatctgtgcaattagttattttgttagcatatatttaatactttatgtatgtgttcaaacgttcgatgtgataaggtgaaaaattttagcctaggatctcaacagggtctaaattttgttttgataggaaatgagctaattattattgctaaagatatatatgcccaattcaatcccaattcaatatcagtatttagttcacatcaaaattgaaagtttggttgaaattagaacgatatgacagaaaagttagaagtttatgtgtgtaggaaaattttgatgtgatgtaaaagttggaagtttgaagaaaaagtttaaaactaaactcagccatcatcaaccactcttccaagtaaagcctgaatttacctagggtgaattcttatgttccaccgggagttttgattatagcctcgtcggatatagaagaagacgaagacgaagtacacacgtgaaacgaaaaagaccattaatgtataattaattaagttttaattattataaacttaaaaggtagatttatttgactcatatgtaataaagtttttttttcaaaaacatgttaataaaaaccgagataaaatcttcatcttggtcgtaaacgaacaaaggcatatgtgtcacctttttagtctttcattactagcacggaattttcgtcacacatccccggtagtagaaacaaaacaagtgacgaaccggcagtacgcgtttactagcggcgagcggtggcacgccgcgcaacggcggcggcgacggcgacggctcaaccgacggacggacgcggacacgcgtcggccggcggcggcgcggcgcgcacatgcagatgcacacgcgttgcagaagtgcagaggagtactggtgccatgggcctacgtgtacatgacgcagctagcactagctcgtggcactgggaaattcactttatacactccaacactccctcttacacgagaccctattaaatctcaagcgtgcttcctctcacacgagatcctatcaaatctcaagcgtgaaatattggagtggactgcaattattttatttaatattggagtggactgcaattattttatttnnnnnnnnnnnnnnnnnnnnnnnnnnnnnnnnnnnnnnnnnntgataccatattaagctgcatgtaacaatcagttacacctaaaagcctaaactaataagaaaagacgggtaattcactctatacgcttcaacaaggagggcaaatcagtcatgctccctcttgacttacgaagaaagtcgtttagaagaatatttaaatcaaatcttaaaaatataaatcataaataactatcaagttgttgagtttaaaaatataaaaattatataaatatatttgtcttgaaaaatactttcataaaagtatacatatatcactttttaataaatatttttataaaaacaagaagtcaaagttatgttttagagaccgcgtctctgttctaaacgacttcctttataagtatggagggagtatccatttcacatatacttatggtcttgtttacatcccaacaaattttagccaaaaacatcacatcaaatatttagccacatgtataggacattaaatataaaaaaacaattacacagtttgcatgtaaattgcgagacgaatcttttgagcctaattacgccattatttgacaatgtggtgctacagtaaacatttgctaatggcggattaattaggcttaatagattcgtttcgcaatttacagttggaatctgtaatttgttttgttattgtgtacgattaatacttcaaatatatatccgtatactaaaaaacattacacccaaagaactaaacacaccctaacataacaacttcatctgtactaaaataaatttatttttcaaccattacacatactttattcgtctcaaaataaactaacctgataggaaacgtgattcatcgtattttttgacgaagggagtataacaatataaaaaacaaaaactaaaatactcctacttaatcacatcccaatataattattttcacaacttttaatatagttatttcttattactcttacaaacttcgatatattgattactcaacaattaatttattttgggataaatgggtggagtaaaaatgaacgcagagtactgcatttgttgctgtggattaatcgccgcgacagccagccatggctatgcccgtacccacatccccctgggagaaataagttgagcgctttgataaactttgattgttgttactcgaacaagacaaggcactgcagtttcagaggatccgcgcgccagtggccatcgccgaatgtgggcgatgtgttgatggccaccagttgtgcgatgatgtgtgtactagtgtcaagtgtttgtgtgtgtggatcacgggacgagacgatgtgtgcagttgccgagcaggggaagggcaaaagcaggcaaggattgaacatggctccagcagtccagctccagatgaaaagagcaccgcgctagtttcccaagtgatctatagctagcaggtgcgacatgtggtaggctggacatggtagacgaccgaccatgaaccaatatacacgtcgactttcgaaacgctaaagttttttttcttttttctttttgcctacaaaactacttaccttggacttgtacaagcactagtactatattattagtgtgtaaattagtggtcaaggttatatttaggagacagtaacaatctagcagagtggtagtacctgggctgcacggagtagcagcagtagttcaacttcaaagcaggcacgggccccgcggcgaaagacccgcagtaattgccggccgcagagtaatgccatttaggccttgtttaggccccatttgatttaaagtaaattcatagaaattttagggcacctttgaatcacaggaatgaaaaaatggaggaataggaaaaatataggattctgacaggaatacaaatataaaacagatgattgcaaaacacaggaaaaatataggaatgatcgtttgattgagccgcaggaaaaacacaggaatttaaggagagataaagactcaaaagattcttaacatgaggtagaacctcatgctaaatttcctccaaaacctgcatgggaagaggcattccatagaaatttcatgggattatataggattcattcctttgattcaaagggctatatagaaaaaatttctataggaataaaatcctttaaaattcttatgaatttcctttgaatcagagggagatgattttatttctacaggaatttttcctatatagccatttaaatcaaaggaatggatcttatagaatcatatgaaattcctatggaatacctaatgccatacaagttttgaagaaattctaacatgaggtagaacctcatggaaactttcctttgagtctttatctcttctctaattcctgtgtttttcctgcggtccaatcaaacggctattcctgtgtttttcctatgttttgcatcctctgttttacacttacgtttctatcaaaatcctacgttttttctattcctacgttttctcattaatgcgattcaaaggggcccttagttcgcgaaaagaaaattttagcgtgtcacatcagacgtttgaccggatatcaaaaggggttttcggacacgaatgaaaaacctaatttcataactcgcctaaaaaccgcgagataaatttattaagcctaattaatctatcattagcacatatgatttactgtagcacttatgactaatcatggactaattagacttaaaagattcgcctcacgattttcatgcaaactagacaattagtttttcattttatctatatttagtgcttcatgtatgtgtctaaaaaattcgatatgacgtttttaaaaaaaaaaattaggaactaaacaaggccttgctcgagcaagggtcgtcgagtcgcgttacaatctgaatatcttatgcccgctgcttttctcgatcggtatggtgtgctcgtacttcgtaagtgcaggaacgcttagatctgttactcgcttgggactttatatatactggaaaccagacgtagattttgcagtaataacaagtatagttcctccagaatatggtttctttaccgggtgggaggtaataagatatggatgttacctgcacacatcacggaatgtgggaaattgcgaggttttgaaatgcaaatcgagctaactggatcactttgttttggtctcctctctgcaccttttcaccatctcctgatgaggtactgtattttcgctgaacaaccgtatctttctttcaacgagcatatatctgacgagaagcaggttcagaaattcagcagtgtaaatataggtagaaactagagatggagatgaagacctcaggaacccaaacacgttcacgcaacaaatcgataaaataacaaacttcaaaatctatcgttggtgccagctgcgtatgatcgtagcattgaagattgatgccaaaataaggtaaatctgtcgccaaaacaaagcagtgcaggacagcaactgctttcggcaagagtaagtacatcaaacttaaaaattcatattcaatgaggtagggaagtgcaaggaaggctccaatgctgcttgcaccgggtgaatgtttatcaaacgaaacatgtccattgaaaacatgacaacataaacttttgtagattcagaaaaaagggaatacctaaagagcaattgaaacagtttactatctgtgtaggattacagtttaagttcatgcggttgtgcagataatcttttaaggtcgcctaaagataagcagctttccctgattggcaattaatttctgcctaaaataaacaatctcagctcgtagatgtttatccggaaaggtgacatattatcatatccttattatccacaactgagaagattccattagtcattttctattactagtgtaaagcattagctgaatgtccatgcacggaatgcttgatacatggaagcatgaagccaaaagctcaattattagaagcaacaaaaagtaggccaagccaggaggtcaagggaaatggattaattttaggaaggaatccaacctaacctggcaaggtgccccatcgtgccagctatttgcgaagccagaccagcaccaatgcaatgtactttggttgtatgcctcttcagtctattcacaaccaactgcactgtgctttggatatatacggggcttgtgtgccacctgaccaagggccaattagttaaattataacacaaatagcatatcaaatgtttgatgcatgttttagacaagtgtatcatagtatcatatcacaagcatgcacagcgacaggtgaatgctgatatattactccttggttgaggagtatgcttaattgcatatagcatcttcaaaatcattatggcatggtaatatcaaattttcaacattacaaattattaatattgttttgagaaactcatttgatataaatatgatagcaaataactatagaattattatattacgtttatagcattataatctatcaatctaagaagtccaagttggagaaatttgaccgcactttctaaagcgaaatatatttctaatggaaggggtaccactttagctcttggtgttctttgtcgaattcttccaaattagttagtacttaaaggagcataaacacaattcatacaaatggaaataaatataggatgatgatttatttcaaaaatgacaatataacgaacgaattaaggaagtattggcacagcctgaatataccactatgaagtgaggcatctcttcccttttggttggcgatcctagtgcaagcccattgagtttatataaataaggcggtccataggagtaataattgaatatacatttaacaaaatgttatataaataaggtggtccatatgagtatttgaatatgtaacaaaatttacgatgagatagagcaggaatacaaaatcatttgtgtaatgtactaagaacatgttgaaatcgtgaaatgcagcaccacatgcgtataatgtcaaatcattatcacacttccaacattaaaccaatggaaaagggcaaataaaacatggaacatgcaaggtatctggcaggaggaaacaagatatcacaagaaaacagtgcagatcatgctatgttcaggtgactacgaagtagaacagcaaacctgtcagaaagcaataaagtcctgccaggtattttgtgttttcaccatgtttcccagaaataaaatgactgagcaaacagttccagtattgccataaatggtactccctccgggttgataatacttgtcgttttggacaagggcacggtctccaaaaaacaactttgaccattattttctattataatatgtataaagtgttaacaaatatataaattttattaaagtacttttcaagactaatctatacatgtagttaccatatttgaaagataaatattttaaaaatgattcataatcaaagattctaaagtttgacctcacccttgtctaaaacgacaagtattatcagcccagagggagtaacttaacaaccattgtgtgtgtgtgtgtgtgtgtgtgtgtgtgagagagagagagagagagagttaccagttgacaacgtggatcccagaatctgatcttccaggaatcaaacagttttgcttccagcatatcaagatgtgtgcaccgaaaatgtcggtttacctaaaggcacatgagggctgaggcacaaagtaggtaattctactgtacttataagaatatttgctggataaagagttaatgacacattttatttagtttagttgataacaagcacataatatgatgtgtgaataattcagcacaagcacgtataggaaaaatattttctgtcatgttgaacctcaaaaaattatctgtacacatatttgaccctgatcctcaacttccaaaactcaaaatataggaatagctaatgaattggaagtttccactgcaacaaataagcaaatagaaataatactaataatgttgcaaaggaagacagtataaaaaatgaagttatcattgatgactaaacaggaagcaatgaaagcagatgatttcctttcctatcaatctcccaagcacattcacgttgatgcaccaccttttcttctcctagtcgtcctctttgcagtatattgagacccagcagcaactttgctggtattctgattatcattcacaggctgctcgtctggagcctgactgacctctggagatgcatttgtgtttggaagagtttttgctttctgtgatctgcttgtactaatctgccttcttaggcgcaatatctcaccctttgctaacgccaactcctcttcaagatgtctagccctcatttcaaaactctccttctcagtctgaagcctagagataagattctgagcatcctcagtgttttcatgagcttcagttgtgatcttctgttgctcagcaagagcctttgataacatttttttctctgcttcaagagtgtccttcctagaattagtttcctctagctcctttgatagtgataatgcactcctgttcatctcgtctagtgactttgttgcttcatccaggtctgcttcaagagcttttcgtgcttcagaatccatctgtagttgtttcaccaaagcctcaagctccctattcaaagtagtgacagttttcctttcatcaacaagctcctgtgacgtggattccaacttcttgaacacatcgagcaattctttcttcaggttgtcacgagcttccacaatggatgcaagctcattagaagtggcttcaagttcttcctgtcccttgtgaaccatctccttaacagagacaagttcgtctgacagagctttagatactgattctacctctcctagtttgttagtaaggccctcttgcatttcattgaactcatcctggagtttagaaatttgcagcaccaggtcctggttcattctatttgcttcatcaagttccactgaaagtttggatacctcacttctggaatctgtcagtgcctcctctgtggattgaagtgattctcttaaacttttaactgcagcaacttcattctctagcattgcttttgttgcatccaattccttgttcagcgcagcgatgttctcacggtctttgctagaatcacttaatgcatcagagagttttccatcaagctgtttgatcatattatctttttctaatagtagctcagagttgcggctctctcttgcttcagaagaagccttcaggtctgtataatcttttgttaactcacttagcttttcctcagcttcattctttgcagagttcagtgcttgaagttcctcattcagtaaatcaattgaagatatcttagaagaaagatcatttctagttctatgaacctcttcctccagttgctgtattttagcttctgcaagttctagactctctttagtttggtcagagaaagagcacagattacggtagtctgcttcctttgacgaaagtaatgaactgagttccctgatgcgtatacccttattatcaatttcttggctaagcaaacttactttttcctgcaaaatgttgacatcacccaacttttccttcagtttggcttcaagaacatctttgtcatccccagcttgtgcaagactgctctctagtcgacgtatttcttccctaagctcctcagccagtgtcttctcccttctgaattcttcacttagcgaagttaccgtcttttttgttgaagacaactgatctaaaagagaggcttcctgctcctgaaacttcattgcttgcttcttttgtgctgtttgttgatccagcaatcttttctcgtagttttccctcatcaatgagattgctgcctcattttcagccagtttgctctccatctgaacaagttagcaaaatggatatgtcagctaatgtcctatattagcacatcattttttaaaaaggttttcaagtatgagaggtacataaaatagttttggtagcctcttgcatataaatctgagttatattgtgctgtgagaacttaagcaacgcttgttttcctaaggggaaacatcatgacggaaaatgagttaaaactttttaagctcttcatgagttctatactttgttagttatcaggttataaacttgagggtgcacagattttctagataaaagaaaataaacaaaacacacaagcatatgtatgcaatcacggaatgtacaactctttaatgtgtatgcatgcaaagatggttacttcgtggaaatttgactatgcaaggatgtcatgggacacttcaaaagtagtaaaatagaaacagtagtaatggacactaattacaggtttgcagatgttttacagatgagacgacggattccagggccttcttttcctgttgagaagtgccatacagtccagcaagaacaccggaggcagcaactgcaattgcattcaaaagaccagaaagtggattcccaggagtttgttcttgcgtgacgggcagggatgattctggttgcaaagcttcaggtagaggagattcagcctgagtttccccaggctgaggttcatcaggcttttgaatatcctttgtctctacagagaaaaacaatataaactatttattccaagtttgtacaggatatttccaaattagtcctaatatgcaagcgccaacatgagatgacaggaaggcagcaccaacaaaatcaatccaaacaatatcacatgcccaggtcccaataccagtttacaaaagaaccatatagtaaatccaacacattccagtggttaagataggtcaaaagaactttgcaggtacacctcaaagtatttatgccagaaaacaaaaataatgcagcacatggtagtagaccacgacagggttcgctaacataatcatagaccccgtatttagtatgagctacttgtatgagggggaaattctgaccatcgacaatagcctcattaggtctacatatgacagtattacgtccaatcttgaaagttttgtagcaagtctgagcttgatgatctatccttgggaaatcaacccgctttcttctaataaatccttggggaaatgacatgccataaactgcgggaaaatgaagaaaaaatgacatatggtcacatgccataatcagactcaaaattcactgggataagttgtgaataatgagcatgcatgactccagtttgagactttgtcatcagaatgtgaaattattttttattaaaacaacacacttccatgcaaataccagccaaattcagcttataaatttatcaaaacttcccttatccctagttccaaaatgcatagggaatccgcgtggtgtactcaggatgcctaacacatggaatggcaatcataaatcatccactgcacctcacatagtggatttgttccatttcaaaactggtcaacagaatgaaaatgaatttgtttgcacaaaacctatacaaaaggggtacaaagggtaagatgatatactgtaagtgtacagtttacttagatgagccatctacagccaagaccaccttcatgtaaaaatatcttactgcataaagcatttacaaactctttctaccttttgcaccagtacaaacgatcactgtgacattctaggtccattcttccatctgatagttccactctagtgctaattgaggtattaacatgtagaagtccatatagaatcacattcaacatgtgtatgtttgcagaaatagtctctgcttgtgggaattgtgctattccaacctcctaattcctttccatccatgcgtatccctgctcaaggaaagcgattgcgcttgtcccatgcatacataattgcttagcagcatttgttagcagatacattgtaaactcttccaccattagcctgaacagaaagttcagatttctcatgtggagctaaaacgtccatataatgcaacgctgtacgttagcagtaatctccatgactgaatccacaaaacaatctatacaattggacattacagaaaatttaaagcccaaccataaatgattcaaatcgcacacagatttcatatggtactccacaatgccagaccgaatagtatccaggctgggagaaacacaaaacgagaacggaattcaaccaactcctggaaaggagaatggcactcacccgttgcgagatccccgctgttaggcgtggccaccgcggccgccgccgcggcttccctggcgcggaggagcgggagcgccgagacgccgaggagcacgccccgccgcgccagcacgtacgcccccgccgccgccgccgagtgggatgggccggcatcaccggacgacgacgacgacgacgccgagctcgacgcgacgatggccgcgcctctccgcgcgcggcctcctcggcggcaccggaacgcgagcggccgcggcgccggcgacggcgcgaggaggaggtaccccatcccgtcccccacgacgcgacaaccccaaaaccctagccccccctcctcgcggtggcgctcgccttcgagctcggaagcggaagcccgcagtgaaaatggcggaggtgaggtgaggattaggcgatggcgaaggcggaggcggagacggcgtcaccgcgtcacgacgggtccgagctggcgagagaaaaagggcaaaacctttttcatgtacccacgaaatgacccttttaccccccgaccctttcaatccagcactgaactccgcgagcacctcggtgagggtaatttggggcattcccccacgcgggtggtgggacccactggcagcgggagtgcgggtccagtgagtgagggtctttctgttttgggatttcggaggaacggaggaagcgagctgatccggagcgagagatgaggattgcgccacgtgttagtgtgggcccagcccagcaaggacaccgtcatcgcccaattagcggtccgcacgtggcccagtacaaatggtccgcgagtaagccacaatctgtgccggcccgatatagatgggccacacgtaaccgcaatctgcgccggcccaatttatatgggcctcacggattccgcaactccgttccgtcccgttaataatgggcctaatacatgtgggctaacacttgggatcgctgtttactaaagatttttttttcaagtacgtctagcattactcaactcccatgctttctgtctaaataaaatgaaaaagacttcggttctcatcgttaatggcatatttacgaatgaaaagtaatttgtgaataaaacttttatatacgtgttcttagcgatctaaaagcaaatgctggaaaataaactttgaagaaaaacccttaaaatcaactgcaaatttaatattgaaaattcagattttggctgataagcataagcataagcgaaaagatgaggctgttccatcctttctcgatggaattcgagcccttctcaaattagtttgtgttttcttgtagttggcaaatgtctgaattctgccatcgcaaagaaaaaaaaaagactgaattccgattcatttcgaaacttgttgcgtgcaaaatgacaataagtttttgcagaaccatacagatggatccaacggcctctgccaaccaaaataaaacgatgcaaacattgcagtgaagtgtccataaaagttgagcaatgtatggccggctctgaattcaatacaagcagtcccaaatgcaacaactgttctgctctgcaacgcttgttttcctgaccaacagagccccatttgtagaaacaggtggtattacagcaaaatctgaatctgctgcaaatcatctgaatctgatctgattatctgaccatagatttcagccacaaaaaaaaaaaactttctttaattctgcaccctctacatcattggcctctgacggtccaagatgagatccagcattcaaaaccatcattaacaacatgacatttagtagcaaatcatccagataagtagtattcataagacggggactataaaccatcataacaacttgacattagtagcagatcagccagttaagtatcttgatgagtctggaattattttcactttcacatgcaaatgctctgcatagtttctacttgggcatgatggtcagtttgccctgtctccttgaatctgcttgatgagaccccaaaatgaactctacgcagtactactactacttcagctttcttgattaagcccactatggttaggaccagctatattctctgataggccaaggcaaaagatgccttgaattcctaaagtgcaacgagcaaatcaggtcagttagatcatcatcatcattatcaccattcatcatgtcatttcatcagggtaaaagaagaatggaaatgacctaaagcagctcaatgtcattatctcacagcagaagtagtgtagcaatattgcagacattgtcactgctgccaaagagcaagaaatgaagaagaaagaaaaggaagaaaaaaaatggatgtgggcactggccagcagccttaggatcaaaactacacgactaaaatcactaaaggcaggcaggcgacctctcttttctctaaaaagcccagatctctgcaagtttccaggtccagtaaaagaaaaaagctcatcgtctccagtgataatgacccaccaagaacattggcttcttcttcttcttcagtttgctgaatcaaaaacaacagactgatgatagatagcaatgtgagctggtgattcgatcatcttgatctatcccctggtagaagaccagggggaaaaaaatttggacaacttgcggaggcgaggacaggttcaatcggtcggtccaggccacgggaagggtcaggtcatgtcgcgacgaacatgccggccatgaagatgtcctcgtggagggaggagcaggatgagggcggggaggagacgatggtggtgttgttctcggcttcctcttcgatcgggatttgttggtcccggcaattggcgctgcagaatgctttctcaccactgcaagagcaaaatcagaattgttcagtgtgcctttcttactgatgacgcagccggcaagatcatgtacaaaagataataataatgcatccagatgaatcaacaccaaagaaatatgttcagtttacttttgatacttttttattagcaaccaatttccaaccaaatcaattgaacctagcaatatataataaaccaataattcagcatgctgttcacatgtccagttcgatttactacatcatactgaaatcccaaaacatttatgatgaacaatgcagcaatttgttcgatgatttaagtaattccagatcagagttcgctccgcagaaaaatgtcttgaacctgaaacatgaaatgttcctccaaacaatgcataaagaagaaaaagaagaagattgcaactacataccggtaaatgtaaatgtcatttccctccagcttcttcttgcaagtgaagcaggagctcaagaagtcgccgccgccggaggccggggcggcgccggcgtcgcacttcaccacccagtaggactcggtgggtgcttccgtcacatccatggcggcggcggaggcggaggcgtccatcgtctggggctccaagatgcagtcccaatatgtgggtcgtcttgggattagggccgcgagcgatgatgcaggtgtagtcctccgactgctcgatctcgctcgccgagaccgagccgatgaaccgccggacgccgccgatcgacgccggcagagagcccggcccagggatcttgccgccgccgagattcgaaggatgcggctgcttggcattggggcttgagctgccacctggattcgaagtgcgcctccagagacacagacattcagatnncccctcgtagatagaacactgccggccacgagcacaggaccatacccgcccgtgcaggcggaagagcaggtggacgggtgggcccgcccagcgagcgccaaggaccatacgtccttggtcgagggctacctcccggagctgcggacgaagtagcctcgctcgccgcaaagtaccttagggctagacgaaggtcgaacagacattgcagtcgggcctcgacagcgcgaggtctgaaggagagaaggcaagttgcttgggcaggcggtcagtacgtacggtcggcaggcaggcagaagggcgaagggctcgaccagggctcagagcgatccccaccacggctctctcgcgcgacccgcgcgcgacccggacgcagtgagctgccttgggagatccacgcgcgcgacgtcggtgcttccatcgacgccggcatccaccgcccatcccccctgccccgcgncttcgcggcctagcccaacaaacaacctcggcacggcgaacagcgccgcgccgccgccgccaccacctcgaaccctccccgcctccccgccgccgccgccggcgtccgtgtccgacaccaccatcctccgcagcatcgccgccaatccaaatccaaatccaaatcccacctgcaaaatcgccacgaaacttaacagactcaccagaaatgaagaaaaaaaaagatcacgacactttcacccccacacccctcgcttcttccaaacaacttctagtaacaaacaacaacaatttatgaaaagaaaaaaataacaagaacagcaagaacaccacctcacctttcctcctcctcctcctcctcctcctccaccggcctctcacactctcgatctcacgagaggagagaagcggaaggagacggtggggaacaaagtttcagtgaaatcacacactgtactactactgacgcgagctcatcggtagcaccatctctctctcctctcctctcctctcctctcacgctcttgtgcacttgtgcgcgtcctttgcatgcatcaaaatcagagacgcagcagcgagagggaggggagggggttggcttctgaaatactcgtacacacacgcaccagtacaccacctcctctctcctctccttctgcttcagcttcagctcggctcgaacccattcatggatgtcagagaaagggaggcaggcagctgctgctgctgcaaccctgcggctgtgctgcctgtactactctactccctccgtttttaattattattatgggtttttatccaaagtttaacctttattttattttattttattatgattagtaatttttattttgttatatagtaaaatataaatttgtattttatgcatgacttattttattttaatattttatatatttttgaaaaagaatggtgaaacgttagataaaaaagcagtcaaaacgttttataacctgatacgaggagcggtagtactatgtactatacactgcaccgtgtactctacgcgtataggagtaaatatacggacctacgcgtgggccgtaggttgcctgcttggcatgtcacttcagcctgtgatgctacagaagtaaacagtggtagagtatttttgtacacgatgctgcttccggtttcgtgtaggggtaggcgttctcagatcccaccagagcatctagaaaaatgcacgagatttttaccaaaattgttactaccgctataaacgtggtagattctcaagaatacggctgcctttgattggagaggtaaaaagaaaattactactccatccgtttcagaaggtaaatcatcctaacatttttcatatttatattgatattaataaatttagatatagaaaatgctaaaataatttacattgtgaaacagaggaagtagatacacaaaataaggtgagttattattatataattaatcaagtattaattattttacatttgtaaaaataggttaatatggtttttgaaccaatttttctgtatttttttaaaaaaaaacatatattttagtagcttcaaaagtatacacgtgaaaaacgagggaaatcttatctccatcagcatcttcgaactcagcctacaacggatatattattgaaacattattgaaacggattatttaccccatcaagaggagtacgtttttctaaaaggttttcttttactgtttactttgatcatttgttttagctgtttgttatatttactttataatatatttagctgtttgttatatttacttataatatatttaattttataatcaagttgataatttgcggcagtaattcacctaatttcttaatatttagaaccaatgttgcattttattcacttggattttgaatctatttccttcatctcaaacatagtctaatcctagttatgaatagacatatacatgtccaaattcacagttaagattaggtattttattggacgataggtgtatgcggtattttgctttagtagcttgcaattggagtaggttgagacgttggatgaatctggacggttttcagcaagccataaaatcacaccagagaaacagagaactgcttcagttttaagtggaaaatgacaagagcaaaacagtagcacggccatgcatgcatgcagtcatcagttagttcagtgattacacatctttgcaacctcattcaaactcattaattggcataattactgccttagcactgttgcacatgaccggttccaccaatctaaactcaacaacaaatttgggaccaaaagatagtaaaatactcccgaaaattaattccgcatcaagattcaatcaatcatcattatcatcctacctaatactaccaccaccacataatgacataaatcaccccctccctgtgaatgatcatcacttgagaagttcagatttctcgttggatcactgcattaggtatgcaatgtactgtatgcaccacaatcattggacttttaggagagttttcccttttctcttcttttcttggtgctgttctgaaaaaagaaaagagaaaacctccccagcgtgtaagccttttccttttcttctctaatttccaagctgtttctgaattattaccactgtttgtaaaggcataaagtgatttggcaaaccatacactctcctggcaattcatcttttcttctctcttctctctctatatatgtctctctctctgttcatcttgtgaacttgctttctttaaagcagagtggctttagcatttaggccattcacaatgcatctacatggcatttggcctcaactgtccagctaagcagatggtatacgtggagaagaaaagaaggtggagcacatgtattcaccagctccgcgcgtcctcatttggctccgagagccttgtcagaaaaacagctttttttaatcgcacttgcacatgagaaagcgggacacagagagagaagggggagaagctaacccaaaaaagtaaatttttgtggtggggcccgcatgagaaacagtttggtggggtccacctaaagacacgcgcccacgccgcattgtggagagaggagcttcacgctgtttcttcgtacgtggctgtttaggttcctcagaaaaacacgacgcagtgctaatgcccttaggggagtagagagagagtggcttttctaatgacagtactacaaacatgctactcatcctttgttttcactgtttactgactgacatcaatctagtggtactatgatactataccacatcatcattgtgtatgtaggagtagggtccttagctacttgtgcaacttccataagtttacacttgacaaagttggcttgtgtcccccttcatacaaaaccgggttcaaactcttttctctcaactctccaaggaccacactgcctatatgaattctttctatgcatcggctcagaaacattgtcgagctataggtgaaaagatactatccaactacaacagtagtagtagatactatcagtatagtattaagggcctattcactttgatgacatttttaaccttaccaaattttagtaaagttatcaaaaaagtaactacatttagtttgctaccaaattttggtaactatataagaaatcctgccaaaattttggcaagactatgtcaaaattgctaaaatttgataaggttttttttggcatcaaagtgaacgggccgtaagaatctcaatgtgtgtacaacatttcaatgtgtgtgtgcagtcaaatctcacaatgtcaagtggctagtacatgtatgaaagggccggtttgatttggtttgtagtgtagccaaactcaacatgcaacaaatagaaatgacattaacatcgttatcctactataaaatttcgtaactccggaaacttacactctcaaaaactacaccaattttggtaaaactttaaaccaaagggtacctacttattaaaatacgccaacatttcgcattgttgctatgattgattttagtgccaaaaaaactaagatttgatatatgaaaatgctgaaaactatttataataatactcataaatatgtactacatctatctcaaaataaatacagcgttggtatgcgtatccaacatttgaccgtccatcttatttggaaattttatgatttttttcaaaaaaaattagtcacacataaagtaatatttatgtgttatcatctaataacaataaaaatattaatcataaaattttttaaataagatgatcaaacattggatatgaatagtataaaactgtacttattttgaaaccgagcgagtaagaaattcaattgctgaatgtgtgtagatacggtgttgacatcttggcatgcaaaaaaagatcaaagaaatgtagcactaatacctctaggatgagatggaatcgaggtgaaatcccatgtagtagatgaaacaaatcctgagcatgatgattttgttagttttgtttttaggcgtggatttgcagtgggggcagtggttgcaaaacccgacaaatcgcgcaaattttcagtagatgctctgcaaagtcccatgacgaaactctgaacccttgcccgatatccgatgctaattggacggttaactctgttgcctctcctgattctctacgccgccaccatctttttgacgcaaaattttacatcagcatgtaattttttttaagaataaaaatcacaccgccacccatctgaatgtattttttattttaaaaaacaaacggagagagaaaaatcacatgtttgaaatcaactattactgcatactcatcagtcgtataaaaaacgaatctaaaatcagatgcgacacattactataaatctagacatacgaagtttgtatatctagattcataatactaaaatgtgtcacatccgatactaggttggttttttatgggacggagggagtatactgttagtcgaggtgttcagcgatttttttttgtcaaacagtacgaattgagcgatagccattttcttgggcggctgaccttaggctttcgttcaaaatttaaactttcgctttcacagcatgatatgatgaaacaaatttcatttttgcaataggtggttgcatcatatatataataatcgttggaggaaaatcttgtacagcatgagtgcaactttagatcatatttcacggagtttctttcatatttcatgaaaattctgtaggtttaataatgcatcttggtgttgggtgaaaaatttcaatatatcctagtgtaaaactaaaagtacgatgcatctacctaggtttgatgcatgcaatggtgaagggaaagagtaacgtcacatggatatgccaccataccctacaaaaggcacgatgattttgggagattttcatgtcggtgaggcacagttgcctgcactctttgagcatgatattatgagagcaaaatagcgacaacatcggcaacaaaaaaagaagaagaagagggaagtcaccgaggtggtccggacctggggtggcgattcgatatgagagcgaagacgacgacaagtgaaagggatggaactaaggggatcaaaagtaatattttttttcctccggctataggtgcatcattagcatggtattaataatttgtgaggggtttgaatttcattcttcataaaactcacatcaaactcattctatgaaccgaacaaaaattagtaatggttgaaatgcatttcgagcccattctagctatttgcattgataaggaaactgacttcaatagtggcttcaatctacatgtcacatcatctcgcgaatatatatatatatatatatatatatatatatatatatatatatatatatatatatatatatatcttataaaggctagtttacattataatatgtttttttatcttagcattgtaaacatgagtatgctctcagtagccggttttgtccaatggccaataaatacaaacagtttgttcactttgttacctatatcttataatttaggacagatgaagtaatggtttaagtatgttgtcttattaaaatttgataatattgaaatttagtaatgcaaactgtaatgatcaaaattttgctggcatatgtccagaccgaagcatacgtacccacaaccgcacaacgtatcccgtgcgctgtggggcccaaagagcagcgagtgatgaccgtttttttataaattggctctttaaaaaacttattctgaaaatagcccctggcaaaaactagaccgtcataacgtctcagcgctgataacgttatcggcgctgagaagttatacctcagcgtcaacctcaatgaatgctgagcgaatgtctcatttatacaataagtttttagcaatgtctaattttaaaataagttttatggaagggtcaatttatcaaaatttcgggagtgatggaggtacgacgtactccaacagtagtagtcgtccacttttacggggacagcgatggccccgatttgacaaagccgaccgaccccaccacctcaatggtggggcccgctacgctggattctgattttttccctcctttctttctactacagtactcattttctcaggtttttaccctccgtgtaaatgtacccaatgtgtaatactactccacaccgtaattttcatatgccctcttttgttggtaataatgtcatctgtgctaacgggtgataatctcagcgtctcggccggcaagaattttgcgcagatttttctctatgtgcaagaatttttaacgtttctcgtcaaaatcaattctataaatatttgacattatcaacatttagtaaggtcaatgtttttttaactggttagaaaaataaataaaataaataaaaataatattttattgatagaacttatatacctgcaaatcaagaggggagaatataacacgatgaaaaaactcctaaaatcatttcttctaaaattaagttagaaaatccgaattttaattgcagcttataagtcagaaaaatagaagatgatttttcaacaatatttaggagttgtttcgtttaataccttatcatttttttttgtatagttacgcaagttgaatgtttcgggattcggaatttttggtaaacgcttatcaaatgctaaaattctgtaatgtttgttttagcaacaaattaaacaaagcccttactaaaagaatatgttggaatgagtagctccgcgataacgattgctggccatcaatatatcgtcgtttccaaatgttcgatgttggctactagttcaattttgagctaaccaagaattaaaaagagagagagagagcaaattttttttttctgtacgtaaatttatcagatgctaatactccatcgtaaaaggattatgaagttgaaatatatcccaaatgcatcggcacttcgaacttcttgctatctttactatgcctttctttcttctaattatcatatcggattaatacgtgtcttttctctaagatcattttaaagctgctccaatattatgagaactttacagaaaaaaaatgagccatttgagaagtttcaaggaaatcaaagtgtactaattaaaaagagaataggagaaagagagaaaaaaaaaggcagaactgagcgagacgcggtgtgtgctcggagtgcgcagtcgagggccctttttgtcgtcttccggagactctctttccacgcgcacgcatctcgaggcagtggtaaaacatctgacggcctagcaggaagatccgcctgccatcgtacggcccgagggagtcgagtgggagagtgggagagggagccccaccgcacgtgctgccgacacgtgacaagcaagcgtttcactcccttttcctttctttttttttccttttcgctttttttttcatatagtagtactacaaacaaatggagtggagtactcctgattgccgacatgggtagagcacccataaaattcactaaggactcatttaaaatgcatgatgaaaagtatatataggattttcataaaaattttagtgtaaaagtaaagattataatacacagtaaaaatacagaaacgatcgtttaattgaataaaaaaaccgtaagaattgaatgagacagactttctgcgatgttagatctcatattaaaaatcctctaaaccttgtattgattgaggcgttaattaggaatttcatatgattcaatagttttcaatcctaagcttcaaacggctatatgtacataaaaaaatcctacgaaattagaggattttcgttcaaactcctatttggttttctaaaatatgaaactaatagctcgaattcaacttttttgtcattattcttcttaatatatttagggtgtgttcggtggttcctttttccctcttctaccctattgttttccacgcgcactttttggaaatgttaaacggtgtgtatttttttaaaagatatatagaaaaagttattttttaaaaaacatgttaatctctttttaaattattttagctgatacttaattaattatgtgctaaatgatccatctcgtttttcatgcagagaatgggttgaattaggccctgtttagatcctccaatatggcaaatattttgccattttgtagcactttttgccattttggatttaaacactagtagcaaaagttggcaatttgacatttgacatttgctagtccatagtagcaaattgtgccaaaaattgctttgggaccactccctctctctttctctctctcactctagtgctagaatggcaaaactttaacatgcatctaaacaccaactactacttttgcaatgccaaaacttttgctaccaaaacttttgccatttgccatttgccattccaaatagatctaaacatgcccttactatgttctaactaagccttttatctaaaaaaatatgatcgaattttcctgtaaaacaaagtatacgatcggacttcttctcactctatgcagaaaaaaaataccgaattaaatgtaggcatatactatatctttttcggatttatttcattccatatatctttttaggagtagaaattatgaaaggcacatgacttgtactagctcatactatccctcgctcttttgtctgcatttgccatctgaattctcaaatactatactccagttgccagttgccagttgccacgcgaatctcaaattaaaaaatgacttttgacgctgtaatgatagcacattagcagcagtaagatgttgtgttagatcatgtacacacttttcccatcaggtgatgcagatgaaccaaacaccccaaggaaacaacaaccactttaattaaccaaggataaagctaaagatctttcacgtgccatgccatcgtactaatattaatcctagattgtcgtatacagaatcaccctaatggcactacaaaaccctttgaaaaaaaatccagtttatcctactaaactattgggttagtaccatttacaacccctaactaatgattttgaccatggcatacataccaacgtactaataactttgttttagctaaaataatcaaagtaccctaaattaatttggactttaaagaagttactaagtggagaccactaagcgtggtcaaagttacatgctttggcaccatatgcataaaaggagattaggagaaacaaacccaaattaactaaaaccaagtggtaatatatgtatttagaatttgggtatacgatgctcaatacagatctcttgtttgtggtatgcatgtatggacaggtcgccagaatgtagaactactactttgtgggaccatcagggtataaactaagtcaatccacaggtttcagtattgcaacaggttcatgtcatgccctctctctgatgtagcacagtctgcacaatgcagggtagtaggagtagtaaattttagtaattttagttactgcatcagcgtgcacatgatgccttccctgaacaagtgcagggatgcaattctgattttctgtccctatgagtttgttaaaaaaaaatactatctctgtcctaaaatatacttctatataaaaataaattttatttgtacaaatatatccgttcagatgcgttcggctatactggctacaaatactatgacaagacaatattgttgcttttcttttttttttaataaaaaagagtaatgtgatgtactgatgcgataaggattttgtatctccaactctctaactaggctttactgcacgctacgggtatgaagcaccatttttcgaacggtcagatcattgccgatggtttatataaaaaataagtgcctcattttaaggaaagaacccttttcccgttcgtgaaaaattttaaggaaagaacatgatcaaaccaaacggcctgttcggttgccttatacaacgcagcttgttgctgtagcaagtgaaatgggtgcaggttgcaggagagcgttgtacataacagccaaccgtacccaaattgtgtcccattatggttttttcagtttttcctaattaattatgtattgttggatacaaaatacctcgtctgacagcaaaatagtggcgaatgtcgatacgtgtttttcttgtcaagcatgatcaaaaggattttatcattgcaaaatcattttgacaagagaaatgaaaaatggttttaattgaaggatttatttttttataatgaaatgaaattatcgtcactatcttttcttgtttttcagccgaagagtaatttactcgtagtatttttactattttctactcgtggtaaatgggtgggcccgcaatcccagagacgcacttcacgagaaactaaaaattcctccagattgtgggccacatctgcagaggtttattgcggctattattttaccccgtggggggtggttgcactgcactgcattacattatgcacagtgacaccaggagcacagatatatttaatgattaattcattgatttacttattattccccagaaacatatagcagtaataaattccaaatatttgcatcatcctcaagaattttttttttattttttttctcatgggaatcagacaagcaagctctctgcttttattccccaatccacacgtcactgtgcaaggttccaagtaaacaatggcgatggtatctgcaggtgggccctctgaactgatagtgtgatgtctgtgtgcacacatacttttgtccctgaaccaggagtggtttgcatgcaaccaccggtacggttgtaatgaaacggttaattagtgtgcttgattatatatattttactattctgatttgatgtgtgtgtgcctgttgatttgacttgcaacatgcaaatttttgttctccgcatgcttaattaggtgtcacagttttattttattgttcattttggaagattttagaagggcatattctttggagtttggaattatttgagatatattaggtgtgcacaggaaattcatgtggcacgcggaggttgtggattcgaaactttgtctttattaaatcaaaggtacttacttatcattgtctataatactattattattacaccttcaagaaaaagaataattgcattaaagattctttacatcccaatatatcatcaggtcttgaaatttatgtttggtgcaagagtaattatatttgattaattgaatcaggaaagaacaccaaatccactccggatttaatctgtctgcgaccatgcatggtccatgcatatgcattatttgtgtcttgctgaatgggtgaagacaatgcagccaaaaacccaattagattcgtttcaactttcaactggagtaagcatatatggtccacgtttcactcatggaaatgggccaggttttatagcccccaataattgttagaattggagcttggtatatagacaaaaaaaatattttggcagttcataaacataagtatatttattaaatatatatttactacatataagacattagcatattgtgagccgaagtactattgtggtatttttagcactcgtttagatcactgataatccaaacattaccaaataattggcaatggcaggatttgacatgccatttttttacaaagaaaggttatttgatttgttgccaaaattttggtaatgcgtagaatttgtttgtttttctgccgatatttttggtagcaatcttcacatgcccgttcagtgctcaatgttggcgacacttaggaatagagtggaatcaaaatttggagttctttcagatgatcactctagcaagactcaagtttgcttggaggggctttctggaggttttcttcttagcagcatggcacatttggaaacaacgaaatagtttaatcttccagaatattcagccctccttccaagcttggagatcactttttgtgaaagaagttcttctgcatatgtgcagaatgaaggaccccttaaaacaaattgtttctgattggttacaaactttatagtttttatttggtttctttcctccttaattttgtaaatattttttgagttctataaaattacactgctgggtaaagccctggcaatatttctggtaaaaaaaatatttttggtagcaaaccgaatgaacaccctagcttattggcattgccaaaatttttctttttagcataattaagaagggagatagaccaagcccttcattccaatattcagctaaaaagacccatggtgatatccaaaactacaatcaagaaagaaagcagattgagtatagtggaaataggcgaacgagcctctaactgagtttgattaggtggctctaataacactcctcaggtattggttcgactgcgagtttcaggcacacactaaagcacagttctaaggctaaatcccctcgtctatcacacgctaaagcacaattctaaggcttagctcaagtcgttggtcgttttcacacgggttacgctgctgctgtgtaagcaaaatacctagggttatcttaccccgcaggtcaaatagtgaaaatagatttttttttgtcccaattttaaaatatcacaatctggccattccaatttagccccattacttgtgttgaaattgatcatcaatattgattggctggtcaaaatggtgggcatgcatgcttgcctgcccactcaattagtagtagtagtagtacccctttactaggtgctttcaaaggctgtgtttgcctttaattagtttgtgggatcagggagacagtctttctagctactctactctaaccatatcattccatcctatcattcatctccagcagatcatggtagctatagtaggatatatatccatgcatggctctatgattggatgaagatatctaataatgtggggtatctaattaattaattaacctagtttgaaataattaatcacgggagatcgcaacagctccataatcaaactcccatgtttcattttgttcatccgtgtgtttcagttcagtgtacagtacagttggagctagctaactagcttcagagcaagtttaataatatagccaactataagcttatagcttatgttagagttcacatgtatagtaaatgagttataatgttatatctttttttctccttctctctatctctcacttatgcatttaatgtatttatcttgaagtgtgtgaatagctagctcttgcatgagagtcaaccctttttatttttcaaattctttttcatccacataagcttatagttggcttatagcctactattatatacttgctctcactgtgacagtgactgacagtgtttaatttgtattttccgtcgcttgattgattcaacatttaaattatattgcagtgcgttgggcttatctattgtagcggagactggagatataagatattcgttgctagtaaaaaaaatgaaagaagagaaatttgaaggccacgtgggctttgtcctttgaggagtctaccgtattgttggtacagcccaattaaagcccagatggatcacgtacgagcacagccatgggcctagattcgtcacgtgtgttatgtgggctagatatgggccgtccatctgtttaaacccgaaggctcaatatttaagttagcaaatactccgcctgtttcaagctatagttgtttctagcttcaaattttatcccaagatatagctcccattcctcctccttttttttcaaccaattaaaacaatttctctacgtatcaaaaacttcaataataattatattttaaaatggaaggagtagttaagtcaaaacataaaaaaaaaacacttgacggcatattggacggtatatgaaatatatagttaatgtactccctatgacttataatataacaatctagtattggatggggcacatcctagtactacgatatgtctcatccgatactatgttactatatgagacagaaggagtagatcatactttcttcgtcctaaaaaaacttaaccttataataattggttgtagctcaagcaaagaccaggatgttttatttcattatcttaaaaaaaaacttaacctaggacatccccttctaatacaacgaatctggataagaagggagtaaatgtcacgtgaggcaatggaaaagtccatgtagttttttctcgcatgcccggacatgtgattcccacttcacaacccccgtggctcgtacttgcgtgaactcaattacgcctttcttcacgccaatgtccagcgtgagctctatctagatttcttatccgaagtattttgaagtaagtgaaaatcatagttgttaaaactggatcataccagcggttcaatctgaaaaaaaatagaaccagatcctctgatgaaccagaatcagaagctccgtcaattcatccattggttcaagtttaaataactacggtgaaaacaaagtgagccatgtgcgtaggagagcttcgcacgggaggaaagactgacgcgtggtaagaaattatgggtacctccatcaatggtaccttttcttgatgtgataccttgggctagttgcagctcacaattagtttcaatttctcaatgtagtcaatttttctgtaattccaaaggtgggcataaatgaaacatgaaatacaaaatacaaatacggtaagaaattaagtggcggaagacgaaactagtgaccctaataaccaaactagagtgagacatatcatccttattagctactgttcgattaattattgatccaaagctgaaaccaagagactaatccagcatgcatgcgctcccttcgtttggccacgctcaaatgaaacgacctaggaccccactgccacttccgccatggtgcttcccgccacctcttttgtgttctccgcctcctccagctctggcaccaacgccaccacccatcccggcacctccacctgctccggacccacctctagcacccctgcttgcaccaattcctcctcctgcaccaccaccgccaccaactccaagtccgccgcctgctccagctccgctactaataccgccccatcccagcaccttcgttggctccagacccacccccagtgccaccgcccactccaagtcctccacctataccaccaccgcctccaaggcctccgccgaacccgcttccaccaccagttccgaacccgcctccagcaccaccactccatccgaagccgctgcccaatcctgtgccagcaccagctccaaccccaaagccattgccgactccttcaccgattcctgcaccacctccaaagccaccactggcacctccaccaatgcctccactagcaccatcaccaccattgaggccattgcccttgcccccgtcgaaatctctacctgtattaccaccaacaccgccaccgcctccaaaacctcctccacctcccatcccacccccaccgccacctccaacgccgcctccagcacctcctcctatgtcgccccccatgccacctccagcaccacctccaatgccaccactggcaccacctcccatgcctccgccaactcctatgccaccacccacaccccctccggcaccaaacccaccacctgcaccacctccaaacccactgccaccacccattccacctcctccgagttcgcccccaccaccaactccacctcctgcaccacctccaaaccca

SEQ ID NO: 13233 - DNA, 768 bp, Oryza sativa
gcgtcgaggagcccgacgtcgccgctggaccccaaggcgctcctgctccggtcgccgcggtcgccgaggacgtggtgggacgccgagccggtcggcctcgccctcgccgccgccgccgacgacgacgccgccaagaactgcctcctcctcagcccgcgcgtcgggccgctgaagtcgttcgcctcgctgcccaaggactgcggcggcgggcactcgccgcgcccgggggagctcgccaaggcgatgtcctgcgccgcggcggccaccgccaccgcctccgccgccggcggtatgtccgtgccgtgcggcgtgttcttctacggggatctgaagtctggtccggaggccactcgatccggtggcgctcaccccaatgccaagcgccgctccttcgatctcggcggcggcaagatccctgggccgggctctctgccggcgtcgatcggcggcgtccggcggttcatcggctcggtctcggcgagcgagatcgagcagtcggaggactacacctgcatcatcgctcgcggccctaatcccaagacgacccacatatttggggactgcatcttggagccccagacgatggacgcctccgcctccgccgccgccatggatgtgacggaagcacccaccgagtcctactgggtggtgaagtgcgacgccggcgccgccccggcctccggcggcggcgacttcttgagctcctgcttcacttgcaagaagaagctggagggaaatgacatttacatttaccggtatgtagttgca

SEQ ID NO: 13234 - DNA, 6841 bp, Oryza sativa
cagaacaggggaaagggaatagacactacacggaagaaaacatatagaaaaacacataccgctaaatcttggtcagaaccaccggtggtccaaatcctcttttcaaggcctagaagtattgcagccgtcatggctcgatgtagcatcctcccgagcctggccgatagggagatctgggatgcaacggcctccttggtggagataatacaagcacaggggcataggcatggtcgcctgggtagcgcgcctgagcaggtcggccttgtgcactgcaggcgaaggtgccgtggtgtgaggagggacgcactgggggcgattcaatcaaagcagcgctcccgtgagctggagatccaagcaaaacaaccagagaagtcgccgaggggcttacagagcgattcgaggccgagaaaaccctagagggagagggtgagacggggtgccgcgcgggggtggaaagacggtggtggtctccggggagaagcgacggcggccgtggatggcctcgccgggaagcgacgacggcgagcaacgggagctgcgtggccgagctcgagacaaaaggggaacggcggcggcgtcgtaggtgacgacgcggtcaagactcgagagaatggggaatcggcaggttcgtggctggtcctcctcttcctgtcgtgagtgactgggtggtgggctcaatcggcctggcccgatacgatgcaagcgcgtggctgggcaggagatcggacggtgctgattgttggggcgacgtggccgcgtgggcgaatgaatagtgaacagtaccgacgtgaggtttataggattttatatgactaggggtgaacgttggatagaagggaatgtgctagtgctgttctgaacctcttgcgcatacattaacatgttttatctaatctaataaacatgattaaatttagcgtttgcttttacagtagtagaaatatgaaattgaacaatggttagtctgaggaatcataagcctatgatctagctggagtcttctccggtttaagctaccaattgaaacatattaattgatgcctgataaacatatcaattgatgaacaatgctggagttctatctcataaatcaacaaacagaaaagcaacttaattgaatcacttgcaccaatctataacttccatgtatacatgaataaacatgcatcattggtatacgtgagcagggataaacatgcggattgtataggaactgcaagaaattttaccatatgtgcaaaaacagggaaggtaagagatagagtaactaagcaaaccgtattatgtcctagcagtggtggtcagcttgcaccaatgggcaaacctagtctttgaggtaggttaagcctaggaggagggaaatgttggttggtaagcttacttccactccctcgctatgcacaaaacagattgacataatgtaccactaagcataaatgaggcaaagcatcaccattgtacgtagtgagtggcccactgaggaaacatccaattagtgcatatatcgacaaatatttaaagaaaaaacaactaaaaaatgtttctagttttacctgtccttcaaattcttcagaggttgtctcacagtgcgtactgatgaattgtaaaccaaccaggtaaaactgaaaataagcaaggaaacaaatcaatcatagtaagtaagtgaatggtaaagctccttgacttttaacaatctaaaaataaataaatcttgagtgtaaggtgagacagtggacaggaagaaaaggcaaggcaatctaggaattgttgaagaatgccaagacatgattatcattttgtatcagcaaccatgacatgtacaatccaacaaaatgtctgacaataattcatattggcaaaatataaattacagcatattgccaaatatatttctgcccataaacagccagatcaagtgttagataaaaaagtgaactttgaaactgatatgtttgaatcaaagtagatatatatcaagcagttgaataggtcagtgggtctgatagcaaagagaaacaatagcatctagctatcctcattcatatgtaacaccgtgaataactgaccatgcatctcagttttttttatcatctcagatttttgtcagttggtaataactgagcatgtattgttttttaaatggaagttgcatgtagcatagtcatttctgaacgtaagcttaacagaaccaataggtatcctataatgctatacatgagtaaacatactgtagtaactggtttttagagaaaactactggcatatggacaagactggcaagtgatggatccgcacctgtaaatctttcagtcaaagaagcaacgtcttccagactggcatcacttgccaatgaaacctgagaccaacagaagatattaaaaatgaaaatacatcaccaacaatgaggttgttaagacaccaataatctaaggagttcacagctggcaaaacccgtgattaaaaatatcaacagaagacaaaatggcaaatgagagctcacctctctagagtgaacctccagaatttccaaacactcatgccatccaggaaaatcacataagacaaatcttccaggccacaagagtgcaacatcaattgattgtggcttactgcacataaggaagaagaaaccattaaaaaataaaggaaaacaaacaagctattttagttccaatcttattctcaccagtaaaaattcagtcttcatagcatttcattccatgctaactatttcttgacgatttgcgactggtcattgcagtccatttaaaattgtttggcatgctgcaccaactacatcttcttatgctttgagagctaaccttgttgcagcaaatacaaatactccagtcaagctttctacaccatctaggatatttatatacacatcaagtcataagccacaatacaacatttgtctgaattacaacaattcaacacaaccaaccattgtctgagtataggtcataccgttcagacaaatgctgggtggtagcacaaatgttggggaaggatgccttggatcccttcatacgaagcaactgggtggaactctcgaagcaattgaagaactcgcagagcatctcgtagctgaccaagtaaaccacccacaaacaccaactgaaagttagcagcagtaaaaattagcatctcaatagatcaaatttaatggtgggtatggagactatattcactaaaggagcgagatctgcaattaggtatcagaataattgtctgaaactaagaaaaattgcagaattcaattgaaccagatccaaatggtggagcctggacctttacctctccggcagcttggccttgcgcttgacggggctccggacggatgtgggaccaacatcgagctgccgttccacggcctcgagctcgtcctcatctggcgccagcgacgccgcccccctctccgaccactgccgcagctcgagcgccgcccgccggaccccccttgacagagaacaccacgccgccgctgctgccatgcgccttccgcaccgccgccgacggctgctccggcctatccggcgtccagatgtgccctgccgccgctgcaaccttccgcgtcggcttctccggcgtcaagaactggtcggccaacgcagccgccgccttccccatcttctgtggggtggcgataccggccgccgtcttggccctcttcgatggcggcggcggcgactgttaccaagtgcattacatgtattccctttttgttaccatgagccctaagccgcctaatcgccggcgtccaccgatccggaaatgaagaggatggagagggagagggagagggagagggagagaggggcggctgccggctccccctcgcctcagaggggccggatctgccggcgaggaggccggagtcaccggatccggcggtcccggcctcctcgttggcgtatgcggcggagggagcgagagtatggcgacggcagtggcccgcgtgccgggcggcggctagcacggcagcagagagtgcgaggaggaggtcgtcacctgcaggaagaagagaatgaggggggcggccattgcttgggcaggagagagagcggagcgagaggaggagaggaggaagacgaatggtggcggctagggtttggggaagggggttagggttttttctattttacgaaaacgcccctcatcttatacttttcagagcgcggtacgattttccgatttttctcttcttcgtatagaatatttttgtttacagaggtcctgtaagtaagaacgcataacgttaaaactaagggatagggacctgtaacaaattatcaagtaaatgaagggcttttttgcaaaatggccagcgatgacgcggaggcaggagctctcgcgaaatccctactccttccagcgcgcgctgacgtgtcgcgccccggccgcgtccacgccagcgcaaaacgctgaggagcgagcagccgggggtcacttttaatactttagactaggggcgagagcgcgcttcgcgcgctgctcttgtggagctggaagtttttttcatcatttaaatgtataggaatatagatagtgtagtgtattttaaagagaaaatcccttatatacccctgaaatttttcctaatcccttctatacccctgaattttgcttacttccttatatacccccaaaatttgattttgatcccttgcatacccctcccgttagttgaccgtgtattttctataaaaatgaccattttacccttggatgaacaaagaaattcataaattacattattaaaaatataaaagcttctcgcatgagactattatagttatgagtttgttgtgcgatgcattatttatcccaaaaaaatatttttagataatgaaataaaaaaaatacgtatttatttttttaaaaaaagatcataaaaatgaggagcattcatataaagataggtataccaatgttcacaacattttttttatgaatgctcctgataaaaaaatccattgtcctattaaaatttcaaataaaaattttaattttttacatttattttattttcaaaatttatgtcaaaattttctgcactaattatttagtctcattagttttataaaatgcacacgatgtgcactcaaacaaaattttcaattatttttgaagcttatatttaaacctaaagcatcaagggcaaaaaagacatttgcaaccaaacgtaacagtaaaatgatggaaaatgtaacggtaggggcatggaagggatcaaattgaaatttcaggggtatagaaggggtcgggtaaattttaggggtatgaaagggatttagtgagttttcagggatacacagggaatttactctattttaaaaatctttccatgccgtaggattgagacaatggagtttgcttgtcagaataatttgtgctatttatcatgtagtgtattgtatggttcgatatagctatagtagaaaataaaaggtttgcgtataatggtgtctttgacatgaaggagaaatgtttaggtagtacgcagccataactatattggttccatataagtagtagttgttcgaacaacatttcatagcacagaaggtggcaaggaaggtaaacataacattacttatttacaatgataatcatgacctaggggtcatgaacaaaagggcttgcttcttagcctctctaggcttgcagctaacttgttgcttctacacttctagcttgggtggttcgttctgtacatatacacaaaagacttgctgatggactacatatatccgtctcattcactgtaggaatgaatgatgagtttagaaatttagtgaagtttactaaagaattaatgcgtatgtgtggagaggtgagctgagttattcagaattaacctgtcagtgggtttcttctgggtactatccttgaacaattttttggcaattgtggtggtttctgtaggtctacctctgttcattataaggacatgtcaaatacaatgtgtgcgagaaatgtctattactgtaactttgaactgaaagctttacagacctttttttgggtgtgctctttggcgccagtgaaggatctgcctgtggagactcatctggagattcagcggtgacctttgccttgtagaagaagcacttttttttcagaaattgatggattaggttatgaaaagaaagagcatgaataccttatccgaagtatcacggggaacaattgtagttaaagatgcactttgtgagatcttctcttcatgatgagtgccaatttttgccttgcatagttggtcaataggtcagagtgtatctccaattatttaggaaaatttgtttatagcagaggaagtgcaagagtaggtattaagaaggataccttagtatcagtagaggtctttgcagtgtgagatggcatagagtagcctgagacaataatgctttttttggtaaatactaaggagcttgatttgctagttggtgtctcatctgttgcagcagcaggagtgtattttgttggtgttgaagtgccctgtgctggtatgatggctaattgcgattcggtgcttgtttcacttggtgttggtgctgtctggagagaactgcttgagcttgccgatacaattgctgatgctggctgtgaagtacttggcgacataagcagcggtggttgatttgctggaccagaggatataacactattaacctggagagtttcttcgcttctgttaatatcctttgtgaagctgacattccatagaaaaccattgtcaacaagtgctaagatttcccttggaatgaattcactgtccggtggatttttttcgatcagagattccactggccttcgtatgatgcgttgcgcagtt

SEQ ID NO: 13235 - DNA, 552 bp, Oryza sativa
tgctgaacttttaattgaagcttcgcttattatatgggatgaggctccgatgacacataggcgatgttttgaagcgttggatcggactttacgtgatatcctttctcaaacgtgtgctacaaattctattataccttttggaggaaaacccgtcgttctaggtggtgatttcagacagaattgccagttgttcctaaaggttcccgccatgctatagtcaatgcatcaatctcaaattcagatctatggaaacatgtaacagttttaacgatgaatataaatatgaggctacttaacacaaacctagagcaaaagcaaaaagatgagctgcatgcctttagtaagtgggttttagctattggtaatggcacaatacctatgaccacgaaggaaggtgaaagctatccatcatggatcgaaattcctcatgacttacttattataactgatggtgataaaatatctgctattgtgaatgaagtgtattgtgatttttttgcatcatacatgaatcctgaatacttagcttctcgtgcaattgtttgtcctaac

SEQ ID NO: 13236 - DNA, 3044 bp, Oryza sativa
gacccagatgtaaaaagtacggccaaaagatttttctatgttatgttaataataaataaagaagtatgtattggtgaaacttgttaatattgttataaaaatgtattgaagttggttgttgcgcaatttcatatgttaagtgaggtattattttgtaccttattcgacgtattagtactcggataatttatataggcctatcgcagtctggatcgtagaaacattatatggacttaaacaagaagaattatgtaacatgaagaaatagtagtataatttgaacatgatacaactatttgcattgcggttacatagatgatattagattcgaactaggagggaggtagtgcaatagttgaacagaacgacgatgtagtaatgggacaaggaagcatgacagtagaaatttcaatatgccaagttgtccgataatagctaacccctacgtgaggatccctctcctctctcaaaccgcgctttagtaaccctgtattgctctggtggttcaagctgcacaacacggctaggtggagttagaacccttctggtgtctatccattctctgtacatctccttggtggttcctgggaggaaagaatagatgtaaagcaagcaaagttagtaaatgttgtgagaaaataaggattcatgtaatcaaaatattcttaccatgaaatcgtcgtcaagaatatttggacaaacaaagaaccttcgacccaatgttgtaggatttatggaacgaagaacctgacaacgatcaccacacctgcatcttggatgggcttcccatggagggagtgccgtagttagcacccgctagtcgctctgttgttcacgacattgtcgttcataagccgcttttctctgtaagtattgctcagtactttcggatgcgaaataccagcgaccttcttgtaaacaagtggttaggtcgagaacgggattttctgtatcaacccactcgatgtatgcgcaagctgtagtgcgggtctgccgaatagagtagtgttacgaagaataaagcgattgcccatacgaaatgaataagcatatgtagataataaaatacctcacgttcatagttagggcacctaaaaaagcgccttcctcgaatatcagtattcctcgaagccattagttggcatcgatcaccgcataggcagagaggacgctggcaccatggtggtagtaggtatacataaggatcgctacgccagtttggatcctcaacaccccggcgtctagccattgatgaatgccggtcagatttgtaatgaagcaagtggggaagagagtactgaatgtgactgagttctgaaagattgtgaggcctcactcgttaaggcgacttatataggcgcaaaaaattgagtgatacccctgacatgtgaacgtggtggggtatggtgggtacgcctgattggcgccgaaagttacatgcctgattagcgccgaaagttacattggtcgtatgcaccaaatggcgggcaaatactcgtatcgcacgcgaataaaggaggctgcatcagtgcggcagaaagtagtcgtgcatgcgccgaaaggtatcgtgcatgcgcgaaagttatcgtgcacatataacaacaacgtagtcattacacaagcatacattactggaaagtgaagcaaataaacaaagagaagactgctctactggccctgccccgcgccgcgaccacgcttggtcctccgggcctgtgctcgcacgtggtcctaggagtaggtgaaacgatccggtggcacagcatgggtagcacgagtgtcccgcggaggagtggcctgcgcctgtcctgcgtctgcactgggggtgcacctcccagctgtgaggggccgatgacgtcctctgtcgagcctgaagcgaagtcgaagtcagtgatgtcgaagagcaaggtggaaggcagcaagcggtccgacgaggtcccagcacggtccagtggtggaccttgactcgacgtgccggctgcctgtgacgaagtctcggtgtactgccagaattgcgctgagtgcgaggtcgacgcagcttcctgagacgctgaccctgcagcctgggagaagtgggcggcctgcgtcatagcgaactgggcgaaacctacacatcgacaatgggacccttgtaagctaagacataaaatgcatgtaaattgattgtcgaagtaatgttgtttttttaagtacctgtggggggcacaacagaaggcctagccgaggaaggcggggtgctgaacggtgcacgaaaccctgaagcaatcggcaagtgaaacggctcacttatatgtgcgaggcatgtacagaaatagtaataaaaatacttacctccgtgcggaaggggagtcggcctaggaacatgcgcagctagatggggaccagtcggtatgggtggccgctgtatagctgcgtctgcccgagcaacgtcgtctgcacgacaggtgagcactcggagaatcgagcgcattgactccaccatccgcgtgtacgtcgtcaggtgctcctctacgggtaccggaatccccgcgcctaaacgttggatcatcgttgaaccgtcaacgacgacccggttgatgtcgttgacctgcatggttaatttgttcgtaaatattcgtaaaatttgacgaagagaaagacatgaaaacataaaggaatggtgcgatgcagggtactcacagcacgagcgaagtcctggtcgcggttcctggcgtagaggtctctagtgctcgcaacgtggggctgctgctccaagggagcgaaggtgaccctagtacgggtgcgtggctggtaccagcgtaggtaggcctggtacgcctcctcagtgtgtggctctccctcatggtccacgacctcctcggttgcgagcaaccagtcctcaataaaagtcgccaacttggcgggccagtcgccagctgactgctgacccttgcgcgagtacctgcgaattaatgtgtaatattagtgtgaatcgacagatgttacaaattattgtgaacaggtagattttaatgcaacaatggaaagagtagtaaagggggcag

SEQ ID NO: 13237 - DNA, 9290 bp, Oryza sativa
tgggacggtggtcggaaacggtactggaaagggctgacggaagccgaactgtcgcatcacgcggaaaggggcgtgaggctcaacgcagatgtcgaagaccatcggaaccgtagtcatccagtacgccttgtccctggtgcagagtgtggatagacccaatggcgcacgagcttgggtagccgcggcactgtagggctcccacacgacgtcagtcggcagaaggcggtcgaactccataacaaactcaggatacgaccgcctaacctgaacgtgagcccatcggcgctgcaattcgagacgatcgatgtgatgtacaatgaacttagcaattaacttaacaatacgataagatcgatgcaatgtacctgacgacggcaccacagagtacccatcgtagggtagtcgacctctggtcgctcctcgtacagtgactcgtacgcgtgctggtccacctcagggcggccgatcacaatcctctcagctgcccagatagaaagaaagagagggcacccaccaaaggtcgcgctgggatccgtcttcgtgcaagcctcacaaagtgcacggtacagagccgccaacaacgcggaaccccagctccactgaggcacctcgcctaccgtagcgtcggcgatgctcctggcgtagtgcacgagtcccttgtcgaccgcgtgcccgtgaccgccacagaacatcacccagccaaaaagctagagcaagtacgcctccaaacagtggctgtaggagtactcgtcggcctccgcctgtagctgctcgacctgcaagccgtcgataaaatgttaggcaccttaactgtggactaaatatgtaatacgcttgtcatttcggtacaaaaacactcacggtgaactgaagcagccacctcttcgtaggtccggtgttgcggtggtgtgccaacggctcgagcgggaggtgcggtgcgcgctgtactagtgcgaaacgtgccgtcatatcatcctgccagtccacagccgtggtcactggcccaacagtgtctctcgcgagtggtagccccaacaagtacgatacgtcctgtagggtaggggctacctcaccgcacggcaagtgaaaagtgtgcgtctttggcctccatcggtcgaccaaagctgctaggagggacctgtccacagtccatcgtctggccgggtccgcgtcgccggcggcagcctccaccagccgacacatcggtaggaggccgacctcatgcagcctgcaataacaaattaatatgtcattataaaaaatattacagcgcaactaacttatagtaatacattgttcgtacctctcgacaaaggagtcgtgaaccgtgagtagctcaccgcacgtccgtgcccggaacgtcccaagctgagccccctgcactgcagtaaggtgagaccggtgtcggtgatctatcgccgggtccaacaactgaggtgtatcctgacgtgccatctctgaaaaatatagtgtttcgtgttagaacaattcagcaagtagtaatataaaacaaaagataacttgcaaaattatgaaatagtaataaaatcatgagaataattacgtacaacaagagtacaggatatttaaatatagcaaacgttactaatggtacataacgatgacgtgcaatttaacatatatgtagagctcgataatataacataacattacgtgtcgaaatccgacatacatcagcatacctaaagacgttaggcgccttagtctgacgttacatcacgagaccaaaagacatgacatgccgaagtctgacattacacgacgaaacataaacacatcgataagttctaaacgaattacaagcaaagccacatgccaacatagaacataagaactacaccacgtagccagacgtggcacgacgacgcctaggacgtggtcgagtggaggtagtgccttcacccgtagggcgagctccatctgctgctgatcctgatagtcctgcctccgccgcacttggtttctccttgtctttaggacaatgcttgtaggtgtgcccatgttcatcgcatttgctgcaacgcttcaccctgccagcctcccactagtccatatcgttgcggatgcgacgagtcctcctccttccagccttgcctcggagcttcgatgggtcaggaatattgagtacttcattgttagtctctgtgaactccccagctatgccgaacccataaatctcgccgctccatgtatgatatattgcttgcttactgaagtactgtgacacatatactgcatctggtatgccacactccgctgcggcagcaatgacatggatacatggcctgtggagcagcttcggctttgcacaagagcaatgacatgtgccgtcggctttgagaacacactcctgcttcactgtcttgcggtagatacccctgcctgccttatcttgacatagtatcttaaacctgtgctgttgggtaccttgcactagagctcgatgtttcatggcctttttacgcaagtcctctagctttttctgcatgaaagttccaaacaaaatgctgttgttcgacatagagggaagaactgcctggaaccgatccctaaaatacctgcatgtctgtcacgtcctgataaattcatcccgaaataaaaatcattctctaaaaggaataatagaattaattaaaattcgaaaagaaattggcaaacactaaaatacgtacaagaaaaattcaaatgtggcccggagaatttttgttaaattctccttggtctaaaaggagccctcaaattttagtggaattttcagagcacaaataataattattaagaaataaacaaagttaaaatggttttataaaaagaaaagctctaaaaagtcctttttcccccttccccctcttgggccggctcggcccatctccctcccctctccctcctctccccgcggcccactcggcctctccccgcgcgcgcgccgctgacgggcgggcccgcccgccaccctcgctgacgggtggggcccacccgtcatcccctacctcccgccgctcccgccgactccgccgagccctaacgccgtcgccttcgctaataccgccgctcccgtccgtcccgcgtgcaatcaataggggggaaatattccccgtgattccctccctctttccccccatttttccctccctctctccctcggattcgtttggaaactcctcccctaacctcgccggcgcatcaatggcggccggatcttccgcggccgtttccccctcatccggccgctctctccccctcccaaccctatataaacgctccccgtgcctccctccaccgtttccgccactcgtcgctctctctccccgccggaatcgagctcgcgccgtcgctctctctctgcgccgtcgccgccgagctccggtccgccgccgtcgtcgccccagaccttctcccgtttcggcgtcgccttcttcgggttcgccgcgacctcgccgacctcgtccacctctccgtttcggtcgccgaccgccggaacgccgccgtccccgtctacccgagccgcgccgccgccttcctccgctccggtcgccgttcccgtcgccgccgtcgacccggggtgagccgtggaccgccgtttcgcttcccccttccctcccctctctcgggcgccgctccgccgcgccggtggtcaccggcggcgaccatcggggcgcgggtgcgccgcctcccgtcggctgtgccggcgtggccgccttcgggcgcgccccgcggctgccatgtggggcccggtcgtcagccgcccgcgccctcgggtgcggctgacgcatgggacccacggcgccggccggtgtgagccgcgtgcacccggtccaccgtggaccgtggggctgccgcgtgggccccactcccgtggacccggtccgcgcgcccctcccctcggctgacgcaataaatccgattttaaattaaaatttaaatgaagaaattcgcaaatatccatttaaagagcatataaacttcaaatggcaataacttggccatttgaactcggaattggaccgttcaagtctctaatttttccttaagaagtcaagaacccatttttgtgttttgtttctacttgttatatggagtttagtagagtaaaagccgtttctttcccgttggtcgtgtagacgctgcagcttcggaagatccgctcttcgtggaagttgaagccgacgtttgggaaagcgagcaaggcaagtcacatcatctttgaacatattgaatcccagtttgtaaaattatgttgatttaaattattgcattatcgctttatttaaattcccgcgttatcactgttttatctagccatgcctatttacctttgttatgaccttaatatttttattgttattatttccttgttcaccctagaataaacaaaaccccaactagtggacactctactcatgggaccactagtatgaatttaggtagatgcttcgctgattaaataggacaacattaggtggtttttataactttagactttgggaattctcatatcatttggacactatggaatggttggcttatggtggaattggacatacacctctcttcctctttcaaaacccctaaaacctgttttccggtggggtttgagtgcatgccagttgtgggaagtagcaccccggccactataaggattaagctcgggcctctgttgcaaagcactaccgtacttccacatgtctagtgggtaaggcttagtttgtggctcagtctggttataaacaaaagtacacggatggagatggacgaagtcgggggtcgatggacatctctaggacaaatgaaggctacacgagctgcggcccggtagtcgagatgtcatggcacagggctggtgtcctgctgctgggggctcattcctgcctacctgtcccggaggttccggccgtaggtggggttgggtcggtactcttgtttatggctaggatgggttgggaactatgtcacgtcttccgtccgtataccgtggtggtatgtggcacgtggttacacgtgaggaagatgtgtcttgtgggtaaagatgtacacctctgatcagagtataatctattcgaatagccgcgccctcggttatgggcaagccgagcaatgtacccaagttagtgtttaattcttaaaatttgcttaacaactaaaatgtggaatggttggcctgggttggcttgggacgagctgggacccagggtcgggttgccagttcggtctgaatcatcgtaggccttgggttaaggcaggttcgtgagggttcacggccttgattaataacactgtgtaactctaggatcgtcttataaaatggctttgggcaactaagtgacttttaaatgctgttttctgcaaagcttaacccctatattatcaccccttgtacccccttacattaatcatgcatctgccggtatggcttgctgagtactgtggttgtactcattcttgctctatctttctccccccttcagtaagagaagctttggagaagaagtcttaggtggagtcctggcttataccccagttgagcgcctgtgaagatggagccgtaggcccgctagtccgctgctgtttatttttgattgtcaggccttaagtgcctttgtaataatgtaaatattatcgatataataaagatgtgccttttatatcatgtttgtgtggtgtaccccggcttttcctgggacggggattaatacactagcgttcgggaaaaggcaattttctcggtcgcgacaagctggtatcagagccatctcgactgtaggataagcccagtggataaaaacctaaggacatattttataaatgaaactatttgcgaaagttcctgtttcctcctttacctaatgctatttgcaaaatgtttattctcttcttcctccttcggattttcaactagtactagatggtcagctttgcgaagaagaagatgtcgtcaattgtctgccgaagctctggaagactattggatctgctagcgaagtggaggaagcagcgaagccagatgtgaagcaggagtgaagatcttggagaacccgtcgcagaacctaagccaccctctagggtagagtcgttagtcgtgtgtttccttgcttgtgtgtgtagcgcgtggttttcatcagtggggtgtgatgtaaccatgctaggttgtttgcttaatcaacttgcagaataagtgaaacaaataacacatcaacaagaagagttagttcctttaaggtcctgtctctagttctggtctattctttcctagctggtttcctctcttcacctcaatccctgtaacagatgtttaacagagaaaaagaaaagaatgtcagcgggtatgcctccagtaactcaagttttcaactcaatccaccactagcctcaagagagttaacaagggtacacccttggtccattccgagcatgctgcttggttcacagctaccattggttggaagtcaagaccaaaatcagtatgtgtttgatcgagcacttgccacccaggtcaatgagcttccaatgccagaagaggatgtccccttttgtcacgattgtagagagcaaggacactatgccctgaattatccatgggtatatgtcaaagaagccccttcctttggtttagcagggcagacatcgctaaaccagcctcctcacaccaagtcaagcttgcagcctagtgtgcaaagtagagagcccaatggagagaatccattgaatcctgggaaatgctttcctcctagcctttcgtaccacgtggggtcacgtactaagcaagccaaaggcaagaagagtaagaatcagaagaaaaaagcaccgatgcgaactgaagaagaagtacgtaagatgactattaccagcaccgaatggcctccagcagggataactattcctagacgtcaaagaggaaataccttccgaggtgcacgacagttgacccagcacctcctaagccatggcggcagagtatttgatagtgaagggtcagatcaagtctcctcggattatgaagatgagtctctccgacatctcggcgaggaagagatggaatcaaaagcatgccctcgttgtggagaaattggacacgttgctagcatgtgtctcacactttgccctcattgtgaggaagaccatccaccaggtggatgtcccacccgcaaggtcacatgttttctatgcgaaggtacaaaccatgtgcccaaggattgccaactcagtgtgttgttgaccaagaccgcagaaatccaacgaacaaccctacgattgtctcgtcagttagtcagctccaacagcaacatcgacgatatcatccacagcaccaatgctcctcttgctgcacctgactctgcaataaatcatagcaataataccttcagcaccaaccattctctgcaccgacggcctcagcaaagaattgtcgtcgatggaagaagttgtgtctctccccgacctactccaggccgagcgaagggcaatcaacctcaggaggatgataccaagcagaagaccgttattcgcttcaaccagcaatcagaaggaagcttctcctgtgaatgatagcaaaatgcagtcctatcacatcatcacagaaccaatcaaggatgcagtcactagaacaatgccagctatatctctccagaatcaaaatgagcatccatgtttgtggttttcagttcgctacttatcattgtgtaatcgaaagtttgcagcaatcatgtaatacataaatatattcatgtctataaacagtgagcttgctatgcttatggatgattcatgttgaggatacaatgtaccgatgttaagcaccttccctttttgtttaaggcagtgcctcgtattcatgtaatatgggagaaatgtgtaataaaaacaagttctatgaggactctttcagaagatgctgatatgggattatgtgtataattgtttactgtcaaaggagacctagggtctcatttcagaggaactatgttctaacctcgagttaataaccaacctgatgatggaaaagaaaatcaagcgattaaccaaagagacatttgtttggactaagagtttcagatgtgtctttttcggatcaaaggcaatggcagtcagtatagcttttggcgaaatacttcaaggattcactgaaaggcagcagaccaaaggacctcatcgccaccagaagtgtccgcaacccacattaaagagtaccacctgttagagataggccgaaagatgattgataaaagagattggcaaagaggttctctagcaggaaagatgtaggccgaaaggtgattgataaaggataatcaaaaacatgctctgcatcactcaaggaagacccctgatagtaatcgccctgcaacagtcaccttgtcattgagagaaaaaaaaagtcgtgagtaagcaagatgacctaggtaaaagtgtttctatgaaggcaaggagtgaaatcttcaactcagtatcagatgctacagggagtgaaaactgcaagcaccggttaccaggcaatgccatgtcttgggagatgatccaatgggaaggaactcatcaaggtcaaaggagtaaaggaatacgttgaatgctaaataatgacaacctgaagataatagtgggaagtaaactgaatgtaaataaccaagtgatatgttcgaagatagtctacagaggtcagattaaaatcacatctaacaacgaagcttcagatttggcaggataacgatcaaacaataagaagttcagcagtaaagtcatttgggaagacgtcaaagcatgtctagtgggataatttggttcccttgggaaacataattcaaaggcaaagttatcgaccctcacattgaatagaggaaatatctagcaccggagaccaggaaagctaatatgagacaattagtggcaagttgtcaatcatggtattcttagtaagcgggatatcatagtctaaagcatatggtggtaagttagaagtaaatgacaagcatggtattctcatgatgacaagcatggtatcctagtaatgacaagctgatatcggcgcaaaacgtgaagtgggtaacttgtatgaggttgacgccaaagatatgaattatgagaagttctggaactgaagccccatcttccaatgccgcagcccagtcgaagtcagctaaaggttcaaccagggacaagtcaggtgaagagaagattccatctgcaacaagggatcgagacaagcagcctagagtggagaagtttttctaggcaagtttgttataaaagacgcgacggaagaagtcagacaagaagag

SEQ ID NO: 13238 - DNA, 2713 bp, Oryza sativa
cctatattatcaccccttgtacccccttacattaatcatgcatctgccggtatggcttgctgagtactgtggttgtactcattcttgctctatctttctccccccttcagtaagagaagctttggagaagaagtcttaggtggagtcctggcttataccccagttgagcgcctgtgaagatggagccgtaggcccgctagtccgctgctgtttatttttgattgtcaggccttaagtgcctttgtaataatgtaaatattatcgatataataaagatgtgccttttatatcatgtttgtgtggtgtaccccggcttttcctgggacggggattaatacactagcgttcgggaaaaggcaattttctcggtcgcgacaatgtcccatgtaaaatgaactccattatgccaactagtggcagtccacggacaccgcgcatcacccagttgtaaacttctgccaaatttgttgtcattattccatatttagcaccacctgtgtcatacgccttggcccatttctcttttggttcatgcagaatccactgagaaaatttcccaatctccaatccagttcttctaaccaatgttggactatccgttgggagaggtccaagagcttgaggagggtcagcaacggcggtcgatggagccgctgcacgctgatcactgcatttggctatcaactcatctaatctcttccaaagctcattgaattttttctcctggttctgattgcacagcctcttgaacatgttcatgagctccttgttcttgaattgcttgaagaaattagctcccatatgacgcatgcaccacctactctgtacatcttcccaaacactggggtatcctcgttccatactcccaaactgcaactcttctatcgctcgcagaatgccagcgtgcctatcatgtatcaggcacacatttggcctcataccaacaacttttgttttaaccaatttcaggaaccagtaccagctgtcggtattctcactctcaacaaaagcaaatgccaagggcaatacctgattgttcccatctacccctattgctgttagtatctggccccgatactttcctgtcaagaatgtcccatcaatgcagagaacaggacgacagttcacgaatgtcatcttgcatgcatgtagagctaagaacgccctttgcagcacactcttgccaggatgttcaattgaggggaatttcttcacttcgtaagagctcccagggtttctttcctcgataacaccaagcaggcgtggcaaattgtcatacgaggcttcataagttccaatacttggcatagctaatagtatacttgtatgtctcttcgatgtgttggattattgaccttggttcatatgtgagattatcgattacatgcgcatacatctcagatgcaacaaatgcacatgtaatgttcctgtggtatttctgaacaccaggtagaaaacatgtatgcttggtaacgactgacactgtccaataatccttccatttccccttatacgcgtgcactctccagggataaccatctttttccttaacacaccgaacttcatattgcgaccggttcgacttggcaacccaaaactctctatgaagtgacactgcaaaatgttttaccgcctccttcatatcttctgctctactataaatcgctccctgaataacctcattttctttgtactcccatctcacactatcctcttcagagacgatcagcccagaaaaatcctcactagcccattctgctggattaatatccgtctcatcatctgacgaatcaccttcctctacacgctcgttgtcagaatcctccctctccatttcatccacaatggcaccgacagtctccccctcgtcggccactccacttggttgaatgcccactggagctactacgcccccgtcctctcgtgcgttgacctcctctacagaagtctcatttacttcagcacttggtccctcgccatcatccatgttcatctgcacacctggatccttcgggtgaacaaacggaaccaaagctagaggccactcgcgttgcaatgcattttccaaataccatatccacactcgagagttttgaactggcattagttcccaataaaaaccctcagttgcccgacttactataacattgattgttatgtcacttgtctgtggatcaactctcaagcccctcattaaccatccttttatagaaggtacactcctctcagccggtctatcaattcccctttctgatacaattaactctgacagatctaccccagttgggcccataacggacgtttcctggtccatggtaaaacttggagtatttgtttggtcgacaatatctgtcaacgaaataactagatcatattactctttcatgcaataaacatctacaacgtaatatcttcttgtgtaagccaatgcaacggtaatgtattgattccaaactagcagatctacgtagttaccgatatctacaatacgcacttctagattagtacaactaaaaccctacaaatataatgcatttattcaaaccaaattttaaaaaatacacactatttaactcaatagtcacatataggatctatgaatattacctgaaatcggcgtctgaatccggcagggcttcgccccttcttctcttctcctcccctctcttttttttcactggaattgaggggggaggaatgagggctgggggct

SEQ ID NO: 13239 - DNA, 1082 bp, Oryza sativa
  unsure (1)..(1082): unsure at all n locations
cttctacgcccacctcgccaagcttgccggcgtccccgacggcgtgctcaacgtcgtccccggcttcggccccaccgccggcgccgctatctcctcccacatggacattgacaaggtcagattacctacttgccattatgaatttctgaattccgattgattatgctttttttttagataatggattatattaacccggcctctacaccttagaaggtgtacacagcccaaaccacaatcaagagtacataagactccatctattacacgaggataccaaataaaagtttaacaaaacggttaaagaagaacaacagtctaagcctgatggttttcacttttcaggtgagcttcaccggctcgacggaggtcggccggctggtgatggaggcggcggcgaagagcaacctgaagcccgtcnnnnnnnnnnnnnnnnnnnnnnnnnnnnnnnnnnnnnnnnnnnnnnnnnnnnnnnnnnnnnnnnnnaacctggtccacatggcctcctacaccaacaaggtcggcctctcaccggccatgtcgtcagaaaaccatctagctggcataagcacaacatattgtgaaaatctcatcagctttccacaacaatcctgttctgttgcagggtgagatctgcgtcgccggctcgcgaatctatgtccaggaggggatctacgatgcgttcgtgaagaaggcgaccgagatggccaagaaatcggtggtcggagatccgttcaacccgcgagttcatcaaggccctcaggtatatatatatgctagatcagtaaccatgctctgatttttcaactatacaaacttcagattcagagaaccaaagatgttcagcaagctgtaataaccacttgtgtgcaattacaacgaagattgacaaggagcaatacgagaagatcctcaagtacatcgacatcggtaagcgcgaaggcgcgacgttggtcaccggagggaagccctgcggcgaaaacgggtactacatcgagcccaccatcttcacggacgtcaaggcatgaacatgaccagtgtgctcttcactcctcagtgctaaaatatgaccagcagcattt

SEQ ID NO: 13240 - DNA, 5378 bp, Oryza sativa
ccatttttgatgattcactttctgctgatgcttacctcaatgttctctacatgccatccacattcccacgatctgagaggtccaggcaatcgaaaggtcctatggacagccagtttgaatctgttggttcatacctagaagatggtcctcgcagcaaccttgatggaatccgatatgccgagtgtattcattacttgcaagaagtaagatttatacccccaactgtattcctattcttctttcgctagcatactgcccacatggtgcatagatctcaaataaatatactgttagttcttaaaaagtgcaaaagaaaaaaataatccaaaccccaaatctgtacacaacatttacatcagtgatcttacaaataacacagagacgagatcttttgaattgagaagttaggggtgtaggcataccatcaccacaactcctttaggctgtgtttggaaccctgggttcccaacccctctccatcgtattccgcgcgcacgcttttcaaactactaaacggtgcgttttttgcaaaaagtttctatatgaaagttgcttaaaaaaatcatattgatccatttttgaaaaatataactattacttaattaatcactcgctaatgtaccgctccattttctgtgcgaactgtgcttgttgggaacagatgcttctgaacacagccttaagtctactggattatcctagctcagctgcttaaaagttatagtggctgttactgtatgcacctgaattgtattcctcatgtcctgttcactactggggtgatcaaattcatacaagatctcggcagctaaagccacaaccctgaactatttttcaagttttggttcacaattggcacagctccttttagatgcattttagaaattggataatctatttaatattttgtcaatttaaagcaattaatggttttttttcggggattcttgcagtatgctcgaccagaaatgcttgctttcatgttcaggcatggtcattatgcagaagcgtgctccctgttctttccatcaaatcaaccaactgatgaaggggaaacatctttgtcttcaattccgcgaaatgatcctttgacaactgattatgggacaatagatgacttgtgtgatctgtgtcttggatatggtgctatgactgttttggagaacacaatcttgacaattactcagtcacccacatatcagggctcagctatgactcagtacatgaatgctatcctcactcgcatttgcaactattgtgaaacacatcggcattttaattacctctacaactttctggtactgctaacaaatttcccttcgaattattcatgtggaatacactgattttgtgccaagtgttagttacactgatgtggtgtatcaggttctaaaaggtgaccatgttgcttctggactttgctgtattcaattgtacgttaattcaatgtctcaagaggaggccttgaagcatttgggacatgccaaggtacacttctatcatatctttatagcataacatgcttgtggtatctatgaatgattgcacaattgtgagttgtgcaatccttgcattgttattgctagaggtctggagcatatgcatcttgtctagcctactcagggaagcaggatcttcgtaaaccagcattagcaaaagattaagtgacaactaccactctcttatgaatgggagggtagagtacccaatgatactagtagtattatctagttatgaattatattaaccaattttgacattctttaaattattagatgctgctgcccatgggcatcatgagttctgacctgccagttgaccacttggcttgtgctgttgttggtcccgtggcccttgttcatgcaaaacatggatatgcttggatttaattggcctaatctctgtttctaactctaccgtatcacacaattgctagtttgtttatgaggatcattggtctagctgaaatttaataacagaataagcttcatttatgagaatgatttctccacatgtccatacagttgtggccttgtgggtacatatgctatcaccacccaaatgtcttgatagccaatattgttgcaaacttccaactttcaaaccaaacaacccctattccgttcatcccaatgccctagcacaagacttgaagcactttggataggtagcatagaccatgtacctgaatattcatgccatctgcttcattttgtgttattttggaattgaccaagaaaatcacttatattatggtcatagttgcagaaaaactcaggtttcttggtgagtggtagttacccaattcatttatgcttcaactaaaacattcatcttgcaccttgggatttagtaaaccagaactacctctttagctttttggcttccatttactactccctccgtttcacaatgtaagactttctagcatttgcccacattcataaagatgtgaatgaatctaaatatttatatatgtctagattcattaacatccatatgaatatgagcaatgctagaaagtcttacattgtgaaacggaggaagtattttttaacaacccttgaccaaatttcaacttgttaccatcaaaatgcatgatatgaaactctgactattttgctcgtatatattcatcagagttagcaaaggcactctgaagagtaaaattgttttggtggggtttaacaccttatgaccataaaacctgggttaagtgacactaaccaagaaacctagttatttgtgcagctacagccatgaaacaaatgttttgaagtttactgtaacaaataatggtgaacatgtgtttgcataatatactttgttgggtagattgtggtaccataatacaatagttatgttgccataattttctgtgttgatgcaacttgctcatcacacagtgacacggatggctgctgtaaataaaaacatttttgttaaatatggacctgggttcattttatttggagctctattgtattgtaaaataaacaaataatgatttaactgtgtttttcttatgctgggcattcttatgaatgcagtcacattttgaggaagccttatcagtgcgagatagaacaactgaggctacaaagctggtaccaagaactgctcgcaataagagtgcatcagaaaaaatgactcgagaaatgataatgaaattttctactagggtgtcctatcaggtgaggaaattatcgaaacagataaaatttctttgtcaagcattcattatttgtttttttatcaatacatgtatatatatatatatatatatatatatatatatatatatatatatatatatatatatataacccagcatgactattatttgtacttcctccatcccaaaatatagctacttttctggttcaaatttgaactgcgaaggtagttatattttgggacagagggagtagctatgtagtaattttgtatctgcaatgttagatctaaatcagctaagatatttttacatgatcgattgtagatggatgtagtgaaggccctcaatagtgtagatggtccacagtggaaaacttccctttttgggaatccaactgatgctgaaactctgaggtttgtatcacttctttgcttgtgaaggtcgattcccttttaactgctcttggaggaggtcaaattatcaacacattactatctaagcgaaatgtgcctcttggactatcgctactatcacatgataaagtttaatttacatttttcacttcatgatttagttttatcatgctattattgagctattttaagtgtaatactgtaatggcagaaccgtcgacatagtttccctgttagtgcttcaaatggttgagaggcactaaaagtgattatgccgagtttgttcttttcattatttatttgttttttgtatcaaggtttctgtagacattcgctgggactaaactgctttctatgttatctttatgacaacatttagttagatttcatcacctgttgacttgtctttcatattattatattacaggcggaggtgcatggttgttgaaacgttggctgagaagcattttgatttagcttttcggatgcttcatgagtttgatctccctggtacttattgaaatcaatatttgctcctaattttgtggaattaatattccaagatatgcttatcgtggacatggaatctacacactcaagtactttccatttctttacagctgttgatatatatgctggtgtggcagcatcccttgcagaaagaaaaaaaggtggccaattgactgagtttttgaagaacataagaggaaccatagatgatgatgaatgggatcaggtaacatttactccgtagtctttttctgcagccttcagctttgattacatgccaagacttggaaagaatattcttggagcagaatatattggccatgatagaatcttttgaattatgtgttctccttgttaatcagcttgccagatgatgctggctagtttttagtcctatatcaaaattcacgttgttcatatgtaattattgtctagggttcacaaatttgatagaatgctatgtatatgcttcctaaaaaaagagtatcatatgaatgctaactcttcctatcaaattctatttcctatattgcaggatgaatttgtttcatcaggtgttcaactatttaacatgttactgatgttcagtcaacatatgcttaaagccttggacatgctttgcatacttatggtccttgacagaacaaatgtgctttatcattagcccaatatgtgatgcccattgtttagtagatctattcgtgtgtgaggatagtttatttgattgctctgctgatatatttgttcacttgcttttaataggttctgggggctgctataaatgtttacgctaataagcacaaagaaagaccagatcgccttatcgacatgttactcagcaaccacaggtatcagttgttcactacataggaaagatactcaaatgtgccactttattgtcatgatggaacttaaccttaatttcctcctgccttggcttctttagtactacaaattactttatggttctgctgatgtggtattttaattattatattatctggagttacaggctagtgttataatcacccaaatagtaatttggtttggtaccaaaatcattagacaccaacagcttactatgcagactagtaggcattcaatcataggagtttctatgagacatgccccccccccccccccttggcatgaattactttacaagacctgtgcactataccgccctcaataaattaactaacaatttttatttggggtacaaaccattgtcaatacttaccaacattcagcgaatggcttgtaccctgattcttttg

SEQ ID NO: 13241 - DNA, 28490 bp, Oryza sativa
gggatgtctcagtggacagagttatcatacttctgttgcctaaaattataagttctctcttcttggttggaaataaaacgagcatttttttctagcaggactacaccagtgacaaatgctacaaattcgggcatagatttgatgcatttatcttggagcatgtaagaaacaacacttctcacttttgtttatttctcttctccacataagcttatagccggtttatagcccactactatatatccttccccttgatacttttttttggcggggaaccttccacttaatatttaacactacacaaatgcattttttctccattttgcccttgtggctgcacagagaaggatctagaactatcttgggtgccaaaaagttacactagtgctaatccagtactatcatagttaccaaggaatacaatagtatcatctggatcaatacttttctcacaagaggtttgttagtaggggtaatttgaaggttgttcttgttcactttgatgcctaaatcaatcttaccaaatgttggcattgctaatatttggtaattaaagttgagaagtgtaaaagttgttgtttagtttgttaccattgtcaagatgttgtgagaggaagattctagaattaccaaaatttggtaatggaggcaagttttggtaatgtttagatttataccttgccaattttttgtaaagccaaaacttggtaacaagggcctgttcactttgatgtcattttcaaccttactaaattttggtaaagttgctaaaaaagttgctacatttagtttgctgccaaattttggtaactatataagaaatcatgccaaaattttggcaaattttggcaggtaaggttttttttggcatcaaagtgaacaggttgcaaatctccttggtctttatcttgtcaaaattcgattgcctaagtatgtgtgcattggtcaaaagtgtcaagtaaatgtaaacggagggagtatatacattaagctatgtgaacaaaggaatgttgccacttctgcataaattttgcatatatttacaaacagatagcttgtcaatttgagatatatcacaagtatttgaatcactgatgcagcagcaccttcatgctctcttttaaggcaaatcctgtacttaatcacatttttttctgccgttatttgcttggacaacattgtgattgtttttgaagattatgtttgtgtggtgattggtgaagaaagaaaggtttgcatttgatctcacccttatttcttaaaaactggacattaggtctctgaagctgaagcagtgttctgattcttgagcagggattttggtattctttaccaaaagaggaaaggagattcttcatttttgttctcagtactgattcttgaggcgggattttggtattctttaccaaaagaggaaagtagattcttcatttttgttctcaatactgaattactgattcttgaagcgggattttggtgtcctttgccaaaagaggataggagattcttcatttttgttaagctgccaatatgacgactgaagagtagagcattaacttctctggctaaaaaagtgaggccaacaattttgaattgtatattgttgtaagttgtaactgttgtcactgtcgtaaatggtctgttcagcgttgtacggacgtaacgtatatttgtcaattgtgtagtctgtctacgatgctgatacgatgattacttcgatggttcatccatatgttgaagtgttcattcttttaaagtttcttcgctgaatgaaagggtcttcgtctatgccattcaattattaacaattgctatatatcatcagtcatactcttgtcaaaccataagtttaaactttaaagtacgtcattatagtgagagtaagatggggacagggggagtagaataattggaaatttgggagaggaaggattcgtgggcagctgaatccgatgggcatttggtgttaatccaatttccgagcaaacaagcagatagtaaaacataaaagcacacagcaccagtcgagattgcgtaataagaacagtcgagattatggagtggtgtgtgatcatgtagatacaagactggacacagtaattacttggcaacggcaaaacatatacttagtctctttccctaaccattcattatacatgtagaagaacactctgcgtaattccatcagatttgcaaatggctattccaaaacaaaacagcatagtgtaagtctgtgactaactggcaaaaccattttccggacatttcggcagttactctagctgcagcacctggctcctcaaatcatgcattcctcaggtatagtggtccctggctacaagtcatcctagtattcattgtaggagaacaatcaaggcctggataacacacatgaacataaaaaaaaatgcagagcttattctgtgaaaccagttaatacaaacaaaactagttattttgacttcttctgatcaggtgctcttgatcctataatgctacagatgggttgttccggtgactgaagcaacctcagagctgggtgaactttgagatcacgcatcaacagtttctgtccgacatccaactcacttaaatccacctcaatgtatggtggcactatgtcagcagggcacagatacttgacagttcgttttatggtgttgaagtaagcccctgtagtttcaaagacagtcacattataatgcttttaaacagaaccttgatgaaaagaaaaggctcacgcatgaataatgacttggaataaagtgcaggaagaagaactaaaatggaatgcatctgcaatgcaggtcgacactaactgtgtggccagagttttcggaatggtttcttcacttagcatttcatgattttcaaatcgtgtaatttgacccagtccaggaggaaattaaagtttcccccaaaccccccttccaaagggataggaaaggtacactaaataacaccagactgtttagtgttgttcaagagaaatgagacattttcattagcactatacaatacagatgattccaaccaacttaaatagcaaatgtttcataatattgttccatgtaatacatcagatgcacagaagacattatgccaagctaccttaggtctaagccttttatgttgaaaaaaccaggagaacatttttgtttggcatctaatataagttttaagtaacacaggcgcaccaaatgaaatgtggaagcatatgctacatacctttcctgagaccaggcgatgcatcctctccgatgaacatcaaaggaacatctatcttgagtagggctgaagaaggggctctcatgaatgtcacattcagaggctcatcagttcctgcatgtaagtgtacctgaaaatatgcatgttcacataagtcttcccccaaaaaatcacatataacagagtgtgaggaaggattcctgaaaatctattacattaattgctacaggcccacaattgcacaacttattatagcattcacctttgcatagagatatttttggagatatacaggccagtttgcaactgatattgtaaggtagaaggcaatgtatgatttaatctgatttatttcttgcattctgaactagaagaagcccatcatttatacttcattgatcaaagaaccatgtcttcaagtagcagttaatattggttacaacagtaacaacacagtactgtttatcttattatgaggccatcattgacactagacaaattgacaaaaaatatttagggaaccaacacagccacacattgttcgtaaaaaacagcagctaagtagaatatgtaaatgatgtcgcattgcgcagattgattgaagaatatatgagcaaacaagcattcctatagattgattgatggggcatacaagttcaagaccccacagccccaaactgcgcggtatgatgcaagtctttcacttttttttttgttgggcataacagtctctgacgtatcaatttagccagaccaaaggataccgaagtggattttggccaacttcaaaggaaacgcatattcgagtttcagaggttggtctcagaaagccatttgtaggaagaaagctcatgttacttccctcaagagctatcgaaccagaaagggatgctcctaaaacaagaaattgacgagatttccgtaagacaaaggcattgagcatcagtcttcatgctgctgcatctaagagtttttgcggtgcatacattttcagttcattgagcactacatactagagcgcatttttcatctacactaaatcatcttccagtattctacagaccaaatcaaagtcatagcccaggctaaagaaacatcaccacagaacaatatttgtatctcgaggagaaagaagcaagttaggcgtatcaccaaaccttgcggggaaggacgcggacgctctcgatgagctccccctggccggcgtgctcggaccagacctggaggcggaagaggcgggagaggaagaaggagcggccgaggtggtcgacgagcttgcggatctgcttggactgcacggacaccagccgcttgttgccgccctcctgcccgttctcctgctcgaacacgatggccggcacccgcccggccttccgctccttggccgccacgtgccgccccgaggaggcgcgcggcacggcgaggatgagctcgtcgtgcttcgcgtccggccgcgggtggcccgggaggtagtcgaacggcggcgacaggaggtccgcgtcgtggtggtggtggtggtccgcggtgaccgcctccgcggcggcggaggaggaggagaggtggcggccgaggagggggaggatgggaagggtgtggaggggtcgccggagcagcatggccatggcggccggcggcgtgtggggtgtaggggtttttggggggaggagggaggaatggtgggtgggctgggtggaggagagtggggtggagtgtgtgggggaagaggaggtgagtgggccgtgggccttcgagggtttgggtttggtgggctgagattgtttgggcctaagaatatttcatgggccggaagtgagaatgggtccagttcggcctaaaaagtcatttttacggagaaaattgaaataagttcacttttggtccctcataatgaaattcgtcaccaaccataatagcagatatgacgcgtcccttaactcctaaaatcaatgcaaataaggtcaatcaatgcaaataaggtcccaagtcggtttggatagtggttttggctgacgtggcacctatgtgacattgacgcggcacatatagtgggacccacatgtcagtgataatataattaaaaataaaaaaattgtagtgggacccacatctcccattccaatcttctcctccccaacatgctgccgttgatgcgaaccgccgtcggcgttttcgatgtctactagctctgccgcttgcggcccccgctgtggcctctcgctagcaagccacacactcgcgcaaacagcctgtctgcccatgttgacgcttgacaacagccgatgaacatcgccttgggcagcacgaagtacaacttctccgcccgaagcaactcagcgtgggccaatgtcggcgggtggtcgtcgaagtagtgctaaaatgagatgaaaaaaaactgacgatggtgctaaaatcaggaatagggtgagcttttcgatgctatttaagtgaacaaataacatttggtgctatagaaccagaaacaattttatcaattatttatgaataaaacttttttatatgtattcttagtggtttaaaaaccaactctggaaaatagaccacgattaggaaaaaaactaatatattttttaaaaattaaaatttggttatcaacaagtaggcaattagaaaagcctggctgatatgaatttgtgataaatttatacataaaatatggcttatatataatatgaattctcatgtaaagtacatacacaaaaatggtttacattatggttacctttcgaaagcacttatatccatttttcatatagagttagctaaaaaaactagattcgaaaatacaataatcatgccaaccacaagatgtctcaaaagtaagttaatcaagcaagaatgatataaacctcaaattagtttagccaaatgccaggtactcttgcatacgtagctcccggaatccaggatcaatcaggcttcacctttgcaaccactaatcatacttatcagccgctcaatcagagtgacaacgccacatggaccaaccacaaaatagaccccctggacccacaatccagtgagagagacaccacacactccccacaatataatttcctccagcgtcctctctccgtccggttccgtaattcctaatgttttgataagatttgtgacaaatttttataattttaactagcaataattttaaaaatatgtagtttaaagacactagtacaatatatatagatttgtcttataaaatagtactccctccatttttatattataagtcatttgatacttttcttagtcaaacttttttttaactctgatcaagtttgtaaaaaaatatactaatattttcaatgcaaaataaacacattattaatttgtcttacaaaatagtactccctccgttttcatattataagtcgtgtgacacttttcttagtcaaactttttttaattttgattaagtttgtaaaaaatactaatattttcaatgtaaaataaatatattattaaaatatattcaatattagatttaaatgtaactattttagtattgtagatgttgctaattttttctataaacttactcaatcaaaaaaaatcttggactgtgaaaaaaaatcaaacgacttataatatggaccagagagtataacaaaagtaaaattttatttatttatttattatatatgttatagtaaaaatatagtgaaagttatattttgaaaacgtgtctgaaacattaagaactatgggtctggagagagtaatattaatttccatgtcagagaaaccaaaaaagaaagaagaaaaaaagagagcatattcctgggctggctgctcgttccagcagcgcagcagcaagcaaacctaacatctcttcctctctcctctcctccctgcgacccgcgaaccacccaacccaacccaaccccaccgcagccgaagccgaagccgcgggaggggagggagatcccgccgcccccccaaccaccaccgccggccacctcggatctcggctgcgtgctgcggcggcggaggaggcggagaaggaaggaggagaagatgttctatggggcgatggtgtgggatccgtggctgatcgtgtcgcagatcgtgtgcctgcagtgcctctactacctcgccctgggcctcctcatggcgctcctcgtcggcacccgcgtcccgcgcctcaccctcctctacctcttcgacttcgccacgctcaccccgcgcaccaccaccggatggtgcgtcatcgccgccttcctcctcgccgccgccgccgggtaacgccgcccactcaccgctcctcccccccccctggtctcgtgctactagtacggaccgagatggattctttctcgaaaaggaatcggattcatgcgctcgctgctagttgactacaggttgtaagagtaatgccagcaattagcaagttgaaccgagtgtatgctcccagatctgtgcgcttaggagaggtagtatgtcaaatttggtgccgttaaatcgagaaaacttgctaggaattcccccatttttcctaggtatatctgcttggtacctgctgaaattttacacccaaatcttccatttaatatgagggccaacaaggtagtataatttttactagtcaacgtgtacaatatgagcacgagggtaaaatgtttctcggcatagtactatttgttatgaatgtgattgtatgtatgggagctagcatatgaataggtgctcagttgatattaaagtagcatattcttcacattttcataaattggctaaatctttctagtttatttcagtttgatttggtactctcttcagtttcattctccaaatcaccctaggacagcttataacagagaacgggaactatacctccactttctaattctaccagcattcattacagatcgcagaatttactacccacatattacgcactattacacatttggtgattactgcaatctaagaggccctgtggaaaacaactcccttttgcctaatttcttcatgcattttaacaggttatcaacaaccaacttaaattaatcttgcaaactatatctatcatggataattgcagaaatcaaaaatatacttttaattatcaaggataagcctgttcttgacctttggtgtaactttgttttcatcaaaatatggttgaatgctaaccttttcatgctttcgcttttgcagtgctgctttcatgctttatgtgattgagagagctaagaagtgcctggactttgcagccaccctctacatcattcatctgtttatttgcattgtttatggtggatggccagcttcagttacatggtgggttgttaatattgctggtttggcgattatgtctcttcttggtgaatacctatgtataaggcgggaattaaaagaaattccaatatcacggcttcgtgcaagtaagcaattatctcctactggatctggcttggattcatgcttttcctctatataattattgtcttcatatatgtataaaaggtcctgtatgatttatttgcttaccctttagccttttgtactgaagtctgcatattgcttacacaatagtcatgtactagctagaatattagattaattcgccaatgaactaaggagcagtagcatgatagtatggtacaataattcttcccaatgattttaattttctattacttattttttctgcttgccacctatctgtgtcatcgtccctgtaactaagaccttgttccatcacaaatgcccacattttggaaaaaaaatatattcaggtgtatttatgctgttgactgattgggactataggaaagggagagtacaaaagttcaactagtgatgtaaagagtgtgggtggcaatgcttttctatttagctttccttggtacgtcacagacagattatttgtagggtgtacctcaactcatatgttccatgtagctaaatgttgtaaacccaatgccaaagaaaagaagatgaagaaactaacattattatgcaagtgcaagcatctcacaaactcacagttgtgtagttgcaaaaaattagtcacttctcacctgatatagaccataaagtatgtaagctcagcgtggagcagagatattcgtcagggacttaatattcttttcaatatggaagaatgctttctgaaaatctgtaccaagcttttgttcagtcactgtttgtggtcatcttgctagtccagttatggtgtttaaagtttttaatatgtgaaatcaagtatagcagggttaaggtgcttaattattagactgcttcttttctcttccatcatattgtgcctgttgtcttttttataaagcacagtgacaagtttagctagcatcatatgggattcccttggaatttctgaagtttgaagttcccatcatgtcgtgctgatcttagttacagcgttcacagttgtccttttctaacatttcttagtaaggtgcatattgcctttctgacatggattagtctcatgtcaataaggctcaatagtgtttggttaatgaaaagcctaatatattattctaacttgggcagttgggctaggccctccatgcacagataacttctgaaattgtttccggtgaggagcggactcagattaggcctgcaattagtattacattgattaactggccccaaatattctacttggattttggtttaaaaggcttctgggtcaagaaccattgggcacaattacagggatgcactgctgactcctggcttgggattttatgaacttgaaattgtgaaatagtatgggaacatgtgcccttagaagcgtacaaaataaactttgatagtttacctggtcaagtgcttaattgcttttatgccgatttcagagtggcttcaaaatcctcagtaaaaagttttagcgtgttgtttgttactgtatgttacaaacactatctataaataagatgccttcaccttttagatgccgggccaataataactaaatcaaactgttgtagtgaaattatgtactttcagttgatgtggttggttgtttcttttttttccttttgtggtatttgggattggctgtactacatgaacattgctacttttctccttccaagtcaccttctattggggataatcttctccagtcactttcaacttattagcctgcttaattattttgtcctgtctttcaggtgtttaatcttacagactaaaggagtatagatggccttcaaatgttgttaccccccaagagatgcttgttaatatgtttctttaggaatacaaagactcgtgatacatgctttcctctatggtttacgaccaatactcttcaaacctgcaaattgatgcatgatctcccagtaaagccaccaggtagagactgacagaacaaatcaagggttctgagaccaagcatagaatgccaactcaatttttaaagcatgtatcaactattcaagtcttctcttctctatggatagtctcattgaattgacgaaaaaagagattacttgacaatttgtatggctagataccagcaccttgaaacctgtgttctttagcgagggtctgtatcgcaccattcgattcttctttagctttatcctgcagataatatatccagtttccagtgcttcctcttaagctcattccagcagagttcagtttggcggccaatcacatgactactcgaacctccaaatcatgctgtccttctgaacatgtatgtcaatatatgtgccctgtgtgtattgcgtcagaggtgttgacatgagttggttaaaaatacatgcttgatacgaaattgtaatttccatcgcaggtgaactcgggcaaaaattttaaaatcccttgtgggttcgcactttttttttcctctagtgctgtgatacttgcagtagtttgttttatccttgctaagtattgtgatattgtcagtactacagaagcgcctgtaatctcaggtgtcaaaacccaaaatcacttctttctcttctcttcactaaggttaaatatgcattgacattttcttttgtggtagttttatcaatgtgcattggtttttatattatggtgtagatgtcaacttggttgtcatgcccagcatttctggtactcttatacctcggtatctagttacccagatttcagttctcctcactaaaattcactgaacatcgccgagaattgacaattttcaggaacgacaccaaccagtggattctgccaggtccaggacctgaacggccgttttgcttgtaaagtgcaaaagttaaagtgtaggttactgttttttttccctgttccagttcgcattaaccaacagaattctctgaatcccaaagggcctaccgcttttttttttttctgaataggtaaatgattttgtgatattattcaacgaataaattaattattataaagttgaagaatataattaaatatcttttaacagaataatatatagaaagcttttttttttttgcgattaggtttgtcgtctgagcgagaggccgaggcttcaacatactggatgcctgggtatatatgacacctgcttactgcacacagcaattgcaatccccgctgaagttgacctagttatgccactactaatttctaatccttaattatgcccagtgtcctgtttcatttctgttccataatcaggtagttggttgcataacaagataatctactgtagctttggtatgctttgagctgccactagtattttccatcctgatctgatctgatcagatgtcaaagctctacaatctcacgtttttctcacctaaattaattaagctcgcgttgacatcacctctagatctctttcctgtgcgtttctataaactgtattttgctggctcgccggtcaactggttgttaattaaaactccaggtttcggcgttccaggtgcctcagttttcagggcgcgatttcgccggaggatggccggccgccggaatagtcaatattctcatatagccaaatgcccaaagtttgacgagttaaaatggaggatctctcctatcctgaattcctaatgcaaagatagccatctctcccgcatattcctacactctaacgcaacctcatttgtaatatttattttttgaaaaatacaagaggttaaaatataagaatgaatagtttcgttgtcatttgaaaacgggaatattttttatagtataaactaagaggttggccaccatcatctccgaggcacaaaatgagcttggctcaactaatcagatttcttctattttccctactgttttgatagaggttatcactatccgatggtatcacggtttacatagtgaccaaaccggttaccgatggaaaccgtagagttctaaaaactaagatcatatggtaatcatgcggttttataaatctagtggtgaacctatccacatgggtgctcgtatcatatctatggctaattatgttttcaagtcacgtcgagttatgatttagattttattttttagaaacacaatacaaacgcagacgctcacaacacacactcacccttataaatgaatatgcacacaccctatctctattagaacctctgaaagactgtgccgatatatttaatgaatttacaatgggcgcattgctacagataggtacatcctctatcacggaaaaattaattagctgtaaatgtgagcatctgttttaaccacagagaatcttactagttgagttatgctcacttcgctagttttctttttctcacaaggaagagtttagaggtggttagaattggttttctgctaggagatcaaggccggcccatgttcggcattacgccagcacgggcgcatgggccgcatctggaattcggagttatcttaaccggatgttggctttagctacatttcttctttacaataataatcatttgaacagatcaaggccaccctgaaggcggaagcagaggcgtttcaattttttcttcgtgatacaataatgagtggcacagcaaaaggcaaagccagctagtcacattctgaaaaccttcatacatatacaaatctggttttcacgtgtgaaaaataaagcaggcatcactcatttccatctatgaatattttatatgttttctcaaaaaaagtgtttgttcattgttaatttagtttacgttcatatcggaacaattcacggtcccggaaaaaagtgacagataacagttcacattcagcgtttatagagaggaaaaaaaagagtgataagcatagttcaattgattaggtttcttatattagaattagcccatccgggttcaagttctacagcctgtttaggagagtttaagattttgataagccgctagttggtaaccaaaatttgaaattctaaaaaagttgagttctctatttctagtttattttctaaaattctacgggccaatttggtaaagctccaactcataaatttaactctaagagttgggtttggaatagagttgtgcagtagtctaaacccagctctatctctttattacattttgtgagagtgcttcgaccggctcaattcccgttttaggtggagctgaaactgtttagatggactctagctcctcctaaagctagagccatgccaaaacatacgccacaactacagcttcttaatatctggatgaaaaactgaattgtttatgggagtttctaattttgggagaagatgcagctgacagaagctctcccaaacagacttgacacggatgctcgcatttgtagctcattattcttttagtattaggtaacgtgtaaccattgacagcaagacgtccatggtccatctttcaaatatacttatagaggtaaatgtgccataagcatctgcatttgtaatgtatttcgaaaactgagattgcgtttatacaacgaatcactagactatatgtttcaataattcgatgaataaagtgaaaataacaaggccttagacgcagcggctgtggttaccagtcacacattaccttaagaaaaatgattttaacatgtgggataagcaaagggaatgattttctttttctaaaaactaacaatcccaaaggaggaaggaaagaaacaaaaaaaaaaaaagagcactgactttggcgtaaccaaacggcccaatgcaaatccatccccgaatgctcatcaacaacgagtgtgcaagcatccggaccgaaatacgcacgcattacacggatgcaacccaaacccaacacgggaagtcgcggcccaccgtattctctatctctctacgcgtatatatgcatacgcgcccctcccatcctctacacgtacggttacacaaatccatttcccaaaagaattcaaaatttaaaacgtacataccacgcagcagctagcgcgcgcgctatagcttttccctccaacacacaagtacgtatctcccatggcggcggtgacgccggacgagcacgagcggcagcaggacggccactgcagggccagggtgaacctgcggccggcggcggcgcggccgttcggcgcggcggcgcgggcggcgctgaaggacacgctcttccccgacgacccgttccgcgggctcggcgggatgccgccggcgcggcgcgcgtggcgggtggcgaggtacttcgtgccggcgctggactggggcgcggggtactccgcggcgagcttctggtacgacctcctcgccggcgtcaccatcgccagcctctccatcccgcagggcatcagctacgccaccctcgccggcatcccgccggtcatcggcctctgtaagatcagatcacgaacgaggaattcctcagaggtgttcgtccgcgacagaattcgatctgtttgttgattgattggttgcgttgcgtgcacagattcgtgcttcgtgccgccgctggtgtacgcggtgatggggagctcgaggaacctcggggtggggccggtggcgacgtcgtcgctgctggtggcgtccatcgtcggcggcaaggtgagggcgtccgacgaccagcggctgtacacgcagctcgtcttcacgtcggccttcttcaccggcgtcctgcaggcggcgctcgggctcctcaggctggggatcctggtggatttcatgtcgcggccggcgatcaccgggttcatgggcggcacggcgatcgtaatcatgctgcagcagctcaagggcttcctcggcatgacgcacttcaccaccaagaccgacatcgtctccgtcctccgctacatcttccacaacacgcaccaggtgcacacgtatatacttcgtgttattaattacaacaagctaagtctatgcactcacgttatttttagctatgtatatacactgtagatatagacgttgaatttctatctattattaaaaaatagcttgcgggatttgacatattataatactatgaattagcgtcacgtccagcgtttgcattttttatttcgcctaaaatttttgtgtgatttttgacacttttaaatttattgaaattttaactggatttgaataaagtttgaccaaattcaacaaacatttgataaaatccaaaaattttggtcgatatattgatttgccggtggggtccaaaatttcgaaacgaaattgcatttgaccaaattcaacaaacatttgataaaatccaaaaattttggtcgatatattgatttgccgatggggtccaaaatttcgaaacgaaattgcaatcactggtcacgtccgatactggttttgtttttaatgtgacggagggaataaattataactctagtgcatttgtaattgcagtggcagtggcagagcacggttcttggcgtctgcttcctcatcttcctcgtcttcaccgagcaagtggtgagacatgctgccattcttgaaactttaacctttttccacctgatgtacgattgaataccaattgattggaggaacaattcctttgcagaggcgacggcggccgaagctgttctgggtgtcagcgatgtctcctctgttagtggtcgtcgtaggatgcgtcttctcgtttctgatcaaaggccacaagcatggcatccctatagtaagttctagctgttgcgtaattaagctagtttgtaagaaaatttatcacctcaaaactcgtatgtttaatctgtaacttttgttcaggttggtactctgaagcgtggcatcaacccgagctcgatatcacagctcaagttccagccggagtacgtcggcgtcgccatgaaggccgggttcgtgtcagggatgctcgccttagcggtgcgcacgcatgcaacaactccttgattaatttttttggttttctttctgaatttgtttggcgatcgacatggctgatctttgatgatcttggcatgcaggaaggcgtcgccgtcggcaggagcttcgcggcgatgaagaaagagcgcatcgacggcaacaaggagatggtcgccttcggcctcatgaacctcatcggctccttcacctcctgctacatcaccaccggtaattaacccactcatccatggctcctcctgcgttcgtcgtcgccagcttagctcacggcggcgccgcgtgtgtgttgcggtgtgcaggtgcgttctcgaagacggcggtgaactaccacgccgggtgccggacggcgatgtcgaacgcggtgatgtcggtgtgcatggcgctggtgctggtcgcgctggcgccgctgttccggcacacgccgctggtggcgctggcggccatcatcaccagctccatgctcgggctggtcaagcaccgcgagatccggcgcctgtacgaggtggacaaggccgacttcgccgtctgcgccgccgcgctcctcggcgtcgtcttctccaccatgatcaccggcctcggcgtcgccgtggccatctccgtgctcagggcgctcctgcacgtggcgcgcccgtcgacgagcaagctcggccgcgtgtcctgcggctccggtgccggcgccgccgacgacgaccacgccttctgcgacgtcgcgcagtaccccggcgcggcgaccgcgcccagcattctcgtcctccaggtcgccggctcgccggtctgcttcgccaacgccgagtacctccgggagaggatcgcgcggtgggtggaggacgaggagaaggccgtcgccggcgaggacctgctctacgtcgtcctcgacatcggcggcgtgacggcgatcgacagccccgggatcgagatgctgcggaaggtgcacggcgagctggagaggaaggggatgaagatggcggtgacgaacccgaggatggcggtggcggagaagctggtgctgtccgggctcgcggagctcgtcggcgagagctggatgttcctctccaatggcgacgccttggccgcgtgccggtacacgctccagggctccaagcacggcggcgtccctccggtgtagatctcgactctcgaggccgctggatcggtacgcgcgtcagtatatgtacagcacacatgcgtatgtgcgctgtactgtacgtattactaacacattgtgatttgaaaagtacttgtataagttttcataaatattacggaacgataatagcgtatcatgatcatataactataattaggaaggtggcccacgcacatgcgcggacacttatattattatattattgaaaggtaagtttattgtttgttaaaaaattttgcctaataaattaagggcaaactaacgttcggataatgttattttataataatttaagggttctatttttcttaaagtatttaaaaaaatcattcataaactttcgagtaggagatggattgagtaattacgacttttgaatcatggttcattttctcgagtaaataataaactattgctagttaattattatacagttcatctatatacatatcgtgtagtacggccacaaatgaaaaatgctagagcgaactacttaaaatttttgtgattaaattgtctcatgaaggccataatatagtaaaaagggagaaaaacgtatgcatggaaaaaaaaagaagaaaggggaaaaagacaaaagcgtaacatgtacgttggtgcatacctatgccgcgggaggagaggtgggactatgaaggtggagagtttgtgaaggtggagagttcggacctcgtagtatttagtttgttctaagatcaatttaatctaacgatttataatattagacctaccgatttaagtgaaaattaagtaatatatactttgctttttttctctctcttagaatatatgatattttctctaatttattagagtgccatgtggtagcttgagagtattttaaggaattttaatggacttaacacatgtaattcataaattaaccgtgtaatatatatgtatgggacatacggtaatattcgttttagatttgtacatgtttgtttatatatatgtagagagaaattaattatgttcctaacaagccattagatgtctaattaatagcaattaattgtaacaactatttacaattgttcatagtagctcttacatattcatcctatgactttgattatccattgatcaccatgactcgcacgaaaaaagaatgtactacttaggggtttaggatagctgaaattgatgaattatttgatatatgtgatatctatttgaggatataaacgaataaattgacttctaaaaagttaaaaagttgtttaaaaaacatcatttagaaatttcaaaacatggaatcagaaaaaaaagagccttaaacttcattctagcacccttgtcttagtaagagttctattgatattcgttaatactatgctcatatttataacataatgatttcattcacctgtacgaacaaataatacagaatccaaatacaacataaaacaatatattataattattatggaatcaactgtcggtttcagcttaaacagagctatgtgttggaaacaacacaacccatggtgcttaattcttctctcactgcatcacacctttaatttttcttttcatgttattaacaaaattaatcatctccatatataatttatatgtggcaaaacggtagcgctgcagcggtcgtgatcaccttagatgcctcagacatgacgctttgtcacacgtacgaaaggtaaaggtgtagacgtgcattgtgcaaagggccaaaaagaaaacttcagacactttaattattagcaaacaatagatccgaagatttaaataatcggtacatgggtgacggagcgtggagctcctcaccgggagaccgcgcaggcccccctttgccggttcggccgggggcgctaagtgaggttcttcgccctcgatcgatctggagaatgttcgcgagagagcaagtgcacgagacacgggcgatgtcgacaggttcgggccgctgagaagcgtaataccctactcctgtgttctggtggatctgtgtgtgaaggagttacagagagccggagagccagagagttcaggctccagaacccctctagcgtcctttttctcctttcttttctcctttttggtgggcaaggtcctacttttatatctcaaggggataccacatgcaccacttctacctacttttcttttgggtggggacctaccctatcttgaccaaaacttggcttgcaccttcgcctggaagctaaatcacaacttgtccttgagtgaggctcagcgccgtcactcgcctgacaccggggatctccctgttactccctcattaatgggcggagatttgccatggctgctttccaaatgaccatccgacgagatgggtcatacctacctccactccaccggaggcagatgcatcgtgggagcacggttgtctgccgatgacgcgaccggcgtcagaccagtcacagaccggtcattcttgtccaccacgtgtcagtttagcatgctacacgtctgcccttcttcatacaatgacttccttgcaatggttgcgatgaagcctggaatgtatctggccggggctgacgtgccaactccaggagttcccacgccggctccggctagggacgagtgcctggaggctctcatcattccgacgggacggggcgaggcgtgtgtcaagccgcctgttgccacctaacccgcgatctggccggtctgtgaccggtcacacactgtgacctgtcacggaccgaacgagtgtgctgtgctgcattaaatgcggcgtggggcgctcgtccaacccgcaataaacgcggttaggtgagcgccgctgtgctcacctaacccacacacgtggcgccaaacccacaggggtcggggcgccccagccctcggggccgaaacgggagcggcccgacccctcggggagacagagggaggggcggccacatcaccctcgggcccgacccctccgagggggtcaggccacgtgggtgactgcagctgccccaaacctctagtcaagatacccccggtcccatgtcaccgacagtagcccccggcgttacgccagggcgatcgcccccctcgagggaagcgctcgggcgtgacgccactccttagacctggtgacaggtggggccggtctccacaggcggcagaaacccagcggtcgcaaatcgcgcacatcggcaaggaaaaaccgaccgacaataatgagcggcttccttcaagaccgctacattacttaagtagcgcgcgaaccgggacgagccggttcgtttcgcctggagatgtgatgacggtgcatcggtcggcgagcgtagttaacgcgtgcacgatatgtcccatctcgactgccacggccgcacatccgcctcgtgcgccgcaaacgggcgagcgggattagtggaggtgggcgcgagagacgagggggtgaggtagtgggcgcggggatcgaggagccgggcatagcgttggcaagggtactaagacatcaaggaagggatttgtttccttcctctcgtcactcttccctttgcctttgccacttgtgctctgactctccgtttccggcgccctacccttgccatactcgctcgctctcaagctcctcctccgccggcgtcatggcacggggctccgcaccgctcgagggtagcgtgctgccgccttcccgcatcgtgagcgagaggcaggccgggctgccgtgccgattcatgccggaatctgccaccggccgggaggtggtcgcgctgggcgagggacgcccggcgccgcattacccggggtggtccgtcttcttcctctctttcgcaatggcagggctggtcccgccattctcttctttcttcatggatgttctggagctttatgatatccagatggcgcacctcacccccaacgcggtaatgacgttggccatcttcgcgcacctatgcgagatgttcatcggggtgcgcccatctctccggctgttccggtggttcttcaccgtacagccggtgtcgccaccgtcggtagtcggtggctgctacttccagccgcgggggccggtgctgaaccgctacattccctgcgtccttcgcaagaagtgggacgactggaagagcgactggttctacacccctctcgccgacgaagcgcgcctccgacttccgagccagcccccggcgcaggcctccagctggcgggcgccggtagatctgggagacggctacgacgccgttcttgaccgcctggcgggtttgcgatcccaggggctcacgggggccatggtgttcggcgactaccttcgtcgccggatcgcgccactccagcggcgcgcccggggcgcctgggagtacaccgggtccgaggactacatgaggacccaccaggggggcagatgggactgggcccctgaggacttcaagatggtggtccaacgggtgctgaatctcagctccgtggaggcatccctcatcccccaaggtgtcctccccctctgcagcgatccagagcgcgccaacatcctgaccatcatgcaggcggtcggggcgtcaggggagcgggctcctcgaggccacgatggcgcgggcgggagccgcaggggggaacaatctaccccgggagggggtcgtgcttctgggccgcgtgacgggggcccggggggcagccgccctgccgacgcccgggggaagaggaaacaggaggataccccctccccatctcctccccgagggggcggggcggtgcgtgccagcagcaggcgcccggagggtgctgtgccgacgtcgcagcccgagggggagcgaaaaaagaagcggctccgcaagatgggggggaccgaacgatgctggggaaaccttatctcccccccaaggtggtcgtttagtcgacctcctcgcaggttcgtccccgcgcccactgcggccgtattcattctcccaaggcgagttttcacttacccgtttctttttgtcttctggtttttcttccgctttcagcgagattccgtcgcgcccccctcgccattccaagtccggccggtctgaggccgaggagacagcgaccgcggaggcccggaggcgggaagctgtccggcgagaagccacggaccgcctccgggaagctgaggaggctgcccaggaagccgtccgggttcgccaggctgaggaggccgctcgggaggaggccagactccgccgggccgggaagtcagcccgggaggcagaggcgacgcgcgcacgccaggcggcctgccaagcccccgacccgactccgcccgaggcgacgacgacttccgaggccacccacgacgaggccgcgggcgcgccgctcggacccgacccttcgggcgacgttcgggacgagccagcctcgggggacgcccctgagtccggcacgtcgattggcgggccgagccgcacagcgcccacaccgaggcggctctcccctctgccttccgccgccccactgaacacagagcccctcctgcaggccctggccgccgcgaacacgacggtgctggacgggttaggtgcccagatggaggtcctgcaggcagagcgggcggagctcgacgcggcgtgggcgcgcgtcgaagaggggcggcgctcggtggaggccatggtggaggcgggccgcaaggcataccgccggcacgcctcagagctcgaggcccgtcggagggagctggcggagatcgccagggaggtggaggaggagcgggagactgccctcatcgccatcgccatgctcaacgaggcgcgggacgatctccgcctccaatacgggagtccttgacgccgccactgcacgggaacggcgggcgacggagaacgaggcagcgtcccggcggcgcgaagaggcccttaaggctcgcgccacggcgctcgaagagtgcgcccgcgcgagggagagggacctggcggaccgcgagaccgccgtcgctatccgggaggcaacgctggcggcgcacgaggccgcctgcgccgaagaggagtccgcactccgcctccgcgaggacgcactcaccgagcgggagcgagctctcgaggaagccgaggccacggcgcagcggctggcggacagcctgtccctccgcgaggcagcgcgggaggagcaggtgcgccgtaatctggaaggcgcccgcgccgagagggccgcactggatcagcgggccgctgagctcgaggcgcgggtgaaggagctggacgcgagggcgcgcagcggcggggcggccgcgggtgacggcgatctagccgcccgcctcgcagctgccgaacacaccatcgccgatctgcaaggcgcgctggactcgtccgccggggaggtcgaggccctccgcttggcgggcgaggtagggcccggcatgcttcgggacgccgtctcccatctagaccgcgccgggcggcaagcgggcctctggggcgagcggaccgcgaagtacgccgccaaccaggggggcctcgcccagcgcctctcagagatggccgggactctccagcggctccccgaggagctcgaggagacgatcaagtcatcctcgagagacctcgcccggggggcagtggagcttgtacaggcaagctaccaggccagggacccagacttctccccgtgggcagcgctggacgagttccctcccagaaccgaggacgacgcgcgcgcgcaggtccgggacgccgccgaccacatcgtccacagcttcgagggtacggcccctcggctcgcgttcgccctcgactccgacgaggagggcggcgacggtggtgtggacgacagcgaccacgaggccggcgactcgggagcctcgaagtgagcccccaggcccccgccaatcttaaatagtttttcctttcttcttccgaggccttcgggcccccttcttgtataaactaatttaatctgcaatcaaataaagaagaaatttctgtgtcaattttatttgttgtgtgtatgagacgaggatggtctgtgccgcggtccttctgtgtcttggcttgaacaagggctcgtgcccaggtcctagcctcaaacggcgcgggtcggggctagtgcctggggagatccacgtgtcgagactggccaggccgggagcgcggtgaccgagggttatggggacccgattgtaggcctttgccgattcccccccggagttcaccacgccccggggcacggctcggttctgggccccgtttggcgatttccgccggcccgggccaccgagggcagggtcgagcacgagcgtgctaattcaagccaagactcttcaaaaggaaacaatggcacagacacagtccttaggaaatcgaaaaagcttttattgaaatacggaagagagaaaaaagataagtatatgcatatgtggtagcccccggccaaccctgcacgcccgaggggggtgcggggttggcccgagcccgagacctgacacccgacccccactaggggtagaagcgacgaaggtgttcgatgttccacgggttaggcagctctgtgccgtcgcccgtggccagccgaacggagcccggccgggagacgccgatcactcgatacggaccctcccacattggtgagagcttgctcagtccagcacgcgtttggacgcggcgtaggacgaggtcatcgacgcagagtgattgggcccggacgtgacgctgatggtagcgccgcaggctctgctggtagcgcgcggctcgaagggccgcgcgccgccttcgttcttccaagtagtcgaggtcatctctgcgaagctgatcttgatcagcctcgcagtacatggtggcccgaggggacctcagggtgagctcggatgggagaaccgcctccgcgccgtagacgaggaagaaaggcgtttccccggttgctcggcttggcgtggttcggttcgcccagagcaccgctggcagctcctcgatccacgagtcgccgtgcttcttgaggatgttgaaggtcttggttttgaggcccttgaggatttctgcgttggcgcgctccacttggccattgcttctggggtgggcgggagaggcgaagcagagcttaatgcccatgtcttcgcagtagtcaccgaagagctcactagtgaactgggtgccgttatccgtaatgatacggttaggcaccccaaaccgagcagtgatacccctgatgaatttaagtgcggagtgcttatcgatcttgatgaccggataagcctcgggccacttagtgaacttgtcgatagcgacatacagatactcgaacccgcccggggcccgtctaaatggacccaggatatcgagcccccagacagcaaacggccatgaaagaggtatggtctgcagggcctgggccggctgatgggtttgcttggcgtggaactggcacgccctgcaccgccggaccaagtcgaccgcatcgttgagagccgtcggccaatagaaaccctggcgaaaggccttgccaaccaaggtgcgtgaggcagagtgggctccgcactcgccttcatggatatcggcaagaagctcgacgccttgttcccgaggaatgcacttcaggaggactccgttagccgcgtgccgatagagggtcccttccaccagcacgtagcgcttggagatgcgctggacgcgttcactcccttcgtggtcctcgggtagagtcttatctgcgaggtacgcctggatctcagcgatccaagcaatcaatctaagggagctgggagcgctcccctcgggtcccgaggcctggactccgacgggcctcgggggccgttcaggcgcgtccgtctcccctagggggtcgggtcgcgccgacggctgggcaagcctttcttcaaaggcgctcggtggggtctgggctcgcgaggaagcgagccttgagagttcgtcggcgaccgcgttatcccgtctgggcacgtgccaaagctctatcccgtcaaaatggcgctccatacgccgcacctggcgcacgtaagcatccatctgcgggttagagcactggtactccttggagacctggttaacgaccaactgagagtcgcctaacaccaggaggcggcggatccccagtccagccgccactctgagtcccgcaaggagtccctcgtactctgccatattgttggttgcccgaaagtcaaggcggaccaggtatttaaggacatctccgctcggcgaggtcaacgtgacccccgcaccggcgccctgaagagacagggagccgtcgaactgcatcacccaataggcggtgtgaggcagctgcgaagggcccgagctggcctcggggatggagacgggctcgggagccggtgtccactctgccacaaagtcggcgagggcctggctcttgatcgcgtggcgtggttcaaagtgcaaatcgaactcagagagttcgattgcccatttcaccacccgtccagtaccttctcggttatgcaagatttggccgagcgggtaggacgtaaccaccgtgacctgacgcgcctggaaataatggcgcaacttcctcgaagccatcagaatagcgtaaagcatcttctgggcctgagggtatcgggtcttggcgtcccggagggcctcactaacaaagtagacgggccgctgcaccttttggcggggccgatcctcttcgctaggggccgcatctccagggcgcttttcgtccgagaggccgcgcggggcgcactcggcttctgtgtcgacgacctcggggtcggaaggcgacaggcgcggccttcccgcagtggccctggggccatcctgggggtcgggggctcctggcaccgtcggacaagcgggcagagggccagctccggtcgtcgggggcctcgggccgccgttcggctcgggggcctctcctccctgctctctcccgggtcgagtcgatacagggtgctcttcgtccgagaggccgcgcggggcgcactcggcttctgtgccgacgacctcggggtcagagggcgacaggcgcggccttcccgcagtggccccggggccatcctgggggtcgggggcgcctggcaccgtcggacaagcgggcagagggccagcttcggtcgtcgggggcctctcctccctgctctctcccgggtcgagtcgacacagggtggggatgcgcggagcgagggtcgtcctcgtcgcgctccacgaccaacgccgcgctgaccacctgcggagttgccgccaggtagagtagcaacggctcatctggctccggggcgaccaggactgggggagaactgaggtacgccttcaactgagtgagggcccgttcagcctcctccgtccagataaacggcccggagcgtttgaggagcttaaataggggtagcgccttctctcccagcctcgatatgaaccgacttagggcggccatacagccagtgacgcattgcacatccctaagcttcctgggggggcgcatccgctctatagctcgtatcttctcggggttggcctcaatgcctcgggcagagatcaagaacccgagaagcttgcccgcaggcacgccgaacatgcacttgtcggggttcagctttatgcaggtggtgcggagactttcgaaagtttccgctagattcgagagtaaggtctcctggttgcgtgttttcacaaccaagtcatcaacataggcctcaacattacgtcctatttggctacccaaagaaattcgagtagtacgttgaaaagtaggacctgcattctttaacccgaaaggcattgtcgtataacaataagttcctacgggggtaatgaatgcagttttttcctcatcctccctagccatgcgaatctgatgataaccagagtatgcatctagaaaacacaaaaggtcgcaccccgcggtggagtcgacaatctgatctatgcgtggcagggggtaagggtccttaggacatgccttgttaaggtcggtgtagtcgatgcacatccg

SEQ ID NO: 13242 - DNA, 8057 bp, Oryza sativa
  unsure (1)..(8057): unsure at all n locations
ttgatgtttacagtggtacagtagttcatcaaggctacaagtttgttatctgaaatatttccaggaagctccccaaaagtaggtccaaattattgggatcagattcaagaagttgctctcatatcagtgataaaacgcatccttcagcgtctacgtgacatcttggatctggtgagcttttgttttatttgtaaccacttgtagacattactgggttgtttaaaatcaaaccgtcctaagatgagtaccaccatgtgctgagttgctgatctcatggtttttgaatgaatgtctaggacttcttcttgttttgcttcctcagttatttcctgggtgaagtattacactgctaggagtacaaatgcattacttgtaataagggttccctcagcttttccatgattttttccctcgaaaatgcaggagagctgcatttcatttcattaaggggaagaaaaacaacacaaaaacacaaaaacgcaggagagctttttccatgcttattagcacagtcaatgtcaagctgtttctttataagaatactatgcattgattatgtctgcaacttttaatttggttattgaaccaaagcagatgtgatattcctactattgcatgcttaataaagcaaaacatctatgcatttttttagggttaattggatccatgccattataacaaaaattagaatgacatatcttttggtctcatctaggagggctatccatatcttcaattagtttttaccgagatgaatgcctcctcatcaactgaatctagcagagttggacaaaagcaacgtcctcttgggcttctgcaccaaatgattgatgatgctttcaaaggaaagcgacaattcttaaatggtaattttttctactttattcggttgagcggtaagtctgttttctgtgatgttctaatagcatttctgaacaaatctttcaggtaagcttcacaatgttgcaagagctattgttgatgaggactctgatggtacttattcaaaggagagtatcaagatagaaaagagagatattttgagctctgaaaaaggaataatccttggtcatggacttagaatcctaaagcaagcatctaggactgaccaaacagcgtcaactgttgttgaaaacaatgcagagcacaaaggatctactagcagatacctgggtcctgtatccactaagccatcaacatatttatcaaatttcataatatatattgcaaccattggtgacatagtggatggaactgatacgactcatgatttcaactacttctccttagtctatgaaaggcccaaagatgtaagccatttacaattttacatatcatgttctgaagtcagatcaaatctatacattttcacttttaatgtttttccttctttgtactggaaacttgaaatgatagtccttaccaaaagtttccccatttaggattatgtttaattggctggcgtttttattaaggcctgtttgattcagttcccgtatcaatacatacttaactcattgggcttctgccttctattttctttaagtgacaatattttgtgatagaaaatcttgctgttaagaccatccataaatttctgtgttttcttgtattttgttttgagatctctttggcctcagagctaatgtggaacctggaattcataatgttaatgtaaatagatattagttgttaggtgtccctggaatatcttttacaagtttttgtgattaaatgtttaaatattatctccgtgccaaatatagctacttctgggttatgtacatagccagaagttgttatattttggggtggagatagtatatttagttgaacatagcagtgtccgattctgtttcctatgattttgtctgacctaaatttttattcaaagtgcttcaaccatgatggtttatatttgatttatttcaacatcctttatagtttcaccttaaaagttggggataaaacttggtaagaaatcatgcccacatgaggatatgccaatgataacattaataagggcatggtatatttgtctatgaagtgaatcctttttagaaacagggggtaactaatgttcaatgtgggcctatttcattattctgatgtgaaacctggtattgatttgtatgaactcaattactgctcttttggcagcattctgacccaccaaacactttccttgtttctattatgttaatttctatgtggctcaaaaacttaggagccatataaatttgtttcagcatgcagcttttagtcatataacatgtgttttggcatgcagcttttaactcgtcttgtttttgagcgcggaagcactgatgcagctgcaaaagtagctgatacaatgggtgtagactttgtgcatgagatcatatctgcttgtgtgccacctgtttttcctccacgcacaggacaaggatgggcttgcattcctcttttacctaccctttctaaaattaattcggaaaacagatcacaatctgctcaaggatggagtgcgcacgattcatcattgtcttctcgtcaggagcccctttatcctcttcaattaaatttagttaaacatttggcacagttgtcatcagttagagcagttttggcatgtgtgttcggaagtagcatactatctggtgacagtgaattatgttccaatgtaaaagatgcaaaacaagcccctgaaatcaagaggtcattctatgaatttgctcttgagcaatcagaaaggtactgaactactgattagtcatttaaatgattatatttaactttacttttgtaattgactaagttctttacaggtacccaacattgaaccgttggatacagatgcagtgtaaccttcatcgagtatctgaatctgctgtatcagctgaaactgacaatgaagtcaccttgcatcagcccaagggaaagttttcttcgaagcgagcccgtgaacctgacagtgatgccgaatcggagattgaagatattgtcataagcgggaaatccacttcaaattcactagaatctcctaagtgtgatgaggctaaattagagccaacaacttttatttcatttgactgggataatgaaggaccatatgagaaagcagttgaaaggtaacacatcatttgtatgccactccttctgctacttggaaaggttgtttgagtagtttgaatctgatgactgtggttactttgtttttgcaggctaattaatgaaggaaaactgactgatgctcttgctttatctgaccgctgtttgcgcaatggagcttctgataaattgcttcaactgctcattgaacaaagggaagaaataagtttaggggccagacagtcccgtgcatatggatctcataattttgggagtgatacatggcagtattgcttgaggctgagagataagaaactggcagctcaacttgctctgaagtatgataagacattttagtttgaacctttcattgttgcgatgaaacttctgatttatacgcatattttgagttttagtgtctctgatacacatgcaatttgtgtgcattatcatgctaccatcttctgttatccagatgtgcttattgagttatttattgcatatgaacactggcaggtacctgcacaattgggatcttgatgctgcagcaaatgttttaactctgtgcatctgccacttacctgagaatgatccaatgtggagtgaggtagccagatttgcatctaattgcatcttaagtttgtacattatcttcaaaggtcatactgtatctcgtgattgctcaccatgattttgttttgtctaaaaaaatcatgattttaaacatgcatggcacattgccacctttgacatatgcctacccaagctaacactaggaatggcttactggcttcttgccaaactgcttagcatttcatgtacaatatgcacttgaatgattacatttttgtgggcaaatttttcaatgataaatgcccaaatctgtctgaagtttgagctttatagatcttgtttagcattgtttgcttgttaaatctctgcctttttatttgtacaggtgctacgcatgaagcaatctttgcaacgctatggtcatattatgactgcagatgaccattacaccagatggcaagaggtaacccaatcaaatgtgcacaaaatactgactaagccaaccctcctcccattttttttaaaaattattcaaatgcaacaagcataggcttcagccttttctcctcaacttgttaagtgtgttcatcataaaatttctgaccattgctgaaattattaggtcgaagttgattgtgaagatgatccagaaggtttagcacttcgacttgctgccaaaggagctgtttctgctgctttagaggttgctgaaagtgcctctttatcaattgatttgcggagggaactgcaaggccggcaattggtcaaacttctaaccactgatccactgaatggcggagggccagctgcagcttcgcggtttctgtcaaccttgcgagattccaatgatgctctccctgttgccattggtgccatgaagcttctacctgacctgcgctcaaagcagcttcttgtatgttggcagatgtgacacataagtcaagtgtggtaaagctttcctttcagtgattaaattgaaatcgattaatgtactttcaggtacacttttttcttaagcgtacagttgggaatctgtcagatgatgatgttgcacgacttaattcatgggccttaggtctccgggttctgtccttattgccattgccatcacaacagcgttgctcttctctgcatgaacatcctcagttgatcctggaagtattattgatgatgaagcaactccagtctgcttctttggtattgcattgcatctcaactgattttttgtacttcttgactcacaatcttgaataccctagaagaataaaaatgattatcatctctcagtactaaactccttacagctgccattatacttgctgtacctgttgtattaatggaatatttcttatttttgactgcagattttgaaagaattcccatccctgagggatgacaagttaattgttacttatgctaagaaagcaatatctattaatgttaattctactcctagggaacctcgactaactatctctggctcaagagcaaagcaaaaaaaggttgctgcaccagccaaaacaaattttgtgcagagctttggtaacttccagagagaagcacgcaaagcattctcatgggtccctcgtgatagtggcaccaaaacacccccaaaagatattcttcggaaaagaaagagttcaggttcaggaggtgaaaggtcctcttgggaagcaacacctagtgtacaggaggagcgggcacctgaatacccttctgaggggcaagaaagacttccttntgtctctgctcctgaggaatgggtgcttactgnagaccctgataaggataacgcaactcgtgcatgccatagatacgaatcctcccctgatattacattatttaaggtaagccaaatttatcaggctttgtctttctggcaatgctgctgacttttacatttttatcctccatagtctgaattggctcctgtgttttttccatgtaatatgttatgcattgacgctggcctaactttctgctagcctgttgactctgtatggttttgagttgtagcttttagttatgtacttatgttctttgtataaaaaaattgaaccttgctgtttagttgccttagattttgatgatgtgcagaagtgtgaatttggtagaatcatatgagtaatactgtgttagaaaaaaacataaacagaatttatatattgtagcacatattgttttcaactgtgtgccctggaagggacttccaaattatccaggagaccaggacatgcaatgcacaggtttgtgacgaaacaggatatagttgagatgaatcttgggcctaatagtcttactgagttgttatgtaaaatgcaattggaatttacacttcttttgttagattgtactgactgactaaacagcactactccctccatccaagaatataagcatatctggagttttttggggtgatgtgattggttgacatggggaagtagcggggaaattaaatgagggatggttgtgattggttaagatgaagtaggtggggaaatgcttatattcttggacaaatttcaaactttcagatgtgcttatgttcttggacagagggagtatacactaaatagggcaacatagtgacagcatgctagtagtttcagagatgttagttaatatttgtaatgatactcttgttggtctgcttagttttcatccactcctgtaattcagttttctaatatattaataaacttagaaaatggatgtgttttgctactacttttactagcaaatcttgtaaacattttaatttatgaattggagttaaggggtgctttcaatgttttgacttcctgttatctatttgctctaattcttcaacaatccttttgtaggcattgctttcattgtgcaccaatgattcaatagctgggaaaggtgcactcgaaatttgtataactcagatgagggatgtgctgagttccctacagttgcccctcaatgcgtctatggacaacatagctcgagcttatcacgcgacagaaacttatgtacaggtacacgaaatggctaacaagatggaacttttgagtggtacagcatgctaaattaacagtatgtcatatgttcaggcactctcttatgcgaaaaatctattgaaaaaactagtggggactagtgatttgtcaagcagctccgaaagaagtagagatgttgatgatatttctgtggacacgggcagttcaagcgctggaagccaaaatatagatgggctgtctgatctcctacctctagctgatttgtggctagggcgtgcagaactacttcaaagccttctggggtcagggattattgcctcactagatgactttgctgataaagaatcttcaactaatctgcgtgacagattggtcagcgatgaacggtatagtatggctgtatatacttgtaaaaaatgcaaggtacgaagtgttacaacttatttctggtttatacttcacacttgctatgacatggacagtaggcttaatggtgtgatcaatttcagattgacgcctttccagtttgggttgcatggggccatgctctagttcgaatggaacattactctcaagcacgtgtgaagttcaagtatggaaagctctgcttgtaggttttgccaaaaggaaatagcgttaggggaacacaagaatatgtctgccttcagaaaataagacaagaggataaatgaactaataaccttttctgatcattttagttcttttaaggtccaaactttcgttgttaatgacgaagaggttttttttattactagcttcgttttgttatattttttcctcattagacagaagggattttgtcctctagcatgaatagtttttatatgtgaggcccaattgttaaaagatgtttaacataaagtttgtctattttcttctatccttctactttatcaccagaaggatgacgaaatgtgtttcctttattaaattcgttgctgagataagtgagttaaaagagtcgcaatataaatggaatattgaaacactttttcgtacgtccagagtgtgagagaggagatgttgctaatgctgatctaaagcattctgagtttgagcactatgttagctcattatcttttaatttgcctgtggaagtgatactgtttatctattgtagtttaaccttctgttgtactccctttccagacaagctcttcaacaatacaaaggggatgcaactcattttgtccttgaaatcatcagtacaattgaaggagggcctcctgttgacgtttcttctgtccgttctatgtaagtgattagcttcaagattttttttccatatttttctgaacttgcagtaaaacattgtcctttgacagacacaaaaacagatgacgatcgcactaaacactctgtgatccatagttatattgatga

SEQ ID NO: 13243 - DNA, 1349 bp, Oryza sativa
  unsure (1)..(1349): unsure at all n locations
caaatgaaatatgaaacttacgggcccttagttctcccaatattaaccaagtcttcaatgtcgcaagcctcactcccaagctcactgttgttcctcatgaattctacaggataagcaacatatggttaatctgtaaaagaattgtttaaaagaaactacaacaaaatacctaacatggacaggcaagcatgggaacataggaagatacttcctttgacaacaaaaataagttgttttgaattttcaaagtcaacaaggtgtcccttttatgaaggaaaagcaagatgtccctttaaccactaaagttgaccattgtctattcgaaaactttgtaaaatatcacggtagttcttccacatcaaatttactcataccattttccaatatcagaactacattttatacatttagacagcagttctcgccaaaataaatatagtttgactgtgcattcaagggtgatatgtttttttgtcatcacgggtagtactacagaagcatcagcgcggcagtaacatctgacttgaaggataacttatatgactcaagcattcaagttgttgattgtggcattgacaataaacttcttgtacgaatcaaatgggcctatgatacagaaatgcctaatgtgtgtgggtgtgcatggatttaccatggctttaactttatgtgcagagataaattttatggttatatgtaacaaggatcctattgcaattaccagcgacagagttgtgatggcggcaccaccgtttcttgcagaggtagtggcaggcgttgttttgttgccttccccggagtttgctcacttcctcgtggatgcacatctgctcgcgggagcccagtactgccatttttggcctacaaaactgaacgagttaatagtgcgagggcactaactccattactccagacctccaagacaaagacattcaaatggaattacagaacagcatacatccggcgcagttagcttagataaaaacaactgacagataagcgtaatttgctcgccatcgggcttcacctgtaactggtggccttgagctccttgatgacctgccggagctggctgtgagtccgtgaggcgtagatgatcacggggtaccgagacgactgcgacgccgaaccccccgagtgctggctcccagaaggctggctcccatacggcggctgctggctcccgcccccgcccnnaanncccaaacaaaaactcgggggggttaaccacctttcacctactataaacgatgttttagcaaaataacaggatcctcaggagcacaaaggtcgctaatttagactacgaccccacctaggaacgaaaacttgggataaaaaggtttaat

SEQ ID NO: 13244 - DNA, 1666 bp, Oryza sativa
  unsure (1)..(1666): unsure at all n locations
caagagtagcccttctgaatgtctgttagtcatgagtgcttcgatagtaatgttgaatctgaagagaagaacatggtgacatcctntngtcgggcttcttcttgatatacttcgtcataatcttatgttagatatggataatcagtcaagtatggggctatcacctgctggcagccaagcactagaatgagattcaaacatgccaaacattccattaaagatttggattggcgtctatctgttctacaacgccttccacctctgtctgaacggcaatggagttggaaggaggcattagttcttttacgtgctgctccttcaaaattactcaacgtgtgagttccttgttgctgtatatcaattttttgctgtctattattgtgctcaatcgtttgtacatctgaaagatcatcatgctctcatgctctgatgcgaaagggcatgcagtctagtggttgcagtgacctgagtagcacctcaaggtcctgagttcaaatctccataggagcgaatttcagattgggttgtttgaggggctaaattcccaatttaaaaggcttcatatattcggttggatgtagaagctgggtaaaaaaaaaagcattatccgatatagttattagattgatttgtttgtatgtgcatatcatcttgcatctttgtttacacagctaaggtcacatcaaactacgtgtaatctgtgcatgtttgctcatctgaatcatgcaccatgggcatgcatctcactaagtagcttacaacccagggtgtgatgctgtagatttttgagcctatcaaaatcaagctcacaaactaatctcaaataaaaatataatctattactaaatgctggaaatatgtaattttaagtgaaagttttattttgtatgtagtaactgatttacaatttctgccttttatagcctctactctttattcgttattttcttttgtttcttttacttatatgatattttaagatttagtacactacttcgtattatttgttaatttcattgtctttctatcttttattcgttatttactacttttattcacacatgattgtgatcggctgtacatcattgaaattcttgatagatgtatgcaaagggcaaattatgatataggagaagaggctgtacagcggttttctttgcctgctgaggataaagcttctcttgaactagccgaatgggtagctggtgcgtatagaatagcactggtatgcttactcttgctatttttcttcattattgccttatagatatgaattgtttggctcctctttatatccatgcacttttaactcataggcatccacatgtctggaaaacacataattccatatagctctatatggcctgactcaccatcgcgtgagtggtccatataggctatagcagtctttatgatgaactatccatatgcataaggcctagctttaaggcaaaaataacaataatttctttctcctctcccctctcctccctcacatcacatggttggtaattgagtgggccagtgggacccaggttaaatgtcttatcttaccatatactcctccgttccaaaataaaccaacctaggagaggatgtatatggttgattttagggcttaaggttcatcttatgtcctaaattgtggatgcccgacattggcgtg

SEQ ID NO: 13245 - DNA, 6414 bp, Oryza sativa
  unsure (1)..(6414): unsure at all n locations
agagttattcagattcctgctttatttagttgagtcgttagcggcaacattagcaagtaattagtatttttacttgactagaaaatatgcctgtgcgttgcaagggtaaatgctattttaatcttattattgttatacggtttaattaaggtaagttcactacggaatacgcttgaatatatattcttttagaaaatcaatcatgaactataattaggagtccgatcatctcaagttagcattcgagtttttttaaagagatttcttatacgactctttatgcatttccaaaagtgaacgaacttaaaatctgactcaaatataaatatgtatttaataaaacgagcaaacttaaaaattgacttatacacggatgacgtaccaaagtatcgataaaaacattttcaatttttataatagtagagattagcctgttgtgtattcgtctaagttagtatggcctgtgggcctgcatgttaattagttggcccgtgtgcttgattggagttggcctgtgcgccgtcatatatatgtgtgtctagcaaattagcactactagaaaaatcattttttaggtggccaaaaatcattttttcaagcgggggaatggtccatctgtatacaaacgattttcgatggcggcctagtcacccacctatgaaaatcttctcaacgaacaaaaaaaaatcgccgccacccccacctgtgctcctacccacctccggccgatctagggttaggattttgggagggaaagagagatgaaggataggtgaggggaagcacgaccgctgcaaggccgccaccgacgctagtggtgggggcgctgctgccgccactgccctcccccggcctccctccggccggatctgagagggaggggaaccgccgccaccgccgctgccctcccccggcctccctccggccggatctgagagggaggggaaccgccgccgccgccactgccctcccccggcctccctttgactagatctgggagggaggggaaccaccgncgccctcccccctcccccctccccccttcggccagatctgggagggaagggaggggagccgctctgagtgccgccgcccccacgcatcaccgtcaccgaccctgcgtgtcgccctggccgtccccgccactgagggagagggagaggatagctgagggctgccaagggagaggagaggtgagggagaagaaaggagataggacttaggaaaaaaaattagcgatgtggctcctatttatatgccacgtcaattttcgcagtccgcctacaaaaaataaagggtatttttgcaggcataccgcttaagtggtccgcttgcgaaaatagagttttgcaggcggacaaccatctcatcccacggttgtcattttcgcaagcggtcatttagctccgagaaacctacccgcctggaaaaaaaatgacatcgtcgggaaaaaatggtttttctagtagagtaggtctaggaaaaagattggtttttatgtgagttcgagtcgagcgatggcgatcccatcttttttatatgctattgaagattgctgagaaatgtcacgtgcacttggcatgttatcctggtatgcaagatcaatattaatggaggatctcctggggatgttcttaaatgcaacgtagaagtagaactgttggccatatgcttttaattgtatagacgcaatatcaagtttaaagtatgattttttgtacagcgggaggtgcacctgctagtatttctttttttcttttttgactgaaaagttatagatggcttgagaagtatatgtctgcttgtgtgaactgcactgtacattggaattggtgttcagaagacttcttgttgtgttgataggacgacaagaatgttaaaagaaatgcatgcactgctacttgtttgattgggttcatactgtcaatatcattttgttatatcattttgatctaggttcaacttatttgaactgcggatggttgaataaagttgtatgatattctgggtttttttagttttttaattaatttcttgagtttctatgaattttatggaattttctatgaattttcagaagtttttgtcgttctcataaaattttcttatggtttttaaggtttgtttttgaactatcttatttttcttatactcattatagatttttattatttttaagcacatatgttttctttttcctactatctctttgtccattccaagtcccaaattgtatatgggttttttcctcccgtgggagtaggttcccctaggtgtggggtgtctcacagggaaaatccccttgggggactattttctcgggtttcttctcccgaactttcagactagctggctcaatcccctccaattcctttttcacagagataaatcaaacaagatataagaagagtgggaactaaaaggcgtaggagtgcgagaatgagattgcctgtgcattaaccttttggctaattggcttgcttcgattgttttgacatcctaccccatttttattgactcgtataatgccacgtgttatgctaacaagtattccctccgtcaaaaacaaaccaagcacatatgtgatatatctatccagattcattgtattaggatatgtcacatctatgtcttaggttctttttttatatatacagagggatagggttgaaactggttcggatagtttctgtccgtccggaccatttttcagatttggatagtttcggttggaactatccggaaattctcggattcggaaacgaattcgaattttttttctcggaaacgaaaatgaatacagtaagggtactatctgttagaatcggaaaacggtcggaaactatccggaatttttttcgaatatctgcagacattgagcaaattttagaaaaaaaatacgtatatatacataactttttggcaaattttaatacatgagacccaaaatttgtgtaatttgctgatagacatcgaaaaaacgtgtcatggctgaaagacattctaaaaaactggtaatttgctagatgacacttttggctcaattgaagagatggattccaaaaaagacgagaatgcccctttgaccacatgcttcaaacatggtgttagagtaaaaatttggagattatgcaaccctacatttgccatagcccaaagtacatcactagcatacaccatatttcattttcattctagtctcggctcaaaaagcttttgaccctagggtcattattgtctttttgaaaaatttctctctccgattaagttggaagtgtcctccagcaaatttccatttttagagtgtctttcagccgcaacacgttttcacgatgtctatcaacaaattatacaaattttggctgtcatgtagcaaattttgtctaactttttcatacagaatcaaatgaagacaaactttatatcaacattgtagagcttgatgagatctacaactttcttattgactattttattatttgggttcatttaagggtctaaatattcattataatataccatattattttttacaaaatctcagatctacaattcaaacgacatctgatggagatgtgttccatatcaaagttgtagagctcaacgggatctaccactttgtagtttatagcatttgtatttgaaagcatttaaagtataaaacaaacattacaagtttcgaagatgtgaaataaaataaataacatctccagtttatacaatggtaagtaattaagttatacatctagtaaaaggtattgggaatagaaaatgataattattttttgcatatggatctcttagaggaacaaccatgaaaatcgattttcacatatggttgtgggaccatctacaaaattgacgatataaatgttggagatgttaaactaaaataataagcgatatctcttccttgatcaagaaactcaatttgaggggttttttatataccggcaaatattcactaccgtattcattccatctcgtattcgctccgtatctgtattcgataatattcaattttatttccgtatccgagttttcgattccgattccgattccgaaaaaaaatatgaaaacgaatatgataaagctagtttctgttcgtttccgatcagttttcattccttgggagtgtccattcttcaccgtcgcggagataaaaggaaaaaaaaaagagggaaagtggaaacgccttcggggaatacgcttccctttccattctgcgttctctccaccgaaaacccccatgcaccgcaagctcccgccattacctcccctcacactccgccgctcctcctcctcctcctcctccgccgccgccgcggcctctcctccaccgccgccacctcgccgtctccctcctccggttccgctccgtgacctcctcgcccaccgcctcccgcccacgcccacgccggaccggcctcccctctcgcggccgcatcctcacgccgacgtcctcctccgcggccgacgcccgggctgcgacgcctcgccggagagcctccacctcgaggtcgtcaagaggggcctcacccatgacctcttcctcgccaaccacctcgtcaactcgtacgccaagggcgcgcgcctggacgccgcgcgcagggtgttcgacggaatgccgggccggaacgccgtttcttggacctgcctcatctccgggcacgtgctgtccgggctccccgaggatgccttcccgctgttccgcgccatgctgcgggaggggccggggtgcaggcctacgtcgttcacctttggcagcgtgctccgggcgtgccaggattccgggccggaccggctgggcttcgccgtgcaggtccatgggttggtctctaagacagagttcacttcaaacaccacggtgtgcaatgccctgatctctatgtatggcagttgctccgttggtccgccgatcctggcacagcgtgtgtttgataccactccagtcagggacttgatcacatggaacgccttgatgtctgtgtatgcaaagagaggggatgcaatttgtacgtttactctgttcagggctatgcagtatgatgattcggggatcgagttgaggccgacagagcatacttttgggagcttaatcaccgcgacatatctttcctcatgcagcttgggcctgcttgatcaattgtttgtgagggtgctcaaatctggctgctcaagtgacctgtatgtgggcagtgctttagtaagtgcatttgcgagacatggcatgcttgatgaagcaaaggacatttatctcggtctgaaagagagaaatgcagttactttgaatggtctgatagctggtttggtcaagcagcaacatggtgaagcggcagcagagattttcatgggagcaagggattccgctgctgtcaacgtggatacatatgttgtgttgcttagtgcaatagctgagttttctacagcagaacaagggttgaggaaaggtagggaagtccatgcacatgtgctcagagctggacatatttataggaaaattgcagttagtaatggtctagttaatatgtatgccaagtgtggtgccattgataaagcatgtagagtttttcagctgatggaagcaagggatcggatttcatggaataccattatcactgctcttgatcaaaatggatactgtgaagcagcaatgatgaattactgtttaatgagacaaaatagtataggtccatcaaactttgcagcaattagtggcttaagttcctgtgctggtttgggacttttagctgcaggccaacaattgcactgtgatgctgtaaaatggggactatatttagatacctctgtttcaaatgctcttgttaaaatgtatggagaatgtgggcggatgtcagaatgctgggaaattttcaactctatgtctgcacatgatgtagtttcttggaattctatcatgggtgttatggcgagttcacaagcacctattactgaatctgtacaagttttctccaatatgatgaagagtggtttggtcccaaacaaagtgacgtttgttaactttctagctgctttgactccattatctgttcttgaacttggaaagcagattcattctgtcatgctgaagcatggagttacagaagataatgcagtagataatgcactcatgtcatgctatgcaaagtcaggagatgtggattcctgtgagcggctgttttctagaatgtctggcagacgggatgctatctcatggaattcaatgatttcagggtacatctacaatggacatctgcaggaagctatggactgtgtttgtcttatgatgcatagtgaacaaatgatggatcactgcaccttctccattgtactgaatgcatgtgcttctgtggcagcattggagcgtggaatggagaagacatgcttttggtttaaggtcacacttggaatcag

SEQ ID NO: 13246 - DNA, 708 bp, Oryza sativa
atggagttcataccttcataaggtggtgacaggtcacatccaaacaccaaagaaatctatgagaagctcaactttttgattcagaagataaggaatgcaggttatgttccactgacagaatatgttttacatgatcttgaagaagagaacaaagaagaactgctaagatatcacagtgaaaagcttgcggttgcttttgttctgactcgttcctcctcaggtggccccataaggatcatgaagaaccttcgggtttgcggagattgccatacagctttcagatacatttctcagattgttggtcggcaaatcattttaagggattcaatccgatttcatcatttcaaggatgggaaatgttcttgtggggactactggtaacttgtttatactgctggtaccaggaacaggcttttcctaactacacaaatttgaggtttgggtacttgattactaggtacatggttttcctggacttttcatatttgaggtgaatatcacttctcaccaggtacctatcatcccttaaccgttgggtactaatagttcatttccctttctccgagtaagttgctaatggttctctacctgatgaatactttaacctaataaatagtgttcacttgacttcgatttataccgagtgtcaaatatgaatactgacattgttggtgtggtttgctgtgatatgcgactcagagctttaga

SEQ ID NO: 13247 - DNA, 2276 bp, Oryza sativa
ggtactttttgctggatcgaagcaaatctcttataaatataactgcaggattccattaccttacctctttgtagcccttgccgaggaatgtatatactaagttttgcattgttcgaagtcgatctttgggtgaaggcagaatcagaaggtggcggatcagatgacaagcaattgctttctgagtatgctgagatcgagaaccgtggcctaaaagatcctatgatatatggacggattccaagtgatcgttgcctgctagacgtagactgcatgttccttctcaacagtgttgaggctgtcatacaagtctttacaaaggatgacagtgataatcctcatcgcgtgagattcaccgccttcagcagcggctttgatcatgagatcgtgttgtacgatgacagattatgtaagaaggggaagttgttccagaatgttgtcgcggtgaagtctaaggaaaaactggttattcgcttagaattcgagggatcgacgtttcggtggacttttcaggatggcgctgttgcagctgttagttctcctgatgattcggtctcgaagctgtttgatgtggtggttcttttttctccaaaatcatagttggtatctgcgccctaagttgtcctctttataggagaaagaacacattgatcaaatgaagaaaaagcatgctgcaacaaagcattcgcattaagattatgaaaatagcaaactagaaatgccattgcattatttgtttttactgatatggtattatcgtctaagtacaaccactttgactgctatattttgacttctttcaattgtggttgagatgtaccccttccccccaaaatacccaaaatataaaggattttggttagatgggagcctgtccagattcgtagtactagaatgtatcacatctgaccaaaatcctttatatttttggacagagggagtattaatcagcgacagacctacaatgttcaacgtatgcttggcaatatattatgggttctcattatttgacctacaaaattttgcaggttcaaataattcaacaggaaacaaaagataaactatgttggaaattcacaaacaatggtatctgcagtacaaagagtgcttacaaggaggtttacaaaagagaaatttcaaatgctcatcaggttcactctcaatccctttctatcttgaaataaatctagaagaacagatacatccctcccaaagttaaaacttttgcctggagactcatcatggaggcccttccttcttcccaaaggctaaatcagaggattcaagacattttagcagcctgctgcagatgtggtcaaatactcaaatagaaacagatttccaccttctcttttcttgtccttttagtaaattaacttggatgatctcagaagcaaaactctactgatatttttcctgctaatgttcctatggctcttattattgcttatatcattaacaatggctcttccaattccaccctaattcgaactctgaatatcatgtggtagctttggaaagctagaaatgatcttaagtttcagggaaaaatcaaggagccaactcaagtttgcatggaagcaaaagcaatgattaaaacttatacaaacttcctttcaaatgatttgatgcaggaggatcttgatgaggaagatacaaacagaagaatggtgaatttgcctaattgaattagatgctactcagatgctgcctggagtgataacgaaacaggaattggcattttctttcacataccttcctctcataatgccatttttattagagccacaaccataatggctcaatcacctttgaaggggggagctgctagcatttcaactggcaatggagattgccagattcttgaagttcactttctcacagatagtgccatcatcgcgcggacacttgcaagagaagaaactttcaagaagaaccagggcattggagcttaaggccaatttggagccaaatttgtatgagaaggttggagaatcttttgcaggttaactggatcccaagggagctgaacaaattagctgataagttagctaaagaagccaaatctcagctatgcctaaatccaacttactcttgtcaaaatatatcccatattgccctatcccaacaggagatgttatgctaatcatattagagacaatttcagtatctcgaattttgctatccaatatgtacaatgctattgagttgaataaagagtttataatttttttaaaaaaataactctacatactccctccgttttttaatagatgacg

SEQ ID NO: 13248 - DNA, 10865 bp, Oryza sativa
ttatgcgggtagcgggactacccacttgcatccctacttgttcccttttacacccgtgaaacacatcttcttcctcggttcctccaccacctacaccttggcatgccttcgccgaggaagacatccctcatcaactatcggagtacaatttgtgcgataaaggaaagtcactcataaccaagaaaaaagggcagattatagtattataagagaagtatattgcattattgcagccctgcttgttacatggaaggcatatgtcaggcctggcaattcagaaaaggagtctaaacaaaccttacctctatgaacacaagaggagaaaaatcatattctacctcatagatctgaacatctgaagttgtatatttgaaagaaagaaacccaaactacaaacttactaggtgcaggacaacttttagaaaagaaatcccaaccttgggcgacccaacggacgtaataaccaaaacaatctacggcacactattcatcattagataaatctgactacagtttagctaagtaatgtatcttgtatggatactgtaccggagatggtcgatccagaggtggtggtattgtatatgggatccgcgctttttcccgagcgacgcggccctcttctactcttccgccgccgccgccgccgctgctgctgctgccgcctacaagcatccccttccctctcccttgctccattactgcttccccttctgtacggatgtacccttcttctagcagcgtactgccggacccgtccccctcttccaccgccgcaagccggcaaccacacctacggctgccgcacccttcccttgatcgtcacctgcatgcgcggctatccccgccgccgcactccaccaccaccaccaccaccaccgccaccgccacccccaaccccaaatccacaacctgctcgctctctctctctctctctctctctctcgcgtaaggtttaagctcagtgactaaagtgaggtggtttttttttttcttacagcggctgcggagctggacttttttttttacattttaacccttcttttataaacttcttttgctgcgagtttttttttattgtctttctggtcattcactcttttcttttttatattttataatccgtgtacaaggcacatatgagtatgactgcgtggcttcgtttgagcctcccgtgcatgcaaatcacactcaaaatctttcatctgctcttacgggtatttatactatagattgaagacataacattatatttcacgaattttaaatagtaccattatcgtttataggtatttgaaatataccattacttatcctttctacgcttaccaaaatatttagatcaaattatctctctactttgtccatccccttcctccttccctcctctagggtggttgcatggtgacgggatagcaagtggccacgtgcggcggtgggtaatcataagactacaaattcagaaatatatttatcaaaaatctataaacttaagccattatatctcataactatagttctagtgtcatcttttttcataaaactatagatggagcatcaattttctcacaaaacaaaaaaaaattaccacgataataggtatagggatagcacatatgggtttgaaaaaaagatgatactagacctatacttaaatatatatagctttgcattaaaatcattcctaaatcaataattttgttataccatggattaaatatacaatttttttgataagtttattgaagtatcaattaattcattgaacctctcatgcatatacataataaaagaaaacattgcatctaggaatggcaaccctgtgccatgtatatgatcttgtttagattgttatattgatatctgaacttgtttgttatattgatatctgaacttgtttagattgttatattgatatctgagagtcatatgagctcggtgccaagagtcttggtgcgaccatcggggtgcaaccgtgcgagctctttatacaaagatattactaagatctattttatgataacttcttttaaagatttatttgtaaaattagtttttgggaggagctaaaatgtaaaaagaaaaaaacaatgagatgcaaagtgtggaagggtatttactgctggccacgtggtttgtagtccaccagaccaccgtagacagacacgtggtgaacccgtggtttgcaatggagcatggactggtgaacccggtgttgcacaaatagcagagctagtggatgccgggaaggcgggaacatcggagactgcgaaatttcccgccaggaattacaagtactgccccttcattctaaattgatctacatatatttcatacatctatttcaaattgatctatatatatttcataggtacaccaagaccaagaaaaactaataactctctcatactatttttactctagcaacaaactcaatgcatgcaccatcgccactactccctccattccataatacaaggcacaaccacttttttttagatgttccataatataagacatacatgcatgtataccattaactatgacaattctccattaaattactacttttctaaatgcttcactctcacattctctaactctattggatgcatgcattacatttattaggatgatccaaactacaaggtgataataactatttcttggtctttgagttaagtgtggttgtgccttatattttggaatagggtggtaataaatacttgtgtgcatggatgcatgcatcaatgtccatttactccaatgcacaaataacaaatagacttaataaatgaacacaaatatgtgatcatttaggaataacctaaaaaaactataagtagatcaatttggaatggatagagtactccgtaaattctatttgaaaaataagaaaactttacttggcctcaaaagtcaaaaccaatattttttatttatactattttacttataatatttgaaaaataaacccctccaaattttctattattacaaaatagatattgcttctagtttttaaaatatttttattacaaaattgcatgcctaatgagcgctttaacttgaccagcactgtgctgtgcgaaaaactgatagttttaacttttaactagtagtcgcataatgcccatgtgaattgggatcacatgcaggactacaagttaagctattgcatataataggagtcatctttttttaatgaacggatcatattattagctacagtgctaatgtaaaagcacttgacaatcttctacattgagctacagtatccataggtattttgaccatgggatccggatctaacagccggaagtggactgcacaagttgcagccacacttgctctcaagtatagttgctatgaacccactcatatcacacttgcttattgatatgggaaaatgggttaacccgacacgtgatgtcggcaagtttacgaaataaaacatgtttacggaaagtaattccttgcggcttccatctaatcattatatggtacgaccacatgggtgatgtgggccctccaatccttaagcttatgtataattgcccggaggtttattttgtcgcatgtcgggggcatttttatccataaacacaacgacaacaacaaaaaagtcatgtagaggcaatttttaaagcgagacattttaaatgttgcataaaacacttttaatctagatatacttttagcataactagttgggtgcccgtgcgttgcaacgggaaaaagaatatgcctcaatttcaaatcacaccaagtgaaataatcactcggtgtaatttgtccccaaagaacatgatataaataatgttctactatataataatactactaagggtacacggcatcaatgttagccaatcaaatgtctgaaaataaaaaggcctaatgcctgtcatttcatcaatgagcaagcataaaagaaaagctgatcaatccctttatgcaagacccatgtagcttcattgagtgacgtcaacattgccccattacgagtcctgttaacagagttctccattatattttgaacaaagttaaggcaaaagcctctgaaaatttagtacctaatgtgtattccctccatactcgcaaaggaagtcgtttaggacagtgacacggtctccaaaacacaactttgacttcttgtttctataaaaatatttattgaaaagtgatatatatatatatatatatacacacacacacacacacacacacttttatgaaagtattttccaagacaaatctattcatataatttttttattttcaaattcaacaacttaagagttattcatgatttatattcctaaagtttgacttaaacattgtcctaaacgacttcctttataagtacggagggagtatcattacagtctatagcggtgggtaccttcatttagcgaggttaacttcgttcgttcaatcatgccaaaatcaatagaagatgaggcttgctgaaagctggagaacgccttctgaatcaagaagaaacaatactgtctattccctgattttcgcatcactatcggtaatatcataagttatgtggtattgtctagttgttgggcacatccattttatcttgtttgttctaacaggatcaatagtatgaccatggcacctgcacaaccgtttattaagctacaaactgcttaaaagacaacctgcagtcaagaacttcatcaatttcagacaactatctttaactgcagaactgacccaatggcatgatgtttgtccttcgaagctcatttgtgttactcacacgggatgactatatctcccatgtatacatctcagccagttgtcaaagttgcgcagaagaaatgatgtctcacccaatttctttattatccactcgtattcttgaaaaagtagcaaagctttacatatacctgcaagaagcactcccccagttaattacagttattatgcacgtgtaaaacaattagcaatccatcataagcatgcacacaagcattatccatagaataatagaaaactattaaaaagtattcagtggctgaaaaaaatgaaaaagatactgatttaatcatttgagctcacagccaaagttcagacaagataaaaaatggagctacctcagaatcattccaaagctcgctatctcctattcagagttgatggttttccatatccaacttgttatgagaaatgtgagaaaataaagctctgttgagctgtattttatagtcaacggtagtgcagaaccaaatgttccaagcaaatgcacagaagatggctagaagggatgacatcgatgcaaacttctgatgagctgaaactatttcctgaatttgttgaacaagaaactaacccatgtagatagtcagaactcttcatcatcaacaatcaaaatcaataattgctagttcccaaaaacctcatgccctgcctgttctaggattggcaatatcgacgcccacgggtgccgtttcctccctggaggtgttgccttgtggactccctcccccctgggtgaaaaccagcccagtttttggacggacgtcgacagcggcttatgtcgttattcacctccttggagatttcatcttacggtcttgctcatccctcggcctccgacagttcgtagttgtcttgtctcaggctttttgtgtcttctgtgtaaggttttcgctggtttcactttagcaaaccgggcagttgtatgttttttgggcccggttttccttataaacagggtgaactctattcgtctaatatattcggcaatgctcttgccacttcaactcaaaaaaaaaactcatggccgttttgaatctatcgagcagtactcatcaaaaatcaaaatatgtgcagtcaaatttagcattacaaggaaacatatgttttcaattttgccttagatgaaaaaaaatgtaagtaataaaattagtggactacttggagatttttgaaattaccattggcgtattcaaaggcaattggagaccgctgaagtgaccagccgctgccaggttgtggcctctgcttctgctaagtaacggagtttcttcagaagtgacggatcaattctgcgctcattccaaaatactggcattggttatattctgcataaaatttcagaacaaactgaaagattgatttcaaatactacagactgaggatggttagtataaaaatttcagaacaaactgaaagattgatttcaaatactacagactgaggatggttagtataaaaatttcagaacatgaaccagttgctaatccacggctgaaagccaaccagcaaagtgagggttcaccctggaggaaagcagctgtgaatcattagttaccgtggtacaccctcaaaactgagtataacatattcccacgctacaaactggtatagttcagatagattattttcctgtgctctttcccatactattttcataagataagatccgtagattattttcaattttcttgagtctgaaatcattcattcagttaattaggccatgacttgactcgggttactaacaggtcaaagccccctgaataaatgaccattctaattctaaataacacaatggatctaaacctagggaactgatcacagatgaacgccaataatcatatatgtatgtactccaataagcaggaatataggatcactgatgcactgcaaactaatttttcttataaaaccaaatacatttatttgttccgaggatgtatattgtacctgcttggaatggactctataaactgaggaatgagacgagggcatggcctgacgaggcttcgcttgatcccgcagcaattccaacctcgacaaatgatctgaaattgagcaatgaaatgaaacctgagtatttgttgtagctggaaacattttaactggtaagaaaaaaagactgcttcatgagaaaattgaccattggttgcttagacaagttccctaccgagttcatggatgaactaaccgacaaccaaagcaagtggcacaaaatatccttatagagaaaaaaaaatctaattcacctatgcatttatttgcttcaatattaatgctaaaaccgatccatccagcgacaatttttgacaaactgatgaactgattttttttttaattgagactgtttgagataaaaattcattttagaaggagtattaattagcatgaccctgacctgttactctgacggtagaaaccattttcttgagggtgcaggtatctatcagttcagaactgctattacacgccatgggatcatattaacaatgcttacttataattgcagcaaaatcaagaaaataaggggaaaaaaattaattctgcatgtctgatgcttcacaagttcgatcatattgtccatatggaatatatgcccaggagtgatatgatatttcttcagatgtaacaatctacttgttctgaagctattatttgtgggggttatgtgggtgatcgcttaccttaatggacacatcatgcccaactaaatccatatttgggttttcaattcttgttgagaacacagtacgtacttgcactgatttaaagataaccctgtctcaagagagaggagatccagcaacagtgttatgcaacagtgtcattcagtctctacacaagcagctgtcctagtgttctcatttgtccatttagcataatttgtacaaacatggcaggcaaagacaaaatccccgatctctaattcccatgtttgaaatttaacacgcctaaaaggacaaaatccccgatctgaaaacatgtagatggatttgtagaaagagatggggaaattttagggtttggggggaagataacatgcagccggttgggttcgtcatgtggcgtcgtcagctgcactcaccctcagtcgccatgcgccaccgtgctcgccctcagccctcttgagttggagggcacctgcaaggcgggagaagaggctgcggagatagggggccggacggaggaggcggactactcacagaatggggtggcgccgaggagattggcttccggcggcgcgcgtgaaggcggtcgaggcgggagaagaggcggcggagatcgggggcggggcgtgcgtggaggcggtcgacgagccggagattgggtcgtagtgtgccttcatcagctgccagcctgccctcaccctcagccgccatgcgccggcgaggcgggagaagaggaggcgaagatttggtgcggggcggaggaggcggacgcgaaggaaacagagatgggagacggcgttgagagggagagaaaatcgggggaaaggggtgtgtgtgcgcgccgcgtgcgatcaacgatgcgtggggcgcgtgcggaagattgaattgtgatctgatctgttggattcaagaccacgaggaggcgacgcagggaggagggcgaaggacgcggcgtggggaaaggagtgggcgtggcgcgtgatgaggagaggagcgatgggaggagatttgacgccattggatatgaaaatcggatggttgagattagacgtgtttgttagatgcgtctgctatgtcaggaatcaagaccaccactacagattttttaagtagtagagatttattaaatttatcttgcagagacactcttttggcactttaaaatttcaatctctatagagacacttatagaaattttaatctaagctgattaactagataaaagtaacattgggctcatatgtaagagtgtaacatgaggttgagatggtaagaccattctagttaaaaatggtatattcaagatgccttgagttcaaagattggcagttgcaaggaaagtgatattgttttttttattatttttttacattggtttgatatggttctggtaggttaatgcctttagaaaatgcctatactcccttatagacataaaaaattcctatatgaatgtgctagaaagcatagagatattttctaaagtatctgtcacgcccagaaatttagcccaaaattttcagactattttgtgtattaaatctctatccgggaatcaagtcagggtacacaaaacgacaaattaatatacatatacaaacgaaaataaagcgtaaattatttacagacaaggcacttagtcctcacaccgaaaagaaagcagcagcaaccgaaaaatacgatcctagcggggcttcagctccaccccacatcaaaaactcaactgaggtataagccttggtcctctaacttcgtcttcagctcagaagcactacacttctgaaaagggagaataatagcaaggttgagtacaaccaccgtactcaacaagtcgcaccaatgatgtagacgtgcaatgggagtcaaggacggttttataaaggcggtttgtaaatattttgtagctggaaacagtaaaacaattggttaattaagacaagattatatatccactgaacaaggctacaccacgttgaacatgccaaccaaaccacctgaaccacatcagttcattatgtcaagttaattaatagagtgggactaatcacggtgaagctagttgattgcccataaccgcggacacggctattcgaataattttactttgatcaaaggtgtacaattgtacctacaagacatagccccacgacatgtttccgtgcgccgacatgtcagcaggatacaccggaaagagactgtgataagacccttcgcataaccccctttaaccaagtgtaccacacctcagatttcgcccccactcctcagcaggcagcgggcaaccctttcttgtgcctaggtgaatccggcagccgtataggccgtcacagggcccatccaaactccatcacgctcgcccttgcctggaaatttacactacaagcctagccgttgcccacgctagcttgtggtaagcacggtagttcttcgagggtttcccgcgaaccgatccttaattgccatgggtgcgactagcaaaaccatgcacccatagcccaccattaagccacattttagttggataattatgacaaaaaaaacatggccagatgtctcgagctcacagctcatcaagatgctaagtgtaaataatgtaattatcccattatgtgagctagtggtaattaagcatgactaagcatacataaatgattcttgcatacataattgaccatatttatcatttaaactacttactgtcgacattaatacgatgaaaaaaaaattagaaaaaacaaaatctaaaaatagccaaaaagggtacggtcagaaacggtaccccttatacggaagcagcgctcggttgattgggaatttccgtgactgttttcacccctacggtcagaccatcgggtcagtcggtctgacaaccgcaacacctgcggtctgaccggcggcacccagtcggtctgaccgctagggtcagccgaaaacaccaaattcacaaaatcaaccgtctattaaactccaaaatatcatcaacaaacaaccaatattttcatcacaaaatctaaattagctccttgattttacattttgcacgagtggatgttggtatttcttaacgacattactaaaaatataattcccagcaatggcgcataaatacttctggtatattatggttacagagttcatctgcaagcgcacggatataccattgtagcatttcacccgagagtattccaagtgtatcgtatttattttatcccctgggaagatcatacagagagaacttgagtaataatttattttacttatgataatcatattctaagcaggggttaaaataatccaagggtagagtgacacacaagcattaactactcattctcataatatatcatctaagctatgtggaaagaaaagataaagaaaatatattcttatacttctaatatacatagtatacat

SEQ ID NO: 13249 - DNA, 4445 bp, Oryza sativa
gagaccgcgcggtcttgcgccgctgccgtacgataccgcctgcgacgtcattcccacgtcactttcgcgtaacagttgtgcgagaccgacggtatatttctgtaaaaaaaatttgcatcctaaatattcgtgaggaaaaatcgaatgaacattatattttcaaatttaattcccgggagtacctatgcgtattttgaaagatttgtatgatcatatcacacatatttttaatatttggattaaaattcaatagacacagtaaaaggcaaaaagcagataagaaacaccataatggacactaaattatcattttaagaaaatgaccaaatccaatataaatttcaaaacttacatacgaagattaaaaaattacactgtaacttacgaaagttacaatgtaagtttcataaattacactgtaacttacaagaaaatacaccgtaaatttgagtgagaagaaaatacaatgttggcttgtttggtaacttgagggaaggggattgagagtttacacgagggaatttataatgagattaagatgggaatttgatttttaatcccaatgtcttgtttggtggatgtgatggaaattgacagggagtttagttggagattagctcattaataaaaacggatggctgagatttgcttagacaaagtaaaggaggaatttcctcccaattacctgcccctacccaggtattgaaaaggagggagtttcttcctcaactccccatcccaatcccaccaaaattcacatgtgtctcaaccaaacaaaacacttaatagcctcatccctctaaactcccaatccatcttaaaaactacctccaaccaaacgggccgtgtaaatttgagtgagaaaatcgagtgggagataaaaaaatatttgaagtgagatatagcaaaatcgttgcctacatgcctactccccattccccagcgttagggttccaggccgcgacttctccgggccagtggaacgaagttgccgcatcaatcgacaaggtaaatccatggatttggatgatggatctgtggtttcgcctcccatttctccttcctctctttcaacatgatttgcgaagctcatcagtcgtcatcgtctccatatatatcgcacaggttgttgagatgagagcagcagcgccaccagcggacccaaccgtggtgatggcttcgtcgtcgccggagaagaagcatccacctggttgtggctctcgggactcccagcccatcgcttgcacggacgatccccccttgtctgaatccccaacgacggacctaggctgccacgatccgcgcgaggaggacgccgaccacccggcaccacccatgggcagaggtgtatcctcaatcctcttgctttcatgtatgctgtgtatgcatttccttatacgatatcgatcatcacccaatgcactaattcagactgcattcagattccgacttttgtcccattgctctttttttaattttcaaaaaacaccacattggctgtgtacctttcggtagaggccggagatataaatcattttaattatctggaaaattcagattcagacgacatctttgcctcaaccaactcagacaatatgaatatgttgatcggtgacatcgacgaggatagtgatgatgatggttacgtagacgaggagacaacttgcccaggtaacattactaataatctcaatagagagcttcgattccagattaaaagatgaacagatactatcgctacattaatttctcagggcagaacttcacgaaggagcaggaaaaggaaataatgcgcaagtggctggaaacatacgacaagaagaatagagaattcatggtggcgtgcgaggagttccaaaagcagggaggagatgagacgagtgcttctcgtccggtatttccttttaaaccgctccccgagacaacagatttttgtatcaccaagagtttatgctatcaccgtgaatacaagaccaatgatacttctgagagtaagtgtgtttgtctaaaggattcattagttattaataatattgtgtgctaccaaagtatcaatatgtatttgtaatgacttatcttttcttttaattgtttgtagctgcatccactattgggtggcgtgaacccaaggagatgctccagatcttctcaaagaagttgtccagctccatgtcctatcctattagtgtttacggaatctttgcagtacgtgattacttggaccctttgcggaattatgtcttcaaccgtaccagagatgatcctgtcatagttgaacaggtaaatacagtctgtttttagaagttaagttatatatcttggctgaaaaagataccctaatatgcctatatatattatatatatgaatgctaataagatttttgtttttcttggataggctgaatgtagtgtgttaccagatacatattttgacaatttgttttattttcttaaagacatcttttgtatggtctatcgttagcattgtttcaaaatatatttttgtttctttcagtgctacattttggtataagtgcatcactgttcgctgcaactgtagtacattctcctgtcatcccttatattttggttacaattgatctattgttaagtcttttggaagtattttgatgtagagattttctagtgtgttaattaagaggtatatataacactatgagatctatatcagtagtgctcattatgtcacagttactatatcagaatttttattatacatgatgcacatttttgtatttctttttgtgattgtactaacatgctgatggtgtccgcaaaaatattaaactttgtatataccatcaagtttgtgcaaaatttcggaaatgttgcgcgccgggcgcccgacggcagaagaaaaaatcgggcgcccgcgcctcccgccgtgcctactagtataatgctaagcattttaaatagctttaaaacgatttttcttctaaactaattatccaatttatgatccgatcatgttgttgtatttattgtaattaaatctttacaaagatcacacatgattatatttcgataaaaaaatattttagcttttttattgatattttttgaatgttgcatataatctcttttgatgcttcaaccagtagttttacgatgtttcagctagtgtgctcgagatgtttcactatatacggatcaaatgttgcagtggattttgatattatggaatacgccgttgcaacaaatcatgcgcatattatggaaaccctctattaagggaatccgtttcattttttgttccacgaaaaatgtttcacctagtgtactcgtgatgtttcactatgtatagattaaatattgcagtaaattgaaacattctttcgttatttgctgaaacattatttttatataaggtgaaacagtacccgatttaaacgattgaaacatttttgatctaactgaaacaattccgatatacttggtggaacaacgtgcaacatataaaaataattcaataataatttaatttttttcatcgaaatatatccatgtgtggtcttgttttaaagatttaattgcaacgaatttaatgatgcaatcggatcatgatttggataaataaattaaaagaaaaaatactttaaaatttgcttacaaaacattaaccacccctaccacacatgcaattctgcatgcatgcatgcaggcatgcatatagctcgggagaagtagcatgcatgcatgtaggagaagttgcatgtagtagtggctgcgcgctatcaatggttaggatttaatcccttgatccgatggctgcggcgggtttcctattttttttgctcctggattggacgcccgatccgtagttctctccgcaaaatttgcataccatcctatttatttattagtatgcatatccagttgagtttattctattagaatacttttaaaatatgtatttatatgttctaattaacacacttaaaattgcttaagctccagctttgggttctaacgagtccttttaaattataggatcccttcacattacctctttgcagcccttgtcgaggaatgtatgtgatagaatatgcattgattgaggttgatctttgggtgaaatggaaggtggagtatctaatgacaagcaattactatccgcgtatgtcgagatttttgcccgtggcgtgtttaataaggagatgagtgggcggatattaagtgaccattgctatctggacacacactacatgtatctttcacggagtattgaagctgtcatacaagtatccacagagattgacagtaacgatcctcgccatgtgaaattcactgctttctgtagtggttttgacaatgagattttgctgttcaatgggaaattctgtaaggacaagtctttcgagcacattgtggcaatgaagtccaagggaaaactggttgttcgcttggagtttgagggatcc

SEQ ID NO: 13250 - DNA, 2384 bp, Oryza sativa
cgccctcctcgtcggagttgagggcgaacgcgagccgaggggccgaaccctcgaagctgtggacgatatggtcggcggcatcccggacctgcgcgcgcgccgtcctcggtcccgggagggaactcgtccagcgccgtccatggggagaagtcgggtccctggcctggtaactcgccagtacgagctccaccgctcctcgggcgaggtccctcgaggatgacttaatcgtcccctcgagctcctcggggagccgctggagagtcccggccatctccgagaggcgctgggcgaggcccccctggttggcggcgtacttcacagtccgcccgccccagagacccgcctgccgcccggcgcggtctaaacgggacacggcgtcgcaaagcatgctgggccctatctcgcctgccaggcgaagggcctcgacctccccggtggatgaatccagcgcgccctgcagatccgcgatggtgtgttcggcagctgcgaggcgggcggctaagtcgctgtcgcccgtggccgccccgccgctacgcgcccttgcatccagctcccttgcctgcgcctcgagttcagcggcccgctggttcagtgcggccctctcggcgcgggcactttccagattgcgacgcgcttgttcctcttgcgcagcttcgcggagggacgcgctctccgctagcctctgtgctgcggcctcggcctcctcgagggctcactcccgctcggtgagcgtatcctcgcggaggcggagtgcggactcttcttcggcacaggcggcttcgtgcaccgccagtgtgacctcccgaatagcaatggcggcctcgcggtccgccaagtccctctccacgacgcaggcacgctcttccagcgccatggcacgggcctcaagggtttcttcgcgccgccgggatgccacctcggtctccgccgcccgccgttctcgggcagcggcagcgtcaaggaccccccgggcggcgtcgagcttcttccctagctccgcctcccagctcccgtattgaaggcggaggtcgtcctgcgcctcgttcatcacggtagtggcgatgagggcagcccccctctcctcctccaccttcctggcgatctcccccagcatcttccgacgggcttcgagctctgagacgtgccggcggtgtgccttgcggcccacctccaccatggcctccaccgagcgacgcccctcttcgacacgtgcccatgcggcgtcgagctccacccgctctgcttgcaaggcctccatctgggcacttaacccgtccaacaccgtggtgttagcgacggccagggcctgcagaagaggctctgcgctcagtggggcagcggaaggcgtgggggagagccgcctcggtgaggatgctgcgcggctcggcccgccgatggacgtgccggactcagggatgtcccccggacctggcttgtcctgagcgtcgcccgagggagtgggcccaagcgatgcgcccgcggcctcgtcgcgagctgcctcggaagtcgtcgccgcctcggcctggcgaagtctggcctcctcccgagcggcttcttcagcttggcgagctcggacggccacctgggcggcctcctcggcttcccgtaggcgatccgcggcttctcgccggtcagattcccgcctccgagcctccatggtcgccgcattctcggcctcagattggccggacttgaattggcaagaaggacgcgacgggatctcgctgaagcagaagaaaagccagaagacaaacaagatgggtgaatgaaaacttgtgttggaagaatgaatacagccacaatgggcgtgggacgaacctgcgagggggtcggttaaacgaccaccttggaggggaaatgaggtttccccgggatggttctgtccccccatcttgtggagccgtttcttcttccgctccccctcgggctgcggcgtcggcgcggccccctccgggcgcctgctgctgacacgcgccgccccgccccctcagggaggagatggggaggaagtaccctcttgcttcctcttccctcgggcgtcggcagggcggctgccccccgagcccccatcacggggcccggaagcacaaccccctcctggggtagattgatctcccttgcggctcctgctcgcaccatcatggcccttaggagctcgttcctctgaggccccgaccgccatcatgatggacaggatgttggcgcgatctggatcgctgcagagggggaggactccatgggggatgagggatgcctccgcggagctgaattcagcacccgttggatcattaccttgaagtcttcggggacccagtcccatttgaccccccggtgggtcctcatacagtcctcggacccggtgtactcccaggcgccccgggcgc

SEQ ID NO: 13251 - DNA, 6616 bp, Oryza sativa
ttcttgcggaggacgcagggaatgtatcggttcagcaccggcccccgcggctggaagtagcaaccaccaaccaccgacggcggcgacaccggctgtacggtgaagaaccaccggaacagccgaagggatgggcgcaccccgatgaacatctcgcacaggtgcgcgaagatggccaatgtcattaccgcgttgggggtgaggtgcgccatctggagatcgtaaaactccagaacatccatgaagaaagaagaaaatggcgaaaccagccctgccatagcaaaagggaggaagaagacggaccgccccgggtagcgtggcgccgggcatccctcgcccagcgagactatctcccggccggtggcagattccggcatgaagcggcgcggcagcccggcctgtctctcgctcacgatgcgggaaggcggcagcacgctaccgtcaagcggagcggagccccgtgccatgacgccggaagaagagatgtttgagagcgagcgcgtgtggcgaaggtagggcacaggaaacaaggagttagggcgcaagcggcgaagacaaggggaataatggcgagaggaaggaagcaaatctcttcctcggcgactttatacccttgccaacgctgtgcccggctcctcgtttctcgcgcccactatcttgccccctcgtttctcgcgcccacgcttccactaatcccattcgcccgtttgcggtgcatgaggtggatatgcggctgtggcagtcgagatggaacatatcgtgcgcgcgttaattacgctcgccgaccgaagcgccatcaccatatctccaggaaaaacgaaccggcttgtcccgatttttagaccggccccacctgtcaccaggccttaggaagtggcgtcacgcccgaccgcttccctcgaggagggcgatcgccctggcataacgccgggggctactgtcggtgacatgggaccgggagtatcatgacttagagacttgaggcagacacgatcacccacgtggcctaaccccctcggggagggggtcgggcccgagggtgatacggccgcccttctctttgtctccccgaggggtcggaccgctcccgtctcggccccgagggccgaggcgccccgaccccttgtgggttttgcgccgcgtatatggggtaggtgagcatagcggggctcacctaaccgcatttattgcggtttggacgagcgcgtcacgccacatgtagcgcagtatggcacgctcgtttatccggtctgtgaccggtcacagatcggtcagattgcgggttaggtggcaacaggcgatctgacacacgcctcgccccgtcccgtcaggatgagagtctctaggcactcgtccctagccggagccagcgtgctagctcctggagatggcacgttggtcctggtcagatatatgccaggctttatcccaacctttataagcaagacgttgtatgaagaagggcgaacatgcagattgctaaactgacatgtggtggacaaaggtgaccggtctgtgactggtctgacactggttatgtcgccggaagacaaccgtgttcccacgttgcacctgcttccggcggagtggaggtaggtatgggccgtcccatcagaagggtcactcgggcagcagccgttacaaatctccgcccatttatgaagagatgacagggtgatccccgaggtcagacgaacgaggacgcgtggccacactcaaaaacaggcagtgtttcagcttccaaaagaaggcaagccaagttttactatagataggatgggcccccacccaaaaaaggagagagggagaagtggtgcatgtggtatccccttgagatataaaaggaggaccttgcccacttaagaggggaggctggaaggggggaggatctggagaggagatcccaggagagaaaaaaaaaggagaagagggtttttagaataagagctctctggctctccagctctttgtagcttcttcatacacagatccactagaacacaggagtagggtattacgcttctcagcggcccgaacctgtatacatcgcccgtgtcttgtgctttttccattctcgcaaactttccacagactagaagcttagaatctcaaccagggcccccggccgaaccggcaaaggggggcttgcgcggtctcccggtgaggagccccacgctccgtcacatatatacattctagttaactgatatactagctaataccctctatccgatgccctcctggtacttcgagaagccacccttaactgttgagttccttatgatagcccgtcatgaccatacaaccggggctaaatacggaggaataccctccccagggaattaacttaggactatataccggcgcagaggaatacccgtactgagctgtcaccatcagcggcccacctttcatctgcaatatataactccaaataatgatatcccgtaatctagacatcacgtctaaactaccagtgtagacccctgattttggaaatcggaaatcttctgtgtttatccgtaccaatccctggatcagtagttggtacacacatacatagttggatcacaacatatcacgaatgaattcaggctaaaagagttaaatacttacattagggccaggtaggccaacaactatcagagaacaacagcggaagacaaaatattataagggcccggttaacatgccacaggcagtcgactggggaacgagacctagaacaagaccgcactccgatcatcttgttggatacgcaagcgtaccgacaagggcttctcttcaacactctcctaaaagatatataaatagcaagggtgagtaccaaccgtactcagcaagccaccacaacaacaatgcgtatgatagaaggtatttcaaggaatggcttcaggttcttttgcataaagctagttttgcaattcttttcacaagcctaagacctagcatagactgatcaagttttaataccagtgttcacattaaacaacgacggttttgtccaccatccattgtgatctccaggacagcttcccgtcattaagtcgtcatggttttctgaggacgtccaccttccctcctctcaggaagtggctccatcagcataaaattcatcatgcaatatcccatcccacacaagttaagaattttgagtctagccaagtgtaatacacgtcccggtgctcaataaccgcgagcacggctattcgaatagatttggtttactcacactgtagtggatgtacactttacccgcactccgcgactgctcaacgcatgagcctcgtcccaacacatgagacgcgtcacggcaaagcttttcgataacctcgcattggcagtacctgctccatgaactttacatcctcatgcactctaggcgtacacggtttctagcagtgagaggagttctggcgcacccgggaagggaaaaacacacacattcctacgttgcttcttgtcgttgaacccagtccatcatgattgttctcttatgggtatcctcatgtagtattgccaagccagcctctgaccatccagaacgggcatccgccatctacctggccacctgaaccgggcatccgccagcagactgcttgccgcatcacacacctagagaaaaccactatgcatggatactgcctccgcgcagctatctactccgctaggtctatacccatacgagaagtgcggttgtacgggggtcgtttcatgcttaacttcatggctctgtccttaactgaccacggacggcactagccttttccggacaccacccaaatcctccagccgccctagtcgaaaatagttgtttcactttattttcctttcacaaatcatgtcatcaatatcatggcaatgtggcgctcatgtctccacatgcagcatctcaattaccttcccaaggtaattgcccaagcataaagcattttgatatatatgagtatgcatgattctagagtagcatttctaagcatttgtcatagttgactagggactcatacgtaatcatggttacaagggaataagggtaaacaataatcaaggcatggcatattcacaattaggatgttcatcattgcatgcaattttatttgtaaacaaaaataatttcgcaattgggatcaacatgttcaagaaatagtgatgacttgcctgctcagaatagtccttattcttgatacaatcttgatcaaccttcacctcctgtaagttgcagacgttgcctcacgactaaccgatacacaaggtctataatacgcgagaaaaaccaatattcaaacaacaatcaaatatgcacaacaaaatgtactattcgtgtttgctaatggattccaatcatgctaagggctaaagtttcttaatctttctattgtcatcgtggtctatttaggagttaaccaacttagcgtttatgatatacatatatatttggctaatcggtggtttagtctatcaaatggctatggaaggattatggctatatatgtatctatctaaatagcacgatttcataccagaggttctgttgttagatggatttaggatcaatcaaataatgaatcatttgtattattattttattgatggaggcgttactttgattatgaacatattttacttgtcacaataaattacaaaaggttaataattatccatgctttgtatgttagagttgtttaggttaatcatattatggttacagattatcccatcacataattttacaatgaataatcctaattttcagttgaactataattataattatatgaggtcaagatttataactagtatttatctaatatacatgtttgtcatatactccccctaatttaatatatgcaacacgcaaattaatactataccgtacaactataatgggatgtatagtatatgtgtaagcaacaatatcttattattggatcatatatttgagtagttgctttttactataagctatacaatacatgttgattttaagatggctcggtttggttaactaatggatgtcaaccgaatatatatatatatatatattctacttcacatgacattgtatcgactaacttttaagtggtccagctctgtgattattctcctaaacaagttaaagattcatctatgtgtttttatattttagttacaaaatatgaggctaaattttatgtaaataatttataagtcatggatttagttatatttggacatagaccagtagatggcactaatattttcctatacacccattaatttgaaggattgattataactaatttatgtggttgctacagtggcaaagcatattaaagataattatgctattgtacaatatccatttttatttattggcacactatttaggctaactatcatctaatcatttgatattaattaatttataattataaatatattttagtaaatagtgaattatataccattggaaagcttatgattttagatgaatttaggttcaagtttcacttaaatcggagctaagatgaataagttatgctagtgtaaagttcaaatttgaattaattctaataattgcgaaacagtactgttcctaattcatttatttttattccataatttacattgactgacctgtgggaccggcctgccatggacacaacatatataagtgaatttttatagattttaatcatagggaccccacatgtaagggacttaactaataaagatcaatgggaggattattatttactaatcacgtggggccactctaacctcccttctctattctcttttctctctctcttctctgttttctcctctctctctcggctctctgcctactcggggtggcaacggcgaccgaacgagggggagggcggcggcttaccggcggcggcggcggcgacggcggcgtaaggcggagcgtcgcacggcgcggcgcggcggcaccgagggcggcggcgcgacggcgcgaaggcggctgcgcggcgacacgaaggcggcggcgcggtggaggagaaggggaaaatggggaaagaggaggtggggtagtgtggggtggaatggcgaccggggggatttatagggcgcggggaggggtggccggccctaaaacgtcgacgggatggcgcggcggcgcgaggctcggggcgacggcgacgtgcggcggtgggacggcgcggcgcaacggcgacagtgcgcggcgcgggcggggcttgaggcgctgatggcgacggcgtggtagcggcacggggctcggggcgcggcagtggctgttttttttcggcgacgggactgccgcgcggcggggcgcaggcgcgaggcggcgagaggactggcgcgcggcgacgcggcgagggtgacgccgacgggtgacagcgacgcgcgcggcgcggcacggggcgcgacgcgatgcgacgcgcgcagggctaggcacggcgcggcagcacggggctcgggtttttttgaaggcgcggtagcgcgacggcgacggctcgcggtgcgtggcgatggcgcgcggcgcggcagcggggactggacgcgacggcgacggcgcgtggcgcggcagggcaggggcgcggggccgacggggcatgtgcgcggcgacgggacgtcgcacggtgatggacag

SEQ ID NO: 13252 - DNA, 5867 bp, Oryza sativa
aggagggggaagggctaggggaccacatcaaacacctaggccataatgaacagtgactttttcctatttattcaattttggggcctatttcctattaaaacttgtcccataaattctagattccacacaaatggagtttacccaatatatgttttaatttagatgaaagttgaccaaattttaatattacccatattttatttatatatcacacaaatgatttctttttatattcttggccctaaagtgaacttatatatttttgaagactttgggggtaatattctgtttaatataatgatgtgtccttaattatacaatggtagattggtcgagtctatttgtatagcaatacattttacacagataggtttaatccatttattctataaatagtaatttgagactcggtacaatattaatctaattgtttaattaaaactctcataattttatttatttataaagcttattttatttatataaccattattttatatgagtgattttcatgttatgaggagcttgataaggtgtttcaaatattaattatatattctagtgagatactctattatagatggggccattgatgtgatcatcatttcatgtgtacttatatttcatgtgagattggattcaagtgaattatattcaaccatgttgtttccttttgttaaatatgaaatcaggctatcaacatggtttgattatttaatatttgatttgtgatttatactacagggtttaataattaacttgtactttatttggcttggctttcatgtgcataaatatttatgggattgataataaataccgtatcgttgtaaatcgtaattattgctcgggtgtaaatctttagattgatttttccattgtgtcgatttatggtttggcaagcaataacaaccataacatccaacatgatgcaaaaagttttaaaaagttcaaaattttagtgatttttaatgttgggaattttcaggatgttacaacttgatactactctaatattatcgtcatgacatagagtaattgcataagcaaacactatacccgcaccaaagcatctcccagataagctagccgtatattcagtataacatgaacataatgtaaagtaggtactcatttactcagaaagtatttcaataccataaatgtatttagaagagtatctatctatctatctattatattattaaaacagctttgaaaggaggcaccacgttcgtcgtgggggctagaaattcccacattaatcagagaaaaagaaaaaaaaggaaaaggagagtccaagtagaaataaaatttaaaaatagcttaaattcggaattaaaattttacccgttagattatagtgggtccgaattataatggtatagattaattgatatagttgtatacaagatacaattatatctacataaatagaacttaagagttgtttgtctattaaagctaaaagttgtataaaatccaaatacacttctacgtataaggttcctataaaaataaaatttttcagaggcatgcagccttgcggaattgaaatcaaacatgatataggatctatacgtatgtaacggactcaatatgaattattgtctaatttctgttagccaaaagaagttccgtatgaattagattatacatatttacttttataagtcaagcacgtatcacaacaatattcaggctttgatatggacggaaacagatcaacaaatattagggggacgaaagctgcagcagcaggttaagcaacattaaaaaaagatttccgtaaaaaaaggaaaaaaagatttctgtaccaaaaaaacaagcgctaaaaattttaggaattactaactagcagcctccgataaaaaaaagtgcgaaaaaagggtttccgccttccgtaaaaaagaaaaaaaatagtgtgaacaaaatgtccaattctaaacaaaaaaatcccgtcctccgtgcccaaaaaaaaaacaagcgcgaatttttttttctatccgattaaaaaaagtgcgttcccgttttccttaaaaaggaaaaaagtagtgagaaaaaaagatttctgtccgattcttaaaaaaaaaatagtacgtataaaccggtcctcccgaaaaacctccgtgcccgaaaaaaaaacaagcgcgaacaaaggttcccgttttccttaaaaaaagaaaaaaaaatagtgagaaaaaaggttaatggaagaaaaagttttcgtgaaacgttccaaaaagaaaaatctgattccataaaaaccgatgcttttccaaaaattccttcaaaaaaagaggctgatgggaaaaaaacgaagagtccataaaaaaaatccaatacgagattagtaaaagttaggaataaaaaaaatcaaaattagaaaaaaagaaaagaaaagaatagttaagtagaatacaatttaaaattaaatataatcagtattgaaataagagtacatatcagaacccaatagtagatgaattaaattcggaatagaaaataataaaatctaaaattaggcaaatgaaaaagagagttaaagtaggaatacaattttgaaacagctgatgaaaataaaaaaataaaaataacaaaagaatacaataagaaaaataaaataaattctgaaattggtgataaaaaagtaaagactattgaaagaaaagaccatctaaaacatatgatgagattaattaagtaacaggcctatagaggaggagagtggtggcggttgatgggacatctaaaaactattaataaatcaccaaataaaatcctaatgactattaaaaggaaggacgacgggcatgtcgtgaagtaatcggtcaaggcggttggcgggacttctagaaagtaaaaaaataaaccccaatgaaaatcatatttgatttttaaaatctcaattacaaaaaaaatgagaggcagcgggcgggtcgtataggagtacaatggcagagccgctgatggttggtgggtcttgtagaaagtaaaaaaatgaattccaacgatagttatgttcgattttacaatcccaatgagaataaaaagtatgcggcggacgggtcgtagaggactacagtggcaccgtttgacgggatttctataaattgattttaaaatctcaatgacagtaaagaagggcggcagcgggcgagccgcagaagagtatagtgacaaagttgctgacgttttggcggaattctagaatgtaaaaaaataaacctaaacgataattatgttcgatttttaaaataatactccccccatcccattttaaatgcagacatagttttccgcacctaattttaaccgtctatcttatttgacaatttttttaaaaaaaattaaaaacattagtcacgagtaaagtactattcatgttttatcatctcataataacaaaaatactaattataaaaaaatcaaataagacggacgatcaaagttgggcgcgaaaacttatggttgcaattaaaatgggacggagggagtaatgacaataaagagaagatgcagtggacggtcataaaggagtataattgaagcgtttgacgggacttctaaaaattacaaaaaagaagcccaactggacaataaactctaaaagctataatttttaattcaatttttaaaggtttcaagaagaatgaatagaaacaatggtgaatcgagcaagctaataaagaataatatgacagaagtaaacggtagcaactagtgtgacttttaaaagctataaaattataaacacgaggatgataaggtttggtcttccaaaatcttaagacaacgagataactatttatgaatttttaagtaaaatcatgttaaaaaatataattttatatgggtgctagccgcgcaattacgcgggccacccagctagttctagtaaaagtacaaagcttacaaaagagaagagaaaagctactagagccatacccgaactcttccgaagactttcgaagtcctgatttctactctattcctattccaccagctagatagtactaaactaaacttgagagaaatgagagagctattgcttgaggtgtgtgagtgaagtgagaaggtgaagtccttatatagaggtagttatgacggttgtggaaggggaattgtccaaagtgccctccaaccatcattgggatgcaatcctggacgtccacgccgaaccctgcatccaacggtgccaggatgggtttggccgaaccatgggctgggccttcccggcccatcttcggctggtggcctcctctattgcttcactttgtaaacttgtgaattttggcccaattcatcgtgtcaattctgagttcttggcccatttatacataagtctggttctcgacatcatacaattgatttatcatctgagttaatgtcgattctcctccattctctgcaaaaggttagtatacctaatactagtggaatattattattctaacagatatatgcattgcaagcatcactagttctcctctattttagtaatattgacggtcgaaactgatcgataacgaccgtcaataaaaccccccaagcttgaacctttgctcttcccgagtgaaggacgaaaggaaacaaagacttggttgttgatcatgagttgctactatgctgcatatctcaaagatacaggtgcaaggtatatgtactctctctcatattaaataatctttggcacggtggcttacccttacccctgattcccacgagacactgctttttcttgccttgagcggttgaaagacagaacagtaattagagcaccaatcacccaatctttatttatctcttattccggaagttttcaaatgattttgcaaaagaaagccgagttcctcaaatgattcactcagtctctccaagtgtatcaaaatgaattcctcaccaattgtagcctttttgattcctactctgatgtaataccccgagattcaaattagtgtattttgggaaatattaaaataaatgtgcaaaagtttaacttttaaaccgttgctcgaataggcgatccgaaaccgtggatgcgtagagctcgctgagtagtgcaaaatatactgtaagtttatagtaatcggagtccgaacgaagtcccggggatcgatttaatgtgggccgttcgatctttattagcatctctatttaatcaacagaaaaaaaagagaaaaaaaaagtaacgctagcccaagccgcctccgtccctgcgcttgtgtcgccgctgctgctccttgtcaacggcgccgcttctacgccgccgccgctacagccgtggcggccaccacaaccatcatcttccgtcgccaccggtgaatcctttccatttctcttcttcccggtgaggtcttgctgctaccgatctgaactaggctgctgctctgtttgcttctgcttgttgctgcaccagggaagaagagaagaacaggaaggagagaaggacaaatttggggaatttggtggatatttctaaattctttgttttgcctacaaattagtactgctagataatccgttttaatccctagttttgtttctaatttatttataagacgatccgtttccggtagctcgaatttattttaccggccgctaggcagaaaacttatttttaaatctggtaattattcgtagagattcaagtttggtgacctaaataagatttgtggtattcactgttatctttccaacgccgctggtttcgttcgattccgataaacggttcaggagaaacagtagaaacagtgctgctgaccgggtccgaacgggtacagtttaacgttttgcttgatctgggatttataaatgcaaaatcagttattccgctcaacatgaaagttgtagattattttctgtag

SEQ ID NO: 13253 - DNA, 15098 bp, Oryza sativa
atgtgtgtggtatatggtggaaatgatatatgaagaataacaaaaatgcttctgcctttgtgcttactttcttctcccaaaaatcctttttttattgattaggagagggcatggctacatctttttttttcaacatcatgctcatgcttgatggagcataacttttttttttcataaccatgcctttccctccccctttttttcaaaaggatttttctttttaggagaagaaagcacatgaaagcatggagaatttattttggtggtaaaatggaaatggaatggaatattgcttagctcccagtgtaggagtttggcatgtgcatatatgtggatgtatgatcttgatcatagagcatgagaagtatctacacaagtcacaagagtttgacagagttcaatggaatgacaggtaaccaaaatgtatatggtttaatcatgatagcacatttttggctctagtaggaatttatatcaaatgaggaactttcaattttatcattttgaaaaacaaaacatccggaattcaagtcaaactagtatcaggatcatagcaactcatatttattatctcatatctcgcaacaacctagacttagatcagcaagtgcagctaatttacctcagattcccggataattgttggctacttttatttgacctttgagagagcacttaccaagaacccacatataagagatataaaacagagcaactattcatcatttcaacaaagagagctagcttgtcttacctagcatgactcaaatctatcatatcattttttggtattatgtattttacaaatttgtagcgtgttttcattttaataagatgcaattggtaagcaaatatgcaatttggtaagggatatatgcaatgtgatattagttacctcagtggggcgaagaaatgtcttccccccaagcttggctttcgcatcaaacaccttgataaggattgcacccctgaaagcggaagtacgcttgaaggtcatcgtgctgttgctgcatcatgttgttgaagttggcgaactgcgcatcagcagattgttgtcattcttgcgtttgagctatgtgttccgtgaggttgaactggatctctcccgtctgcatatcaagggtgtccattctcttagtgatttcacctaagtcccaatgagaggaacttgagtgccgttcacttggagatggaggcacaccacttgatctgaagggttggttgtccccccattggatgtcatgaggcgcacgccaccagtcctcactggcgcttgcccaggttgagactccgatactatgacgtggagcttgggtccatccgggtgcgtcctcagttggctcccaacctgcctcatacatctggacgggtgttgaggatgataaactttctcgttcatttcttgtcatgtcgtgcgtctccctgtatgctccacctgcacgagattcttctatggtttgtaggggaatggttagttcacggcaattgtacaaatgataccctgcatttggcaacgggatttcatttgtacaactggagaaaaaataatcaaagatccatctactccatgtttcagaatatgcccttgcactagatatgtctcatcaatacacggacgagcggctgagataaaagcaatttggtcgctatcgacccctagcccttttgctatccgagtaatcagagaagtgcactcaacaggagtagagaactttatactttctaaccattgtcttatcatacatttcacaggagtaattttgatctttctaaccatggcaaacatgataatcaattcatctcccataatgggcctcagatcacgtctaagcaattcatttgtgcatgagcctaagtgtaggattatggatatcattcgttctaggtttcttgcaaattggagcaccagaaatatcttcccaaaacctatttttcttgaacccagaaattcctttctggagattgattttacaggaatcttgaaaaccaagaagtgtacttaagcctttccatgtaagtgtaaactcttcacggaaaaaatgaaaggaaattccatcttctatttctttcaaagtgcacagaaaatgcaaagtaagcaggagagaaccaggctcatctaccacagcaaatctctgccaaccaacagctttacaaaatagtacgtaattcagcatccatacctatcttttttagcagcttcggtgagtattctcgcgtgtgagcatactcccggtcgctcagcatgtagtaggcttgtctctcccgatcactgacaaggtcaaggtcggtgtcgttcaggagtcgtcgcggagcttcggcgtcttccatcaagacatctgctgatgaacgagtactagactcgtcatgacaacttgatgaagagccggacctcttgaacagacgagacagtcgcctcctcattttgcacaatggagcaagaacggactaactcgacggaggttaggaatgacaagaatttcacccgccggttagtttcaccaaagcaacttgtatatatgcaactaattgtttgaatttgagggaaactatcaaagcttgaatgaacttgagagcaaactttggagagggaatgaaaatgtgttgaaatggggtggaattccctctctcggccggttggcttaagtagtgcacccacaacggtcaaaaccgacctatggggcccactagccgttgcctcaaagaaggaggcagccgaccgttggcctggccagttcaaccgaaccagtgggttcggccgaacccacggtgggcccaaccggccccactttcggccgttgggttccaacggtcagtgtggtcatggcacatcggattttcactgaaaattttattttggtttgctctaaaaattttatttaaagaatttcctcagaattaaaaaaaaacctaaatgcaattttgaaattcaaacatgtgatgatgcaaaaattcaaattgttgaaagcaaatatacggatacataccaatttacctattggcgaaggtcgcgtcatttaaaatccgacgtgcaagactgtacctccatctagttcagtttgcggattttctacccgtctccggagatgatggagcgggcgtctttggcttctccctccacaccttctttggttttggtgcggacagcggcttcttctgagctggctgctctagcttcttggctggtatgggttgttttaccaatgtcttctaataacagttcctgggcatcattgtttccttctccaggaaattctgcatgaatttcaccaggctgtccattttgggtggctccacttcgacctcttgaatattctgtgggtttggcccgtactttattttgaccatggagcattgttccgtcctcggttgaaactcaaacttctcttccttgtcgttgatgtggaaacggatactccccgttcccacatcaatgttggctcccatggtgctaaggaacgggcgccccaggatgagcggcgtctcttttcctgtgtccatgtccagcaccgcgaagtcaaccgggataaagaaatcccgtgtcttaactgacacatcctccgctatccctgccgggtaacggactaacgaatcagccagttgaaggcgcattgttgttggtaacaacaccgtgaagttgagcttgtcgaagacgtcttttggcatgacgctgacactggctccaaggtcgcacaaggcctggtcgaactgttgtgcccctatcaagcaggtgatcataggacaccccgcatctttcttcttctccgggagcttgtggagtattacgttgctgcattgttccgtcagcttgaccacctccgttgttgggagcggtctcttgctgttgagtatgtccttgagataacgggcgtatgttggctcttgcatggcgtctaacaatggcacgttgatgtggatcttctggattacttcaacaaaacgagcgaattgctcgtccgctgacggtttcctactccgttgagggaacggcagcaaccgtgtgtcgcagtactcctgcggtactgtcttttctggctaaacctccttctcagccgagtcactagatgacgcttctttggttatcccattagtttctgcagggttaggatacggcggatcacgagtggacttacctcccctcgtcgtgatcgccttgacattttcagtggaggagtcaggttgccccaggatcctcccagtttcatttgcatggactaaggatgccaattgagctagctgggtttcaatcattttattaaagctcagctaattttgaaaagcagaagcaaagccatctaacttgacatttatgttttctaggacattgtcattggccgcaagctttttgcttatcgcatcggtggttttagcttgtgcaaaaacgagatccttcaaggagggctggttagaaaaattaccattgttgttacctccttgataatatgggcgtggttggttccacccctgacctccttgtggacgatgcccgttgttgttgttgtttcccatgtacatcgcctcctcacgggtttccgggcagtcattcccagaatgacccgtgttgtcgcagacttcacatgtgacgtgagagtccaaggccttgacggtgccttgtggccgtttctcgtggtcgtccaatcacttcatgaggaggtccagcttggtagcaagtaactccatctccttgacggtatgcatgcctcgctgacgggtctggagtcgttcctcgctccaacccatattggagacctatttctctattagatcaacggctccttgaaccgttttagagaagaacgctcctccagctgccgcgtccaggtgatcgcgggacatcggggtgagtccattataaaagttctgcaggatcaaccagtcgtccatcccatgatgaggacaggcggctacgtactcctgcagtcgttcccatgcttccggaatagactcatcccttgtctgctggaaacttgaaatccttccacaaagggcattggttttgcccatcgggaagaatttcgagaggaatgtcgtagagtatttgtcccaggtattgacagcagcacagttggcatagaaccactgcttcgctctcccgagaagggagaatggaaacagtcgcagcctgacggcgtcgggactaacgcctttgatagtgtacgtgctacagatctccaggaactgttgtagatgagcattggcatcctcattaggcttgccacagaacgggctagcctgcgccattgtgatgaggctgaacttcaagttgaaatccacgtcccctatgttgacctacggcccaatggccacattgtcagcagagggagcagcgaactcgcagagagtcttgttagccatagtcttgaaggtcggtggcactggtacggctggtttctctgtcggtagagttttctgcggagcagcaactcatggcctaacgctccggaagaaagcttctggattttctttgaagttttccggcaagttgaaaccagtcatgcactaccctattttcacaacaaaagtgaaaacaaccaaggttagcttacaaaagaaaatgattatacagaggcaaatataaaatattagttcaagtagtctctattatgaatcttccccgacaacagcgagagaaatacttgttggtatttcttaacgacattactagaaatataattcccagcaattaatggcgcagaaatacttctggtatattatggttacagagttcatccgcaagcgcatggatataccattgtagcatttcacccgagagtattccaagggtattgtatttattttatcccgtgggaagatcatgtagagagaacttgagtaataatttatatattacttgtgataatcatattctaagcaggggttaagataatccaagggtagagtgacacacaagcattaactactcattctcataatatatcatctaagctaagtggaaagaaaagagaaagaaaatctattcttatacttctaatatacatagtatacatacattctagttaaccgatatactagctaataccctttatccgatgccctcctggtacttcgagaagctatctctgactgtcgagttccttacgacagcccgtcatggccatacaaccggggctaaatacggaggaataccctcccgagggaataccctccaaccgtcatttggatgcaatcctggacgtccacgctgaaccctgcatccaacggtgccaggatgggttcggccgaaccatgggctgggccttcccggcccatcttcggctggcggcctcctctattgcttcactttgtagactcgtgaattttggcccaattcatcgtgtcaattctaagttcttggcctattcattcataagtctagttctcgacatcgtccgattgatttatcgtctaagttgatgtcgattctccttcactttattgtcattctctgcaaaaggttagtatacctattactagtggaatattattattctaacagatatatgcattgcaagcatcactagttctcctctattttagtaatattgacggtcgaaactgatcaataatgacagtcaatagtggatatcatggatgccatagatacttgaattttgctttcgaggctttcatgttggtgttatgacatcttaaacttggttaaatgttgtcaaagatagcacaatttgacttttattaaagagtaaatttcacaaaactacaggtattttgcacaatttatcacaaaactacagatttaagagcttgtttcacaaaactacatatttagtgtctatttttatcacaaaactataggtactttgtataatctatcacaaaactacatatttaagaacttgtttcataaaactatagatttagtgtattcgtttgtcccataactacacatttagtgtcttcttttattataaaactacatgtttagtgtcttcattatcacaaaactacaagttttaacaatgctaaaacatgtagttttgtgataatgaagacactgaacttgtagttttgtgataaatgaagatattaaatctgtagttttgtgaaacaagttcttaaatctgtagttttgtgaaataagttcttaaatatgtagttttgtgatagaatgtgcaaaatatatgcagttttatgaaatttactcttaaagttaaatttacctacttgtcttaaattaatgtactatcacgattttagtatgcttgtgtatattattttttattttttgtgatcttgcaaataatccctcgtttccgtattttccttttttcccctgaatttactcttttatgcttttttacgttttatataatttgcatggaatttccgtaagccttttccattctatcttgtttaaatagatacttctgtgttttttctgttgtttttaatgtttttgttaatttttcagagttctctacttatctttctggctccctacgaaactccccctccccatgtttccaaagtaaggacggggtaaacttcgtagtagggaagctgaccgtccccgccccctagcggaaaaactcccccgttccctgtccctatccccgcacacggggcgtggttttctcccgtccccgtccccgtgcgggtactggacacccgctgggttcctcacccccgacggtgagaaggagaagcgtctgccatgctgagaggtagcgtcagtgtggtgcgaggagtagtcgagcagaggcggcgtgatgcggagaggcggcggtagcgcatgcggaggagcaaagcatcggcggggagatggcgacgaaaccaagcgctgtcgcgcggcgcggaggcggcaacggcaggagctgcagcgtggatgtgatgacggcgaagcaccacagagctggttgatccacgcggcgttgcccagcgtggttgattcgagaggcatcacctgatcaccggcggtcggcggagcatggctgatctgcgcagcgcagcgtagaggcgtcgtcgtctcgctgcttcgattggatctgagtcgtcgtcgtcgatgtggaatccttatccactcgaccactccaccgtcctgtgtgagcagacatatacgagctggactagctctagctagagacaaaacccatcagcccatggcatgttaagtgttctcactgtgtcatatatggacattcgatgttgggctagctgggcttttgttgcctgtgggctgtacacatgctatgctcggggccccatggggaagagcttgtgaacacccccgaacccggcccacccgatggggaggaaatttagccgttatcagccccatgggggataacatgcacccacttacagcccctaatagagtttttccccaacgggtttcggggtacggtccccattaccatccctacttcgtaggaagaaaattacacgggatcgaagtcttacacctcgtccgaaggacttgtccctctacttgacacttgtcttgcaccattgcacgaatccttgagtaggctaactcccttgtctctccaagggtgtgtttgcaagagcaagttcccaacacttccctctcgttttcctcgtgtacgcttttcaaactactataaacggttcgttttttgaaataagtttctatacaaaagttgtttaaaaaatcatattaatctttttttaaaaaaaattgctagtacttaattaatcacgtgttaatggaccgctccgttttccgtggataggagatggttcccaacacccacctccaaacatagtccccatccggttcctcttctcggtgagctcgcgtccgaccagcagccatggagctcacggccggctgccactgtcaccggaatcaagcggcatccgcaatgtgttccaggaactaagtattccctccgtcccaaaatataataatttttagcatagtgccaagactattaaaataaaaaacactaatcatataaatgttactagatttatcattaaacaaactatcaataacacgcaactctttttatttaaaacatcatacttttatagatgtcattagtcacaatagtatctcaaagaccgtgtcgaagtctaaaaatgcttatattttgggacggagggagtagcatccaaacttgcacacgagtagggggtggatatcgagctggctcggctcgctctaactcgttaggataacagctggctcggctcggctcgcttctcagcgcgagccaacacactggacaaaagaaacttgcgatgcaactacagattatacaaccaaaatgtccaagaatgcaattgtatcttcgtatcaaaccaagaaatcacgtgctagctcaagtcaacaaatgcatcattattcatggtagctccacctttaacaaatcataaactcgtttgctggtggcaatatacaagatcgagcacccacctgaatccatcgccctgtgccggcaacctcctagcaagcagcaacggcgaggattggcggctcgttgcagcgctccatctctatcaactcctcctgcccggccatgacactaggggtgaaaacggtacggaaactttccggattccggacctatttttgaaaacggaatatgccggtcggaatttttcggaaacggaaacgaattcggaaatattttctcagaaacggaatcggaaatgataagggcagtttccgtcggaactcggaatcggtcggaaactttccggaaattttctcggaatttccggaaatttcctcggaattaccagaaattttgtgactgaaatacccttgattcttttttaagcactaaatagtgaataccatggtgtttggctgttatttttttaaaaaaatatttgttatgcaaatctaaaattacataagaatatttttttgtgctacattgggatttatcaataacattactcttttaaacatagataatttattcaattggatttattagtttgaggggctttttattccgataaattttcgttaccgtattcgtgccggttcgttttcgctccgtttccgatttcgataatattcgattccgttttcgtatccggggtttccgattctgatttcgattccaaaaaaatatgaaaacgaaaatgataaagatggtttccgtccgtttccgtaccgttttcacccctacatgacaccactcgaccaagccaagaacaggagagacgtgtgcaggtggtcgatgcgcttgaggtgtcggcgcagccgccgtcgccgccagacctcaaggaggtgtgccggatggagggagcgtgacgcgaggacgcgaggcacggcaacaaggcagggcggcgcgcggcagaaggaagatcgatctggattgggaatttgggaatttgggatgaggggaaagaggaagatgagagctacactgaccagatagggttctggtctttcccttttgactgttttcttctttgggcctaccgtgtttccttcatatgggccttggcctgcaaacttgtctgcctatgcttccagcttgtttaagctcgtgagcgtctcgcgagccggctcaagctggctcgttagctcggctcgtttcaaaaagatatcgaaccgagttggccacgagccgagcgagctaacgagccacgagtttttcgtccagccatacacacgaggcactcatcaagaatagaacagtcatttttgtaatcctggaagcaggaagctggaagattcatcggcaaacagaaatcctggaaagctcaatcaacttcaaccaccagagcagtgcagtgcaccatacagactaaaagcgaaggaaagaaaattctaatgactgaacaatttcactgaggcaaactgtttgcgattcatggagatggattcgatctaatcgataacgcagcttcttccaacccaaagattttcctcgcggcaggtcgggagcgcgaatttgactccaatttccggctgtcatgagcttgatgcggcttgacgccgcagggcgcgggcgcgcggcgctcgccgcacggtgctcgggcttgaccttgacgcctcgccgaggatacgaagataaatgggaattggagagacgagggagagagaggctattttgagattcgtgcgggacaggtgtcgtgtagaggaataaagtccttccgatgagggtaggacttcagtccttggcaattttcttccaacttcagagctaaggtcgtgtttagtttaccctcgactaccccaaacttccaactttccatcacatcacgtcacatccaaaactttcctacacacataaactctcaactttttttcaaactaccaactttcctcaaactttcaacttttttcaggaactaaacacaacctgagaaagaaaggacggggtatgtcacctcaaaaaattcttttgcaggaatttttcctagggattttctcccccttccttccaaaggagccctttaggccatcctcaatccaaaaattatcaagaaattattaagtaattttcatacttatcatgttcactatgcatagaaaccatgtatacaatgaatggtgtcttcaaattaaattcttatccattcatctctctccttttattcacaaggttcttgtgtagaaatagtttcttgcatgagaaatgatttcttcatttttttttacctctcttctcgttaattcttttaccacataagatttttttttacttatgtgataatgtattttaatgctatcgacattggatgatacggagggttgggaatgaccatatgttttttcatctaaggccttgtttagatttaaacttttttcttcaaacttccaatttttccgtcacatcgaacttccctacacacacaaactttcatttttttcattacattgttccaattccttcaaatttctaattttggtgtggaactaaacacagcataagggtcgattttgaataggatctattaaccataaaataaaaacaaacacatttcgcatctctcaaaacaaaatgaggtccctagatggaatgatgggctaggcaagtaccccctccgtaaaaaaaaaaaaaagccaggaggagtaggaatagacctggttgcatttagcttgggagttgggcaatagacctagtcgatgggctggatgtgggactgagcgttgggccggggcccattaccaggcctgcccattgcctacatgcctagtactccccagcgaggtggaggtgatttagggttccaggccgccgccctccgccagcagttccctgaccggcgccgcgacttctccgggccagtggaacgaagttgccgcatcggcgtcccctgcatcccaccgcatcgagaaggtaaatccatggatttggatgacggatctgtggttgcgcctcccatttttctttcaagatgagttgcgagctgtgtgccaaagaagcccatcatcgtctccatatcgcacagggacagggttgctgagagcagcagcgccaccagcccaaccgtggtgatggcttcgtcgccggagaagaaggatcctcctagttgtggctctcgggattcccagcccatcccttgcacggacgatccccccttgtctgaatccccaacgacggacctaggctgccacgatccgcgcgacgaggacgccgaccacccggcaccacccatgggcaaaggtgcatcctcaatcctcctcttgctttcatgtatgcatttccttatacgatatcgatcgtcattcgtcacccaaggcactaattcagactgcaaattcagacttttgtcccatcacacttttttgtttttcaattctaaaacaccacattggttgtgtgcctctccgtagaggccagagatgtaaaccatttctattatctgaaaaattcagattcagatgacgtctttgcctcagccaactcacacaatatgttgataggtgacatcgacgaggatagtgatgatgatggttacgcagacgaggagacaacttgcccaggtaacactactaataatccagtagagagcttcgattccagattaaaagacgaacagatactatcgctattttaatttctcagggcagaacttcacgaaggagcaggcaaaggaaataattcgcaagtggctagaaacatacgacaagaggaatagagaattcatggtggcgtgcgaggagttccaaaagcagggaggggatgagacgagtgcttcttgtccagtatttcctttgaaaccgctcccggagacaacagatttctgtaccaccaagagtttgtgctatcaccgtgaatacaagaccaatgatacttctgagagtaagtgcttgtcgattcctattataaaggattcaatagttattaatattgtgtgctaccaaattaccaaaatgtatttgtaaagtaacgacttttcttttcttttaaatgtttgtagctgcatctactattgggtggcttgaacccaaggagatgctccagatcttctctttgaggttgtccagctccatgtcctatcctattagtgtttacggaatctttgcagtacgtgattacttggaccctttgaggaattatgtcttcaaccgtaccagagatgatcctgtcatagttgaacaggtaaatacagtctatttttggaagttaagttatatatcttggctgaaaaagataccctaatatgcctatatatattatatatatgaatgctaataagatttttttttcttggataggctgaatgtagtgtgttagcagatacatattgttgacaattggttttatggttcttaaaggcatcttttgtatggtttatcgttagcactgtttcaaaatatatttttgtttctttcagtgctccattttgatataagtgcatcactgttcgctgcaactgtagtacattctcctgtcatcccttatattttggttacaatgggtctattgttaagtcttttggaagtattttggtgtaaagattttctagtgtgttaattaagaggtatatatatacctctaacactaagaggtctatatcagtagtgctcaatatctcattgttacgatatctcattatatatgatgtgcatttttgtatttcattttctgattgtactaacacgctgatggtgtccgcaaaaatatttaactgtgtatataccatcgagtttgtgcaaaatttgcatgccattctatttatttattagtatgcatgtccagttgagtttattctattagaatacttttaaaatatgtatttgtatgttctaattaacacacttaaaattgcttaagctctagctttggattctaacaagtccttttaaattgtaggattccttcacattacctctttgcagcccttgtcgaggaatgtatgtagtagaatatgcattgtttgaggttgatctttgggtgaaaatggaaggtggagtatctaatgacaagcaattagtatccgcgtatgtcgagatttttgcccgtggcgtgtttaataaggagataagggggcggatattaagcgaccattgctatctggacatacactatatgtatctttcacagagtattgaagctgtcatacaagtatccacagagattgacagtaacgatcctcgtcatgtgagattcactgcattttgtagtggctttgaccgtgagattttgctgttcaatgggaaattctgcaaggacaagtctttccagcacattgtggcaatgaagtccaagggaaaactggttgttcacttggagtttgagggatccctgttttgctggacttttaacaatggtgagcttggagctgttaattctcccgatgattcagtcctgaagcaatttcatgtcagggtgttgttttctccaaaataatgtgtaccagcctataatagcttctttgggtgaaggagaggaagtaaatcagtataaaaagcttgatacaatgtagtgcttgtgttaagatgcttatctgggtaataaactagaccagtacttgcattcagatttgcaaattgcatccagggccgagattgttggaggcactgttcacaaggaggcttaatctttgaaacctggatgggatgtccatccatcattgtgctctagcctctaatccaaacattgatggcattgtacacaatttgtgctttatgggcttaattt

SEQ ID NO: 13254 - DNA, 4924 bp, Oryza sativa
  unsure (1)..(4924): unsure at all n locations
gtctccgtctcaaataagccaaaacgtttctccaacctagctcctggattatggattaacactgtatagctcatgactttagaaaagccaaacaaaaaagatcataagctaagcttataagcctaaacaaaagagggtctactatggtccttgaacttttgcttcgggatgaatttacccctgacgtgagctagtttccaaagaactccatataaaatttgttatatactccgtactagctttctattggttcctggatcgacctaaagcgtcatatggactttggcatgctatccttatatgcaagatcaatattaatatgttaattttacccttatatgtagcacagagaaacagaaagaaaaatcaaaggcaaaggcaaaccagaaaaaaattacggatcagactgatcatgtacgtatgctttggttggatgcataaataaaatagtcactctctacagattgataatacttatcatttttgaacaatccaaattgataatacttatcattttgattgtcaaactttaaaactttgactataattacatctaaaatatttgtataaattggtcttaaaaatattttgataaaatcatatatttattgatatttccatatatattataataaaaagtcatactcacaattgtttttaaagatggtgtatctattcatctatctattatattattaaaatagttttgaaaagaggcaccacgttcgctgtgggggcaagaaattcccacattaatcagagaaaaagaaaagaagagtccaagtagaaatacaattcacaaatagctgaaattcataattaaaaataagcaatattgaaataagtgtccatataagaacccaatacgagattaatcaaaattcgaaataaaaataaaataaaatctaaaattagaaaataaaaggagagcctaggtaggaatataatttaaaaataattgaaattcggaattaaaaataaggaatattaagagaagagtttatataagaacacaatacgagattagttaatattcggaatacaaatgaaaatgaaatccgaaattagcaaaaagaaaagaagagttcaagtaggaatataatttaaaattaactgaaattcgaaattaaaaataagcaatattgaaagaagaatccatataagaacccaatacaagattaattaaaattcagataaaaaataaaacaatatccaaaattagaaaaattaaaagagagttcaggtaggaatacaattttgaaacaactaaaattcaaaaataaaaaataaaaatattaaaagaacactatacggtattaattaaaatttgaaaaaaaattctgaaattacaaaaagaaaaaaaattcaattaggaatacaattaataaataactaaagttggtgataaaaaaaaggctattgaaaaaaaaagaccatctaaaacacatgatgaggtaaattaagggcgtgtttgcttgctgccctcagattcgcgcctggctcaggcgtcaatctcaggcgtccgatttcggtcgcctgcggtcggatcgacctgcctgagcaacggtctccaggcgagggcagcaaccaaacagcccctaagtaacaagcctataaaagagtagagtagtggcggttgatacgacatataaaaattgctagtaaaacaccgaatagaatgctaatgatgattaaaaggagggacgacaggcatgccatgaagcaaacgggcaaggcggttgccgggacttctaaaaagtaaaaaaaataaatcccatttataatcatattctatttttaaaatctcaatgataataaaaaggagaagcggcggatggggtgtataggagtatagttgcagagccgccgactgttggcaggacttctataaaataaaaaatgaattccaacgatagttatgttcgatttttaaaatcccaatgacaataaagagtatgcggcggatgggtcgtagaggagtatagtatattagtatcatcgtttgacgtgacttctaaaaaatataaaaaataaaacccaacaagataataaactctaaaactacaggtccaattttaaaggttcgaaacttctaacaagtaaaaaaaccaaatgataatcatcttcaattttaaaatctcaatgacaataaagaagggagacatcgggcgagccataaaggagtacaatgggaaagccgctggcagtttagcgggacttgtagaaagtaaaaaatgaactcgaacgataattatgttcgatttgtaaaatcccaatgataataaagtgaaaatacaatgtacgggccttagaggagtataatggcaccgtttgacaggacttccagaattataaaaacgaaacccaacgagacaataaactcaaaaaactataagatctaattttcaaaggtttcaaggaaaatgaatagaaatagtggtagaccgagcaagcaaataaagaaggatatgacagaagtaaggggtagtagctggtgtgacttttaagaactatataattagaaatacggagatgatacgagaatagctatttgtcgaggaatgatcctctctagcgggtgatcgtgagatcccccttttgtgagttcggccgggggaaaaggtgcgcttgacgagatcgtttatccgccctgagtgcttcgagatcgtgcacgagtgtcaagattatacaggttcgggccgctatggagcgtaataccctactcctatggatgggatttatggttgagtgttacaaaggttcctaaactccggagagcagtctcgctcttcttctcctagggtttaggcctactgggagtcatccccctttctcggtgggtaaggtcctccttttatagttcaagaggataccacatgcaccgcttctacctactctatcacgggagggggacccactctactcagaccggaccacggtctgtgccttcgcccggaagctaagcggccgtccgtcctcgagtgggacccagcgccacctcccgcctgacacgggggacagccctgtcattccctcttaaatgaacgaagacttgtggcggtccttctcacgtggagggagttctggatgatgctttgatgggacggggcatacctgcctccactccgccgggtacaggggcgaacgtgggggcacggctgcccgtccgaccggacgtgaccagcgacaggccggtcacagtctggtcacgcctgattgacgtgggtcaatcgggccgcaccgcacgtccgcccttaccgcattaaatgcggtgagggacggttggggcgccgcgcattgatggcggttcagcntgagtctcctcnccgcgcgctcccctcgccacatggtagctgggcgagggcctcggggcgaggcagcgcgagggcccaaggggcgtgacgtggcaccccgaggccccctggctgcctttgcgtcttccaaggtgtgggggaagggctaggctgtagggccacgtggctggatgggaaggtaactcccccgtacttcgcacacccccgggcccatatcaccgacactatttaataaattttaagtaaaatcatactgaaaaatatatgattttgtttaggtgctagccgcgcaattgcgggggccacccatctagttttattttatttatttatttttactgggccacctacatgattaggcccatagttgaaatagcccgccacgtataaaagtaggggcgcaggtgaggtgagcaaacgagattattgtgctcgcttattttcttttttttcccgctcgctgttgataggtatgttgtctacactattatgacccgaacatattatattgttaggggactagtggatggtatacacgagtagtactcccttagttacttttttagttttcttaatgacatcatgtaacaccctgaaaattcgactaaataaaatgaaacccgaaattaagtactttcaaaaacttttaaataaattgcattatgctgatgttattggttcttttattgtgcattgtgttaactaaaatagaacataatggataaataaatttttgagtgaaaataaatattataccaattattaaatacggtaaaatataaacatacatggatctagggcaatataaatattgaataatatttaatttggggaaatcacatttgattcttaaattagtcactcaaatgcttttgggtgaatacaacaaattttctcaaattataaatcaaccaaaaccctaaaatgggggaaaatagagaaattagaaatgtatataataaaaataaaaatatgtccaatattaaatttgaatacaagttacatttgaataacttagagtttgtgtattttacattgtggcaaaataggaggcagtagtttatttagtttttagaagagtgatcctcaaaattagccacgtaagcgccacatcatccaaaaccaccatctaaaccaccgagggacctcatcagcaccggtttcgatagttgagggacccgttgtatctggttttcgttgacaagtcaagggacctcagatgaacttattccatctaaataaggtcccaagacttagtcaggctgagtgatggacatgggcccattaccaggcctagccattgcccagaattaaatttgaaaatataatgttcattcattttttttcccaggaatattcgggatgcaaaattttttacagaaatataacgtcggtctcgctcaaccattgcgcgaaagtgacgtgggaatgatgctgcgggcggtacgcgcggtagaggcgcgagactgcgcggtttcgcggaatggaagagtgagaccgaatggtctcgcaaaatcaaacagcgacattgtccaacggctcgatttgattagtgattaattacttaattaataattaactaataataattagcgattaattttcctaat

SEQ ID NO: 13255 - DNA, 2354 bp, Oryza sativa
ggtggaatcaatagaatgggtggtatcaattccttccatggtaagaatacatttattcaggcgacttacatgttttataagtcgatgagggttctgtaagttatgggtcaagttgaaaggacgacagcacatcttttttcgaagattcaaacacgggtatgattctcctagcaccaacaccagaaaatagtcacaggagaatatgagggttagttcagcataaacaagaagtcatgattaagatggagaaatgttaacggtgaagtgtcattcaagacatatacagaggtatatattgtatatttatgtctttgtacaacaagacaaacaattgctaaattgaattagtactacatgaatcaaaagggatataaagagaagtataaagctcaatccaattgtacaagtgatctcacatttcctcaaattcagaggctgtttggcaaaagaatggtacaccagctcttgcagaagtaacctaaagcagaagagaacctccagtaaggtgaaaggtacatgattacaaggaaacaaatgtagacgaaaagaatgtgcaaaaaagtgacatatgtatgtagttttaccttatatcccacagattcttcattcatctcttcttgatggtctggtgagccggagtactcatcacattcactgaatgtcatgtaagcattctcaatcagagtcggttgattttgttcgttgttgttagtgggtggaaattttggggatcgttctgtgagaaagccccaagaaggatcatccaaaccgtgttcacgactccttcttagctcattttcagtccatgcaacatctattgggccatctatggacagatgtacaggcatatcctttagaagaaataggttctctgccttatcaaaagtcctgtggataagccgtacctcttcaagaaactcctttgcttctgcttctgtcacatctttcttagaacttttttctgtggcatcatggtctcttctacctttttctgcaatttcactttgtgcaccatctccttggaaaattgacttaacatccccacaagttttactccatgatcttgccttttcaatttgtcgtttcccaaaaacatgtgctggtgatgccctgaagttcttgtgaattttatcaagaaagagattgtcggacttagcggcttctggaaagtgtaagatcataacttcaccagcttctcttacttcatcatctgagggcataggagcttgaccatcaacataccgatgaagaataagaaatgacttaagaagagcattatctccacattttgcttgatgggcagtcacatatgcaccatcccagggcagcttttttgcatgttcaatgaattctgattttgtgacccccaggtatccattctccctaatacgaagatcatcaatcttccctgtgcttctagtaatataaccattgaggtatccagaaataccttcaattagagcacaaagccacttccctttgtagtgcatgtacactaggaaatgaccttttggtgggagagcacaacatcttcgatacgggtgaccaaattcatatcgtgcgtcagatgtattgtagcaccatagacgataatctagcaccgactttcgccatctgtttcgcacttgtacttgagtacctttcagatccaccacggtgtagttctgttttagtaaaaaaaaaaatgtccacaaattaaaagaggcaataagggggaatcatgtctgaaaaaaggtcacgtagcttataaatagaacagcttgtgatcatgttacaccacaaaacatttgagaacaaatacgagtagttgatatattacacatttgataaataaggaaaagggtaaataaaatactacatccgttttttaatagatgacgccgctgttgacttttagaataatgcttgaccattcgtcttattcaaaaagttactgttaaaatatgctaacgtgtaagtcatactaaaaatttctttaatgataaagcatgtcacaacacaataaagcttttgaataggacaaatggtcaaacgtcgtgacaaaagtcaaaggcgtcatctattagaaaacggagagagtatatgtaactattatactttagataatcccatgaaacacatttttcataaaactatacagaagcattctgcattcacaagaataaacacaccacaaaatttgaactccatctaaaagaaagttcactcgcaaactgccatgaccaactgaccatgtggactaatattaggcaaaagatatgaaaaggtatgttttatttgtcaccaccctcacgctaccccatagaacgtatctcctcctcaggcccaccttcctacctcacatcaagggcctg

SEQ ID NO: 13256 - DNA, 4776 bp, Oryza sativa
tggtcaagcgaagtcatgaaatagtagaattgtagttggaaagacatgtcgtatgagctgtgctaatttatggacatggctttaatatgacaagttggtggtggtgttttagcattacattacaactaattagcacatgctgcagtcattgtactctctgttcttgttggattccaacattgggtataagaatttgaactagtcactatttgacagtaaaatgcactcgataggttgcattttggagacatgccacacgtgtacatcttgacgcctaaaaattactcttcatctgtctgcctagcatttgattttgaaggtatagataaatctaggatctgccacaggatgtctgcctaacatttgattttgaaggtataaataaatctacgttctatgccacaggaagggaaggaatgtcattgcttacagattcttccactgcatgtgtctcccatccatccttcaggcttctaaggaccacgtattccattcccatctgatgaggggctgatgcttcaatgccattctcgttctgaattcacctcaccatggaacattcaccgactactttttccttcaaatcatctctcttgttgctttttcattcaaatcaatctctcttgttcccttgttgtatcagcatgggactatttttttccttcaaatcaccttttccttattggatcagcatcgcgaatccaacctcaagttgtagctcgcgttaaccatgccctgcgaaagctgaactttctgatgaattcagagtttcagacgacccagctgcatcctggtaagtgttcagagctcttcccgcctccggcttccccacctcctccgccgccgccgccgctgccgccgcagcctcgcagcaatctctcgtagttccagccgccgccgtcgggctgcagcgctctgagctccctcgccgcgacgctcccgatagagcagttcttgtgagccaggcagcagtgcaggagcgtcgtccacgccagcgcgctgggcgcgaacggcatgccgaggagcaggccgtgcgcgtcccgcagccgccccgcgcggccgaggagatcgatggcgccgacgtagtgctcgaacgcgcgctccaccccgtactcgacctccatggcgtcgaagtaggccatcccctcggcgaccagctcggcgtggctgcacgacgccaggatggcgacgaaggtgctgccgttgtagagccccagcgccagcgcgcgctccgcgaacgccagcgctcgcctcccgcggccgttctggccgagcccctgtatcgcggtgttccacgacacgacgtcgcgcgccgccatctcgtcgaacaccttctccagatcggctgtcgagccggagcagctgtacatgttcatcagggagttgccgacgaagacatggctgcgcgagaggccgctcttgacggcgcgcgcgtggacttgcctccccagggtgagcagggacagcaccgagcagatgtgcaggaccgtcgtgtagattgatgcgtccggcttagcgccgccattgtcgcgatcacccaacctcagcagatcgatgaagaggcggagcgcgtcttctcctcggcggttctgccacaaacaggatatgatgacgttccatgtgaaggcgtccttgttcttcatcgatctgaagagatatagagccttgtcgatgagcttgtgccgcgagtatccatccatcatgatggtccaagaacttgcatccttgaagcgaatcccgtcgaacaccttctcggcgtcacacaacgcgccgaccttggcgtgcacgtcgatcaaaccgttccacacaaaggtgttatctgtattctcctcctccaggagcttgagtgccagggcatggagctgcgttgccatggcgagcgactggagagccacgcaggccttgagcaacgagctgagcgtgtgcgcgttgggcagcaccccgcgttcgtagagctcgccgtagagcgccgcgaacagctggaccgcctcgcggggctccccgttccggacatggcaggacaccatggccgtccaggtgaacacgttgtgctttcccagcggcaggtcgtcgaagaggcggcgcgccacggaggccgccccggcgcgggagaggcccccgatcatggtggcgtacgaggcggcgttcttcccgggcatctcgtggaaaaacgagagcgcccgctctatgcgccctgcgccgacgagcatgcccagcgccttattccaggcgacctggttcttcgggggcattccgtcgaacaggtcgagggcctcgttgtccgcctgcccggatttccccgcccccaccaagatctctggggttttcagggccaaacggtacagcgacggaagctcgtgggccgccttggcgatcggccgcgccgccatactccgccgccgccgccgccgacgaggcgctcctgcgtgttggccactcctgctggccgaggggatgaagatttgagaggtatcatcggcgatggggactggggaaacgacattgatatgtgttattttacatatgaacccttcgagttatcatattttacacatgcgagagtatcctgtttcatgggattattgttacagattacttgctggacgtttataaaatacgttatctcaaaagaaaaaaaaaaatcctctactcactccgtttcgtactaagtttttatttttgaccccgcccttttgttccgaaataagtccattttagagtaatcattatatcagagtttgtgaaagtaagaaataaatgtattgagagtagataaaataaaaaatgattgtattgaaatttgatagtgtggatattctagatttggttttgtattgttatgtgtgggatcggtgaaaaatgaatttgttttggaacgggggtagtacctaattgcttaaattacttgttctaggctatttattaaatttatttaacaaaatatttaattaattcataaattcacagcaataatgtatctatagatcctacatccatgtgtaaaccctaaattacaagactactgggctattaccactattccattgacatcgtgtcaaaaaaaagcatatcatattattggaatgatcagtaggagtatttagtactccctccgtcccaaaaaatagaattttagagttggacacggctatcaagaacgtaagtagaattaaatagaaatgtattggaatggtcagttacaagtatttagtactccctccgtcccaaaaaatagaattttagagttggacaattttagagtttcaccattcacaacataggtagaattaaatagaaatgagttgtgattggttaagaagtgtaggtaggtaggaaaagtgaatggtgaagggttgtgattggttgggaaggaaatgttagaggagaagttgttatattttaacacaaatcctaagtgctaaaagttattatattttgggacaaagtagctgttttatttggccacgaggatcttttggcaaggtgtatctccctccgtttcttaatatttgacaccgttatctttttaaaatatgtttgaccattcgtcttattaaaaaaataattattaattattttcctaccatttgattcattgttaaatatactttcatgtatacatatagttttacatatttcacaaaattttttgaataagacgaatgatcaaacatgtggtaaaaaatcaacagtgtcaaacatttagaaacggagggagtagaaaagtgtgacaattaaattttggcccttgtgatacggttagttaaataaaatgagttctttgtgaatccaatgtacaaaaaggtgagataaatttgtgtagcagtgaagcaaatgactatctaacaaactatgcgtgacagaataaggcaacaaacaaaaaacacctcatcgttttgcttacgctgatacggcttatcagtagaaaaaaaattacgataaaccttttatatgttcttaacaattttaaataaaatattggaaaacagaccacaataaagacctttaaaatcaacttaaaattaaaatttaaattttaaattttggttagggcttataagttaggcacaacaatcaatacccttattgatagacgttggttgaacttttttttttttttggtgctacggtagaatgacccttaccaaagttgggtggcattttcctttcttttttttccctacccttttcggctttgatggccaagcacagcttcctctctccaggtctccatgctttacagaatacttgcatcaaccggctatcagtatatcacaatgcaattttcatttacattcaaaatctttaacacgaagtcacgaacacagttggatataaagtattcctgatggaacccacgaacaacttgatttctctccaatcaggcttcaacaaaaatagaaaatacaaaagcttaaaagccttaaagagaaccatttcatctgtgactacaaggccgcacagatgataaggttttaggaaaatacataacatacagcaacaggagacaacactggtattgtgttgctgcctggttttgcatgcagcatctcaccacaatccagttcagtagtattcatctcaccacaatccacttcagtagtattccttctcaccacaatccacttcagtagtattcgttaccagcgctgtccgaaaccatgtccattgaggtgtcattggagcctccagagttggtctccctattctgtcctgcagagtttgtttctgcattccggcctccattaccagatccttgggttaaatgatagctct

SEQ ID NO: 13257 - DNA, 955 bp, Oryza sativa
taataataataataataataataataataataataataataataataataataataataataataataataatataataataataacatgacgcggaggcggaagccaaggaaccaatcgaattcccgacgaccgaaccgcgagaggtggagggggagatggggggaaagggagggagggagggaggtgtacggacgagggagtggcgctcgccggcctggaaggagagcttctgctgggccatggcctgggtgtagagctgggagagggagttggcggcgccgcagaaggtggagtagagcgtccggtcggcctcgtccagccgcggcgccgcgtccgtcttcctcttccgggccatcgccgccgccgccgccggagatcgtgggggaggagggaaggcggcggatggcggaggagcagggtttgctgctgcgatttttttttctcctcctctcttgtgatttttttccccctcgtcttctctcttctctctctaattttccacgggtgggtgtatacgaggggtgcgtgcccttttcaaatgaatcgtgtggcgtttttggctgttttttggtcaaattcgggaggagttttggggtttttttttttttggctttttgggattgggtttggtgtggaggaggtggtgagtcacgtgacacactgacgcgtgatgatggtgtggaggggggcagcagtagagatggtaccccatgacccaagacctgatgagcttttacactattatgagtcacatatagagatggtaatagggccctgtttaccttttcccgcggtgaattcacctattaggtgtgacgggaatggttaatatgtattcaccatggagaatgaaatggttacaaacctctcaccatcaaggatgacgggggctgggacggtgaactattccccgtcctcacccccacggtgactcgactttactgcatatagt

SEQ ID NO: 13258 - DNA, 5286 bp, Oryza sativa
cacagatccactagaacacaggagtagggtattacgcttgctcagcggcccgaacctgtatacatcgcccgtgtcttgtgctttttccattctcgcgaactttccacagactaggagcttagaatctcacccagggcccccggccgaaccggcaaaggggggcctgcgcggtctcccggtgaggagccccacgctccgtcatctggcgcgccaggtaggggactctgcgtgtgtttttctaagctctcgcattctttcgtgtgcgccaagcttttcctgttcagcccaatggctgaacaagcaaaggcgcacaacctctctccgagtgttagcggtgacgacggggagccgaacccacgccgtcgagctcgtactccaccgccccctccacgccaaagtcctaggcgggaggaggcgctcgagagggtcgaaggatccgcgacttcgacatccacgggtgatggggaagggcggcgagatggggagcgtcgcctcctcgtctacggcgacggcagcacgccccagggcgcgctccaagctgcgggcgcgctcctacgtcacccgcccattgtccctgacccagagtctccagcccaacgttggctggacgacgtggccaacttggtcatgacggcacggcagcgcctagatgctggtgggcggtcctccgccaccaagacctctggtactgctaccaccggctccgcgtcgtcaagacggagggcgcggcgagcggcggccgctgttcgccattcggccgccactccttcgtcagcgcctccgacccgggaagatctgcgtggggggccggatgcctgcatcagtatcgagcgccggcgtaatggccgacgtgctgcccacgcaacggagggcgcctcctcgtccggagtgtcacctcaacacggacgcggggatcagccctccgtgcccccggttggtggtgtcggctgtagagcctttgtggcgagccttcggaacgtccgttggcccccaaggttccggcccaccatcgccgaaaaatatgacgggagcgtcaaccccgccgagtttctccaggtctacacgaccgggatcgaggccgccgggggtgacgacagggtcatggcgaatttctttcccatggccctgaagggacaggcgcggggttggctaatgaacttgccacccgcgtccgtccactcttgggaggacttgtgccaacagttcaccatgaactttcaaggcacatatccacgtccaggtgaggaagcggacttgcacgcagtacagcgaagggatgatgagtcacttcgctcatacattcagcggttctgtcaagtccgcaacaccataccatgcatccttgcacacgcggtgatctacgcgtttaggggggtgtgcggcacaaccgcatgctcgaaaagatcgcctccaaggagccccagactaccgcggagctttttcagctcgcggaccgagtggctcgtaaggaggagtcatggacctggaacccctccggttccggtgtggcagcttcggccgcccccggatccgctgctcggacagggcggcgtgacaggaggaggaagaaaaggtcagcccattccgacgacgagggtcatgtcctcgccgtcgagggtgcttcgcgggccacccgaaaggggaggcctgcgagcgacaaaaaggaggccagcgctcccagcagggagcgcccaaccggcaagtggtgcaccgtccacaacacctcccttcacgacctcgcggactgccgtgcagtcaaaagtttggctgagcggacgaggaagtgggaggaggagaggaggcaggagcgccgagagggcaagtccccggcggttccttccggcaatcggcgaagagaggccaaacagaaggcccccgccgaggacatcgatgacggcgatgatgacctgggtttccaagagcctggggccaccattgccactgtcgatgggggagcgtgtgctcacgtttctcgccggacctcaaggccatgaagcgagagcttctggccgcggcccctactcatgaggcgacgcgccgggcgcggtggtcggaggttgccctcaccttcgaccagaccgaccacccaccgtgcgttgcccggggaggacaggttgcaatggtggtttcccccactgtttgcaacgtgaagctggggcgtgtcctcattgatgggggagcagccctcaacatcctttcccccgcagcctttgacgccatcaaggccccggggatggtgctccggccgtcccaaccgattatcggtgtgacgccggggcacacttggccgctaggtcatatcgacctcccggtcaccttcggtggatccgccaacttccgcacggaacgggtaaactttgatgtggcggacctcagtctgccctacaacgcggtcctagggaggcccgcgttggtgaagttcatggcggcggtccattacgcctacctccagatgaagatgccgggccccggtggccccatctctgtccatggcgacctcaaagtcgcgctcgcttgtatggagcagcgcgcggaccacctcgccgctgcgtccaagcccgagggtggcgacgagaggcttggcacctccgtccccgccgccccgaggcagcggatagtcacgtgcgacgaggtcccggtcaaggaggttgccctgggcgacggcccgtccaagaccacacgaatcggtggtcttctggatggcaaataggaagacgcgctcgtctccttcctgcgggcaaacgctgacgtcttcgcatggagaccggcggatatgcccggggtccctagggaggtgattgagcaccgtctcgccgtgcggccgggcgcaaagccggtccggcagaaagtgcgccagcaggccccggaacgtcaagctttcatccgtgaggaggtggcgcgacttctggaggccggattcatccgcgaggtcatccatccggagtggctggcgaacctggtggtcgttcccaaggcgaacggcaagcttcggatgtgcatcgactacaccgaccttaacaaggcatgtcctaaggacccttacccccttcctcgcatagatcagattgtcgactccacagcggcgtgcgaccttttgtgttttctagatgcatactctggttaccatcagattcgcatggctagggaggatgaggaaaaaactgcgttcattacccccataggaacttattgttatacgacaatgtcattcgggttaaagaatgcaggtcctacttttcaacgtactactcgaatttctttgggtagccaaataggacgtaatgttgaggcttatgtcgatgacttggttgtgaagacccgcgaccgagaaactttactttcagatctggcggaaactttcgagagtctccgctctacctgcataaagctgaaccccgataagtgcgtgttcggtgtacctgcgggcaagcttctcgggttcttggtctctgcccgaggcattgaggccaaccccgagaagatacgagctatagaacggatgcgcccccccagcaagcttagggatgtgcaatgcgtcaccggttgcatggccgccctaagtcggttcatatcgaggctgggagagaaggcgctacccttatttaagctcctcaaacgctccgggccgtttacctggacggaggaagctgaacgtgccctcactcagttgaaggcgtatcttagctctcccccagttctggtcgccccggagccaggtgaacccttgctactctacttagcggtgaccccgcaggtagttagtgcggcgttagttgtggagcgcgatgaggacaaccctcattccgcgcatccccaccctgtgttggcttggcccgggagagagcagggaggagaggctcccgagccgaacggtggcccaaggcccccgacgaccggagctggccctctgcccgcttgtcagacggtgccaggtgcccccgacccccaggatggcccgggggccactgcgggaaagccgcacctatcgccctctgaccccgaggttaaccctgtgccgactcgacccgggagagagcagggagaagaggcccccgagccgaacggtggcctaaggctcccgatgaccggggttgaccctttgcccgcttgtccgacgacgccaggagcccccgacccccaggacggccctaaggccactgtgggaaggccgcacctgtcgtcctccgaccccgaggtcatcagcacagaagacaagtgcgccccgcgaggccgcttggacgaagagcgccccagggatgcggcccctggcgaagaggatcggccacaccgaaaggtgcagcggcccgtctactttgttagtgaggccctccgggacgccaagacccgataccctcaggcccagaagatgctttacactattctgatggcttcgaggaaactgcgccattatttccaggcgcatcgggtcacggtggttacgtcttaccccctcgcccaaatcttgcataatcgagagggtacaggacgggtggtgaaatggacaattgaactttctgagttcgatttgcactttgaaccacgtcacgctatcaagagccaggccctcgccgattttgtggcagagtggaccccggctcccgagcccgtctcagtccccgaggccagctcgggcccctcgcagctgccccacaccgcccactgggtgatgtagttcgacggctccctgtctcttcagggcgccggtgcgggggtcatattgacctcgccgagcggagacgtcctcagatacctggttcgccttgactttcgggcgaccaataatatggcagagtacgagggactccttgcgggacttagggtggcagctggactggggatccgccgcctcctggtgttaggcgactcccagctagtggttaaccaggtctgtaaggaataccggtgctctgacccgcagatggatgcttacgtacgccaagtacggcgtatggagcgccatttcgacgggatagagcttcggcacgtgcccagacgggataacacgattgccgatgaactctcacggctcgcttcctcgcgagcccagaccccaccgggcgcctttgaagaaaggcttgcccagccgtcggcgcgacctgaccccttaggggagacggacgcacctgaccggcccccgaggcccgtcggagtccaggcctcgggacccgaggggagcgctcccagctcccttagattgattgcttggatcgttgagatccaagcatacctcacagataagactctacccgaggaccgcgaaggaagtgaacgcgtccagcgcatctc

SEQ ID NO: 13259 - DNA, 1380 bp, Oryza sativa
tagccggcccaggcactgcagatcataccactttcatggccgtttgctgtctgggggctcgatatcttgggaccgtttaggcgggccccgggcgggtttgagtatctgtatgtcgcgatcgacaagttcactaagtggcccgaggcttatccggtcgtcaagatcgataagcactccgcacttaaattcattaagggcatcacagcccggtttggggtgcctaaccgtattattacggataacggcacccaattcactagtgagcttttcggtgactactgcgaagacatgggcattaaactctgcttcgcctcacccgcccaccccagaagcaatggccaagtggagcgcgccaatgcggaaatcctcaaaggccttaaaaccaagaccttcaacatcctcaagaagcacggcgattcgtggatcgaggagttgccagcagtgctctgggcaaaccgaaccacaccaagccgagcaaccggggaaacgcctttcttcctcgtctacggcgcggaggcggttctcccatccgagctcaccctgaagtcccctcggaccaccatgtactgtgaggctgatcaagatcagcttcgcagagatgacctcgactacttggaagagcgaaggcggcgcgcggccctccgagccgcacgctcccagcagagcctgcggcgctaccatcagcgccacgtccgggcacgatcactctgcgtcgacgacctcgtcctacgccgcgtccaaacgcgtgctggattgagcaagctctcaccaatatgggagggtccgtatcgtgtgatcggcgtcccccggccgggctccgttcggctggccacaggcgacggcacagagctgcctaacccgtggaacatcgaacaccttcgtcgcttctacccctaatggagtttgggtgtcaggtttcgggctcgggccaaccccgcacccccttcaagcgtgcagggttggccgggggctaccacatatgcatattttttcttctatctgtatttcaataaaagcattttcgatttcctaaaggctgtatctgtgctgttgtttccctttgaaaaatcttgacttgaaataggtcacttgtgctcaatcctgccctcgggggctcgggtcggctaaaatcgccaaaaggggcccagaaccgagccgtgccccggggcgtggtgaactccgggggggaatcggcaaaaacccacaatcgggtcacccataaccctcggtcaccacgctcccggcctggccagtctcgacacgtggatctcccaggcactagccccgacccgcgccttttgaggactgggacctgggcatgagcccttaatcaagtgaagacataaaaggaccacggcacagatcatcctcatctcatac

SEQ ID NO: 13260 - DNA, 732 bp, Oryza sativa
ttcagcaactgctccaccaaaacaaacatcaatgcgggccaagattttttgtttgctaattgaagtatttcctggtgaagcgacttgtgtgaccattccaagagaaagaccatgtggaagtacagttgcttggtgtatgggatgagcaccctgagtgtggagtgcaacaatagcatgcccactttcatggtatgcgataagctaagaaaaaaaaataattagtgaaatggaattcacattctgttccaaagattggtaggtcaatgtatctgtttgagctagtagaattgtttgcttgctctaaaggaaaaggttagaggacatgcctttctggattcactcgatagtaacaatggcctcttgtgatttcccatgatgtgacatttggcaaactccttatgtgcggtgtcctgtccttcagcaccttctattgcagccttaattgctgcaatgatcacgagatttgctaaacggagtgaaataaagcacaggtagaatattggtgataacatcataaccatttgcagtacctttgaaaggttacaacattaatgtatctgtcaaaaatggaaattctgtggaacaactatactcaaataaaggctataactatgtaggaataacaaaagggaacaaataggaaaacatgactgatgaaaaaagttgttcggtctctataaaatctctgaagtcatcacttgattggttcatgcttccaaaaggggatgctat

SEQ ID NO: 13261 - DNA, 3790 bp, Oryza sativa
agtagtcaagctagttaaaattgaacttaattaagacacatgctcatcatatatctttgtggtcagactaattaccatttcatccactcaactagccttttgcttgccatcatagtaccctagctagatccaagagataaagatttttgcggtaccaaattttatattgatgtacatcgctctgatctcaactttcaaattaaccctcctatatatcggtaaactactacaaatctagccatccatgcccccacatctatgacgagtgaaagatccccatctcgaatgactacatctttaacgggtgataaagtggctatagcattctgacaccacccctcgcagatgaccgttaccacactgtgagttcttcactcgatcgacacatataatgcattatgaccaatgacatggcattcgatagagatgagagttacgatccatcacaaatgaattgttctattgcagtagtatcggcaaaaactgcttatttttttacaccccttaatcttcaacaaaggaggaggttatatccttcccaactaactgggacgatccttgaatattgttgcaacattcatggcttctctctcgactggccaacagacggtcaggtctactacttgctgcacaatatgacaagctgcgtgtcggtcttgccatgtacagtagcacagtacaacaacagtacagtaccttctagagactggactactgcgactacctgatagcatgcatgcatgtcataaaattaatctccatgatacgaacttaattagctcatcatggagcctcagttcttagctagagtgtgcatgccgcccgaacgcagtacgtacgtctgtgtagcacatcacaacaatacattagtgacctagataggctagctagcaatgcaatgctggtattgtcgttgcagcatcatatcatctcctaattgaagacgtacgtacgtacgggattgtgttggtttcattcgtcatctgctaccagctgcagatttcatcaagacaatgcagttcagagagatcacaggggccagtcaaggcttgggtaaggccaccaccaggctggtctaagctgaatgttgatggctccttcagtaatagcagcggccaagcaggcatagggatgatcctcaggaattcagaaggataatccatatttacagctcgtcaggttatagcaaattgtgttgatgcgttggaatcggaactaatggcctgtaaagctggactggctttggctttacattggtctatacttccaatcgtccttgagtctgacagcatcttggctgtatccgtgattaatggagaaactgaggacaaatcaaggtttgcttacttgatacgagagctgcgtttcgctccagagaggagaaagggaagttaaaattcagaaagtgcatcgagatcacaataaaattagccttgaacttgcaaatagtgctcgattagcaaataggtcagatttctggtttggccatgagagcaactgtttctctgcacttattctggaggagtgtaatcactctcatattgattaatgaattcccttttccccgccaaaaaaaaaaacgatcacagctcgatctccctcccttctccgtccaatgctccgtaatacttcctctgttttaaaagaaaagtctaatattaagaaattcagaattgtatttttttttttacagagggagtacatatgttcccacctcttatgattttactatttgaaattatgtatcatgctctcattactgcgctaatgcatgagtggtgccgatcagctcctccgttgatagcacgttttgaatgagacaacagctatataaggattttatctagaggagtttctgacagttgcagtattttttaatcaaaagttctttaaaatagttagtttttcgttcagatcttaggaaactatagtcatataatttaaaaattaaactttaaattactttctcattagctatttcttataatataaaaccaataaataagccctaattatatgttgtctaactagcgccgccagctggaccacggatgaatcatcattcatcagtggactggacgatggatgaggcggcatcctatcgcccacacatgttttcaatatgtttgccccaagacaagctgcaaccccagcaaggaattgaattgcgtcttgatgccgtgttaattaattgttaatgcagatggggatgtggcgtcgccgctgctccctccattccataatttttgggtgttttaaataaagttaaagtattttttataactttaattattaataattttaaaaataataaaagtaaaggcaatagcacacatagatatgtcttagaaagttttataataaaaatatatttaattattatatatattataatagaaaaacatagtcaaacatggatatatttcagagactatgtcattgtgcaaaatatcaaaaattatgaaattgaatgaagtatttattactatcgtgttctatcataagtgcgtgagagatagactcaaagagacacgcatccatctgtatgccataaagatgttcgtatgcatgcagccaccggtgtacagggttacctaataaaaaagaggctcacgaggcgctatcttcggtttctatggaatgtctattaacttattaaaggaatagaaaaagaagcctccgcgttcgctttcatagtctagaaattctcacattaatcggagaaaaaaaatgagtccatatagaaatacaattttaaaatagctaaaatttggaattgaaaataaggaatataggaagagaagactagaatccatatcaatatacaatagaactaatggaaattcgaaattaaaaaaataataaaattaaaagtatatgttagagtccatacagaaatacaatttagaaataaagaaaattcgaaattaaaaaaaaggagtattgaaagaagaatacagagtccatatagaaatacaatttaaaaataactgaaattcagaattataaaaaaataaatattgaaagataagtttagagtcgatatagaaatacaatttagaaataatagaaattaggaattacaataaggaatattggaagaagagtacagagtcaatataggaatttagaagtaattaaaatttggaaaaaaataataagtagagtttagagaacacattgaaataccatttacaaataactaaaattagaaatttaaaaaggaacattggaacaatagtctgtataggaattcaatttagaagtaattgaaattccaaatttaaataacactgaaagatgagtttagagtccatatagaaacacaattagaaatatcaaaattcaaaattttaaaaaaagcaacattagaagaagagtttagagtccatataaaatacaatttataaataacagaaatttggaattgaaaaataagaaatattggtaaaggagtctagagatcatataggagtataatttagaaattttgaatttcaaataagaaatatagggataaaatttataaattatagaaattcataattaaaaaaataaaaaatgttggaagagaagtcaaaagtccatatagaaatgtaaattagaaataacaaaaaattgatattaaaaataattaataactatcatgtatatacaacacaatatgaagtttggttaagttagtgaaaaatttaaattatgttgctattttaagatattttaataataaaataagaaaaaatatatcgtattatatgagagaaaacatcaggatgctagccgtgcaatt

SEQ ID NO: 13262 - DNA, 1393 bp, Oryza sativa
  unsure (1)..(1393): unsure at all n locations
tgaaatgaaagaaagggctccggtgtatagagagggcctcgccgtttaaaagggacccatagaaccgatggaacccactattttttagtattgtgcgaaataactaaaggaagtagaagagaaaattgtggttgggaaggttatagtagcaaaagccattggaactaatattttatatatgggaataattcgttttgttattaatgggaaaaaggatggctaaaagaagagaaatcattagttattcattaaggttaatttgattcaatgaccagagttccgtgaggatatatagctcggagacgacgggcaaaaatgcgttcatttgcctcaaactttagaggggctcatttaagacttaatcgaatgattactcaacaggtaagaagagcgtttgtttcctctcatcgagatagagtcaggcaaaagagggattttcggcgtttgtggatcagtcagataaacgcagcaacgcggatacataaagtattcgataattatagtaaattaatacgcaatctttacaagaaagaattgattcttaatcgtaaaatccttgcacaagtagctgtattaaatccaaataatctttacncgatttccaataaaataaagattatcaattaaagggataaaaaagtaatatacaggaataattaaaaaagaattcccggagaggtaactccgggaagatacaataaattaagatttattggtaggaatcaacgagcatgttgcaataaataaaaaaactattttttcttccccattgttctttcttataacaaacccaagaatctaaattggattactttctttatatatagtctggccctttcgaataaaacatcaacaatcggaacttaagttccgattggtgtttcttaaagtctggttggagtttcttaagtttcgattggaattgaacttttgtgttaatggaggaatatgtctattttttctgggtctaggacctgtaattattgaaattgactgggcttgaaattgtttctcattctcatagttacgaaatggtaagaaagataaaatacgagcctgttttatagcaagagtaattaatcgttgttgtttcaaggttaatctatttattcgtctcgataatatttttccttgttcactaataaatcgattaattaaactcatgtttctataatcaattcgatcccccgggccaatccgaggatgcctacgaaaaggttgtttgggtttgcgaaaaggttgtttgaatttacgaaaagtttgcttggatttacgaaaagtttgcttggatttatgaaaagtttgtttggatttatgaaagggttgtttagatgtatacatgatttattccttattttaaaattgaaaaaaaaatgatttgtttattttatta

SEQ ID NO: 13263 - DNA, 910 bp, Oryza sativa
ttttccagttagtccataaggatcagacacccatatcccagggccatacaaacccgttacatgaaatgcgccaaagccaaagcaagccacccctgcaagaaataaatgaattccaaagatcttgggcaaatccaaagaaggttttcccgtccgctcatcacagaatatttcgaggtcccaatatacccaatgccagatagctgccaagaaacacaagccagaaaacacaatatgcgcccctgccacgccttcataactccaaatacccggattcgttacagttcctcctgaaatactccaaccaccccacgaattggttattcctaaacgagtcatgaaaggaatgacgaacataccttgtctccacattggatccagaacaggatcagagggatcaaaaactgctaattcgtataaagccatcgagccagcccaaccagaaactagagctgtgtgcattatatgcaccgaaagcaatcgacccggatcattcaatacgacagtatgaacacgataccaaggcaaacccatggaaatactcctttagcaaagaaaaatagacacgatgtcactttattttatcgcattggcaaagactatccatatcctatgtacctaacccttctaggggattctgtgtcagaaagcgtgaatatttatttcattccattaaaaataagaagccaattctgttcgtaagaagaaagagaagcagatctattctatactcgataagtgccaatatgcaatgggcagcttggcttatttggaaaaaacgaagaatagatccctatctctttttgattagtattcgaatcacccattcttttttctttattcaatctgtcttatactacttatatgaataatctttcaatctatgtattatttcaatctacgtattaataga

SEQ ID NO: 13264 - DNA, 677 bp, Oryza sativa
ggcttcggaatagtagaataattcggaatagggctcaagatctttgggaaaatctaagttaatgatcaacaagtttggataaagaatttaggaaagatattcttatactggcacaatacaaagagaagtagatgcgaaagctatcccttcggatccaacctttcccttaaagaatttaattggttagcataatataatatctaataaatggaaaatcaaatagtagataatctgttatgaaagagagaaaacattctttgaagaatcaagattggtaatcaacccttggctttgttactaactttcttgaccaaaactgcaagcgtgaacttggccagttcttaggtttccgaaatagtgtaatggaaaaagagtgcttcgaatcgactttgattggggttcgaaaaaggaataaaaaaaaagtaaattcaggaaagatttcctttttttaggagaccctcaaggggtcgtggaatgcttttcttctcctcttattccatatggaatacaatcaattaaaataagaaggataggggaatattcgactgttcgctccaaaaagaaggttaaatcatcctattgaaaaagaccaaaatagaaagaactttttcaaattcaattctttatttttcactggggttagctgatctagttcttaatattttacttactcaatt

SEQ ID NO: 13265 - DNA, 603 bp, Oryza sativa
catcatatcatgatcgatacagaaatcgatcgagtcatctgttcctttacccaagaaaaagtatttctattttccatgtccaatcacagatcccggaatttctacaataaattagataggtagctaagctaatctagttccctatacacgaatctgttgcattctactgcaacagttgtactggaatgatgaataccttgagcaggtagaaatagaaaaaaagaattttgctaaaatggaaaaaggctttctttctaaaagaaaaaggatgctaattttgattaatatcaggagatcaaatgagtttatgcttcactaattgaatgataaatgactacaagcgaaggagataggcggtttaaacaaaaaaagacccaaaatttcaaacatgtatctagaatcacacaggaaaactacaaacaaaaatagtgaaaattagctcgtaggaacccatcagatcgttatagacccaacgaattagtagttcccaaccgcgggtggagtgaaatccaacaaaaaaatcagtaactaaaagaataaaaaaaagcttttactgagtcatttaagttatagaagattcctgaacccaaggattcaaaataa

SEQ ID NO: 13266 - DNA, 28742 bp, Oryza sativa
ctttttcagttgaaatcatttagtatttgaaaatattgtttgaagttttgaaattcaaatttttaattgataaaacaaattcacaagaaaaaatggccaaaataatagcagtaagaacataagaacatcatagagcatgattttagaaattttttggaaaaataatcgtccaatttggagttcatatgagtgagatacactagtttcaaaattttcaaaagtttcaaaattatttttgcatacggctgcttaagatgtccgtatgggaaaatggccctcgatttttgcagacgccactagttacggtccgcatggaaaaatgatggggcctcgtacagaaaaatcacttttgcagtagtgagtgaaaacggtccgaaacaatcagaaagcagcctcaaccatttccataaccatattttcttggaaacaaaatcgaaaacagtaaaatcagaaatgaaaatgatatcggaaatatcggaaaaccaaatacggaataatacggatgaaaagatatcggtacgtatcagaaaccagtaacaaaataaaaaacactaaactataaaacatatatttaactttgcataagtatgtaatacctataaataaattcaagcttagactatataaattataaattaactcattttagccatgcactcaagttagaaatttgattaaaaaagagtcgatcaatctttaaaccgtggttcaaatagagaacactataaatatcgacatatttaaaagaaaaacatatgaattatcctcctgaactatcgtggtcgaccgaattaccccatgaaccacaaaacctaacattttacaccctacactatttataccggacgaataaccccttgtcactgctttgagaggttttgatcaaaagcttacacacgtgatgtcaacgtggcaatccagccagcaaaaacaacaataatgaatttgtagggcccacttgtcatatcttttctccactctctctctctccctcttccctctctctccctctctcttcaacggttggatggaggcaacgacaacgacgactggctggaggaggcggggttcaagatgagggcggtggctggccggggacaaggctgggaatggagaaggtggccggtggtagagacgttctgggtggtggcggaggatttccggagtggtagctcgttcggtgttctgcagcaggaccacgagcgacagtgtgggtgcctggcggcggcaggaccctggggcggtggtggtgggacagtggggcgacgacgcgggtgcttgggggaggatgagctcgtgatgtccatcttcccgctaacattctccacctacgcgtatgccgtgggcgccgagcttgccgcgctcttcccaacaaatccggctacatcatagcgcctcgagcggaaagaggtggcggcggcagaagagggattgatccaacttgctcggcgacaaggagggagaggagagggagggagtggccgagcgtcctccagcggtggcgttgttgtggcggtcgagcgtctggtttgcagaggcgacaccgttgcaacagccgagcatctctagctacagcctgtagacaaaggaaaaaggagagagcagcttatatgtgggcccactagctacataagagagggaggatgaggtggaggctgacatgtggggccggtgccatgtgtgcggtcacgtaggactaaaaccgctccagattgagccagggggttattcttccggtataaatagttcagggtgtaaaatgtctggttttacggtttaaggggataattcggtcgaccgtgatagttcaggggtaatttgtatcttttccatttaaaaatacggtaattaccatattataagaaggtaatttccataaaaatacgataaatacggaaatgattggtataaagcaaaatcacttccgtttcaatttctatacttttactatcttcattttcatttttagttgattaccattttcacatagctcaacggaaaacgagcaccggctggtcgggaatttctaatactgttctcattcgttccctagggttcccaactcccaaccctcgttttccgcgcgcgcgttttttaaactactaaacggtgtgtttttttaaaaaagtttatacacgaaagttgctttaaaaaattatattaatccatctttttaaaaaatagctaattcttaattaatcacgcgtaatgcgaacatagttttacgtgccaggctcccgaacacagccaagtcgtcacaggcgggactccatcgaatcctcggtccggcagcggcaggtcggtctgctcccccctctcgctctcgcacctctcgcatttgcgtatcgcacgacggcaacgagatatttgcgtggacgtcatccgcgaacccggtggtggccggtggttgcgtccgcgacggatggatggggaaggcttgattccgcgagaaggacgggcagcggacgcggccggcgcggggcttaaaaacgggggcgacccaaccagccaaccaaccaacaaaccaaccaaccggccatcgccccaactagacggaacgaatgaaccgcctctcttcgtcatctcttcatcttcatgtcatacgcctcgatcgatcgcgaccgcgtccccgcgctaattccacgtgtggtcgccgctatatcatcgtcatctctctagcttaatttgtcatcgcaaatgccgtacccgaacaggacgttgctcatgatcataatgatgatgatgaccaattaatagtaatacaaaaccaatggctgcatgtatagctgatttgtacctaaacaaacaccgtgccttatcgagatctcgtttttatatcttctaatcattagatgcatgtctgcgtaaatccttgtgattgttgcatggctatagatagtactcctatttggcattgccagggtaattacgggtagtataagtatactccctcgggtacaaaaattattgacgtttaaaccttgtaagcagtaattgctaattattaaaccttgtaaggagtatattggaccgctttaccctgcatgcatgcaattaaaaatcgagtaaaacagctaaggaattggacctttagctcgcaccgatacaggtgattggttcaaaccaacgaggtagcagcaggtgtagtgattatcgttagcacaagatcatatttaatatggacaaaatagtaagttgacaccctaaatcaccttttggtatgtgagatcaggtcagaaacgttaacaattttggaaccggagggagtaactacctatttatacggatttaacagaaaaactatctaacggcatcccgtagagatgggatagtagtgctgccttatctcatcttcccctctctctgtgtcgctttccctccactcgctctctctctctctctcttccccttcactcgatctctctctctctctgtgactgccacccatgagcacggaggcggcgacagcgacgacggcggtggcaacgacagcgacgacgacgacgatgccgtcaccaccaacccccgcggacgacctggacgacagccggcggggctcccgaccaccacgggcgacggcagccgagaagcctccccatcaagctcctcaagcggctcctcctcttcgtcgttcttgtcgttggcttcctcgccgctgccgccctcctcctcctcggcggcactggcgcctcctacggtcggggagcgggggacgcggccaccggggacgagcgcttggcacaacataagcgacgaggagctgctctaggcggcgtcgatggagccacgggttcggcggtttggagcgaggcacgatgacaagtgacagaatggcacaaggtaggcaccagatctatcgcctcctcttcctcttcctccgtcgccgccccgctgctcgacctccccgacccgcgactcctcctcctcctcctctctcttgggatatcacgctgatacccaggtaccaaggcctgatacctaggtaccaaggcctgatacctaggtatcagctcgatacctaggtaccaaggcctgatacctaggtatcagctcgatacctaggtatcagctcgatacccagggtaccaggtatcagtcgatatccaggtaccaaggcctgatacctaggtatcagctcgatacccagtgtaccaggtatcagtcgatacccaggtaccaggtattagtcgataccggggtaccagctgataccagtatactaggtaccacctcagtaccttacccaaggtaccagggaggattggataaggtggaatcgcaggatagcgtgggcttccccacgaaattgacggtgcgtattaaatctctcgggatttttagttatcccgtgactgctaggagcaacggaatcccgtggggtagcagccctctggatttaaagggattgtttggatggtgaccatactttgccacaactttggcaagctactttgactaatttagcctagtgtttgcttgattgccacatctttgtcatgccacactttttgattttgtgaccccacttgtcataggcacatacctttgccaacatttgcctaacttgtggccaaaaatttcttagccacataaattgtggcatgccacatcttagctatagaactttgataaactgaagcaagtatccaaacagccccttacacagagccgcaagtacacaggaaaggcagcatcaacccgcaacacagagccggcagatttaacaagctagaaacggggtcgacgagctgtcgagggcgtgacttaaattgggcgccggtgcgcgtgcttttcagcgttaactgctgctcttctcgcctgaaccagctgccgctccttcgctgtcgcaccttcatcaccttgctctgctagcacttaataccactatactagtatcaaatagatatcgtgctatatactcgctccattctcgtaaaggatattattttggacagcgacacagtctttaaaatacaactttaatttcttgtttctataaaaatatttattgaaaagtgatatatgtatacttttatgaaagtatttttaagataaatctattcatataatttttacatttgcaaactcaacaacttgagagttattcataatttatattcctaagatttgacttaaacattgttctaaacaatttactttacgagtatggagagagtattatatatgcgtgcaatcaagtcttaaaagccttaaatgattaattagttaaaagaagatattgcagtctgaactgagaaaatgatactagtagatttgtcgtgaaaagcacatttatatggttgtattttaatatcttttataaagatatagttagaaaaggtagcagttattgacactatgtcaatgttttaagtgacgagtaaaaactaaaaagtaaccaagttagttatagctatggctatggctatgtttagatctaggggtgaaaagttttggcgtgtcacatcggatatacggacacacatttgaagtattaaacatatactaatagcaaaacaaattatagaatccgcatgtacactgtgagacgaattaattaagcctaattagtccgtcattagcaaatgtttactatagcaccacgttgtcaaatcatggagcaattaggtttaaaagattcgtctcgcaaattagtcgcaatctatgcaatcagttattttttagcctatatttaatactttatgcagatgttcaaacgttcaatgtgacagggtgaaaaattttgggtgggatctaaacaggccctatgtcaagttaggccctgtttagttctcacacaaaaatttaccccctatcacatcgaacgtttgaacacaaaaaaaactaattgcacagattgtgactaatttgcgagacgaattttttaagtctaattgctccatgatgtgacaacgtggtgttacagtaaacatttactagtgacaaattaattaggcttaataaattcgtctcgcggtttactggcgaattatgtaattagttttttttattagtatccgaacacaccatacgataccctatgtaataattgatgtgacacatcaaaactttacaccctgacccaagatcccctatactttctgcttgtcatctaggctggttgccactcacacacacacagccactgaggagcactttagaaggttcgttgtgaatcccttttgattattccgtacataacgcatggaaaagaattggagtaggggcagtctttagttcacttcaaactttaaaaaaattcatcatattaaatgtttgaacacatgtatgaaacattaaatggacaaaaaaaaccaattacatagcttatatgtaaattgcaagactaatttttgagcctaattacaccatgatttaataatgtaattctacaataaatatttgctatgacggattaattaggcttaataaatttgtctcgcagtttacatgtgaaatctataatttgttttgctattaatctatgtttaatacttcaaatatgtgtccgtatacttaaaaaagttttggcacccgaactaaacccgccctagtactagaagaatagtgttatggttctagtgcattcaacccttctcttttcttgacatgttagctgaaatgatgtatcagtgctagctaccaatacatatatttggtcaatacatactacgcccttattagttcctaacatttttttcaaaatttcaattttttcattacatctaaacttttctacacatataaacttttaattttaatcaaacttttaattttagcgtggaagtaaacacactcgtagtaacactcgtagtatttggagagtcagaaagttggagacgctttgcatagtttgacagctgctctcttttgaccagctcaacgggtcatcagaactaggcaaattcttttgttttttcggttgtaatggcatgcacaatgtatcttacctaactagtaaataagatgggccccatgactaggaggtagtaagctgcaactcttctcacaatgcttatatgagtgtagtggtaaacaaggtggggtccacctgaaaaaatctatccatcccaaccctccattacctgaatcctatcagaatcttcatattttatttggttgttgccggcaatagcgcaaataccaggtagtaactactatctcttcccacaatgcttactactggatactggatagtaggcttaaaataaatgcttgttacctgattttttgttacattgtggttgctcttaagtcgtaggaagattctaaacgaatgttgcattctagaacaagagagaattctctctgaaaagtagtagagaaaagtggtactactatggaatttctcccaagaaaagcccatgttggaattcccaatctgaagctccgtttcttcctggaagcacagttgtctacacagttctccgaatagagcggttgttccggttttgccaaaaaaaaacgttgtttaaaccgttgactagcagtgtaatcggacgaaaatctattaacttattaaagaaatagaaaaataagcctccacgttcgctctcaaagcctagaaattctcacattaatcggagaaaaagaaaagcagagtccatatagaaatacaatttagaaatagttaaaattcagaaataaaaaataaggaatattggaagaggagactagagtatatgccgggatataatttagagcttatggaaattcggaattaaaaaaatattgaaagaagattatagagtcataatttagaaataactaaatttcagaattagaaaaataaaaaattaactgaagttcagaactagaaaaataattaatattgagaagaatagtatagagtccatatagaaattcattaggatataatataaattcggaattaaaaaataaagaatattagaagaagagactagagtccctataggaatgtagaattaagctaaaattcgaaataaaaataataaaattaaaagtagagtttagagtccatatagaaatacaatttacaaataactaaaatttgaaattaaaaaaataatattggaagaagaaccaagagtctatataaaaatacaatttacagaaaatgaaaattcgaaattaaaaaataagaaatattgaaagatgaatctagagcccatataggaatacaatttagaaataactaaaatttaatattaaaaataattaataactataacgtatatacaatacagtatgaatattacacattggtatttgctaaagtaaatacaaaatttagaattatgttgtcattttaatatattttaataataaattaagaaaatatatatgctattatatgagaaaatataatgatgctagccgtacaatatgcgatgaccaccatgctagtttatataataatttgattttttttaaataaaattgattagaaaccgtgcgaaccgaggagtttgtgttttcaagcttggttcacgaaaaccagctggtttctatctgttttgtaaaccataactacaaaaaggcaacgtgtgaaagagttaactaggtagcataattttgagtcgatgtgaaacgagtgagtgccttctggctggctcacagctgcataagggcacgaccaatgcaagctacaccatctgagttttcttgaaaaaaaagaggactctacgtcgaagaaatcattaaaaagtcatatatttcacagtgcatgatacacttgatttcttactaggactggtatggatttttttttgacaactatctgacagtgaggttctgtcaaccacgtcggtctaaactgagcaccgagcaaccatgtagagacacgacagagtgcgacgtggacaaaatcttttacgcggcacctcgaatgcacacgccatgtcactgctctgtgaaaggcctaacagtatagcataattctgaacagtagtagtactgcatttgggcaactgtcaacagggtagtagtatcactcgcagcaacaggagagtgagtgagagtgcaactgggacgaaagggatgtccaacgagaccacttcaattcccccaaccagatcaccgtcgtcagagactcagagcttaccaaagtcttcggagaaacgaaaatcaaagagctttccgggcttctgcttcacaactttgccgtctacttaaatgggtacttggcatccacttaccagttaaccacttcctactttgcagtacgtgtacgtcatcgccgacgccttcaagttttgccgtttggtacatcatagcacagaacgatcgagatggtgcgcggtgcttaattgggctcttgggttctgtaatactgtgattagattgtaactgttccttccattttataaatcgctttgtatcttatattaaattaaatttattttaaatttaattgagtttataaaagaatataataatatctgccgtatcaaattaattagttttattaaatttaacattaaatacattatggtcgctgtttgttctatcttaaaaatattgctatattatttaaaatttgatcaaacttagaaaaaaaattttagaagagaagatctagaaaatatcattgataagcgcctagttccaagaaatattatcgataagtgcgagtttcataaaatatcattgtacatgtgactttgtcccaaaagaccattcctgataggatttcgttaacaaccctccgttaagtgctacatgatgaatagtatatttaacgtgacggtatagatgaactctgacaacgacgatatttttatgacaaaattgcttgtacgatggtatttaatgggattcacgctagtcgatgatatttttcggacttgatcgtttgtcaatgtcattctttagattttctctcaaaaaattaaagccttataatataaaataaagaaaatagtactaaatgcggttgaatttggtaacgtttcctggaatcgcactttctttcattttgaaaggtttgtagacttttctttcgactttgacgggtttaaaagaacagtagtgtactttagagtgctggagaagttgatagaaattattgcatatttaaattacgttatcacataaaattcacgatgatgaaaaaaaaagaaagaaaaaacaatttgattcatggattcttggaattaaaatatagttttacgaagtgaattagctcaactgtttaggttgtttgtgttaaaatatagtttgaattacgaagtgaattagctcaactggtgagtacgcacgtgttataagcatctacgtttctatattgtgtttctctaagaaaagtcaaaaccgctactaagagtctattatgtaaattgcaccttccattcatatcgaaacctacaaccacgcttagcttctgaagatctcatactccaagagcagatagcgagatcttttttttaaaaaagttcacataagacctgaatatccaaatcaaaacatcacaggtattcaaacaactgaaaaaaaaaagctacgggctcagttcaaccctccagatgttttatgaaaaaaagtgtgtttcatcaactttcaaaggaggaaaataaattcataggtgatagaggtttactaaacaagctgtcactttttttatagtactggctgaagataaaagattaagtaccgacaaagctattaacgtgtgattagtgattttttttattttttttggacttttttaattttttaataggccttttcaaaaaatatagaaccttttggccacaccagccgagtaacttgtgtagcagctttgttttgtcacgccaaccatgatgacgtgacaatagactggtgtggcatgacaacactgatatgccagctgcacatggcgtgataaagtgaattggtcagacggatggcgtggccaaaaggttcagatttagaaatacttttcggaaagttatattaataaaactaaaaaatatctaaaagtataaaattaaaaaaaatcatgattagttaggtgtaaattattctatacttaaaaatagttttatctaatattttaaatcaacttatagaaaattttcttacgaaatatactacttaacaattaaaaaacatgctcacgaaaatcgagataaaatctactatatcttaaaatgaattgactagtaaaagttgagatatcacttaacactatgaatctggacactaaacacaatctaaactcgaccttaggttcataggctgtatttagttcacgctaaaattgaaaatttggttgaaattgaaatgatgtgacggaaaagttggaagtttatgtgtgtaagaaagttttaatgtgatggaaaagtaggaagtttgaagaaaaactttggaacaaaacacggctatagttttaggtgatctcttatcttttattgttactatctctgttctataatatagatttaggactataaaatattactctgatttcaaattagaactactatatatcatgggacgaaagaaatacattttaagacggggatattatttagaactggcctatttccacgtttctcctcgtgccccgcactacagacctacagtatagtttattctttctatatgtctcatcaaagatgtcctttttcacggtccatcccagccgtcggatccccaggcggtggcaggggcaggacggtcattgcacaccccccggcgccacgcagagaagaaaaagcctcggtttttaaggtcgccgtggccagcagcggctgcgatgcgatgcgagcctgtgttgacagcggagaaagcagtgtaatccggtcccgccaccgcagccgcctccacctctcttcccggcgccaatggccgcgtcgtgaagcgcagcagcagcagcagcagcggagacagcggcagaagctttgcctaaggtcggtttgcctccccgcctccgccgcattccggttggagttttgtccgtgttcgtcggcggtttcttggctggccggatgaattgttgtggggagggggagggggaggggctctctcacgcactcgctgctggatttcggttaggtttcgcggctgggggaatcgcgggggaattcaggatctttgttttgttagttcttctttcgggcggggttggatctcgagtaatctgcgtcgtgttatttgccgcgagatttgggtgttttttttcttctctccgcatcttctctctcgttccttcgtctgtacggtctagtggtggtctacgggctacggccgtggtaaaagtttctctagatttttggtctcgtttttttctttattttaggcggcttgctttgcttcgcctgctttgacgtttgaccagcggtttatcctcgattattcttcctcgtgagtcgtgagcaagctatgatttgcagctaatgatttttgtgcttggattagataaaagatgcttctcactcttcgtttgtttccattttctggaatttgtgatttcctggtgatgataatgttgtgctcgtgttgattcaggttgggatcctccctattcgcgcgcgtctttgatttggcgcgtaaagttgtaatccgtactccggatggccggctcaatcgccgcctcggcgttcttgccggggtcgccggcggccgcgccgcccaagagcgtcctgggcgagcgcccggacagcctggacgtccgcggcatcgccgcgaagccgggctcctcgtcgtcggccgccgccctgagggccggcaagacgcgcacccacgccgccatccccaaggtgaacggcggcagttcggcgctggcggatccggagcacgacacgatgtcctcctcctcctcctccgcggcgccgaggacgttctacaaccagctccccgactggagcatgctcctcgcagccatcacgaccatcttcttggccgcggagaagcagtggacgctgctggactggaagccgaagcggcccgacatgctcaccgacacgttcggtttcggcaggatgatacatgaggggctcatgttcaggcagaacttctcgattaggtcctatgagatcggggccgataggacggcgtctatagaaacgctgatgaaccatttgcaggtgaaatattgtgaattttcaggcgtcggattgctcgggctgggcatcagaacattgaaatgtttttggttttgatgcaggaaaccgcactgaatcatgtgaagagcgctgggctgctaggagatggttttggctcaacgccagagatgagtaaacgagacttgttctgggttgtcagccaaatgcaggcaatcgttgagcgttatccgtgctggtataatactataatttcacatatcagcatgttcttggttttgttttcttacatagtttgagctccaaatagggtgttgcttttctgctttcgtgttacatgacaattaggaggcacatagatgtatggttggctgtcacagtacgttactgtagttatagtagctatcatcttgcttcacagcagtcatggaataacaggtttaggtaaatggagttttcaagttgtttggcaatgaatatgaaaaagattttcccaagtgtttgtatcaattttaaatggatgagcaactcccatctcttaactgtttttgctatcggcattaaatatttgtgcaactggtagactttcagtaaacgatgatgatgcagaagcctcctgtgctcttaatattattgatcatgtatcatattttctgtgagatgttataattgttcgtgtttgttacctgaaagtgccatgttgccaataattaacttcttatctgtgtgcaggggtgatactgtcgaagtagatacatgggttggtgctcatggtaaaaatggaatgcgcagagactggcatatacgtgattctgtaacaggccatacaatattgaaggctacaaggtttgaattattgtcactctcataaatactgatgatcatgaaaactgtattagcatctgctattcaacttcctacccatcttattaccactgtttgcatatgaagtctagaagttctgtttcttctgaacatattataagctgccttacagcaacatgaagctacctatttgtcctaattgtttgctcaatgtgcagtaaatgggttatgatgcacaagcttacaaggaggctagcaagaattcctgatgaagtacgtactgaaatagagccatacttttttgagcatgcttctattgtagatgaagacaaccagaaacttccaaaactgccagatattgaaggtgctaatgtagccaaatatgtccggacaggcctgactgtaagttttgtggaattatacaagattacagtttacaagtatacaaaatgtgcatgtttttctttcattttttacatcttcttctgtctcataatgcagccacgatgggccgaccttgatatcaatcagcatgttaataacgttaaatacatagggtggatcctagaggtaaaaaaagttcccctattatgttcatctttattgcccttgctaacacctcttgcctagatgattcttgagggaaaaaaatgcttcttgaagttcagtatgttactttcagaaaaaatatccatttgtttttatttactgtaaacactccatggagttgctgttaggcatctttgtcgcggtattcattattaagttgtcacatggtggagcataactttgtgttgctttacttgcctttttctctttgggcatacatttagtactattgatggtgctacataattcaaagagattcatttatctcgctatatttcccatatgttatgttccaagaatttgggaataaacagtaatcagaagagtactggatttgtaggtactttattttttgtgtgtgtgtgtgggggggggggggggctcagatcatgcctatgattaggcattactgtaggagtttagataaacttggtcaaggtcccaaaagggtgtgcctatggttctacaagtgtccacctaactttatcctcaagcacgcaaccacttatctggcagctttgtactctttcaagctatacgaaaaatatctgttgcactagttggagaagtaatgtatcctagcagattttactacattaggttggtcacctacgtacctaaccctgtacgcttgttgcttccgataaagagcttggctggaatacttatatgcaatttgatcacaagtcattcacttaattcaattttttttagagtgatcaacacctgcatataatgcatatttgcctggttgacaatctgccgtgtgtatgtgtgttttggaagaaggggaggggtagtcatgtatgtatttatccagtggaccacataatgaggaaaaagaaattgttcaggtgacctgcaacctagatgggcccaaaacaacccaaaatattagggaaattaacacttcaggcatttcctaacatacagaaatatttattaccaacatgcgcacatgttgcttaaccctacctttttgtccttttttcccctcagagcgcaccaatctccattctggagaaacatgagctggcaagtattgtcctggattacaagagggagtgtggccgagacagcgtgctgcaatcacacactaccgtgtacactgactgcaacaagcactctggacaaaccactttgcactgtgagcatttgctgagcctggaatcaggacctaccatcgtcaaggccaggaccatgtggaggccaaaaggaaccaggccccaagagagtatcattccgtcttcgtcgtgaagcgcgtaaaatctttcatgtgttgattttggtagcaacaacttggttaaaccaaggacaagtggacaacaacttgtgttctctatggaaaggcaaaacctggatgaacataacgacggggacgtaagttatttacagacaaaatgtatggatttggaggagttcaaaagaggggggggggggggggggcaagatggaggtaaaatgcagaaaagacagaaggcgtattgtgcatgatttgttgtttcagcttttccttctatttttcctttccttagcaaagatattcaattacacagatgggtgttgtaagtattgaaattgtagctactgctgtacaatgggaagtgaaatgcttctcatgcatgtttctgtctgggctatgtctatattatgagccctcgaaagcagattgcctggtccgaattgtttgaaattttaagtttatatattgtattgattgatatttattttgatttttgtaagtttcttctcttctcaattctcatgattgccaaaccgtgttgaaattttggatctgggtctggccttgtccaatcttgaaacaaactatattttgtcagcaactttgacttgcttaactgaagtagacagattgacgtaagcaatgacagattcacagatccagtttgtattttaaataacttcatcctgagatcttcccacatggtcatgttactgctttttttaaatcctgctttaaaaaaataattgggcaactgaaaccacactggaaaaatggaagcctcggatgcttggcatgttaggaaactaaagcgaaaaaatgattccgtcaattaggttattattacgattcaacatactcctactcaggggtattaaaactactgaatatactaccaacgtcagagatttagaggcaaattcagaagagtagcagaagaattcacgtctctgctaatggtccatgatatattactactttggaagaaatgaacagctaatagaaaaatgtcaacccatgagtgattagtttcttgcttacaactacatggaacggtgttctttgtttggaatttagaggaatcatgcatgtcgttttcttccaagttcgtgcagaactcctggacaccggacagaagtataaaaactcaagttgattgcggaattcgcatgcgagtgtatggcattgagattgactcaaacataaggtgttacgttgatcaaatgctgaacttgtttattgtcaatgtgttgttgttggtcacttggttgttcgagttgggttacctaagttgatattgatgggggtcttaagcgaagattgtaaggaggaaagacggataagcaatgatttattctttcagaagtcttctgtgttctgctacgaggattgatagtagggtactgcattggtgaaggtttcttagtcaccaatcttttttttataaataaaaagataatgggtagaaatacagcctttatgttcataggtgaatatacgaaaccaaagattacatgaacatactgaattcagtttcagttgccgagttatgttttctatttcagagcttgttcttcttccgttgtgtcagtcagcaaatctggcactgttgcttctctgatcgttgtgtagttcagctctgtgttgccagtgttaacaaccaaatttggtaatatcggtatcggaaaagaagattagatcgaagtggagttgaaggcggagatcggttcgagaacaaagcaagaatcggctggagtccagatcggctacgattaggatcggctgggtctgagtcgtattaggtaagctgatgcagccgattccgacaatacgacttgatgtatgacatcgggttaaatcgaggtacttctagatgattgccgcacatggatagagtcctgagaaaacaattgtatctattaattaggatattttatgtaatttccttagagatatgtttgggcaaaagtctgccgcaaagacttatagtatcttagagtttgttagagataagagtcgtatccggtatggacatagtttgtaattttcgggtataaatagaccccgaaccccatttaatcagggaacacacatgttcaatacaatttcggcgcatcgccaccttttgcttttgttttatttcgacgagttcttgctttcgggttgagctgcattggtttcgatcttcaacaagaggtaaaacttgttatgatggtttgcgttctcgggattagtgcttccatcttcatgatactctaatcttgtttatgtaattcatcgagttatcatatatcttacataatctctagcaatatcgttatctaacctataatcggctaacatctgttagcagagggcagccggctaggttagattttgacgttggtttagtttatataagatatccaccaccctatgaaacctccagcggcttgattgtatagatattgttcttcttttcatacttaatgctgcatcagttgagtttgatctattaagtcgtgcttagaatatcaatctctagcctgccttctggttgccgattagagtagcatcggagtttcagccgatcttatctgatttaactatatttgctctatatgcttcattgatacgttaaatatgtcctttatgtcaagatattattgcatctaagtatattaagcttctgtttggtatattctgcttgttttaaaatcttgacacagagttgtatcggagtattagccgatacatgctagatctatctgatcagctatgttatgaacatatatagtcccattattaatatatatttcgatctaagtgatttatactgtctcggcatggcgaccgatctatcccaatcacttgatttaaatatatatcgatataagaattatatattgttaatatctttagccgatcgagtagatttagttctttattatctatttccaactgccgatcgatctacatatgacatcggctcagagataaatgatatgtcatcggcacttagccgatcggctatcatttatagatttaactgcggtttctttgtctatatttcttgttgattgcaggatcaaatcaactggcacgctaacacacccgaagacgagttttggacatgcactggagttaagcagatctcccagacattgtgttttacgtcaacagccagaaacactttgtatgatcttactagatgagtacccgcgggttactgcgggataattatgtgaggctagaaacaattgagataatatggttccataatagaagagagaattaacattaattatacttagtggagattaagtttacatatatatatatatatatattgtacgattttctttcatatgctttatatattttgtatattaatcaattattcaaagattataaatgattaggttgtatgttgtggtttatgagagaagagaggcaatttgcattcttggtgaaatcatccaaaggctaaaaacaattaagatgatgtgactttataaaagaagagagagttaacattacctatatttaatggagataaactttatagatatataggattacaagttaagcagttttatatttcttgcataaggaaacatatcctctaacttaaaagatacggacatataaccccgctacataaaagaaaagatcttcttcgcttgcacttaccatgcggcagacatccaccagtacattattagtactggatgtagtggtaacctctgaattcagagcggcgccaaaagaacctaaacagcatgactgtggaacattagtacattgatgattcatcattcagtattcataaacggatcagatcgtaacagcatgattgtggaagacattatgcctacgttgtactatttcaggaccgtccgcatcagttgcacagcacagataaaaggtatgaccttttcaaagcaaaaattggttcacaggtaggctcggcaggggaaaaactaatgatgttgggccacattttgtctactctcagctaggcttgggattagtccggttgactccctcgaatatgagtgtaatctgatttgtatccctcaactataatactagatatctagactccccaactataaaaactggtgcaactattaacttctaaaatagtattgagagtggtattcgctaatgtggcgttcacatgtcatcccagtcatcaaagaaaattaaaaataaagtaagacccacctgttatattcccatctctctccctttccttccttctctatcccacatactctcttaacgatgttttctccccatgtcaagggagctgggcggcggcgacaacccgatgtgtggtgcccccacgaggagcggcggcgtggaacggtctccggctcttcgccgacaccttccaccaacaataaggagcggtagcgtagagtgaggatggcggcacggagcggggacgaggagcgactgcgtggagtggtctccaccggcgccaaggagcagcagcgcggagtggggatgaggacggcgacacggagcagggacgaggacggcggcgtggagcagcaaagacgagagaagacgagtagtagcggtgtggatcagtctctgcctacgctttccaccgacgatgctgagcggggatgaggagcggtggcgtggagcgcgctccccatcttccctgatggccgatgccttccaccatgttgttccgtctccgccaccaaaattgtgccgtgaatgaggaggtgctcagggtggctgatccaagcctcgtcgaggcaccgcttgatgcggaaggcctgcgatcacatcaggttgcagccaccgtccaactcccttgccaccgttgtgcactcctcaatgttccatccccctgtcgtcgcccgcccgctcatggtggagaaaacattggggagatagtgtgtggggtagacaaggaaaggaaagggaaagaaaagggagcataacaggtgagtcccgctttattttaagtttttctttgatgactaggataatacgtggataccatgtcagcaaatactgctctctgtactgccctgggagtcaaattgcatcggttttaatagttggaggaggatcaagatatctggtattacggttggaaatacgaattagattacactcatatttaaaggagtcaaggtgaaattattgagctaggctttagcctaccacaagagcatcgtgctattgtatttgcagccctgcccctcactcgtgcacgtggtgttttattttttctttccctcgtttataaatctcgaagcaatgtataacggtccaacggtctaaattttgacaaattttctatagaatttcaattgacaaatatctagcaaaatacaatttcttttatttaccgataatgatgagtagtacacaatattagtaccaacaggatgcagagtagcattaagcatgctacagcgacacaacaatccgagacagaatccagatatagagattgtagatttggctatgatatcgtttgttagctcagaatcaagagatgttgatctaatagggaggaagtatttttttttaaaaaaaccagcttaagaggtgccttttttttgacaaattgaccctttacaaaaacttatttcaaaaataacccctaaaaaaaacttcaacaaaaaataggccgtcggctccgcgccaatgctcttggcgctgagcttatacacagcaactccaactggtctggcgctgacatcgtgccaccatggcggccgagccgatcccccagccgacgtggcagggacctcagcgccaaggcaattggcactgaggtggccaacgtcagcaccaagcgcattggcgctgacttttggaacttagcaatgtctctgatgggtgctctacctggcgctgagatttgaaatctcagcgtcattttgcttggcgctgagtttgcagacaacacagcaacctgccggctatctgcgccatatcaatagcccaggcaagttacaaaagcagcataggcacattttgtcataaattcaacatagtaagccatttcatcaaacatccatccattccatccatttcaacacacaagcatacattgcagcacaggaacacaactttcagaaaccatccatccattccagcagaagcaaacattgcagccattccatccatcaagtccacacatagaaaataaaagtcgtagtccataaacatccatgcactttgtgaaaactattgaggcaatctacctctcgtggaggctgttcaagtcattatataccagacagagatacaacaatagtacaactcaagaccgaatcgtatattactaacctatacagattctacatacacaaggaaaacacctatacagcatcgaaaacgaatcagttatgcagtaacgtaagcagcagcatctctattgtttaacactccccctcaatcataactttgcacaagttaagattgttcctgaaaatttgcaacttgcttagagattgtgccttagtgaaaccatctgctaattgatcaccagaagatataaaccggatatccaacaaccgttgcgcaacccgttctctaacaaaatgataatctacttcgatgtgtttagttctggcatgaaacacagggttagcagagagataagttgcaccaatattgtcacaccaaagtactgcagcctttggttgtgatactccaagttccttaagcaaggtttgaatccaaatgacttcagcagtagcattagctaatgccttgtactctgcttctgtgctagagcgggaaactgtagcttgttttcttgcactccatgatattaaattggaaccaaggaaaatagcaaaaccaccagttgaacgtctatcatctgaacatcctgcccaatctgcatctgagaacgcactaatagtagtggagtctgatcttccaatttttagaccaaatgtcaaagtgccactaacatatctcaaaactctctttaccgccgtccagtgcaaagttgttggtgagtgtaaatattgacatgccttattcaccgcaaaggctatgtcaggacgagttaacgttaaatattgtaacccaccaacaatactcctatactttgtaccatcttcttcactcaacagtactccacctaccgatgaaaacttttccgaaacagcaagtggagtacttaccggtttgcaattccttaacctagctctactgatcaactcagttgcatatttcctttgtgacagcaccaaacttccttcagatgacggcgttacttctatacccaagaagtaatgtaaattaccaagatccttaagtgcaaactcagcattaagatctttaagtaaagcaggaatagcttgatcacttgagctaaccacaatgatatcatccacgtagaccaagaagtatataaccacattacctttcctatagaaaaacaatgaagtgtctgccttggaagcactgaacccaagttggcatactttgtcatagagacgataataccatgctctaggagcctgtttcaaaccatataatgctttgtctaacttgcacacataatatgaagaagacttatcaacgtacccaggcggttgcttcatatatacttcctcttccaaaatgccatgaagaaacgcattcttgacatctagttgacgtatactccaacctttggagaccacaagagacagaacgagacgaatagtagagatcttaacaacaggactaaaagtatcctcgtaatcaatgccatacctctgcttaaatcctttcgccaccaaccgagctttataccgatcaattgtaccatcagattttcgcttgatcttaaacacccacttgcaatcaataatattttttcctatcggtgcaggcactaaatgccaagtattatttttaatcagtgcattatattcctcatccatggccttcttccaattttcatcagctagagcatcatcgaaacaagtaggttccttgtcagaaccactatacataccccatctaatcgttccatctgtacgagtaagtggcttacgaatattactttgaagacgagtatgaggccgggacaccacaacaggctgaatgttctgttgttcaccttgctgagccatagaaggtccagaatccgcagaagattcaagagataaagtctcagtagatccagacatctcaccaccagaaacggacaatcccggcgtagactccgaaccggaacctgccgcaccactcacgtgtgacccaggagaacaagttggtgatggaggtgcagattccgaaacatgcgacacttgcggtgaccccgaaacagatacttctggcatatgagtagaagaagctggaccaatgccagataaaccaccactattttgatccagattatcatcaccagaatcttgtacgtacaggccagcactagaagcattgttaggagcattagtctcaaaagaaaaactattaatcataccccttgatgataacaaagattctggaagaagagaaatttcagctcgaagttggtttccagcattggaatgaagatcaacaaagggaaaaacagtttcgtcaaatataacatctctagatatatagacccggcctgtggaaatatctagacacttataccctttgtgatgaaaactatacccaaggaaagcacacttttttgaacgaaattggagcttacgtttgttataaggacgaagatttggccaacaagcacaaccgaaaactcgaagaaaggaatagtcaggcttagtatgaaacagaagctccaaaggggtagaaaagttaataactcgactaggtatacggttgatcaaataggtagctgtgagaaaggcctcatcccaaaatttgagaggcatcgaagcatgagcaaggagagctaatcctacttcaacaatatggcgatgtttgcgttctgcagagccgttttgttgatgtgtatgaggacaagagatatgatgtgctatccctattttctggaagaaagagtttagacgatgatattcaccaccccagtcagtctgcatcgtaagaattttcctaccaagttgtctttcaacaagatgctggaaattagtaaaaacttggaaaacttcggacttgttctttaaaagatagatccaagtaaatttactataatcatcaataaagcttacataatatttgaatctccccacggactgaggagcaggaccccaaacatctgaaaagacaagctccaaaggagcagacgaccgactgactgacctagaataaggtagttgatgactcttagcttgctgacaagcatcacaaactcgctcttccctcgactcactaacagggatattatgttttctaagaactctagtcacaaccgaaaaagaagggtgaccaagacgactatgccacctagactctgcagaactagtagaaacaagagcttgacgtccctgaggtgtagtagacttcaaaggaattggatacagaccaccccgggatctaccttgaagaagagtgctcttcgttgtttgatccttaacacaaaagaatttaggatgaatttcaacaaaggcatgattatcataagcaagacgatgagctgaaactaaattctttttagcctcaggaatataaagaacattattaagagcgagatttcgattaggggtatgaaaaatagtccttcctatgtgacttatactcatacctgcgccatttgcagcatgaacttgctcattaccatgatacctttcctttgtcataagtttctcaagctccccagtaatatgatctgtagcggcagtatccaaataccaatttgtatctaccccataagaagatacggctgatgccgactttgcttgctgatggtgctgctgaaagattacatcgtctccagagaacgatcgatcaaaacgcttccagcatgtatgcactgtgtgaccttccttcccacacaattgacaggaaggtcgagaaccatctccacggccacggccaccacggcctctgccaccaaaaccactaccgaaattgctgccaaaaccacctcgtccacggccttgaccttgtcctcgtccacgtcctcctcgtgacgcgctgttagccgacgagtgatagcctccttcagattgattatttagatgtgcctcaaacgagagtagctgggcatatagatcactgagtgatatgtagtccttggaggagaccgaggcaaccagaggattataatctgcgtcaagtcctccaagaatatatgaaacaatatcatcatcatcaagtttcttcccagctgcagccatctcatctgctaatcccttcatcttagtgaagtatgcagcagccgatgaatctcccttcaattctcgagccaattgcgcacgaatctgaataattcgcgccttagattgcgaggaaaacatctcgttaattgcagtccagacttgtctggcactctcaagatgtgcgacttgcaccagaacttctcgcgaaagcgtcgagagtaaatacccgagtacttgttgatcatgcgcaatccactgtgaataggctgggttgttgacggattccttcaccaaatcgtcgcccacctttttctccaccgtgatctcaggtgatggcacctcttttgtgccatcaagatatccagtaagctgtgctccacgcacggccggcaaaacctgcgctctccaaaccaggaacttgtctctggacagcttttcagagacgggatgtcctagcactgccaatgaagacaaagtcgacgaagaacttgatgccatgactagatgttttgtggaagaggatgctctgataccatgtgaaaactattgaggcaatctacctcttgtggaggctgttcaagtcattatataccagacagagatacaacaatagtacaactcaagaccgaatcgtatattactaacctgtagacccccgattttgaaaatcggaaatcttctgtgtttatccgtaccaatccctggatcagtagttggtacacacatacatagttggatcacaacatatcacgaatgaatttaggctaaaagagttaaacacttacattagggccaggtaggccaacaactatcagagaacaacagcggaagacaaaataatataagggcccggttaacatgccacaggcagtcgactggggaacgagacctagaacaagaccgcactccgatcatcttgtgggatacacaagcgtaccgacaagggcatctcttcaacactctcctaaaagatatataaatagcaagggtgagtaccaaccgtactcagcaagccaccacaacaacaatgcatatgatagagggtattcaaggaatggttttaggttcttttgcataaagctgcgttttgcaaatattttcacaagcctaagacctatcatagactgatcaaattttagtttcagtgttcacattaaacaacgacggttctgtccaccatccattgtgatcccaaggatagcttcccgccattgagtcgtcatggttttctgaggacgtccaccttccctccctctcaggaagtggctccatcagcataaaaatcaccatgcaatatcccatcccacacaagttaagaatttagagtctagccaagtgtaatacatgtcccggtgctcattaaccgcgagcacggctattcgaatagatttggtttactcacactgcagtggatgtacactttacccgcactccgcgactgcccaacacatgagcctcgtcccaacacatgagacgcgtcacggcaaagcttttcgataacctcgcattggcagtacccgctccatgaacttaaatcctcatgcactctaggcgtccatgtttctagcagtgagaggagttctggcgctcccgggaaagagaagtctcacacacatattaaattatggttcaagttaagttctctctctcacacactcatggcagtcctaccaatggcgacaccgatgtagggcacgcctcttggccctacctcaacggctgtcccatcgtagcgcacctgcctcactcaggggtgaaccatctatgcagggatactgcctccgctcggctatctaatccgctaggtctatacccattcgagaagtacggttgtacgggggtcgtttcatgcttaacttcatggctcggtccttaattgaccggggacggtactagccttttccagataccacccaaatcctccgtccgccccagtcaaaaacagttgtttaattttatttctcctttcacaaatcatgtcatcaacatcatggcaatgtggcgctcatgtctccacatgccgcatctcaattaccttcccaaaggtaattgcccaagcatatagcatttgataaatatgagtatgcatgattctagaatagcatttctaagcaattgtcataattgactagggactcatacgtaatcaggggtacaaggattttaagggtaaacaataatcaaggcatggcataatcacaagtaggacgttcatcattgcatgcaattttatttgtaaacaagacaatttcgcaattaggatcaacatgttcaaggaatatgtgatgacttgccttgctcaagataatccttattattgatataatcttgatcaaccttcacctcctggaagttgcagacgttgcctcacgactaaccgatacacaaggtctataatacgcgagaaaaaccaatattcaaacaacaatcaaatatgcacaaacaaaatatatttgctgaggtcgaacctagggttgctcatattattcgcgcttgctaatggactctaatcaagctaagagctaaggtttcttagtctttctcttgtcatggtggttcagtctagctaatggctaaggaaggattatggttacacatgcatctatctaaatagaacggttatacactagaggttatgttgccggatggattttggatcggtcaaataattactgtgaatcatttgtattattattttattaatggaggctttattttaattatgtacatatttcacttgtcaaaataaattataaaaggttaacaattacccatgctttg

SEQ ID NO: 13267 - DNA, 4650 bp, Oryza sativa
gtggcgtgacctgaccgaccaggcggccagatttcataattcagagataaggaagaaaaggaataagttcacttcaggtctctctctaattttcatccattaatcacaaaatcgggtacgacgggtccctcaacttacaaaaccatataaaagaggtccctcggcagtattatgcccagttttagatcacgtggctccctttgactaggacctcatcccacgtggtattgacgtgaagtttatgtggcaattggatcttgggaaaataataaaaaactatgggacccatgtggtcccacatgtcagcctccctcttctctctatcccccctctctctcccctacacggcaaaggagaaggacgagcggcgacgcaaagggggtgacaggcggagcgacggcaggcggcggcgggtggcagcagtggcgctgcgcgttcatcatcgcccgcgccggcggcgaatcccacgagctccgcgtcaacattgctaacgcctcctcggcatccgtcctctctcacgtcgtccaccgcagcgccgccctcccgacgctgacactggaggagcagttcgtgacgctggcgctgccgccgaagcacccgccgttcgtggagtcggtgcgcggtgcggggtggacatggacgacgtgctctgcgcggtgttccccatcgggtggttcagcggcgagcttctacgagcgaccgctgcagggcgtgacgctggtggtggacctcaacaaggaggaaagaagcgaagggtcggcgggaggaagtggagggcgcgcactcaccggctggcgaggaaggatggtggacggggaggagtcagcgtttagggaggagcggctgcccaaggtcaggacgggaccgagagcacgaaaggaggggcggcggcgacgtggtccgagatctgcaccgaatcaggaagctgcggcgttgtcatcgtcctcacctccaagatgtacgcacagatcgagacgacccgacggcagcgcacggttgcagcggcgaggggaagaggaaggggccgctgcgggcctctacccgccaacctccaagagcccatcacccgtcgccatcgagcccccactcgccgcgtgcctctcctgccgcccgccaccgtcgagcctccacccatcgcgcgcctctcccaccgaccgccactagcctgtcccgctcgaacggccgctcgtagccggccgcctctcccgctggaacgggtgctcatcgtcgacggggagaggtgtgttgctgttggtggtgtgtgcggcggtgaaggcggaggcaggcgcggcgagcgacgaggagagggacggccggccgccgacgttaggaccatgggggcgggagtggaggaggctgcgcctctccatggtgtccttatcttcgccggcgagatgaggaagtagaagggagatggggagagccgaggagaggaggaataagaggattggatttgatcatttgagaatgacatgtggagccaccatatttttttggtgtagctgacatgtgggccccaccatatttttttggtgtagctgacatgtggggccacgctttttattatttttccgagatataattgccacgtaagcgccacgtcaatgccacgtggaacggagacctagtcaaacaaatcacgtaggcgccacatcagccaaaatcgctgagggactacgtttacctggttttcgtaagttgggggacggatcatacccagttttgcggtcgagcgacgaaaatcggacagggcgacaaatagagggacccatagtgaacttattccggaagaaaagggatattcagcggttgggcggttgagcctagaaggctagaagccgaagcaatataggccttcgtggtgcttggaaaattgataatgggccttcactatgcctaacgtttgtgggcctcaatgtccggtgcataaaatataggaataagttcactatcagtccctcaaatatagatcggatctgattcgcatctctcaaccataaaactagttataaattactccttcaacggttaaaaccgtctaaaatcactttcaagacattattgaaggtggtatctgctgacatggcagccgaccaccacagccgcctgttgatccgctccggcatcgacctgtcgacgctagcatgtctgacaaggttcgtgctcaagcacggggtcaccggagacaacgctgccatcctttcccttcgtctgctccatgtccatctgcagatcaatcaacaacccaagttagcaaacaagcgatcaccagaacagacagtaaaatatttcatccgtatttcaaatgtacgacgccgtcgacttttcgaccattcgttttatttaaaatttttatgcaaatattaaaatatttatgtcatacttaaaaaacatttaataacgaatcaagtcataataaaataaataataactatataattttttttaataagataaatggtcaaatattgaaaaaaagttaacggcgtcatacattaaaataaaataaaatatgaatgtagtaatggtcaactcacatcggcttggcccttgacaacaagtgcaacatgccggcgatgtgcgaccctgccaccggggaagcctaccgcggcgtggccagtgccaacgactaaacgacacgccatggcgcgccggcggtggcagcgaaggagctgctcaagtgctcagcgccatggttgtgcccgccattgctaactcacaccgcagatgaaatcaacacaacctaacttagctagatcactctactgaaatcaactcaaaggcccagtgagcatgcacacggtctcactgcagccgccgcttcacctaactatatggagtagaatatatgggctgaaattctatttcaatcctgggctagacacttgagatatgtttttttttaaatgaatgttagataagcaatttacacttgggatatgttttgagctcaactatatttggtggacagaacgcatgtgcgatgtgccgaagaaaatgtctaccagaggaatttttttcatttttatttttttaatattttcagaaatattataccggcgaaaatatttacaaaaatagaccttactgcctaagtggagggtggcaaggtgacgtggcacacggcaccgtgtgtgcattttgccctgaggtggggtgaaatgcaactttcgccgcatgtaaaatttgcatgcccgctctataaatattttcgtcggcataatatttctgtaaatattaaaacaaaaatattgaaacagacaggaggaattgcctgccagcgcaaggaactgagattattctcctagtagtactgtacaaaataaatcgtactactagtatagcactatagtagcaaataatcagtagtcgcgcacgtgtgtcatttcgccaggctgtgacgagagagcatctgtagccactcgccatcaacgtccacagtggtcaacccagacggctgcctctagtagccgagttttaatcgccaaaatggaaacgaggcgtgtggagaaaagcccagtttaggtgaaaggttggtttgtttggtggccacatgtggtagcctccgcctccacaggatcgcaatgctcggcgtccacgcgcgcgccgcgcggaccggaaatgtaatgcccgagagcgcgacatgcaggcaggcaggcagcgcagcttaactggatttgcgtgtggatggaggatatgatatagtatgtgtattattagtgcaaaacgtgcgcgacgttctggtttggaggattattgcacgtacgtgtgtgtgatgctattgttcaggaaaacgggccgacaaaacaagggtcgtcactcactcaaaatctccaataaagagggaaaaacacgggccgggtaatcgtgagaagtgtgtttgccgcaagttccgctcctatctcacaaccgattgccacggtacacggttgccatcccatattcagcgcatgtttagcgtagctttagctcagcttgtatcttcatccaaaataagagaattaaacgggttatggagctctcttgaaatgaataatcaaggtgaaagctgggtacaaactacttgtaattttacttaaatctagaagttatattaaaggcctaccaaacacgacctcgtattccctacttctcgcgatcgatcacgtacacgctgcatgcacgttccatgcccagaataccgtcgatcgcccacttgctttcctcccatcccaacacacgcacgtggcgcgggcggcacacgtacgtctctccgtctctcaaacacgcctacgtacaccggcacaacccgtgcgtgcgcacgcgcgtggcatgcatgggtccccggccaactcccgtcgctcgacgcggcccgatcgaatcgaatcaaaacccgcacgcacacgaattcgcaaacgaagcgcctcgcattgcgtacgtcacacacggatatggaatcatgaaaagtcactactacaaacatggtttttgcatacgggcgagaagggggcgcaaccgcatgcactaaatcgtctgcgaaaatcacgatctttgtatgcggccggcgcaaccgcatgcgaaaatctgattttcgcatgtggacgcttaagacgaccgcatgcaaagagaaaaaatcgcgaaaaaaaaataaaattccaaaaataaaaaaaa

SEQ ID NO: 13268 - DNA, 12748 bp, Oryza sativa
  unsure (1)..(12748): unsure at all n locations
agagaaacgattgcttaatcagggtgagaagaagacactggttgctgtccaacgacaacttcgcgttcagaacactgaatatatacacacggtcgtcgacagcaacttgccgtacgtacactggcctgaaaaaatatcagcaaattgaactcagagaaaaggttaactacacggnnnnnnnnnnnnnnnnnnnnnnnnaaattcgtgccacgcgctttaccccgcttactgcttcctgagcagagctcatacggttaagagttggcatcatggacagtaagtttatgcattattatcaaactcagtacaattttatttcaatttgttttacagtaaatacactgcacaagtacgatgtactctgctagtacaaagtaaaagactgtttgtttcgttgacgaaaccaacctcttattaataccaaattttatcaaggcaacaaacattcactcttggttacattctttgccttagtttggaggaaaaatttttgtaaacgcaaaatgagaaaactcattagcacatgattaattaaatattaattattataaacttaaaataaatttatttttttaaaagaacttttatacaatttttttaaaaaatattatttaatggtttgaaaagcgtgataacgaaaaacgagaaaattgaagtttggggttgaaaaaaaagaacagtgccttaaaaagctagtacaccaaatttttcatactgtctgtttagtactaactagcatggtggtccgcagattgcgcagatagtatcattatattttctcttatataatagcatatatgttttctcaatttattattaaaatatattaaaatgacaacataattttaaattttgtactaactttatgaaactactaatgtgtaatattcatattgtattttatatacgtgttacttattaattatttttatatcaaattttagttatttctaaaatatattcctatatggactctacacttagtctttcaatatttcttattttttaattccgaattttcgttatctgtaaattgaaattgtatttctatatagactatcggctcttcttccaatattatttatttttaattctgaaattttatattttttctaattgtatttatatgtactctaaactcatctttcaatattatttaatttttaatttcgaatttcaattacttctaagttctaaattgtattcctatattgactttagactcttcttcccatgtttttttatttcaaattttagttatttgtaaactgtatttttatatggactctaaactctacttttaattttattatgtttattccgaattttagtttgttttagattcctatatgaactctatactctacttctaatattctttatttttaattctaaatttctattatttcttaattgtatttctatatatactttatactattcttctaatatttttttattttttaattctaaatttcagttatttctaaattgtatttctatatggactctagtcttctcttacaatattccttattttttaattccgaatttcaactatttctaaattgtatttctatgtagactctgtttctttttctccgattaatatgagaatttctaagccgtgaaagcgaacgtggaagctctttttttctattcctttaataaattaatagattttccatactgattagtactccctccgtactcgtaaagaaagtcgtttaggataatgtttaagtcaaaccttgagaatataaatcatgaataactctcaagttgttgagtttaaaaatgtgaaaattaaatgaatagatttatcttgaaaaatactttcataaaattatacatatatcatttttcaataaatgtttttaagaaataataagttaaagttgtgttttgaaaaccgtgtcactgtccaaaacgacatcctaatacggagggaggacctgacaataccatgtgacaaaccgagagtagcatttttcttgtaaagcaagcactgtagcattattctgaccctaaattctggaggtgattagagcccctaaatggccggatccgattcgtccatctctgcatcgtgcggtgggcaatccctttcacatccagtcatcaacaacaccacacacaccctcacacacacgcacacgcagagaaaaagaaaaaaaaaagaagaaaaaaactaaagaactagtcgtagcggccacactacaatttacaggaaagaccttataaaatccaagagaacggtcaccgcttgcttccaagccgagcccagccagcgaagcccaccaccaccaccacccagatccccacctcgccgccaccaccaccatgcggggctccgcggcggcggcggcggcgaccgtgacgcgggtggctcagcgggtggtggccccatcggcggcgacgcctgggggcgcgctcccgctgtcctggctcgaccgctacccgacgcagcgcgcgctcatcgagtccctccatgtcttcaagggccgcgccgacgccgccgtggcgcccgccgcggcgatcgagcgcgcgctcgcggcggcgctcgtgagctactaccccatcgccggccggcttgcggagcgcggggatggtggggagctcgtcgtcgactgtaccggcgagggtgtgtggttcatcgaggccacggcgagctgctccctcgaggatgtggactacctcgagtacccgctcatggtggacaaggacgagctcctcccccaccccacctaccccgcctccgagtctcaccccgaagactcgctcatcctccttgtccaggtaagacaacaatggcgaggaaatttctcgagcgattcttgtggtcaacgggttggttggcaatgtcatggcaatggcgtgtgattgagctgtccgttccccaatgcaggtcacgcagttcgcgtgcggcggcttcgtggtcgggttccggttcagccacgccgtcgcggacggccctggcgcggcgcagttcatgacggcggtcggggagatcgcgcgcgggcgggcggcgccggcgctggcgccggcgtgggggcgcgacgcgatcccgtgcccgccgtccgccgccgtgggcccgctccccgtcccgacggagctccgcctccagtacctcgccatggacatctccaccgactacatcgaccacttcaaggcgaggttcctggagcagacgggccaccggtgcagcgcgttcgaggtgctcatcgccaaggcgtggcagtcgcggacgcgcgcggcggggttcgccccggggtcccccgtccacgtgtgcttcgccatgaacgcgcgccccgtgctccggcgcgcgctcccggacggcttctacggcaactgctactacatcatgcgggtgacggcggcggcgggggcggtggcggacgcgtcggtgaacgacgtggtgaggctgatccgggaggggaagaagcggctcccgggggagttcgcgcggtggagcggcggcggcggcggcggcgaggacgacccgtaccggatcacctccgactaccggacgctgctggtctccgactggtcgcggctggggttcgccgaggtggactacgggtggggcgcccccgtccacgtcgtgccgctcaccaacctcgactacatcgccacctgcatcctcgtccgcccctccgcccacaagcccggcgcccgcctcatcacccagtgcgtcgccgccgacgccgtcgacgccttccacaacgacatgatgcgcctcgactaataaccgagcgagctcaccgtccgccgccaccgacatcgccggcgcaatttgattcgttctttttttctttttttttttgggttttttctctcctctcgctgtacgcacgccatggcattcattcgccgtagtagactagaagaagaaaattatatatatatcagattaaaaaatacgataaatatatatgtatacgcgcctgtaatgcgaagcatttgtgcttattccttcgattaattattgagaccgggttcccctttgctgcgaatttgatgttcttttaaagaagatttcaataagtttcagaaatgaacgctcaggtaattaatttaaaccgttcggcagggccttccatgtcaccgtggcaaaaacaaattcgttcaaaaatcaaaatatggcatgacaaatctttggcaaaacattgttaccacgtcataaacagtgagctgtacaggtagcacgagcttgccacgttacgattaagaaattcagagagatatttataaggctctcaagcactatccaatttttggtttttgaacgaatcaaaaagaaaaagaaattaaagtagcagtaaaaattgttgtttatatatgattaagcgggaaatatgtaatgcaaatttagataagtatggataaattttagacgtttattttttattctatagtaatttttagatttgcacagtatatttttctcacattaaggccgagtttagttccattttttttctttaaacttttaacttttacatcacatcaaaacttttctacacatgcaaacttccaaattttccatcacatcgttttaatttcaaccaaacttttaattttcacgtgaactaaacacaccctaagcatacaaacatagtttgtatgtatgggggagaagttaacatttgtggtgttctgctggaacgactagtaggtggggagcaactgtctggaatctcctcttgcttaagcaaaggggttgcgagagggcaagcgaggtgtggtatatgcgtgatgatgcatctgttatttgtcgctgcatccatatgctaatgtgctcatgtcaagctcaagcgtcgtctacctgcctaaggggctaggcgtcgccatctcggtttgttgagctccggaatcgtgtgcgcttcgcatagattgcgttgcggacagggtttctcgctgctgctgctttctcttggcatgtcgtgcactggggtttgctttaccggggaagaggggttactgtaccccaaacgagggtaactccgactattgttatttaagaatggacgcacataaatcatatcaatatggtactacttcatagtatataaattggtcttatctgtggaagttttagcaaatgcagcttcttaagctcctcaaacaatttagatttttactactatcttcgtcctaatatacagcaacatgtgaatctgaagataattatattaagattcagggtctgttcactttgatgtcattttcaaccttaccaaattttggtaaagttgctaaaaagtgcatatatttagtttgctgccaaattttggtaactatataagaaatcatgtgccaaaattttggtaatgccaaaatttgataaggttgaaaatgtcattaaagtgaacatgccctcatagttatagaatgatctaatctcatcttaagttactgtattttaaaattgaggaagtataatctagaaaattaattagaaatgagaagttaataaacactggtctgcttctcataacgtcatgctcttctaatacaagacgtttatccatggctaaagttgcatttggaaacatggcagacatttaaaatagtagtgtaatgcttagatcgagtacgatgatcaatgggcttgtgttcgttggattggtaatttggatggtgggcaggtggttgaataaacaagtcgttgtgttcatgttctagaagctttagcctagcccccttgatcggtgcggtcctgcagagtcttggagcagcaaactcttcctctttccgactgtcggtgcagctgaactagttccatgaacaatgaccttgcaagatctggaccatccaatcaggatctaacgatgaacaccgggcaatcaaaactgtggcacgcgtaaagcaaggatagcacacggcatgggggagcagcagtccgttgcaagtcacgtcacatcacggttacgcaccatcgtcttgcgattttttttaattttttttgaacattttaatttttaattttaaaaataaacccgtccaaaaacttattttcaatatctaacctcttttgacattgacgtgacaacaatattgtcacgtggctcccgctaggatgacaacgtgatttgaccacgccagcctcgctagcgtgatttaaccacaccgctctcgctgacaagtgtcatgtcgtccactgcccatagcgtgctagtgttggtttgccacacaggcgggctagcgtgaccaaaaaaaagttcagattttggaaattaggttttgaaaaaggtaaaaaaaaaagtttcaagaaacaaaaatttctcgcttgaacctcaaaaagtttggagcgcactattgggcagctggatacggcagtgccaaaaaaccaaagtagcagcctagcaggcatatgctcatggcatcaagttcttgctactacatgtctactgctacaccatttgcatacaaccagcaactacctaagcggctagtagtaacacttgtatttttatctgggtggtgcagttcgcatgatatataattacatgaactgcatggtagacacaaagggagaatagggggccaaaaacatcggatgcttgctgactcgcacaaaggtaacgtagctactgtaggttccaaggcatggagccttggttcccagtagcgtagccttggccactaccgtcaggcgtcgcggaagtgcagtactgctgcacgacgttgttcgccggcaagccggaatgcgcggcgccggcggccagccactgggcggtggtctgccagccaggctgcaaatgagtcagctgctgcacgggcacggaatgctgctgtgagtgggactggacgtagtaagcctgggacaaggtgttctgcgattcctgtgttgcgtgatactgctgaatggattggtaatgctgctgctgttgctgatgctgctgatgatacgcgtgcatttgctgatgaacaggtccgggtggaggcaacggtggctgtggaatagcatgccgtgtttgctggagattcagattgctttggtttggatcccattctggtatgtcatcatcgtcatcatcctcccagggttgggctgcggcagcggatctgctaccatacttgcgaaccatctccctcacatggtctaccgggcggcgggacgcggcctgagaatgctgctgctggctcctgtgtgcttgtcgtgatggtactacgttggcagctgcgtttgggacggtaacaaaatcgtattcaggtaggtcatcgtcttccctaacaacaccagggccaaagcccggaggaacatcatcagttacaacatcctgaccgtggtgctgacgctcattggtaggcttggaagacaagggcactgcactggcaatcacggcatgctgcttcctcgagatggattggtttctggagccatcgttcctggcgggtatcctaggtgaaacatggggcctccgccacacgacgactccaatagctgatgttcctgtcacggttaagctgctcgactgctccttgggtaggtgctctgcaagtatctgtgctgccttcccttgagaagggcagaggtaaagctccactccatctgcaggcttcactagtcctactctctcgtctgcaatatatgagtcaatggtctgcaggaaaaattagaggtggttagcagatcaggagtcccacaatagcattacgctgagcccgtgcaaaaggtaacagatgacaagaattaagggagtaacccgcaagagatgctggcgcccactctcaagagagccctccttccaacgcaactcagttacctgtaaaacgagtaacaggttcttaatgaaataacatatgtttcaggagcagaaataatggaagattacccatctggatggcacaaggtaaatcattttccatcagatagcatctctatatgcacaaatcaacatttaatgcatgaacataacctatttatttgggctaatcaggtatatgaaatacttggggtgcagtcaggaactttaagaacaagaccttgtatgtgctaattgctaggctctaagcaaaagaaaagcaggttcaaatgaaaattgtggatttctcatagcgtggaatgtggaactacttcctccgtttcatattataagactttctagcattgcccacattcatatatatactaatgaatctagagttctatacatatatatgtatttagattcattagcatctatatgaatgtgggcaatgctagaaagtcttataatatgaaacggagggagtatatactaagcatagtgaataatcaaattcaagagcacaaaagtacatatgcaattccgaagtacataatatttctatcattcatgaatcagtgcgggaaccatagcacaatccaacattcaggctataatacggtcatagtcttcttattagggcattccctttttttctttcatttatttgtttctccaactaacacttaaagtgtaaaacattggcaaaggtccatgcctcaacataacattagtgcaactatgcaacccatttcaaaaacattaatacctagtggcctagtggaccaatacgagtaataaattgcataaaactccaggtacaaatacaaccctgtgtaccacaaaaccacgcgttttaaaaatattttcacataacacacgtcaattgaagctagtaaatgaaacccagagttgttgcaatccagaccgaaaaattcattgtggtatgatgttaggtttgccaacagggcacaacatgtgtccagtgcaaggttggggcacccgttccatgtatccagtggcttggccttgtagaccctttttctggaatgtggccttgtagaccttttttctagaacactggtctagtgtgggcctttatggaattcttaagccatatttgaatggctcacgtatcaggacagaaggttgtgttatggcggttgcctaactgcgtagcccaacagctgtccatcctgacaggctgacatgcgaacgtggttctagatttacaccaaggacccacacaagatggatgtagtgccacactacagccgtgtttagtttcccccctattcccaactttccattacatcatatcacatcaaaaactttcctacacacataaactttcaactttttttccaaactcccaactttcttcaaacttccaactttttcaggaacataccctacagcaaaaaggccacggttgggccgaatgtccacatcacaatgctatattcgactatggggttttctgtaactatcacccatctatctgcgattttgtgtcagaaggggccacaaacatgaggttttctcaaattcactcgcataatatctaaagcctaattgcatgtataacagtataaggtgttttacactgtatttggaaccacagtttcaacatattccacatgaactacccagttcctaacatagtattgaaccctctttgaacagagctttttttttaagtgtattctgatttttttcccttgattttgtggtattttttatgtgttcgaaaagagtcaaactgggagtgcaaaaagggttaatacagaaacacagtgtcattttggagcacaaagaaatagaatggaggttcgttcagtggtaaaaaaagaaatatctcgttagcagatgtatattatgtatattaacttttattaagcactcaaaacaggccctttctcaggatactagttattttcgtggctttcttctgttgatctgcgagggcaatttgcataggcaaatccatgtgcgcaacttgtttttgctaggtttgtgtaccgagtcccataaggaatcaatttgctgtaaggacaacagaggcgacagtccattccactgaaggtatagcactatatctgcagtgcacttcaatgcaatgtgtagaactcaattaaaacacaaccagaaaacagtgacattgaataacactctgcaaaaaaaaaaaaaggaaaggaattgccacagcatgtcatgttgacccagtatttcttttaagggaatggctaccatcattagatttatggaatcccctgaacacggagttcggaatatttatgcaaatgcctaacgttaacaacaaagattatcttacaaaacaaaaatgtgtttccgtagcatcttacaatcaatcattcagaagaagcagtagatgctactgctagcaagtcaataggtacaactgtacaacatcgatgtatttcacatttccatactgtggtaattgccaattttaattaaaaaatatagtcatccaactgagaatagcaaatgagaaataactattaccattatagcacggctcctggatttaggaagttgttcaagaaattcttgaaaagcactgagcctgactcttcccttgatatcaaggaaatggcgccactcgtttgtggatgtcttttcaccgctacagaacagacaaaacaataatcgactgaggatatataactgaaatattaatttgtcaagttgtgcactgttctataaaatggtaccatgtattgtgctcaagatatagaaactagcaagagaagtactttcaatagtgaattgtatatacaagagagataagcagtgcagaactgcggatgaaacaaaccttttgaagatcgcaacaacatttgtgagtgatgacaaggaaagttgaattgttccctcccatacactgtcatgtgtcagcaaagcatcaggagctgatttacaatccgtgatagattcagggatcgactgactgccagtatcaatgttttcagcattggccttttcaggggaggatttgactaacagatcttcctttatttgttcaactggaaacaaaattgagcctgcgtcttttttgggtgactgtaacttggactcaaacttatcttgaggagataatgtttgcggatcaagttgagaatctgatgcagaagcactatccacatttttggaagaatcttccgatttcaatgaaatgtcagttttctcaatagaattaggatcatctttcacagtttgagtggaatcatcttcgaaaggtggttcagaatcaagggtctccatgaattcgtccagtgacataattggtggaagattctctgtatctttcaggtcatctaccatcagttcctgcatcagatcagttttctcattttctgtatgttctaaattgcttggcatgttattgccgcctgtcacgataactccatcttgctcactattgtctgattctttttcttccgtgtgtacacttttatcatcggttttggtttgaccttcagtaggtcttgatggaacatgcgaaagcaaatcacccccaattccaacctccacagagataccgtcagtttcttccacctcaacttgaaattctcctttgtgtgttttcctcaccaagcgtctaacatccacttctttactaggaagaaccaccatctttgcaagctcttcagccttagccaaccgccagtctgaaagttcctttgaagcgagttcttcagtagtcattgaacataggcgtttgggtgttatatctccagacaagacacgtcccctcagtacaggattacttttatcttttaagttgaacagaagtgatcgacccttctccttgtatttcttgttaactcctcccaataaagtgaacagctcaccttcaatttcaaatgctaaaatttgggccttttgggttacactcttcttttcttctgctgccccatcatcagtctttattcttttagactcatgctcaatcagagatacatcaacaccttcatcaatatcagattttctgactctgtctggatcggattgagaaatagtttcagaagctccaacaacgtcagaagaccagcaaagtccatggccttgcagaagctcatctaaagtgcaagaattgttatccagtactttattttccaaaggaacatgtattgattgctgctgcatatcatcactcaccttgatcgacatgtttgatgccgaattgctacttaacatgttatgttgcccgcttttcaaagcactagtctctgtgacagaatcaataccagcaccatcggcttgcttgttctcgctagcagatccaacatgtgacacggtttcaacggattgcggggcacactgttggtcagaatccatattcagggcagcagccagagtctctctgaactttgatctcacggactcaaataattgcggctgtgccttgggcagcagttcctgcgcaggacgcttgctaccagcagaccgaaagggcacagacttcagcatctgaaccttcggcgacgctgccatcttcttacctgctatcatagacggcgatggcatcatcgcggccataccaggcaaagctgtctggacactcagcacctgttgcggcggcctaagcgacaccctactcaacggcctggccccggacccggagaggcccagcgcgttgggcctgggcacaccaacctgcgccggcggctcgctcatgggcacgatcaggtagctgctggccggcacctgcgcgccccagttgccattgtagaacacggccgggtacccaacctgcgtagtgtgggtaatcgccccaggcaatgtcggcggcgtccccgccacccgcggcggctgcccctgcttggggatctccatcacggcgccctgcccgttcccgcaccacgccacctagggggatccaaaactagggttacatcagcacacgttcgcacgcagataaaaccctacctactcgacgtcaaaccgcaatgcgggttcccgggggg

SEQ ID NO: 13269 - DNA, 5734 bp, Oryza sativa
  unsure (1)..(5734): unsure at all n locations
ctcgcggcgcacggcgatgacgacgcgacggcgacggcgtgcggcgcggcacgatggcgacggcgatggcgactcggggctcaaggtgatggaatggcgatggcgcgacgagacggcgacagcgcggcagcggcggcacggggcacaaggtgacgcgacgggcggcagtggcgacgcgacagcgggcggcgcagcgcggggtgcgatgacgcgacaacaacggtgatggcgacgcggcagcgacggcgatggcgcggcgcggcacggggctcggcgcgcggcgatggcgacagggcggcgcggggctcgagacgacggcgacatgacggacgcaacgcgcggcgtggggcgcatggcagcggcggcgcgcggcgcgaggcagagacggcgacggcaggcggcagagagagggggaaagaggagggctgggttaggggaccacgtcgagcacctagagtgcaatgaacagtgccattttctatttaacccgattttagtttatttcccatataaatttaattctataatttctaaatcttgcataaatgaagtttactcaatatttgtgttattctaaccaatggattcaccctagattaatattactcatattttatttttatataatttatttgagttttaattagggttaattcttattccatcgtacttaaatttaattgatccaaatatggtcgcgataatattttatttatttctatccacacctaagctttattttaatttgtatttactccttagcatttgggtgaccatattaagtgttcaaatgtgaatttgcccaaaatttaatattgtccaatatttaaggtttattaaagattctataattttctaatgagaccgttattaacacaatagcacattagctcaatttatttatatgttagtttattttatatggagaggtttaatatatcaaatttcaatccctaaatgcaattaggaacttggtgcaatatcgatctacatatcgaattaaatactcccgtaattctattatatatacagagagctcagtttatttgaatgatcatcatttcatgtgtacacctattatggcacccacctacattatttaaatattttaatatttgataaaataggttaataataactttttcttttatttgattttaatatcttgtgcataattatttgtaggattaaatatattcccgtaaatcatatctattgcttaaatgtagttcttttctttattttcttggtgatcatttacggtttggcaagcaatagcaatcataacaaccagcatgatgcaaaagttttaaaaagttcgaaattttcgtgattttcattgtcttgaattttcaggatgttacataacctatacagattctacatacacaaggaaaacacctatacagcatcggaaacgaatcagttatgcagtaacgtaagcagcagcatctctattgtttaacacacttaatctatacacatcaactccggcacatccatccatacacttacctctccctacctctagtgcgaggatgaggcacatcgggagtgaacctccactcttgggatggagctcgcctacgtcgtggtcgagacggcccagcctgtgacgatgactcccctcacttttaagttagttaatattctcaatcgtggcttggttaggccttgttcggttacacaaggattcattccgggccgagaatgataaggtataacaagaaatttataataggcacaacaaaagaccgggatttattccgggtcgagaaccaatttactcatattaggtacaacaaaacatccggattagttccacacttcttgactagtagattgattcccgatctcttattgtccctatcataagtaaaatagttcccggctcggaataaatcccggtgtcttgttgtatctatcataaatttcttactatacttgtcatttccggcccggattgaattcttgtgtanccaaacaaggcctcaggaagctctcgcaaatgttgatttgggtcgtgggggcggcgagtagaaggaaacaaccggtgacggtggcgatagctagtagtgaccgatggaacggctttgcatgggtaggtgtttctacgagagagggagaagagagaaaaggctcgtgctcactctggcgactcatagggctagtttgctttgtgacctaaattgaccttaccaatttttgttaatgtcaaattttggtaagttttggcatagctaatcttggcaaggtaaagttatttttggattgaagccaaaacagcctaatttcactaatgaaatggcctatttctttaggcatgccaaaatttagtttctaaccaaatagacactaaacactattaaaattgataaatattggtaagaccaatttaggccacgaaccaaaccagtccatagtggctactgtcctcctaaccttgaatgaccgatgaagccacagttaatatattgaccaggtttaatttgcacacgtacggcttgatcatgcatcggcagttgattttttagttctgatgggagtcgggccatgccgggttggcacggtctggcccattcttcgtgcctaatgggccgtgctagcctgtcacggcctgattgtctatgacattccagcacgccctcttcaatgaggaaaaagttcactccaagtcccccatctatggtcgagtgcgtccctcaaccgcaaaatcagatataggacgtttttcaactagaaaaacagtgtaaatcaagtcacaacagttttggatggtggttttatcatacgtggcacattggcctagtcttcgtccgacatggccttacgtgaaatttcagtcaatggaaaaaaaaacatatgtagtgggacccacacttagttgtaattctagaaaaaagatttaaaattgtgtacccacatgtcagtcaagaaaaaaacctctctctccgctctgttagtggctgaggcgtggggacggtgtggacgcatgccgaggatagcgactggcgaggttgaggcggatgcggttggtagcatcaaagaagagggagaggagtagggcatcgtgggagcttggacgttgtcgctagtgtttacaagggtgaggaggagggtgtagcggaagcaggcaggcagggcgagacgcgcaaggacgacccatgtagaccaggccgatgacggcatggccaacgagaacgaggtggatacatccaacaatgtcaaagacaaggacgaggaggatggggatcgtgggagctggcaaacgtgggtattggcgcaggaaaggaaagcccaaggacagcgtgtggaggtaggcttaggaaggagagagggcagagatatcaagggggtgatgacgtggcccccctgcatttttttttaatttttatgcaaacaccactgtattttatcttactccctctgttttttaatagatgacgccgttgactttttcttacatatttaattattcgtcttattcaaaaattttatgcaaatgtataagatataaatcacacttaaagtattatgaatgataaaacaactcataacaaaataaattataattacgtaaattttttgaataagacgaagggtcaaatatgtgagaaaaagtcaacggcgtcatctattaaaaaacggaggtggtatattcttactgtatgtgccgcataaatgttacgtgggacagaaatctaaaatctagtcagtacgtcagtacgtcacgttagtctaaaatagtctcgatattgccttggaattatatttgctcttgatttgaaaaataaggtacgtccaccattacatgagagatataaagtggaccttttccctcggtcacggaaattcccgatcaactgaccgccgtttccgtataaggggtactatttccgaccataccgtttttatctatttttaaattttattttttctaatttctttttcatcgtattaatatcggtactgagtagtttaaatgataaatataatctattaccggccgtttccgaagagatgctaccgattctgacatttttttaacgactcacacaagaaggtgcgaagttctattgatagggcaggaaaaaattacaagattacaaccctagagggtcgtaaccaggaaaaagaaaaaaaatataccgccacccacacaccgacagcgtcaacacacaaaaccgggagaaggttaacaccggactggccgccgctaagcgtgaccgaccgccgctagacgacaaaggaatatagacgagattgcccaaaagaacaccctcagaaccaatgcaaagccaactcctagagcatgcttgcaccgatcgagaggcttcggctaggggataccaaaacaacgtcttcaagaagagaagcgacggaaaacagccgccaccgtccgtcggggctcaaaggagccaagactgggttttcacccggcaaccacccgtgagggatgagacaacacgacaacgccctcaggagggggaattaaccatcgttgtcagtcaggccaaggccatgctaggttttcacccactgctcaccacctacgaatccatggctgaagcaccgatgctccaccaccactcaacctctgctgacatgtgggaccactgcaccggcgccccccgccggccagccttcgtgcgccgaagaccgcgccacatccaccggcagctcctcctcgcaccaaggacgcctcctttaccgccggccgcgcctctcgcgccaagacggcctccatctccgccgcccgcgcctctcacgccgagccggcctccgctgccatcggctgcgcctctctgcgccaagccggtctccgaccctcctccaaccgttgccgcgtcggccaaatgcagccgtctgccacgccctcgactagccgtctgaggccgccatgcctccttccaccgccgccgccaccactgccgtcctttcgcagccatcatcgcccgtttcgggtcgacgacaccgcgttcgtaccccggtcgcggcatccttccccgccgccatgcatgtttctccgcgctttccccgccgcggcatccaccacggtcgccagtcgcctccgccagacagggccgccaccgccgagacggtgcctcgccagctgccaccacagcagccatccggctgccaccacagctcgccagccgccgccttgtcaccagccagtgcatcagtagccgccaccaccgtcactgcctcagcagtcatcatagcagccgccgcctagccaccagccgcctcctcaccagcagccagccgcggtcggcagccgcagtccccaacgcggacgccatctatctccagtcgcctccagccgccgccgccaactccggctcagccacgtcgtctaccaccgccaccttccttccccgccgccggctgccgctcccccagatccgactagcaccgcgcggatctgggcgccgccaccgtcgagcggcgtccccagccgccacctcccacatcgcatcgtccaccgccgccaccttcattccccgccgccgactgccactcccccagatccggccagccatggcagatctgggcaccaccgtcgccgccgagcggcatccccagccgccgggcgtgaaggggagagaggctacacgtctgtcgtgtgattttttcttaggcatttcacgtttttttagtcgcaccatatgtgggccaagatttatgcaagaattggtggggctgcatgcatggataaggcagtgcgttg

SEQ ID NO: 13270 - DNA, 589 bp, Oryza sativa
aggtagtatgaccaaaagtgaaccaaccccttggactgttgcgaaattacaccatctgatttcaaagtagcccgatctaattcaaaaatttcccctaattgggaacgcctcgcatatttttttacagtagcaggattagaataacttactccattaagttcgccaccatagaactccaccgttatgcctacttgttcaacactgtatttggattctgctcttctaaaaggaacgtccgctctcacaattccctcttcatctaccaaaacaaccggaaatgtttcaaaaaaagtaggcatacggcgtacaaaaagttcgcgcccttctttatctctaaagataggatgtcctaaccatccaacagctattccatccccattgtccattgagcctgctctgaataatcccccctttgccggattattaccaatataatcataaaaggctaatttttcgggaattttagaccaagcttctgataaactgagattttcggctaacccatcactaactcttcgatatatttcttgttgaaagaatccctgatcccactgataacgagtaggcccaaacaattcaattggggtag

SEQ ID NO: 13271 - DNA, 1200 bp, Oryza sativa
tttaatgcagtttctcttgcaaattgtcatgttactgtgatggggatgttcattgaatacccatgcttagatttcaaattttagctattgcaacatcgcttggtactgtagactgtagttggcattcatttttccatcttgcctgtactgccacatttgtactgatgaacctttattgaaagaaaaacgtgaacagcctgaactaactgaatgttgatagggtgaaatggacgttgtaacaaaatagaagtaaactcacgccactaaatgtacttcgagttgttcagtgctggttgttttgtatatttaatgttactatgcaatctgccttgatttttgttgcatgcagtttgtgagaagcatagtggattgaaagacaacaaccaggaaatttcaatcgggagtgagatacctgagaatgagcagggtgctgtaaaacaagaattgctttgcgtgctgacaaatccgagggggaatgaatttggtattgacaatttagaaggaaatactgagacagttcatcaggctgatctcaataatggatggaattcgatgccagtggaagctggagtgcatgcctctgaaacttcaactgagaacaatgaggagtggattcagccaggtgagctgagccagaaatcgaatctgatgccgatatactctagggagcatgctgatgaagaaattaaagaggacagaatttcactgactgagataaaacaaggattggactctgtgacaattgattcttgggaagaagttcatttgatttcaaatgatggcaccaaagagaatcaggctgaacagcctgagctgaatcatcaatcaacttttatgacagtacgtgctattgagtatgtaacagacttgtttgatgctaacatcagtgcaggcaacggtaagaaataagattttaatcatttggtttgtatcttttgttgacttctctagtgtgatcaactgatcatcttttttttttcaaattgatccagttaatccaacagaggctgctctaccaagcttacatcaattctcttatggaccatcaacaagcttaaacaaattatgtcctgactataatgatgttgaatcagagagtgctccggatacaccaattcacattgaagatatcgatggtttacatgagttggcaaaccataaagcaatgacttctgataccaagtcagttgatctggaaag

SEQ ID NO: 13272 - DNA, 1517 bp, Oryza sativa
tttaacatatttttggtgtttcttagttcattctctttatctccttctctctttgtttagcttaaatggatttatttttcttggccgcaaaaagtgttacataataatcgtaccgactcaaatatatgtattttctggaaacattgtgaatgtgcatttcaagcattgaagtttttttttagagtgggttttataaaactccaccagttatggacaaagttgtacaaaacaaaagggattttagcacgtaactcatagccatgaatattattgctcaaaagtttcacatgaccacaccattaaccaatttaacatacttctatatcaaaatttaaaaaggctatacttgcatggatataacatctttatgatggataaataaaaactcatgaatttgatataataaatctaaaactcagaagttgttgacgagggatactcgtggaccggatgagttgagtattggggtacgttggaacgagggtctacgtagtacgacatcacgcagacagaagacaaggattatactgattcagaccccttatcaggtaatagccctagtccagtttatatgagattgatgatgatgagaacaaattacaaagagaatagtcgaaacagatggtaccgatgagatcgtagtcgagggattcgacgagatctcccggcgacttggctctgtgcactctggcttcgtaaactttagtgggtatgtggatgatgagatgcgatgcccttcacctccccctaggggccccttttataccgtggaataccttgaccctaagtaagacttagggataccttgaccccaagtaagacttagggatatgtaaactggcacgatataacaaaaggctttaccccttccgagtaggactccggcaattacttaactcatagagatattttccataatttgagataaattcctaacgacgtatacgaaaacgatccgtacacgtgaaggtataccttatcggtatattctataagtcgtatgatagatgatatgccttatctgtaaccctgacagaagtatattagatcaaagttcaaatgatcaatagtgtggttttatgaaacattatgaccataatacatgggactatccgcaacgtacgaaaatccctatagttttgtgcaacttagaccataatacgcgtggttaggtgaaatttactttacaaaagttcacttactaagtaaaaatgaaccacctagttaacatgcatttcttctttccagtttctatttaggcaaaatgcttgagttcctactacatagccatgctcatctaatttggtatcattgccatagtgattatttatagacaagcaccatatatgtaccagtgagtgcaccctcttaccaaacaatcaaagggaaaaaaacaaatgacatatctctaactcgctataaccattaaccccagcaattcacgtatgtgtaatataatccttttgtgaggttggaagatatgaaatagaaaaactatgtgattttcaccataggtt

SEQ ID NO: 13273 - DNA, 2872 bp, Oryza sativa
tttcccctttgtctacaccaatagttcaccagcgtgatcaccaagttttcatcttcatcattatagtttgaggggccatgaattgaacaactgtacgtctatgtattcatctcttatcatcaaatcagttgatatcatcacttagattaaattgcttactctttggttttcgcgtgtttccccatatagatgtgagaccagtacgtccggagtcctttcggccaaagttttgtaaatattatccatcatgggtttggatatcaaatgagcattagcgattacaatgaccagctagcaataagatcgaggtttgtacggttgtatcaattccatataatcgtaatttaatcataatatatctcatatgccctcttgtcaaaaatatttgacttttaacacaagatttagtcaaaattttaaaacttttaaaattaattttgtgttataataaatttgtaaaaacctatagaatttatagtatcatgataatacttttcaagacaaatctacctgcactctttgcgtgttttctaaacttgccctctctagttataaatatttgatgtttaggataaaattcaatcaaattgttaaaactattacccccaataatttctcaggtgcttagttaaagaaaatgtatgtgcaattctgttttgaaatttattactagattttacaaacacgagattatggtttctttcaatggtggagaaatgtttttttactcccagttggtaacccccgtagtccggttttccaaccaggactaaagataaaaaagtagctctaaccttttgaactccccattttttttacaactgggaccattgtggaatttggtcgaccatggctaccatggatacaaccgttgctcacatcatggatcaagaagaacacttcaagatcaagccgtccaaattctggaatccaattcggtcacctgctaccgtgctgaattcaaatggccgccaaatgtgcatacgagctccgttttgggtccgtgagtacttgatggaaagctctcggagtcctctttccaacgaatctagcctcgtatacaaattccatctcatttggctgcaatcgcataaacaaggtgctgcgtcacctatattgggccaatgggtttgtaacttcgtttgggaccttggcctaagtggggcccatgtggggtgcgccccaaccaggtggagcacgaccctaggcaccactattaaagtttagctttgctactttgccgtgtaatcctgtgatcggttagatcgccggtttactcgttacgtaaccccaacttatcatttgtactcaattcctatttgcaattcagattgtttttatcttgttcttacttgtttcttcgatttgcttgcaggaataaggttgatttgcatcggcaagatcaacagcccacggagaggtgtattgatcgctaaggcgcaacgcaacgtcttgtacggttgtagtcgaatcatcaacgtttctctcaaatcgtagttatcatcaactcaccgaaagatcgggccaaacaactgtcttgagtgtcaaaatgaactcaggggttcatcatggtttctccggtagttttttattattattttaactaaggtttctccagcagtggttatatctaatcgatcttcccggtcacatgaacgttcaaacactacagctagaaactcagcctgctgcatataccttgctagatatggtttccacatccaaagtgcaaactgcaatctcgcatgcatggattcgtctttcagcaaactaagcttttggcgatcagacaggcgccattcgatatctcagccatgactcaatcatgttcgtcactgtcatgtctcggagggaaccgaacgctagctaacacggcacatggagaataattgtcgaaaaacgacatggcacacgagcaatcaaccgacgatggctactcacggaattatatatatcatcgttatcgtgtactcttatgtagtatcaaatttatgaactgccccttcccttttttaatagatgaagccatctccttttacactactactttctttttaagaatcggaaactacctactaagcgcatatattctgccgtaacgtgctcatcgtcctctaacccagtacatatgctgattgtaatccataatagcttatcaattatccaaaatagttaatgagtatatatatcattaacgaattaaaaaccaatataaaaaactacaataaaaactaaaataaactatgagctgtgataaacacaacagaattttaaagcttgtttagagagtttaaaattttgagaagctagtaagaatctgaaaaggttgaattttccagtatgacttttacttcattttctaaattctagcttgtaacaatctaaaaaaattggaattttcagcttctaacttttactttgttttttaaattctacaactatatattactagaaaaaatacccgtgcgttgcaacgggtgaagtctattttaatcttattattgttatatggtttagttaagatgaaattcactgtgagaattcgcttggatatatatatatatatatatatatatatatatatatatatatatatatatatatatatagagagagagagagagagagagaatcatgggctgtagttaggacttcggtcgtctcaagttagcatgcgagtttttttaaacatattttttatatgattacttctgtattatcaaaagtgaacgatcttaaaaacctacccatacacggataacgtatcaaaataccagcaaaaatatcttcaatttttataatagataatatttcagagactgaatgacaatctaaactattgagtaaagtccatcaccagtccctaaacttg

SEQ ID NO: 13274 - DNA, 4988 bp, Oryza sativa
cctattaacttaacattttaagtcagttttttatatgatttataaattaatggatttaaagttttaagttaattggtgaagtcatatctctatcttacataaacaaaaataattttttcaacccagtttttggcttaatagtgtataagagtgacttatagctttagaagaccaaacaaaaagctattatttgtttagatttggagttttcgactcataagttgatttataagcataaataagagggatttgtttaaactggatctaaaaatacaccacgattacaagcggcgtcccggtaggcaaaacaacctaaaaaggcgcctgcgcacattgccttgctggacgacgctggtgcatgcacgcacgcacggcattgcagagcccgtgacgtgagggcgagctagccaacaacgctcacgagccgaatacaaccaaacgccgctccgtccggccacctccccttcctcctccatcatctcaccgggtgcgcttcccctccccttcgtacaacgaagatttgctattcgccagggcccaaccacagttatagctcacgtagccgctacaggcttcttcgccgcctcgtctcctcctcgatctcccttcctccctagaaaatctctcggatctcgccgagagctagcggctggctggcggcggtggcgcggtggcagcaaagtgtacgctttgcagttgctgccggcgcggcgcggcagcggtgacgacgaagagggaggaggagagaggctgtgtcgggtttgtgttgtgtttgtgtgtgtagtgtgagatctggagacggccgggaggatggcgcgcggcgggagcttctcgcggctgcggctgcgcgcgggggtcgttgtcgccgccgccgccgccgccctgctcctcttcgccgtcgtcgcgccgcccgccgcggcgctcaacatcggcctccagtccgccggcgacggcgcggtacgtacactatatacgtcactacccactctctctctctcctaatctgctcgtactcgttggctaacaaagttgattaatcattatgactgggggagcgacgccccagagcaaggccgggttgtgcaaccgcacgtgcgagtccgaccactgcacgagtaagtggctatgttattcgtcgtcgtcgtcgatcctaaatttgattgtgatatttgctctgacgacggtgatctcgattgggtgcgtgtgcagcgccgccgttgctgcgctacggcaagtactgcggcatcctgtacagcggctgccccggcgagcagccgtgcgacgagctcgacgcctgctgcatgcaccacgacaactgcgtccaggccaagagtacgtcacagaactaatccatcataattaccaactactgtcccgtatttgcatagcatatgctgcttagttttctatgtgtatatatatttttttttctttcgctcatatcatcagatgactacctgagcaccgcgtgcaacgaggagttgctggagtgcctggcgaggctgcgggagggctcgtcgacgttccaggggaacaagtgcatgatcgacgaggtcatcgacgtgatctcgctcgtcatcgaggccgccgtcgtcgccggcaggctgctgcacaagccttagcttacatagcctcagccgtgctgcaggcaccacccctgccggcggcgaacggcggccggatcgacggcatgggcggcgcgaaggatgagcagtattgtcctctaacttcgaatcactgacgtgtaggtccagtagatgtggggcctacatgtcagtcagtcacagtcaataatgaccgtactacagaggataaagtgcttgtgcgttattgggtgggtggtacatgttttgcttgcttggtgtgtgtcagtgtgtgtgtgtgtgtgcagcttagctagcaccgggctggcggctgcgtgcgtcgccttcaacttcacagttcacgtgggctcccccttgacagaggcccagacttacgacaaatatatgcagatcacaaatattactacatggttttggacttcggttttgtgccacttgctgctttatttatcgtgcacatctggtgtgataatgttatcaataaacgtatacatgtcccacataggtatgacaagacaattcgtctgccggtttggattatgtgatggcagatggtatcataagcttttcctttccttcagatggatctttgtaagatttgtacttggacggttggcgagtctctatgacgggatatttaggacatccatgatatagtagaaaagtaaatattagtaactaaaaaaatcttattatcaggtaagatatattgtgaaaaatagtaaatagttactaccaaattataggcttactttcaagatataaacactttgtgacgtgtcctacctattttttagttgtgccattgcttatgtttgtggttttttcagttcaccttgttacccgtactcttcacatatagacattgtgatgtaggctgtgtttagatccaagggtgaaaaattttagcgtatcacatcgaatattcggacacacatttaaagtattaaacctagattaataacaaaacaaattacatattcctcctgtaaactacgagacgaatttattaagcctaattaattcgtcattagtaaatgtttactgtagcaccacattgtcaaatcatagagtaattaggcttaaaagattcatctcgcaatttacacgcaatctgtgtaattaattttttttatctatatttaatactccgcgcatgtgtccaaacattcgatgtgacggggtgaaaaagtttttacgagggaactaaacatggccgtattttcaatttagagtaaattacacccacggtgtatcaacttggtaggtgggtgtaatttagtacaagaacttgataaatgagtattctagtgcaacaacttggtagatatgtacaatttagtacatgaactttataagtgactgtataaatgcaacaacttgcaagatatgtacgattttgatacaataagttcagaagttatgcgacaatttaattatttggagcacttttttatacatattcaatttttaagtacttattttaacaatatactagtgtggttttgtatataagcatatttatatttttatcctaataactaataactgaaagtcaattaaactggatgtaaaaattattatatttcagttgagatttgagaaggtgaagaaaacaaaaatttttaaaggtaattggatgtgcagtataattcttaaagattaaattcaatattataaggtattaaggtaatatccgtacgattgctatgtaaaggcatattgacatcgcgagaaaaactcacatagcatatgcttagctaagttgatgtaccaaaatactaaattgtcaagttcttgtactagaacgtacctacttgtcaagttgttgcactcgaacgttcaattctcaagttcttatactatatcgtatccacctatcaagttgttgtatatgggtgtaacttgttctttaattcaccattaacatttgacatgggtttatcttaccatccacttttgtaataaacattgaggatgctctaggatctgcgtaactataaagtactactgaacagtgggctaatcagacaacttaagaacacatggtcataactatgcaggatgcaaccgtgttcttaaacagagtcgttgagctgtgtttattaaggaaactgcaataatacatgctatgaccgtgtgattagttaacagcctaacttacaatactgtttattagtcccgttgaactgtatcaaccatacggcagatactcccggagttgtaccgcttgctcctaggatcagctactgaccacatggtaaaaatcaggcaagaacagcagttgaaacaaatatttttttttttgaggggatagaagcaaatctaaagaaatgttgctccgcttccacgattcatcgaacagtgggctaatcagacaatcagcgtctgtttgaaaatatgacgagcattgctgatttgctgtcggcatttggtaacattaagaactggagatagattttattaagcataaatatcacccctggaaacagagtagcagcgtagttgtgtgacttgtgtctgaagacggggaaaaaagcacagctactctacatcgtacatcaaatttattgccataaaattcatccatgaaaacagagtagcaaggtatttacactgtctgaagacgggagaagaaagcacagctactcaacatcgtactgcagatttattgcgacgaggataggtaatcagcatcatcaccattgcttctaggtcatcactcgtttatttgacatataggtaactgcttcaactaattttcataaagtggctgaggtgggattttcctttgtaacctgagaaagcataaaaaagcatgctagcaaattttaaaaaaaggtggaaaagtttatgaaacatcgatagctataattttacgatgttgtatgaggtgtactggtgtagtatccacttcagcattgcaagcaagccggtaagtttaagatggagtacttgttatgtataaacaggaccaaattacctacaaaatttctgctaacagtgacttaaacaaggacactaataaatttctgccttcggagttttcaagtgattgacatgaaagataaagtaaaacatcattcccatttgtaaaaatacaaacagcggcacaataccttgtttcaatatatacaggtacaagtaaccaatatgtgtcctgtgttacaggctacggcaaaactatacagtatcaagtacaagattatgcagtataagattatacagtctaaaacaagtacttcctccgtttcgcaatgtaagactttctagtattgtctatattcatataaatattaataaatctagacatatatgtatctagattcattaacatctatatgaatgtgggtaatgctagaaagtcttacattgtgaaatgga

SEQ ID NO: 13275 - DNA, 2880 bp, Oryza sativa
gcaggtctcttgtagcgtaaagaagagaacaggctggaaacattcgctccaaaagagaactttttgaacacagggtcaagttcatgtaacgctgcataaattactgagcagtgaatggcaatatctcaagatatattgttataagtatacaagtatacaaacaatataagcttttcaaagcatggaaaatactaacgttaactagaaaaaaacaaccaaacaggcaaattcaaaaacaaactaactcaagaaaatttctcttaacccagattaatggaaatgcaaacagcagaaatagcaaggttgaacaagaaaatttatgttcagaacaagaaaagaattaccaataaaagtgctacacgattggttataagactattccagcagcacctatgaatcgaatgcaatcttgtttaggatgttacgttgttatctttcggcctagatgcaatgtaaatatttgtttgagcaatcagagaagtctattacaattttcgacttctatatttaagtaggaaaatccctgactgtttctcacaagaagtcatcatgctaagacaatttacaacttgcatagcaagtggcatcaggttccaaaccatgcaacataaacaacacaataatcttgcaagattcaatcaatcatcatagtacaaactacacacatgtataaccaatttctacttggcatactgaccgtgcccaactttattgattgaaagttcctttgcctgcttcaagcatccatcatctccaaatgccttttctgtgagtaatagaaacagcaaaatatataaatataaatcactatccaaatccaagtaaacctgcacatgctaaaagatgtaaagcaacaacagagccagaagaactgttcgacactaataggtctgtaactagtacacattatcttcttgtttttttttaacaaactaccaaccaattccttgttcagatagcataactgatgaatgttaaactccacaactccaagaggatgaacttcacttaccctcaaagaagaaagagatattctccgcactcttgaagaaaaagtcgttcttcacctgccgctgcattgggaaacaatgtaacagtaagttcaaaccgcgatgcatgtgccactggcaatcaaatctagcagcgagactagaaactactcctcctgataatgtacatacgacaagcatacagagacagctattcagtaaaggggaaaaatatctttccccagacatacgtgatcctttgtggagaagacgtcgccagcgccgtcgaagccgtcgacgagctccgccatgcggtccctcatcgccctcacctcctccgcgctggagaacgaccccagcacgaggtaccctgcgaccaacgagacccccccacgcgcgacaaggatttaggtcccctcgtatcgtacatagttctagctgggcaattcgctgcctccgattgctgggagcgacactgaccagatggccgcggaggaggaggaggggaggggaacgagcggtggctggcgcttaccattggcgtcgaagaagcggagctgctcgtcggtgaggctaccggccggcggcatggcggcggacgggaaggggagatgagaagtttgacgaaacagggggcgggtggattgcaggagtggactacaggatactacacgaaaccgcataaagctggaataattaactactccgtatttgccactcggccgtgtttgcaatccttcgttcccacccttctccatcgtattccccacacacacgtactatttaaaattgctaaatgggtgttttttaaaaaaaatttatacaaaaattattaaaaaatcatattgatatattttattttaaaaaatagctaatatttaattaattacgcgctaatagaccactatgttttctgtgcacactgtacatgttggaaacccatgattgcaaacacagctttagggcgttcggaaccaagtgctcgcacggaaaacggagcgattcattagcgcgcgattaattagatattaaataatttttttcaaaaatagtttaatttgtttttaagcaacttttgtataaaaactttttttgtaaaaaatacaccgtttagtagtttaaaaaacgtacgcgcggaaaacaagagatatatgttgagaagagagggtgccgaacacagccttaatgtggtgataaaattatttatcactaaacccacatgtcatagatatatgagttctcacatgttatagacaatgagtggcaaataattaattgtcacatcttaaaagtggcataaagttaaatgtcccatttttacgtttccttgaagcaaaagcgggcatcgagtttcagccacaaacgtttacgcttccttggagggaaagcagattattgtggtgcgagcgtcttgggcttttgttttgtaggcttctaagctgcctagcaggaagctgggccttactacatactccctccgttaaaaaaaaagacaaaccttgggtttctgtgtccgtcttatatgaaagtttttttataattagtatttttattgttgttagatgataaaacatgattaatactttatacgtgacttgtctttttaattttttttcatattattttcaaataagacgaacggtcaaacgttggacacggaaacccagggtttgtcttttttttaaggacggaaggagtatatcggaacctttgatccgtacggataaggtttttttttcatttttcatttatttatttatgaaaatatttataaacataatttttatatttttcaaagtattgcagatttaaagattctacacccgagcttcttgatagggggtaatatttgaaattacaaattatttttctaaatatttcaataaaaaaa

SEQ ID NO: 13276 - DNA, 903 bp, Oryza sativa
tgctccggcccgtgaccgcgtccgacgccggcgagttcgaggagcaggggttcgtggtgcgcgtgctggacgaatgcgccgagacgtggaaggagccggacgacatcggcaacgtggcggtgctcgtgaacgcgtcgggcgcggtgccggcgtctacgcgggagtgccccgggttgcgacccagcaccgtgtacttcgccgtggacctcgccggcgagacgcgcgtgtgcgcgtacagcctcgccgcggcggccaagggcaagcacaagaggatcgaggtcatcgagtcgatccccatggcggaggggtacaagccgccctgcttctggttcgcgccggtctacacgccgtgaccgtgccaccgcggcggctcgagtttgatggtgaccattgcctttggatggacgtattgcgagttggatctaagccagaagaactcagagaattgtccgtcttcttcacagtggaattcttgcatggttgcatatgtctttgcatgtctagtgttcatcaaccttgagtatttttatctcttgtggatcataatggagtggtagattatcaggaatccaggatgttctctgctttgtgtaaagtagatcagtataggagtattagattatacggagtcatatatatgaaggttcatcccaaatgtcagcaacttttgagtccccggcgattgtgtcgtttatcccaaatgtaccaacaaattctcttttatacggtcgtaagaatctcctttattaatgcgagctacagcgagatactactactatactccctctgccgatgtgccctttctagtacaacaaatctggataaaggtctatccaggtcctctcctaggttagcttttttttttggacggaggaagtagatgtaagagggatgctatataat

SEQ ID NO: 13277 - DNA, 582 bp, Oryza sativa
ctgccgacgggggcggtgctgatccaggtggtgccgtacgggaagatggagcacatcgggaaggtggacttcggcgatccggcggaggacatgaggctcaagtacatggcgtactccgccggcgtggaggagagcacgctggtggagacgctggggcgcgaccacccggcggtgcgcgacccggagtcggtccaccggagcgggtgggggaaggtcgccgagtactacctcggcaagcaggacatccgcctcgatctcgcccgcttcgagcccctcctccgcgacgccatggattacctcaaacaccagtagaggcgagctccatccacaaagactactgtaattagctactagctgcaacatttttttttttttgaatgcctagctgcaacattttcattttcgttctctatgcttttttttttttgctttctattctttcgagttctttcacagaaaaaagaaatcgatcgattatttgatcaggattacagttacattatactacttctctttgtattccctttgatgcacataatggaggatggaatggaacgaaatcgattcattattagcactgaa

SEQ ID NO: 13278 - DNA, 950 bp, Oryza sativa
ggaagtctgcagtgggatcaaaccagagcttgtaccgcttctctctgccaccttttcctctggcatacaggttagtgtgcagggtgtacggctccgcagtggagttccccaaaaactcaaggtcaatctcgtcgtggaattgccataggccctctgttatcatctgttcaagatcgcaacacaagagaatggttagtctaaaagatctgcaagtgacaccaatgctaatacagtaatctgttcattccctggccacttacataaagagtagtcacggttccagctgagtctccagcaacgagcttgatgtccatgtcgatcctactgaagaggtatgtgctcttcgaccggaatgcggaggtcgtccagcggtcaagagtcagtgagatagtctgtttgccggagttgtcatagaacacctttgagtttccccacagtatgtcgaggtcattggtgaggtcgccagtgaccatggagattgctaggatgaggtagaaagcccacagggaggctaggaggtgagccctagcctgccccatggcttttggtggtatgggagagtgagcagagtgagtgggtgtgctgtgtctcaaatggtgtgccctttatagactgaggtgaagggagacttggttgtgcgagcgcgtctaaacaactaaacaatatctagcttgccagtgactttgattcttggaagatgtaagaaactgaagagaatcgtctggctgctgaataagttgtgtaaaaaatggtgatgaaagtggcttccattaaagccagaatggtgatcaagttgactaactggttctagggttcgatcttggctccaaatctgcgagccgtcccacggggtcttctgacaagctaaggtggttctcaagcaagttgctgaaggcttatgttatgatgacaaaagagttttaggatccctttggccattgtggtgcaat

SEQ ID NO: 13279 - DNA, 593 bp, Oryza sativa
ccttaattgagctaggtaccccaaaatacagatatgcctcataatcttcgtccaatgcaataactagctaggtggtaaccaggtttgaactgtagttacgtagtttttcgattttgctatttgttaaaacaccattgttaagtcttattccttttttttgcaataaaaaagaaggagctgtcaaaacatataaatgtacatgtgcagggatcagaaggatgcattggtctccatgtggcacttcctgaagcgcaatgggctacaaaatctgtacgagtccttctgcgagggcacatgcttcgggggccctgtttggaatcacattctcgagtactggagggcaagcaaagcgaacccaagcagggtgctcttccttagatatgagcggctgcttcaagacccaacagacagcatcagggagctagccgagttcgtcgggcagccattcactagctccgaggaagaagctggtgttgtcacggagatcgtagagctctgtagcatggagaatctcatgagccagaaggccaacaaggaaggcgcccaaggtgtgttcatcaagttctctcacgactcgtatttccggaaggggg

SEQ ID NO: 13280 - DNA, 2200 bp, Oryza sativa
aagggaatagaaaactgctgggaaccagcctgcactagaaattctcaattctgtcattctgggattgggctaagtggagccaaatcatcccaagtttcagttagttatgcaaaacaaagttccaggttatgcacaacagaagacccaggttaatgcaaacaaagagagctaggagaagatgtccgtcaagtcactagtgcttgggatatgagctgtggtctggctatgctctcagtctttgtctagctggtgtcccttgtaggtgctctaggtgttgcgcgtgtcagtctgatctgtctagtttccaggatgctgcatttcctgtctttgttttgttcttttgagctgggctgtgctaagtctgatctatctagttttagtttttaagccgggtgtgtgcgcctcatgcctcatgggaagtttcattaaaccgggtgtaaaagcctttcctctaaaagaagttgcacttggtctgatatataagaaagtctatactcggttcctcaattcttcattggtttaattttcattcctcaatgcaataccaaacggaatccatcccccaactatcaaaaccatgcaaataatatccctatgattgttttgcaagtgattttgagtgtggtggcttgccacatcatccttttttaccatgtcatctgccacgtcctgtgtgttagtcctttctcttcctttttaatagaaaacaaataatgaaaaagaagatgcaaataatatgcctagtagatggatgatctaacaggttcctttgttttatcatttcccctgacatcttcatagtgtactgtggtaaacctttgcagggagtaattactcaagatgttaatgcaatatttgttttccaaaataacaataggaattgatcaagtacaacttcaaaagtgtgtatgccttatcaaggaggattgttccataccttaattatgtctagctgcctctcaactacctcttgatctaatgacgtagtaaggtttccagtccaagtgaatacagtatttccatcatgtaggatgtacgaataggatgaattcaaagacgatgccgcctaatgaaagagcatgatcaagttaccttggaagcaatataatctaattccaaaaggagttcaaacatatctttaggaatgaaaatgtgagaacttacagcatcaacttgaattgcctgcatgttttctggtcctgaaccttgaattcggaagagcgcaagtccatcttccaaataagtgtcatcatcaataccattttcagcaataaatttcttgtatccagagcttagaccaccctataatgaaaaagggaaagaaactaagaattggatgttgtgttcaacctgagctaacagtattttatagaagggaaccttaaacacttggaagctttgaaatatgacgaagaattgaattggttcttttccctcatatagtcgtgtctgcatgtaaccaagaacaattagatacacaaggaagtcatgtctggttcactaatgaaatatggagaaactagtaggttacctggacagcctgaaatttcgcagactcaaccatcttgcttgcaagtgaaatagcagttaccctatcctcctgaatccaaattgaaatattttttaacacctacattttctagtatgcactaacagaacatgtaacaaccgcatgctgttatccaaaatgccacttcttaacagaaacagatagatcattgtggcttccagttcataaatcaaaaggatggaaaacagaagcatatgctgtccatagaaccttctaagttctttcttcattgtcctaaagtccggacttcattgataacttaattaaaaactaattgtgagctataaggtggaaactctaaatacaatcttataactatgaacatgaaatcaaagataaattttacctcaatgctcttcttcccaaaccaacttccaataagacactcctccttgtcatctccagggtacatatattgaaatatgtagcaatcgccagtgtaaaattttgattggtcagcagatggcagaagtatcttgtccttatcatttatgcgccagacctgataacagatatagaaaaaagaaaaatgtgtggacattttagctctcagagacccagaaattgaacatatagagcagaaataaaatcttgacaggaaaacattcttgtaaaaattaaaaaatttag

SEQ ID NO: 13281 - DNA, 614 bp, Oryza sativa
caaatcctccaaatggaagggctcagaaaaattcctataggaatttaatcctacgaattttctataaaaacaatgtgttccaaagaagccctagacatgataatattttagtttcatgccctgataatatatatttttgtctctggtatatttgacgtttatgataagatttagataaacttcttcaagaaaaaaaaaggcatcaatagtttctcaaataccacttaatttaaaaagagataatcgcaacacacataattttcacatagcaccatccaaccaccattcctctgtgcccaatcgctggcaaaacaggttatccatgatcgtactgaatcaccatacagttatacattacacatgactctgcgaagggagtcagggtgagcatccaccagacaaccacacccaaggctacataatagctatgaaaagaacaaaacaatggcatcaacgacagctttgtcagcagctgcaaatatgaactccagttcagtttcaccagtctaggctaatgctcctcgagaggaaaaggttgtcgatgtagtctatgatagggctagaggcatcgatgtatctcctcatctccttctgcacggagcaatctgcagtag

SEQ ID NO: 13282 - DNA, 4256 bp, Oryza sativa
cggcgctcccggtcacggtcccggtccctgtcccgatcccggtcccggtcacggtcacggtcacggtcggaggagtcgcggtggtgggaggaggaggagtcgcgaggggggttggaaaggggaggcggcggcgccgaaggggggcgggggagcgactggagcaggtcgagggcggagcggcgctggtcggtgacggcggcctggcggcgctcgagcgccagcttctcccgctcctcccgcgtgaggaacttgggcttctccatcccgtcggcggcgcgcttcatggcggcggcggcggcggcgggattcgtggagttggggagggtttgtgtggaggacgagacgacgggttcgggaatgggcgaacagatgggcgctactacttgtctacttgggccgtgcaggccgcaccgacctagtgaatttgggccgtgaaatgagcccagatgcgtcggaatcccggaattcggagtggattcgtggatttgggggtttgggcttgaaaatttgccccaaatgtacaggaagggaagtgctcccagtgatgatgaggatgaaccttatacttgttttccttcaagatccatatgaaatggtgcgttgattaggaatttgaaaagaatttggaagaatcgttcctttgttccaaaggaccaaatagttttttttatctataggtatccaatcctacaatatttctccagttttcatttgttgctaaggggtcctaaagaatgatttccctctaaggcccagtttagattttaacttttttcttcaaactttcaactttttcgtcacatcgaactttcatacacacaaactttcaacttttccatcacatcgttctaatttcttcaaacttccaattttagcgtggaactaacacaacgtaaattactgcactccaatatagggcagctaaaagcctaaatttcaaattgtcactttcacgatgaaatttgatctaacttaactagagatgcttaactaattaaacagcatagcgtgtgctgcttgcaaggtttacaaaaccatgttgctatcgcggttattacatacagtaaccttctcagtttttaaaattacggtatacttcacggtaatcgcacggttgtgctgtaaccgccaaaccagtgacacccaaaacagtctagggaacctttgttgcttgcgcctacactctacacagtgaacagggagaagcagcggggcccatgtatcagtctaacagggcttgctctaatcaacccatgcttaacgccaaagcaaacaatcactgtcggatcagttgggtagatgcgacgcagctcgcaaacctgtccgccccttatctatcagaacgaaccctctcaattacatgtgggccccacaacgagaaaaaaaaacctgtacgagcgtgccgacacatctagcctacaacgacactgtccaggctagcttagtggcttgtcaagaatcaagcagctactagctttcaatgcaagaggcagcagcagctgatcttgtcaagctagcagaggaattgcaaagaacgatggatgatactaacatggtagggcagaagcagagctggcaggtccacccaacaacagatttttttggtgaccaaatggtccatccatctcatgatttctttgacagctaaaccaaatcatgcaagacctgttgctttccataaccataattaattagcacttcgtgtttgtattttgcattttgtatatgaagaaacgagagagaagaaagggaacagataagcaaaaccataaccgtacgtgttacagccaatgctcatcagacaatgatgctatgcacaatgcactcaagagcaacccacattccaaaagcattacatacaacttagaaaatttacagggggaaaaaaacagaacaactaagaaaggcactgaggccctttttctttagccttttttttatactcactctacctggcatcaaagctggcagaggcatatgtttcgtgttaatgaattccaaggctttttcacaagccatggtttttgccacaaaacacaactcatggagggggcagctcaccaacccctcttgttcttgagtaaaagtttggaacccccccccaatcccctcatataatgaaaccaaacgaaaaaggacgtggaaagcggtccgcgaaaaaaaacctggacctttggaaggcagaattgctccatgatctgccatccagacggcaatgccgaaccaacttgagaattcgagcaccaggtggatctcctttccctcctggtctgcgccaaacttctggcatgacaatactagttagtcagcaatcttttttcgttgttttatagctttcatcttcaatgcattttcctcgaacatgatcataacgctctgcagatgatctggaaccagcaagaaagaatcaaggttctgacagaattcagtttggatataatgtggtattgttaggcaggaacatttggtgaacatttagtatttgtataaaaaggagtttggggggttgcacatcttcttttagtaaagtggtattttgtctattcaatgttctggaactaaagagtttgtactaaagtaatatccatgtggaataaatagaaccaactattgtactatacatgtggaaaagaaaattcgtcaagtaatcatgaatatgaactgcacctttttaccttcaatccgtgtaagggtgcagataatgcggtgagagctctccagagttccttgtacgctgctcgatccttctcaggtccctaagatgctgcaagatctcctgaagaagatcaaaccccttgtctcctttcttcaaagacctcacacactgttttataaattccttgtctgcctctagagcatgcagccgctcatggacttgatcaatttcatgcgctattgcaagtttatcttgctcattagctggttccaacacaacattttctgtagaatggtctgcctcaggatcttgccttgttaggaggtcgttcccatcttccacggtagtgtcatcaaataatgggagcagcttttttcccctatagcttacaccttttcttttgtcatgaagtttgaagttgctatcatcatcagagaaaccatttgaggcacccatcaaatggttttcttctgataatcgcttgtccatcttaacactatctgaatcttcatcttcgaggtcaaatagcctctcctctagcaatttgagctgctccagtatggagagtctttcttcctcaaaatctgcgagtgagcaaccaagtgtccccagatgcctagcagtttcttgtaacacagcatcagtagggatactaccattgcttccattaagaccatgggcagattcatcgccttcatagaaactttgggaatggtcatcgctgtcctcagcactggatgatgctgaggatgacccattgtggtcatcagccttgtgcctggacatttttctcctttccttcacctcaaagagatgaaccttgcgtctgtacaactcgagctctctctccagatcttgtttctccttctctctcttcacaactagttcattcaacctctctagcgcatcttgatcatactccgattgttcttccataagtcgctggtactggattgcctccatctgcattgccgccttttgttcttgcaagcgatttatcattgccatagtctcatcagcagcgatagcagctgcactcctctcattttcaagctcagtatatagggtgctcaaagatttatgtgcagatgccaaagcagattttaactgatcaacactaaccagttcaatactttccagatcaactgacttggtatcagaagtcattgctttatggtctggcaactcatgtaaaccatcgatatcttcaatgtgaattggtgtatccggagcactctctgattcaacatcattatagtcaggacataatttgtttaagcttgttgatggtccataagagaattgatgtaagcttggtagagcagcctctgttggattaactggatcaatttgaaaaaaaaaagatgatcagttgatcacactagagaagtcaacaaaagatacaaaccaaatgattaaaatcttatttcttaccgttgcctgcactgatgttagcatcaaacaagtctgttacatactcaatagcacgtactgtcataaaagttgattgatgattcagctcaggctgttcagcctgattctctttggtgccatcatttgaaatcaaatgaacttcttcccaagaatcaattgtcacaga

SEQ ID NO: 13283 - DNA, 558 bp, Oryza sativa
tgcagaaaaaatgtcgaggtcaaaacctgggtacagaaccaaaaacaaagcaaaaaaatgacgcggactcatcagtcagttgattaattagttggaggtcacgtgatttgcaggtgacgacgttcacctgcggcggcttcgtgatcgggctgcgcaccaaccacgcggtggcggacggcaccggcgccgcccagttcatgaacgccgtcggcgacctcgcccgcggcctcccggagccgcgggtgaagccgatctgggcgcgcgaccgcttcccggacccggacatcaagcccggcccgctgccggagctccccgtgctgccgctccagtacatcgccttcgacttccccgccgcctacctcggcaagctcaaggcgcagtacgccgccaccgccggcgccagcaagatctgctccgccttcgacatcgtcatcgccaagctctggcagtgccggacgcgcgccatcgccgccgaccccgccgcggccgtcaagctctgcttcttcgccagcgcccgccaggtgctcggcctggagaccggctactggggcaacgcca

SEQ ID NO: 13284 - DNA, 622 bp, Oryza sativa
agacagcacgtagccatttttcaacaaaatcatttcgaaccgatgacctcaaggcaattcgatattcaactttcataacaccagccaactgaacaaaccaaatgtcagaattagcaatgtccttgcaaaagaaaaagagaagcctgaaaataaaatagttaaccaaataaaagtattcaattgtacaggatagcagtcataccttcgatagatagtgttcattattcctatatgctgatgcaacttgagaaaaatgtttttgagttaaacatagagaaaatggagccccttttttgagtcctgccaaggcctcgttggcccattctgccactgcagacaacaatgaaaaggatacacgtgcaactagtcagtactaaactgaatttataaaacggtctcaatatagaaacactgttggcacttgtgcataaatataacaacattctcttgacgccttagcttaaaagcagagtacctgcagcatcatcactttgactacacttcttaagctcttccacagattcagcaactgatttgtcaggaccaaaggaagaaatgatatatggtaaaaacttatctagctggggccctgactctggctcgttcttgaactttgtcagca

SEQ ID NO: 13285 - DNA, 1338 bp, Oryza sativa
atttatgcagcgttacatgaacttgaccctgtgttcaaaaagttctcttttggagcgaatgtttccagcctgttctcttctttacgctacaagagacctgcagttattcaatctatgtacatctttaaggtaccttgtgcagtctctagtttcttgttggcattgactataacttttattccttattgggttaatttctccacaactcagcaaccaggcattggtggcgaggtggtaccacaccaggataatacattcctatatacagaccctccatcgtgcacagggctgtggcttgcactcgaagatgcgacaaaaacgaatggttgcctttgggcaattcctggatcacataaaagtagattttcgcatcaaattattttatttcaagaatcctcttgtgtttatctgagcttctgatttgtttatcatttacattgctttgtaccagatggcctgaaaaggcgaatgatcagagatgaaatcgatactcattttgatcatccttcgccaacctatgatctgaaagaatttgtgcccttagaagtaaagtcaggtgatttggtggttattcatggagatcttatacaccagaggtgaagttatcctgttatattgcgtatgcttgcaatcaactgcttcatttttttactaatatgttttaactttctttgccagctttgaaaatctttctccggtgtcaagacatgcactgagcttacatgtaattgataccgaaggatgtgaatggtccaagcaaaactggttagtttattttaacacttttggagaattctaaagttaaaattctatcttctatatttgctcttggtggtctttgcataacttactgtcgcgcagtagaagtctagaattgcctagaaacaagctattctacttccaagcttgtcctaaactgctcaaaccaagctaatccctccatttcacaatgtaagactttctagcattacccacattcatatagatgttaatgaatctagatacatatatgtctagatttattaatatttatatgaatatagacaatactagaaagtcttacattgcgaaacggaggaagtacttgttttagactgtataatcttatactgcataatcttgtacttgatactgtatagttttgccgtagcctgtaacacaggacacatattggttacttgtacctgtatatattgaaacaaggtattgtgccgctgtttgtatttttacaaatgggaatgatgttttactttatctttcatgtcaatcacttgaaaactccgaaggcagaaatttattagtgtccttgtttaagtcactgttagcagaaattttgta

SEQ ID NO: 13286 - DNA, 575 bp, Oryza sativa
gagatctcaaaaacaccttcgtcctctccacccaacgccataccaccccccctcccccctctctctcctccgcgcgcctcagcggcgaggggtttcgccgccgccgccgccgtcgcgccggggggacggctagagaagatgctgaccaagttcgagacgaagagcaaccgggtgaaggggctgagcttccacccgcggcggccatggatcctggccagcctccacagcggggtgatccagatgtgggactaccgcatgggcaccctcctcgaccgcttcgacgagcacgacggccccgtccgcggcgtccacttccacgccacgcagccgctcttcgtctccggaggtaaacatcgattcctccctgcctagatctcgcccgcctcgagcattttttttttcgctgtggtggttcgccgctcgcggggtcgggtgtggcgtcgacgcgtgtttggtcggatcctcctcctcggatttggaggacgtctcgcgtggccgttagatttccgcgtgatccatttcatggtgcaatgaggacactcgaggtagataccacgcgtacgtggtggcgatta

SEQ ID NO: 13287 - DNA, 1560 bp, Oryza sativa
ggaggttgaatgaggaaattttaagcatgattcaagctaaaaaagttggagagcgatcttcattctattttgcttccactttggaagcttgctgaatgcttcctttgtcattccaaacttgtctttgaattcagccgaagataagtaggtctgcatttagttcaaaatggggtatgtggtcattacctggtctgaggataagtaatacgaagtagctaagtatcgaaaagatcatatattcacctctcgcctggtaacgtcaatttcagtgacaggatcagcagctgtagttatcaggcgatcatatgggtatactgggagcccctcgtcatcttctggttcattttcttttacatcttcattaatagtgagagattcaactctactggtcatggtgttaatgccttcttttgcatcttcctcttgctttggcttctccaactcagatccatcttaatttgtacagaattttacaaacaacaagaaatcattaacccttcctctgtttaaaggcaattttatgttccaagataagtgtatcacataccttttactgatttagggcgatcaaaagaaccagtgagagaagcagttgcagatgacttagacggtgcacttgatgagtcaggtgtggcagattttgggaaagttttttaactacgggtggaggggtggaaagatttctgctgtttgcactttcaaagttagcagccaatgcagtgaatgccggagatcttcccctaacacggacacgttcagggctgaaagacatactcctcgagcgctgagatttgtcttgtacagtgcttctccctgaatatgttggtgttcgtcgctttggtttctggtaacaagttagaaagattgtaaatgcaaaggttccacatccacagataggtctgctaactacagaaaaacacttacagaccacagacttacaactagaaatgttataaataggtggttccatgattgtacacacaaaagataaacagaacactgttgtctagcagaaaacgagtttgcaacaaagaataccatatatggttatttcgacatggcagactatcataagacaactaaagtttgtacatatcttacatccaaagcaggagaacctccaccctttacaatggaaagcttcctctggtatgaattgccatgcatctacaagagaaacaagagtgagtacaacacattgaagatgaaaacaaggagcattatggtgcttctgccaaaaggaacacaaactacagttgttcatcttatgaatattctacttacaagtgactttgctgagtcccaagtgaagaaccttgtgaaaaatgtaggctcacttccttccatgataacaaaaattggtgtgtcgctggatagattttccatcaggaaatcaagcttaacgaatttctgatgcagtattaaaaataatagtcagtgaccaaaagaaaaggagatgccacctaaagtgcttcagcatggaaaaacaaatcattacctcaccaatgtccagagcttgtaatcgcactttgacatctacctggtggccaacccaaacaa

SEQ ID NO: 13288 - DNA, 522 bp, Oryza sativa
tgtggccaaaagtaatgtgatcctttagggtatgtcttatactacacttaccaacttcttctccctcgttttccaagcacatacaatgtttttggcaaactgctaaaccatgcgttaaagtacttaattaataatgcactaataagccaccccgttttccatgcacggggaagaggttcttaaacccttctcccgaacacaccattacttgtcataattcaagcaaaggcataaaaaaaatatttcaaaatcacttgtcatgtcaaagcatggccattttttagaccacaatcgtagaagtgatcaaaaagctcattctaaggtgactactggttctcattgaactcatgcctgcagtttgcgcacttatagaaaacagtttgcccctcatctgctgaccgtaactgcaattacacatttttcataaagtagttaagcatcaaagctagaaaaaggaaaattaagcttattgaacatcaaatgttcaaggatcgatagctgacctgcttggtgtaatactga

SEQ ID NO: 13289 - DNA, 708 bp, Oryza sativa
caacggcagcataaaggccagccgtgcaggcggaaacaccagtcggcagcggcgaaggcaggccggtcggtgaagacgtagacgcccaacaacggcggcataataggccagccgtgcaggcggaaacaccagtcggcggcggcggaggcaagccggtcggtgaagacgtatacgcccaacaacggcggcataataggccagccgtgcaggcggaaacgccagtcggcagcggtcgaggcggccggtcggtgaagacgtggatgcccatgaacggtggtgtgaccaaccaaccgtttaggcgaggacaccaatccgcggcgactgaggcaagccggtggtggagtcgtaaaccgccaacaaccacggcttaataagccagccgtgcaggcggaaacaacagtccgcggccgacgaagtggccggtccgtgaagaacttgattgccattaaccggtgtgtgaacaaccaccggttaagcgaagacacaattcggcgggaacgaggcaagcccgtccgtgaagacctaaaccccacacacgcgcggattataaggccagcgtggaagcggaacaccaattggctggcggacaaggcggccggtcgtaaaaacttacaccccacaaccgttggattattaggccaacctggaggggggaaacaccatcttggggttaacaaggcgcccgttgtggaaacacttaaaccccct

SEQ ID NO: 13290 - DNA, 861 bp, Oryza sativa
tcaaagaatccacaagaggatcttatgggaggtaaaggtaccactaaaaatcaaagtatttatgtggtttcttcacaaaaaagtaatcttgacaaaagataatctcataaagagaaattggaggggaaacaagcaatgttgtttttgtaatacacaagagaccatccaacatcttttctttgactgtcatgttgtacgttttgcttggcgatgtgtcttctttgccttcaacatcccccctccccacaatgcaaaagatatatttggtgactagctaaggggagtgcctagacccacaaaaaaaatgattttatttggagctagtgctttatgttggtcaatttggcgttgccgtaatgatatagtttttaaccataaaaaaatgcctaacatcatgcaggttatcttcatgtgttccaattggctccactcttggtgtatgatgctttcacaggaacaacaggatactatgcgcaatggtgctacacgcttggaaatagtaagagatcgaggcgaagcatatcttgattcccagcccgatgcagtaatcctggaaatcggtgctgatgaactgggagccgttgtcggttatgatgcggtgcgatagtccgtatctgcaaaatatccccttgatgaatttgatggcgttgtcggccttgatttccccgtgggtactgcttcgatctacttagtgaatttgtcgatcgccacgaataggaaccctgttaccgccctgtctcgttggaatggcccgagtatatctagcgcccagcacgagaatggcccaagtagagggatagtctggagcacttgcgccggtagctttgtgtgtttactgtggaattgacaagcttcacatcg

SEQ ID NO: 13291 - DNA, 561 bp, Oryza sativa
atagggcgaattcgagctcggtacccatattgtaatgttctttgtggatcatagaggcacacctcttagatgatatcaggttatggttaactatggtgttagaagattatgatattatggtggcctcttttatcgtttacttcactgttattatttttattccccatccacagtgtgtgtgcgtgggcgtgtgtgtgtgtgtgtagctggactgttgatgcctggttatgccttgtgaatgaccctgtcctaacatcctctcattttggcagttgcaacttcttaaattttgctcgaaatcggcactgccttgaatgcaaagcagatggaccaaagaagatagaaacagctaccactgaaatgaaaacgggagactggatctgtccacagtaaccatcgaatgccatatttgttttcttgtactgttcaacattattatatatttgccttgataacttatttatttttgtttcaggtgccacttcatgaactttgcacggaataagatgtgttttaaatgtgaagaatctcgaccaaagagccagctcatccctggagaat

SEQ ID NO: 13292 - DNA, 733 bp, Oryza sativa
acggggattggcttgtgccgattcgtaaaaagggaagaaagaataattgatcggctacagaagagggataatctaattttactagggacaggcaggcatgtgcaaagacaaaattactcacatccaaagccttttgagcctccttttcgaaccaaataatcccgtggtcagaagcggcgatgcatgacaacaccacatgctcaaaactgccctctgctggcactgcccttctgacctgcggcggaagtctcccacatctgcatagcagccaatgtggatacaatgccaattaaaatcaagtgtaaatataacagctaatcttcggaagcttctaactaatggctaatgccatactagcacacaaggattttgtttttttaattttaaaaaagttttaatttttggaattttggcccttaacctgcaggtctccctcttcaccatatgaaagactcttactggagcggagaagtaagatgcatccctaaacttctcttctgacacaaacgtgtctctcaagccaaagaaaacacaacaagcacggcaaactggaaagcaagaaacagaaaaaaaggggaatcacttgggctaaaaaaaatggggaaataaccagcggaacaaccagtaaacaacgccctcggaacacaatggaaaacaaaaagaactttagctggtttaaaaaccacaaaaatgaaccgaaaaagcgtcgccaaaggccctggagaacctggca

SEQ ID NO: 13293 - DNA, 658 bp, Oryza sativa
  unsure (1)..(658): unsure at all n locations
ttgaattgtggttggagatttgacatttattttgcttggtatagatcattacaaaaatggctgccgctaatggagtaagacgtgtttgggttggacaaaacagcctcatgtctactccagctgtatctgctgttatccgtgaaagagttggtgcagatgtaagatttattttacaaagattaactttttgcagtgtgactgttagtactcactgcttattttctctgtgttaacaaattaccttactggtgctttatcaaatcatcaaaaaatagggatcaaaggctactggtgccttcattttaacagctagtcacaaccctggtggtcctactgaggtatcacagttatgatgtatctctgctgctaatcaaagtggcacgattttctggggttatcagcaacttttcatttgatctttgcaggacttcggaatcaaatataacatggaaaaaggggggacctgcccctgaattcggtactgataaaaccttttttaatacaacgaccattactgaatatcttatcgcgaaagaccttcagatgtaagagtgacgctgacctggtagttttggtgttggtttgctcccaggattgaanatatgttcaatctttattcttgcccattgcaggtgatattcttgtgaagggcactacc

SEQ ID NO: 13294 - DNA, 725 bp, Oryza sativa
tttttgaaaatatcccgcatatttaaactcgcctggaccccttagttatggaaggacctatatataacttttgggaccttgtcaaggccaataaagtgggtttaaaccatcaagcctctaaattcccttcggaacattttccaataaaaatgctatcaaatgaaagtttttcaagccggtgggtaattgggggcaaaagccccaataaatcgtatctccacgtgcccgactaagagaccaaaaaataattaggtgttattaccatgcttgtagattctttgccattcatctatggaatactatttatcaatatatatggcataaaaagcaacagcattcaagaaaagggcttaataaaatatcttaccccccatgtaggtgctctttaaaaactcggtcaaacgcacgacacatgtccaatattgtgtcaagttgtgcctgtagattatgataagtttatgagtcagcatgatgtagacatggtttgcgaatagataatgtgctagggtgccattcaaatgaatgttgcaggttgtggcacgaacaacatgaacctgaacacttgcagaaagttacaacaagcaaagtacggtttttcttaccccagcatcacctccaattggcctaccaaggcgatccaactcagcttcaatttcatcaattgttttgttaatcatggctataatacttggaatttttgctctgatcacagcctctaagtgctg

SEQ ID NO: 13295 - DNA, 547 bp, Oryza sativa
ataaaaatagcaatatctcctttatgcaaaaagaataatgatgtgtcagcttttgaggcactaaacccaagatcaatcagtttgttgcttaatctggcaaaccaagctcttgagcttgtttcaaaccatataaggacttatctagtttgcatatatagtgtggcttagtgacatcctcaaatcctggtggttggtccatataaacttcttcttctagatgaccatgaagaaaagcattttgcacatctaactgtctaaggctccaacctctagacacagctatagataaaatgattctaattgtagcagccttgaccactagactgaaagtatcctcataatctattacatacctaaagaaccatcagctttccttttaattttatagacccacttacatcctatgacattcttccctctctgaggtgggactaagtgccaggtattatttctgattaaggcatcatattcagattccatagcatttttccaatttttatctttaagagcctctatatcattactagattactaggttctccagaat

SEQ ID NO: 13296 - DNA, 1737 bp, Oryza sativa
ttttatagcaaataagtttacttgggctctttttatttttaagatacaccactgatagatgtagtagtataattataaatgcacaaattaatgtgcttcttctttatgttgattaatatcactcaccaccccaacagtaacctccaactccaaataacagatatccctttctttcttagatcagaaaagattgctttagcatcttcagctgcttttacctgcaggatcaattcatatatactggtcaaaatcaacttattgagttcttgataattagcatctagctagtataggttaagtactttggatatagttttgcttaatttgcggcttaatttgtgcatcctgataggtgcaggagctgagaattttcatctgaacgatcacgattactaggtaattaatgttctatggaatataaaatcaaattgcataagacggtgaaacgaattaccggagaatgtttgctgaaccattccgtaaggttcaggtctaatgtgtaaggatctccgtggaagaaatcaggtacagcgacataatatcctgcttgaccaactttgtcagctattttcctgtaattttcagcatcattatcacacatatgcttttaaggtgtttccggatctactactggatcataattcacgatatattcagtggaattcaatgcaacaaaacagcacaattataccgtcctatgggtattagtcgaacaaaacacatcgctgataagggttttcccaccatataccagcccgcgccctccacacagcaagaagcggcactgataaagatatggcctcaaaacagttcaccaaacccccttataattatggacaagcttgagtagaagtgtagagcatgcagggaaccctgttgctcaacgggttgagattttgcagtttttttttaagaagaaatgggaattttcaaagctcttcttcgctctatatttattttgtatgtctcgcacacaattaattattcacatagagctttattatgtgaaaagtattgcattttttgtcctctctctgcaagatagataaaattacgatgttttgcacataatttctccttcaggaacaagtacttatatctcatgggttgaagaggtatatatctccttgcgacgcatatatattacaaatggattgatcagagctattctctaaaatatcaaacttgagatgacttgcttgaaggaaatgcttatagtgaaatatattagtttgattttttttgacatgctaaatggttcgaacaaaaaaaaattgggcacgcgtaaattaatactaaatcatacaatagtctggaacttcaagacaactttgccggcttcgtcattagggacatttctaaaaagacatgttcattgatcgagggatcgcctcgtactatactctctccttctataaatctgagacatatttcattctttggtttctctaaaaatctaagtcctatttatagtcactatgtgttaaattaaattgttgatcggaaaccaagaaaccattgtagaacttattggttgcatgttcattggttttgtcacatagtgagtgagttaattgcttcttattttttatcaaaagaaatagtctcatattcttggaaggagggagtacaaagtaaacagaaagggctaaacagaagagcaatcatttctacaagacatagagatttgtcaagttgttcaacaaaaaatagctgttggtttcttgtaacgacaaa

SEQ ID NO: 13297 - DNA, 2430 bp, Oryza sativa
ctgggctggttgtcaacagtagcatattggagaggggatgattgagctgggatgggttggaacatgatatatgaaatcaaacggcttatcaatctttcttgatactgttatggaattttattcaaaatctaggtggaattgtagaggaagattgaattgttagttgaaattttttgttgtgagacttgatctggatgtctttgttgtctctttgtctcctatggtggtgtttgcttttgaacttgtttactccctcgatccatcctaaaatataaggcataaccacccataacacaaagaccaagaaaacatttaatcactttcttagttggatcaccttgatgaatgcaagcaatgtgattgggagtgattgggaggtttgatgatagtataagatttaaaacaaataaattttataggaccaagagatactagttaatgtatgcatgcatgcacgccttacattatgagacatgagagaaaagtggttgtgccttatattttgggatggagagtataagcctaagtgtttggtgatgtaataccatatttgtgtacatccttctatagatgtagaggccgggttttatttaatctattattaaaaaaattaatctttcttggttacatgcatggcttgacttgggagctacttcataggaataattgcagtctgtggttggtaatatatatatacaaatgttacagagattaccaaagctgctaaaatatgttatatatccatgtaactttttagccaatataataattcactaacccgcacacgttgcttttaattgagttttacatatatcctaaaaaattacaaccaacaatataacctatacatcaactgatgcatggctcattatgcaatttttaaacgtatggacatcggaaatttattttgacgaaattatagtcgtggccttgcatgcatgattagctgatccttgtcttcatttcaagtgtttgtgaaaccaatcgaccattaaatcaagagcttgctcggcttttttgacctcgaatgggttgctggcgttatatctgcaagcaaatccatggttcactccttggaagaccttggcaaagtaatcaatcttcaataattaatgaacaaaaggttatttctaacgttcattttttgctaatgaataatatatttctttgcaaagatttgttattgaaatatttgatgaatgttttaaagaaaaatatgttcttcttgcaaaaaaggagagaaaggaataggtataggattaaagccacatgcagtgccccaaatgatggcctagcttttgtggattagattttgggtgagttattttcctcgtttcgcttatgcaactcacttgtttactgtgactattttttaaaccacgaaacagtgaacggtgtcttttttagaaaattttatatatatatatatatatgtgtatacgtttctttaaaaattaaataaatatattttaattttgtaatagttaatatttaattaatcatatactattgttatttctcggttcccgtttacaatatgctagtaaatcttttgatttttatgccattgtatcagctctaacttttgccagatgttgaccagcaattagagcccgcgtttccctcaaaaggaaaatatagcccgcatgatcctttatcatatcatcatccccggaaaattcttttgtgtgtctacagtctcatttcctttcagaaaatagacttaattagtttttcagtcaagtgttctcactcttcccgtctattgaatcctgtgcttcatgtatatgtgcaaattaaattatcttatctgaaaaacaaaaaggataacaaattgcaaggcaaatagagctatatatgctgatgcatttgctatatcaactgtaaacgaaattataacaggggaactcacccgatcagttctatgacgcaaggcctgaacatactggtacactaattttggtggtgtcagtgtgtcgttctgagctccaatgatctcaatggggcatttgacctctgcgtgaaatgtcacggcgaactttggaataagaaaacaatggctatatattcctgtgcaaccctatagctagatcagatgatacatgcatatttcagcaacagcaacaaagaaagaatatcaacctttaatgtcatcgacagtcaccaatccaggatgggtggtgacaatcgcttcaacctcgttggtttttgctacctccacggcaaacttccctgccagttaaaacttgcctttgagagactttaatatgaatcagatctctgtttgttcaatgtggagaggagatcaggaaggttcagagtgtatccttagaatatgaatctggacagactcatgtcttcgttggactagaaaacatctcatccaatactagattggtttttttttatggagggagtatgttggtattc

SEQ ID NO: 13298 - DNA, 690 bp, Oryza sativa
tcaggtaataaccctacatcctgttggccggagccggagttgctttttattcaccataatcacaccagtacaatatgtggggtagtctatctaattgttgtcgacatggcggtctgaaggtctgactcgtagtcgacaacagggtagccttcctcctcaaatccgtgtccggcgagatcagagatagcgctttcgtatctcctgacggtatccggagacaccgtaggggaatagccatgcctatccctgaagtcgatatccggcagcgtgtcttggcgtatgtaggcttgtgtgttgtggcttctggtggacgtgtgttgattgtcatgggtgtcttccatggtctcctcaccctctcctcctaggggggcttgtatttatacccataggtatccccttgtccaagtagaactaaggaaaccaatatggatacaatccgagtagtccttgtcgtttccatgtataactctggttgtctttccttatccggaactccctcgaggtcagtttccgtataagacatggtatgtggtggatcctgccgaaatttagtcaactactattaggtatgtgttatccataaccctgacaattttaaagagttagttttttttttcatatttagtggtggtcctatttttaagggtctgtttagatcctccaaaatggcaaaagctatgccgttttgga

SEQ ID NO: 13299 - DNA, 720 bp, Oryza sativa
ttttttttctttcgaaaatggaaatgcgttaagttggcgttcatgccatttccggcccactcggcccgttacaatttggaaaaggaaaaagtacaccgaaggtccctcagcttgtcatcgagttacaaaatcgtctccgaaccgtaaaaccggatataatacctcctctaacttataaaaccagtgaaaactagatccctcgacggttttgactccggttttaactgacgtagcagctgactcagcatgggacccacatgggtcccacgtgtcagcctctacttcccctcccatctccacctctcttcctctctctcctcccacgaaagcagctggccagctgggtacggttcggctggcgcggcggatggctggtgcgtaaaaactgggcggcgccagcgggggaggagctgggcggcgccggcgataggtgacgcggggacgcgggagaaggggcgacacggcggcgcggcgacacgggagaaggggccacgcggcggcgatggactcggcgggtgccccgaccgcggagctgttcgccgcatgcgcaggagaaccgcggagcaggcgagcgaggcgggctgcgacctcgctttcgttcgcgtgcggcgtcggcgtcgtcttcatcctccgaagcgagctcccggcgagttggtgaaaactgcaaaaccgggcaggggctagcaggcagtctcgaccgcgtgtgcgtctggcggcgtc

SEQ ID NO: 13300 - DNA, 650 bp, Oryza sativa
aaaaaagaacaatattctagcgagctgacattcagcgacaaagataaatagccattgtttttgaggctttataataaaaaaaagtaacggtacagcagcatgagctcaccaatcgggtctgatgaatcgacaataatagcatcatatgtcccttcaggagcattccttaagaactccacagctgaaataaaataggacagttatgaaaattacaaaccaaagaattgaaaggtgcatctaaattgcaaataggatatatttttttcacagttataaacaggtaatattgattgtgaacgtaccatcaccaacatgaagccgaacacgaggatctttgaatccaacagataaatctgggaagaaatctttacaaacctacataattaagatgcatatcaggaaagtttgttgtgcaatgacatatatttattcaaatatcaaaggagaattgttacatcaataactagctgatcaatttcacatatatcaattgactccacagaaccatgtctacatatctcccgaaggactccaccatcaccacctccaataaccaaaacctgaaattcggtaggtccaaagaacattagcgaccaaactaaaattttctatagaagtaaggataaaaggaagaaataattcaagacaat

SEQ ID NO: 13301 - DNA, 703 bp, Oryza sativa
attcctgcagcccttttccgcaagaaccaagcaaaactgattcacacgaaaattctatacaaaattcatgctttccaaacgggtcgttttgggtggggaatgccatacttgtgttcttcctcgagatcacaaacttgcctaattttgcaatctccatatttccccagcgctatatgggagcaaagcagccaggtacgatttgaaactatgcggccacaggataatccagaaatttacaatgggctaaatttgctaaacataagatcctcagagtgatactaccacacatatcgtcaggctgtgtgttcatttgcagctcatgatctccagtttttcacctcttctcatcccatttgagcaacatggggggaagttgcatgttttcctccctcttttcatagctcgatatggtgagaatgattgggaacatctccttggttgtccaggggcatgtactgggccatgatggcgcggatctctgaatccatgtacctctgtacacaggcacaaccaatgcaaaagaaaaagcgagaatttagatgccaattcagagttatcaacagagttaacctgaacaaagttacccatatcatacccggatcctgtatttgtatactgcgtatcctgcaatgcctgctaccactaggccaaagaagatcacccacaagaagttccatcctacctctgttgctgcatttttgcc

SEQ ID NO: 13302 - DNA, 507 bp, Oryza sativa
cgatagaatcaattcaatgctgaattgcaataagcggagtctcacaactagagacgaaccgctagactacatagagtaatgaatccaacgattcaaaaaaaactaacagatggaggaaattgcacaagaaatcctggtctcaaagaaaaagaaaatggggatatggcgaaatcggtagacgctacggacttgattgtattgagccttggtatggaaacctgctaagtggcaatttccaaattcagagaaaccctggaattaaaaaaggggcaatcctgagccaatccatgttttgagaaaacaagtggttctcgaactagaacccaaaggaaaaggataggtgcagagactcaatggaagctgttctaacgaatcgagttaattacgttgtgttgctagcggaactcccttctaaattagggaaagaagggctttcgaaatctaatacacacgtatagatactggcatagcaaatgattaatcacagaactcatatcataatatagg

SEQ ID NO: 13303 - DNA, 749 bp, Oryza sativa
gaagttaaaattctacctcattctcatatttgaacacgaacgggtatgacagatgccatgcctcatctaaagcaataccaagaaattcccatgttgcaccttgatccaagcttcttgcaacaccaatatcaccttgcattgtgcttactgtttttgtttcaaagaacagaaagagtgtgtccccctgagagatgcatactatcatatcaggttgagcattacaataataactagaaaaaaaaatattacgatgggcttaaaaaaattcaaaagcctggatttgacagaaatttaccttcaataaaagaaggtttctgtttgtgtattgtaacaaacaatattgatgttacaaaagcatgtataaaattcccctgtcccagttgaggaaatatctccaaaaaaataaaacccatcgtttacatatctatatgaaatccagtgtagtgccaatttaattttaaattatttcatcatttatccttaaaatgtgttttgacactcatagaaaccacatcatggcccaaattcacttcaattgtaatgcaatgtacaagtctcaggcaacattttttctggtttcatattcggtcaaagaactgttttctcttcagtgtttcaacaaacatttcagaatcatgataaacttaaaggcgaagcatctttgcgtactaatttcgataagcatgaacattcattaactttatcaaggagataatagcggttagaactttgtataaatctaaggagaa

SEQ ID NO: 13304 - DNA, 505 bp, Oryza sativa
ataggaatgattttccaaccgttccaacatttcatcaatgaagggtagtgaaaaatgatcctttttcgtagccttgttgagtttcctgtaatctatgcacattctccatcctgtgatggttcgttgcgggataagctcatttttagcatttgcaacaaccgtcattcctcctttattaggcactacttggactgggctatcccactcgctgtattgcacaggatagataatccagacgtgcaggagtttcaggacctctttcttaacgacttccctcatcgcattattcagctgactttggggttctctggacggctgagctctcaggcacgatgggccttgcgatgagtatagcagcacgggattaatccatttcagatcctgaagggaatagccttgcaacagcgcgatgctttctcaaagacggctagaagacgactggttttgccatcagaaagcttgtcactgataatgactagagcttccttattaccatatacaaaag

SEQ ID NO: 13305 - DNA, 503 bp, Oryza sativa
cctcaactatttctcgcgatatcttcttacgaagttttgttagggcatctataacagcctctggtttaggtgggcaactcggcaagtagacgtccacaggaattaacttatcaactccccgaacagtactataggaatccgtactgaacattccaccagtaatagtacaagctcccatagcaatgacgtattttggttcaggcatttgctcatataatctcactaaagagggagccattttcattgttactgtaccggctgttaaaattaggtccgcttgcctaggacttgatcttggtaccaatccataacgatcaaagtcgaatcgtgagcctattaatgaagcaaattcaatgaaacaacaactggtaccatatagaagggggccataaactagagagtgttgaccaatttgaaagatgcttttagtgtagttgaaataacggaattggaacttgtttggtcaagtaggggaaactcaatcaaactcataactgtcttaa

SEQ ID NO: 13306 - DNA, 1065 bp, Oryza sativa
cagttttgttataatttaccacgttattgttgcagcaaactgaaacgtgacgctaatgttgcagcaaactgatagttttgtcactaaaattgctgttttctgaaatctacactttaaaaaaagtatatcttttttcctctctatctacgatgagaaaatctagttataattctatttgtatatgtatgactaacatgtgggtcccactagtacgtcggcgctaccgtggcatgacacgttagcacttggagcgggtcaaaacccgtttggacctaaatgacacacaagacaagttcggagacctaaaaatatattttaagagtttagggacctcaataacacacccgcacaagttcaaacaccgtccacgtatttcactcaaattttgtttttttaaaaaatgcatcgtttagtagttcagaaaacgtacccgtggaaaacaaggaagtaggactcgagaaatgtgagaaacaaactaaaagccaagtctataatgcaccacctacaatctaacataattttgctacaatttggttaaaaaaatttagttttgcaaaatttactcaaaattggacgatattagtatgaaatacgtccaaccaaaatactggagagaactcattggacaatcaacggtagataagcgcacgaagctacctcacgttcccagatcaacggcgtggattgcgccaccggagcccgcatccgcatccaccacctccgctcgcaatcactctacaacagatcggaaacctcgcgggcggcggcggcggcggcgcgggtaagcgagcggacaccggcgacgagcgcgaggaggaggaggaggaggaaggagaagatggcggcgacgctgtcgcagctcgacgacgggatcgtccgcgggatggccatcggcgcggtattcaccgactacgtgagttctcccgccgcgaaaatcccccatttgtttcgactgattcgccgtggtttcctaatcgaactggtggtggtggcaggctgggaagataaactgcctcgacttccaccgcaaggaggatctcctcgtcacctccagcgaggacgact

SEQ ID NO: 13307 - DNA, 1074 bp, Oryza sativa
gacctagatgacatccaagacaaattttaaaacccaaaaatatattttgagattttatgggcttagatgacacacccatacaaatttaagaatcactcactcaaaaaaatctatagaaaagttgcttaaaacaatcatattaattcttctatcaattctttttaactaacaaagtacttaattaatcatgctctaatgagttatctgttttcatgtgcaggagggataagacatgtttttagcaccacatttgccatgaaactacatatttgtaatatgtgcttgcactttaagtacaaatcacatacgttgtaaatatgtacttttttggtataaactcaatgttaaatttatagttttgcgatatatcatcttatagttataattttgtagttttgtgataggcaaagtagaaaactagcaggttcatgtgtgtacggttacgccctttttacggatactataccactatatcacggaatagtagcaaacaacaacaaacacaccaacaaaagatgtcacagcaaatgaatgccaatgatgcaaggatccagctacagctgacctttggtcttgactaaccaggttgttgctaatacatgaaacaaattctaatggaagttacacaggcatagataaaccaccaggctataaaccatctgcctgcagtgcgtctgttcaaacatcaaagtgaaagtacaacctggcagcaaaacgttttgaagctaattcaagaaagaaaaaagatagttcaagtttaacctaaacatgactaatcgtcctgctcaaccttcaggctctgaagcttcgagtccagctcaccgtcatcctcttcctcctcttcctcttcctcatcatcttcagcctccccctcagggtcgttctcatctagtggaccaagcacctccacagagttctcaccactcttcagaatatctttcacctcatcaatcccttcgtccgagatgaaattcccgtttatgttcagttgcacaaaacctggcttgtttgcgattgcctgggcaaagcaccgagctcccaccctctgcagcatattcgtgcttacatcaagct

SEQ ID NO: 13308 - DNA, 749 bp, Oryza sativa
tatgtttttagtacgatgggtccgctcagaccgccagaaatgttctttaggatttttaggttgggttagtttttgtttttcaaacttttgactgtctgactttctttgattttatctaacattcatcccttttagccgtttctttttttttcaactccaaacttcaacttttttttattttctgttagtatgtttttcaaatggttaaatggtttgttttttttttgcaaaaataatttttatatagtagtttcttgaaagaatcaaataaactttattttaagtttataataattaatacttaattatttatatgctaatagtttatcacgttttgcatgtcaccgaaaagctaaacaaagatagagatttacactacctttaataggcttctctgtattcgatcctacacgatcactttgaagaagaagctgaggacgtatggtacctgcatgcacttgatccttccgccgttggtgatgtcgccgaagcctgagttggtggagcggcggctcactgggaggccggcggtggacttgagcccctggaatggagccacggaggtggccaaggaggctatgacaatgggagccatagttacgtagctagggccttttagattgatgacattttcaaccatatcattatttggtaaaattaataattatgtgactgcgtttagcttgttactaaatattagtaatgtttatataattttggcaacattattaagccaatcttactaaaat

SEQ ID NO: 13309 - DNA, 1271 bp, Oryza sativa
atgtagcccgacagacttcttctcggccgagtgcttgctcgcaagatgggccatctcgcagctttccttgtcgcaggtgatagcctgcttgacatcgctgcgcagggatatgactcctcgtggtcttggcatcttcatcatcatgtaggtgtaatgtgggatggccatgaacttggctaacgccggtcgtccaagcattgcatgataagctgtctcaaagtcggcgacttcaaagcagacattatctgtatgaaagttttccccagtgccaaaggtaaccggcatagtgatttggccgagtggtgtagatgaaaacacaaggaagactccgtgaaagggtgcattcctcagccgtaactcgatcctcgagatctgcatttcgtcgagagtcttggcgaagaggatattgagcgctcttccgccatcaataagggttctcttgagcttcacgttgcgaactactgggtctagtactgggggtaccgccccgggtggaccactcggttgggatgatccgagcgatcgaatcgattgcaacctcagaccattgtaggaattgtggtactcctggctggactgcgttgatctcccggtcggtcagcttctgcttcctctggactcgtaggcaagtggccctccgaagatgtggttgagctccttccttgaatcctgcaaagtgccttgagctggctcggtgtcgtccttcttctatgttgacgtgtcagtttccccttaagtcggcttcttgaattgagcgacgtactgcttggcaaactgcttgtagacgaaacaatctttggcagcgtgcttggagttcgggtgaagtgaacatggcgcattcatgatcttgtcttaggtgttgacacgaattcgttgatgctgaaaagtggacgtggcggcaaccagatcctcgggcttacacttgcgatccttgtggtgagtgttgctgctacttgcaccgttgttgccactgtccttcttgggcttccagccactgccggactgcttcgaagctaagactgcgtcgtccgccttggcgtactcgttagccttctcaaacatttccttgaccgtcctgggtggtttgcgtccgaatttgccaatgagtagctcgttgcgaactcccttggtgaaggcggtgatgatattgccgtcggtcatgttagagattttgttgcgcttctctgaaaagcgccggatgtaatcccttatgggctcattaggcttctgtatcacattgtagagctcgaagtgagtgcttggccgttcga

SEQ ID NO: 13310 - DNA, 1045 bp, Oryza sativa
gtcccacccctatatatatgtcttcttcctcctccagctgcccgagcaagcttcaaaatttcttcaaaaaagaggggaggtcatgccaaaatttctattgaatttattttggtgattacatacaaatcggaggtgcctaaaaggtttgcaacttcatcctccaatgttttttttgtcatactacatttgcacctatgttttgcacactttttttgtctccaaaatttagttgtaagttgatgagagagaaaatgtgtgtggggaagaaagaatatatagaaatttagttcatttgctaaacaaggttttataaaatagttgagaaggaaaactctagtgaaagttaatattaaataatagaaaacaaactaaaataaaaattaaaagaagtaaaacacattaaaattagtttaaaactttacaaatagtttttaagaattatttggtgtaatattttatgatttttgtatgaataaagatatcttataattattgtatgactgtcattattgtaagaataattatttgtgtgcagttttttttactcatgtagatggatcggcaatggatgtacgctgaccggcggtccaaagagtttattgacggcgtgcactattttttgagagtggccgaagctaacaggcaaaggggttttatttgttgtccatgcaataagtgtaagaatcagaaggagtattctgcatccaggactattcatttccacttgtttgagtcggggttcatgccaagctataattgttggacatcccacggagagcaaggtgttgaaatggaagaagatgaagtggaagacgacaatattccggactttgctcagtatgttggatttgaaggaaatcaaacgggcgaggaggaaatagctgctgatggtaacgacgttgcggatgatcttggtcagatgttgcaggacgccagggaagactgcgaaagtgaaaaggaggcccataaattggacaagatgttggaggaccacagaacttcgttgtacccaggttgcgagcaggggcacaaaaagttggatacc

SEQ ID NO: 13311 - DNA, 1082 bp, Oryza sativa
gaatattgaagggagcagctggtcttgctgccgatgccaatgcgttccgcgagttcttcaactgggccgcaccacgtgtctgggatgccgtacgttctcagcagcagcagcatctgctgcaagtggatccacgaggggtaggatcagcatcagctagagacaacagaatagcttcactgcaccagattgaggccgatcttcagaaactcgagaacgacctatggctgatccaatcaactacatccacaatgtatgacctaatcgatcgtcttaaatggcatagccacaaggatacagaagcctggcatcttcgccagatcaagtatgtagtgtatgatgccgaggacctccttgatgagtacaattactatgctctcaaggtgaaggtggacgcaagcaagaacttggggcaagatcactcgcatgaaacctttttggagttcttggacagtgtcaacttcagtaaagtgatggaaatccaaaatagacttaagcaggtttttgaccaatccaagggtttaggctttcacaaaacaccaaagaagtttgatcgattagtcagaccagagacatgtcgtgtcctcgacaagccagataagatatttggtcgtgaaaaagaactgaaggagttgaagcaaaagctaggagtatgtggacgcaagagaagcaggcctgtggcatgcagcactatagctgaagcaaggaggacagagttgcctgtgctgccaatagttggcatggggggcgtcgggaagacaaccatggcacaacaaatctgtgaggatggagtggtgcggaaacactttgactgcataatctggatatgtgtgtcggatgaattcgaggtaaacaggttaacaaaagatgttctgaagtctcttggtgtaaagtcacaacattctgatacaagggatactcttatggttaatttacgtgatagtgtcaacgcaaagaagtttttactcgtccttgatgacatgtgggatgatgtcttaaaagatgagagaggatggagaatatttcatagaactttaagcaatggtcttcagggaagtatgattttggtcaccactagatcttcc

SEQ ID NO: 13312 - DNA, 2552 bp, Oryza sativa
cacgtcaacgccacgttaatgccacgtcaaatgaagaccgagtcaaatttgccacgtatgcaccacgtcagccaaaaccgccgtctaaatcactgagggatctcatctgtagtggttttgataattgaggcacccgttgtatctggtttcgtggttgaatgacgaaaatcggattcgttgacaagttaagggacctcagatgaacttattccgcggcggatcaagcgatgtgaacatgggctcactgggccaatggacacggcccactaactcagcccaagtgccaagtccgccgggatcttcatccgaatctccaccggcccagttagctttcggcccaaaacagatttcaaaataaacaggccacttcaattcttttgttactacacggcataagcacatgtacacatactactacacatgcaacactatgcttacacttcggcaaatacgacatctaacacatgcttaaagaaacgaaaaccatcaacatatttctgatctcactaaaatcttattggaaggctacttgcgtgttcgtaatatttatgggcacttcatatccataataatcccatcaattatatatgggaagttttctttaggtatttttaatattggaaaaagtacggattacccccctgaactatcatggttggctgaattaccccctgaacccgaaaaccagacatagcgtaccctaaacttttaataccagacgaattacccccctcaatactattttgagcggttttgacttgagcttgtacacgtggcgccaacgtggcaatctagtcagaaaaagactcctcggggccacatttcatctctcttccttcccggtctccctctcctcggtcgcgctctctctctctctctctcccgtgcacacggctgcggacgggcggtgggcggcggcgcgcgcggacgtgccgtgggcagtggcgcggggggacgggtgaggcgatgggcgctcgccgccggcagcctgccatccggtttcttgtggtgatgagctcaggtagctgcagagaaatgagaggagcttgttggccaaatgaccatcgccggcataggaacagcagcagcaacaggccttcgacttccctggctacagcacgagcagcagcaacatcacttggcgcagcagagccgcctcgacaagctgaggcctgagggtgcagcagggcttcgacccgccggccgggtgagaggggaggccatggcttgctccgcatcgacggcgatgagcacgcccagcctgccgccatgtacgaccacgcagaggcgacggccgggcatggatcgtgcgcgttcccggagatgttaaacttcccatcgcagcgtccaacggggccctccgccaccgagctgctcgccagccagatgaacgccaactaccggttcgggttccggcaggcggcgggaggggtcgccggattggctggcggcgaaggcgccagtcggctatccacaaagcatcggacgggcggcgttgaggtggtggccgcgcggttccaggtcaagcggcgctggagtcggcgcgcgagggccggtgacgggcggcgccgaggtggcagccgcgcggtccctggtcgagtggcgcgggggtcggcgcgcgagggctggcgacgggcggcgccgaggtggcggccacgtggtccctggtcgagcgtgagagtggatatggctcaacgcgataatcatgttgatacacgaagagtattacatataggcgccaaccttccatagaacactcgaccgatttatggaagcatgatcgggaggttttaggaaagagggctaattagagatacatgccatatacagtctaacacccccccgcagtcgcaacggcgctagcagacgttgagactggagcgaaactcggtgaagaccggtgtaggaagccccttggtgaagatgtcggcgtactgcgatgttgtgggaacatgaagaacacggacggcgccgaccgcgacacgttcccgaacgaagtgaaggtcgatctcaacatgcttggtacgctgatgctgcaccgggttggaggagaggtagacggcactgacattgtcgcagtagaccagtgtagcccgcgacggcggagaatgtagctcctggagtagctggcgcagccatgtgacctcggcgaccgcattggcaacggcgcggtactcggcctctgcactggagcgggagaccgtgtgctggcgcttggaggaccatgacaccaagttgtctccaaggaagacggcgtagccagatgtggagcgacgagtgtcagggcagccggcccagtcggcgtcggagtagacggcgaggtcgcaggcggaggaccgctgaatgtggagtcctaggtccacagagccacggatgtagtggaggatccgcttgagggctgccaggtgaggctcgcgagggtcatgcatgtgaaggcagacttgctgtacagcgtaggagatgtcgggccgggtgaaggtgaggtactgtagcgcaccggcgaggctcctgaagtctgtgggatccgctacaggagggccgtcggaggagga

SEQ ID NO: 13313 - DNA, 8898 bp, Oryza sativa
ctttcctgctcctctgttcttgtacagtttttccctcatctataatataaaaccagcatgctgtattcttcaaaaaaaacgtgtaacaaaagagaaaacgattggacattggctgttaacaaactgcaacatgttcagatggttcaaatatgcccagctaacatagcactcccctgttcaaaaatattttaaactccaatcaagattcaaagattaggtgatatctaattaagtactagattgttatattaagattagacgatatctaaacaaaaactagattgttatgttatgaaacaaaagagtagcattctttttttctcatgacatggaagacatgcaacaatacacatacacatcacaaaaacaccgtgtctcctaacacagaaagtcataccatgcacacacctgttcttttagataatacacgcctgttgagtgtcccctaaactaaataggttcttattggaaatgtacttacataatacaaagaaacgtatacagataatacatacttgtttagcgtatactatggtgccaaatctagttctagatagctatattttggaacggatgtgttatcagggtgcagcttcatacgaaaaatagcaatcataagatccacaccgacacaacctttatttccgaatcaccgaatcagacagcagtatatttttttcagaaggcatggcactattttacttttaattggctctctttaacaaagcttctctctcttggtgcccctgcttgggtgtagcgaggccgttgaagcgcaaggtggaagataaataggacgagtagtcggtttcagaagaacaaagcccttgtcttctgagaaaccgggcttctgtcctgagaaagaggcaaagtacgtttgcacagggaacataatttagcaaaacagaacaacgcaggttgggcaagccgtaagcaagtctctatgaattgacgtaccgttcatgctagatccagaatggctcctttttatgtgacgcttactgatattgctgtcctccgggaggtctagaacatctctcccaagagcagaagcgatcatcagatcagcgatgagtagaaacaacactgccaagacgagagcgactgtgttcttcattgttgctatgagtgctgggagttgttcttcttcacaatttatacccaatagaacttgttacctaggtggtagcttaatgtcattgaattggtaaaggagaagccccatttccatgtcccaacgagcaatgaattgtttagcattaaatgaacatcatgcagcatgtggggaacgagaatcaaaatctcaagctggggccatagagcaatagctccctaatttcccaacatgtcataataggccctgtttgaaatatgggaaatcaaaacctaggaaaacaaacaagaaataaaaagaaaagcatagaaagtatatggatacgtgtgtttggaaaacaagaaaattattgcgatggtttctaggacttcaattggaaattcagaataagattttgtggactggcctgatgagatgcggttctacctgcatagcaccagttatcagagggcatatcaggatgttgagccccatcgtggacgagtgcagtaacccagtctggaaagttctctccagtttcaccaaggtaaggaaggttatggcttttctttcttcttaatataaaaatatgcagatctcctgcgtatttaagaaaaaaggaaggtaatggctgaagttgcatcttgaagaccataaaaagttattttaaaaacatcaagttaagccgaatggagatatttcgctcaaaagaagaatgggggttgtaatatgaaaaaacagcatgtaaaaattgttttttacgataactgtggggctgaggtaagaccacatatcatgcatacctgggcagttgatatgtggcagccatcttatgtgtgatgtgtccctctggtcttctaggagggaaagaaagcatagaaatattttgtttaaattatcacaggccattccatggctgagatatacaacttctcattggattcatgtttcaaagaagtgtatctgggtagctattcactaacctggctataggcaccaaatggattcactaaattgaatgcatgaaagtgaagcagctcaggatacccttccttgtcaaaagccccttgtggaatcaagaaggaactgaatagattgatgaaacaacgatagaagagactgactcccaggataggaacctgtcaatctgtggagattgagggcagtcaacattcagagagagcaacaaccatgattccctgaatgaaatccaagagctgagtctgacatcctcttcaatttaagttgtctataaaacagatagctaacgtaggtgcaaatttaatgcacaaaactatcactgtagcacgtgcctgtttcaggtgccagcattcttgctgcaatgacagcatatcgatagtaattcacttggttaataaagaggaaagctcttagtctagaaaaaaaaattaagaatatttaaaattgctacgttaaataccaaaatattcaacatttctgacagaagtagcctcataaacgaaaactaatcaaggtgaacattcttgaatctggacataccgaagcatcatagatcacatggtcacattgtagagtagttgcactcttgaaagtgcattcatgtttcctccaagtgtgcagattttatttagtgtctcaaaaactaccaacacagtttccatgtgttgtcaagaaaggggaatgtgtgtttgtgtttctccacatttaggagaactgattcttgatggtaattgcaactactgagttaaagcagaccttttattccatgtcctacggatagaatacacaagttaagaaaagtctgttccaggccttattccttctgttggaactcaagtggatataaataagacatggtaccaggtacatctaattttacctgtaatctttgagtcagacagactgttggccactgagtatttacctgggatcaacataagacaagacagtaaggacagtctgtgcaacagtgcagaaaagcacgataacaccagccaaccctgccacggccagccaagggttactaagatggttgtgcttcaaccatgcaatccacctgtgcagacgattctggtaatgtgcctccaaggctaaagacaggggcatgaggtaataattcccatagaaatcaaataccacacctttcgtcagcttcgtaaagagctgcgatacatctctgtcagtgcgcaaatggtgggcaatgatcccctttctagccaacagtgctacatcatcaggcatgttcataagcttagccatgaaaataacataggcagtaacatcgtttcctacttttggacatgtttgctccagcgctacaaagttcctaaaaagaaagctggtgctttcatccacaagcaaaaatggaatttccaagacagcatctctgagctttatatccaggagagaatggcgattggactcgctatatgctctcctcctaaattcaatgccagcttcatgatactgcgatgcccggcgccaccgatatggaaaatgaccattctgtgacgaacctaaattagctgcctcctgcttgtaagtaagatgtagataatcccatcctagctgaagaaaatgacgaatgtggtgccccgtatgaccatgatgctcatcctggtttggactgggtctgacgtacatatgacataagtgtaacaaatgatcaaaatcttttggacgattggattctcttattgcttttggataacatggtacaaactgttcaatgcattgaacaatactccttcttagtgcagtagtagttgtcaatttacttgcaagttttgaaacaactatctcgtgtattccctgaattacaaaaagtgaaatttggttctctaacaggagcaagtcatgtggaacaaacatgccataccactgtccaatctgctggctggggtcctgatactggccactgatttccgaagataactcaatatcagagattgaatattcttccatagagtgcctgtcatgatccaattgagtgttcttcatcgcactctgcttccccttgtttacttgttgactttcatttctcccagttactttctgatgatccccaaaactcaaagctccctcaaatgttttgtcattcgaaggagaaggtatatatctgagggaatcaggccacaaaaattcattgtattgacttagagagacaagtacaaagcatccatcaagcaagagagtctgcaagaactttctcttattcattttaatatctccagaatagcatgaccttgctcgtttttctagtctgtttatgatggtcaagtaatctttcagacctttttgacagcttaacttaaggatatagtccaagcagttccatttttttctctccatgaaagaaagtgctgaagacccattgtgatatgggccaatcgacaaaattagtggttcataagaatctctgtctatcatacggatatgctcatggattcttggaatcaagcagaactcagatccatcagcatgcacagtatccaatgacatgtattttttcagtttatccttcattgagttacccagctcctctatctcaacatcagatataccgtcttccatttcagtcattttctacctctcctaaaagcctttacatttccttcttaactgatcgacagagctcatgccttacattttagaaaagagaatcattacattagtaaaatcaatgtaatggaagaagcccggattacaaacaagtggaggtatagcttgaaggagagattctgaaccctggcctggcacattgaacataagctagtaaaaattttccaagagtgaagaagaagacgagcttgccgttgcgaaaattgtagagtggaggctagttgcaacgcatccgaaagataacaacaatagccgagggaaacaaaacaagtgaataaccctaaaacattactacctcgtacgaacgagaatagatccacgaaaagttgatcgattattttactttgttcacggtgagatccgacagaatgccgtacctcgggacacggagcgagctccagcggccgcgggaggaaaaatacgccggtgggaagtggtcgccggtgtccggagaatccgggaggcggaaggtgatcgaagatggggtgagggtagtggaatgcggtggacgacagcgtcggagggatcaatgtggtgggagactttgggctcctttgggccgggttagccgggccgcgtgacaagggacccgacatgaccgggttttggctgatgtaacgactaagtggctccttttaactaagttttcgtgtcacgtggcattgacgtagcacttacatgtcaatttaacctggaaaagtaattaaaaccatagaacctacatgtcagttacacatacaaaataataatagatagtggggcccacatggtcccacatgtcaccatcacattcccgtcttctctcacccatgccaactcgccacttcgctaggaggcggagcggagcaggtggggtgacgtgcgggcaaagccggcaaacgggtggagtggctgatgaggatgttaggtcccgatcttccgataggtattgataaatagtcgatttgggcggagtcgagacacaactcgattcggcttttgaacgaacacgctcttgagccccacaatcgcaacaccacgtctcctctgtttatcaaccgtgccgaaacccagttgacctcgccgagaaggctaatccctgcatgcgaatcgaagaacacaagcaagaataacatagattgcaaaacaattgcatatgaatgattaagcactcgaatttggggtttcacaaaccgatctagcggcgaaactgttcttgacagattaatctaagcaaaactccactccaaacaatgacggttactgaataaatattattagggacgtcctagggttgtcctagggcgcacacccctatgggctaagcccacgacacaattacaaggcccaaaactcaaatcagattcagactggatgaggtacatgacttattttgcagattcccaacagctcggtaggaattttgacgtgggaccaaaaccatatgaaagtggactccataagctttccaacaagtactcatgggccacgatcgaaattccttctagatgagcggctaggtccgtttgaagttgatgctgtcaggaggcccgaatcctaatccaaaacgtatagaactttatctcttgtcttctatgaaccaaaagtaacatggtgaggtagaagtagacttggagaaggtcttggtttggtctctaatcaatttctttaatcatccatgtattccttacgcacggtctcttttctttcgcccaagcaagtacctctgtaaacgaaaacatacaaaactcatttgtgtagcaacgtttgttcaaatatataacaagtaaaactaatatagaatatatacacctttggttgattaatacataaggtagtcatggttatatctgagctagttgtgtccttattagtggcggcggtggacagagcagtccagcggagccgagcgggcgacggcgagcgaaaccggcaggcgggtggaggagaccagcggagccgagtgggtggcggcgagcgaaaccagtaggcgggtggagcagaccagcggagccgagcgggtggagagctggcggcggcggggtgagtaggccggtggagccgagcgagcggagctgtggcgcgcaaagccgggcttcccgccaacgggctggcgagctcaagctcgtggcaggcacgaagtggaggattagggggtgctgcccgtgctcgttgccgttgccgtcctcctcaccatgctccaatggccgtgaatagagatgcacagagggaggatggcgctcaatattcaatgacaagtaatttctcagttcatccttcattgaattacccagttcctctatctcaacgtcagatatactgtcctccatttcagtcattttttaattctccttaaaacatttacattagccacacgcaaagattaaacagcaactgttatgacaaggtggttattatggtcatatggtttatttggttggttcagaatggcaagatttccaatgggattgatgagccattctttcaagcatggaaatatcttttcaaggaattttccatgattatccgtagagtgcaagcagagtaatttctgattattgagaaccactccctccgttacaggttataatacgtttttactttgatcgaaatcaaaccgattaaagtttgaccaaatttatagaaaaaagtagtaacattttcaacccaataaaaatttattataaaatatattcaattattaatttgatgaaactaatttaatattataaatattactatatatatttgtctatggacctagtcaaccttaaaatagtttgactttgaccaaagtcaaagacgtcttataatctaaaacagagggagtagctaactagcttgccgtgattttattttttaatagccttgcatattataatttcttaaatatattaatacactaggagtcgctcttcggaaaaatcatttgaagtatttagattgaatacatcaaaatcgtaagtgtagatttatctaaaaaaaatcatagtattatagttctgtagggtactaaaaataaatttgcaatataaattagcggtcacaatattatattccgaggaccatgctcatgttgtaatccacatatacttgtgaccggatgggtatttccaatgagctaaagggcataacctcccactttttggaattagttgtgaactaacccccaccatcttcaacctcggcatgcaatgacattcaaatctatctccagcataggcatgtcctgttgtggcgacctttttagctcacctttggtgcgtccttgattcgaacgacacctcccacctaggaggagagagtcactttcacgtgttatgatggaaagatttcctttcatgttattcagcaacttcaccatgctgcagcattatctgatcgtccaactaatcgcgattaatcgtcctgatcaattactgtgatgcacaaaggaaagtttatgcagtttgcagttcagtacacaagtactctgttgtaattgtaaatctccctcattactgtacttggtatataacattcgaaagattttgggatgataaatttgcagaagaaggcaagtgtgggggtaatgggagcagagtgaaggagaggttaagccaaaattctggtgaagttctgattgaacagaaaccagtaaattttcccataaatcacacaatcacgtatgtttgcaatcgtcaacaatggcatgcatccccggatgacagagcattaacgaattaatttcctgatatctaggcgttccaaaagcgctggaacaaaggaagaaggcgcccttgtattcgttgtaaaaatagcagattaatcagacctgacgacgcatccaaaaaaaaaaaaactcgctaatacctagcgaggatcacgggaaaacaatctaaaacaccaatcactttcttcaaggcgcactgcgacagaatgccgtacctcggagaagcggaggagatccgtcgccggcggccgcagcagcagcaggagacgccgttgcggtggaggcggacggcaacgtccgacgatgtgggggaaatggggatggcgagagacactgggaattggggatggcgagcggcggatggaacaagttcacctgcggtccctcaatttgttgctgagttcgaaattcgtccctgagcgcagaacaaggtacaactcatcgcccaacttacgaaaccgtgcaaataaggtccctaggcagtatttgtgtccggttttggttgtcgtgg

SEQ ID NO: 13314 - DNA, 8663 bp, Oryza sativa
gcaccggtttaacagtttaggcagttaagatatctggttttgtagttcagggtcacggattagattcgtgtcacttaaaatatcttgttttgtagttcagggccacggattagattcgtgtcaattttaagggagtcaaattgaacctattccctcaagctatgcaggttcttcttccttctgcactcgcttccagccctaaccctagccacgcgcacttcaaaatttcctcatcaaggagatcttcttcttccgctcgtaatgctggatggatggatggacgtgctgatgtgatgatcccttcttattgttgcgccaacgccgcgaacgagccgccctatgatgggtgagggtgagttggttctttcccctctctgtgggtggggaattttctttctttgttcgatcgccaaaatgggccgcattgatgaatctgatatttcctcttccgttcttgattttttagcatagtgaatctgcccctacctgtatttggaggcggacaggaataacttgtagggcaatcgcgcggtgaatcggcagttgaaggtgccaaatgacaaaaccgcatttggttttactgttcatgcagggcttatttgtattgttcaggactcaggagattagtcagggttcagagtcattggatctaattcatgtgatttgtgcgttcctctgtcagtataatccacgctgatgacaatgggcataaattttccccaagagatgtcttcccatcaaattgagctatctaatacttattttttagattgttagtgcattgaaatttaaaagaaattaatttatcggttgattattttctttctccccaaccttttcatgatagcagttttcttaatcactatttgaaagtaccgattttcatttcttaacagatatgttgactgaacaatatgacaatactgatgatgttgacattgatgagctagctggttccatgagggcagatctaaatcgtcgcattgcactgaatgagtatcgagggaatggaaacaaatgctgccttatatgcaaaatagtatgctgaattcgtcagaatgataggaacgcatatgaaccaagtgttctctcaattggcccttatcaccattcagagttgcctctgcttgccatggaaacagagaagtggatatgtgtagactacattcttaagctaaaccatcatgttagcttgcgtgagtacccgagcttgctttctgggctggagaaacaggtaagaggctgttacagtgaggacatagacatggacagtaaggagttcttgcagatgcttctgctggatagctgcttcattcttgtttatcttggaggtatgcaagggatttgcagggctaaagacacacatgaagcttctgttgatggtcatgggatccaagaagatagtgatactgttgatggtataatagttctgctgtgtatgacctactgctgctggagaatcaaattcccttcttcgttattagggccatttatcagctgttctctcgtgataccatggcgactacaccattacttacaagtgatatttctgaattcatggaaggcattctttaccatttcccaaaagcaatcactgaggagaataggccagtagacttttaccatctgctacatctgtgccgtatgtacctgaagcctggtcacaaggtggaggataaacagcatcatggtcatgctggaaagtctcactactttgactatatatctgattttggccaaaaggtcttctgtgttggacaggagcaaaacatgttatatgaattaagcaagttgaattcaccagagcatgtttatcggtggcgtagagcagtggactatcatgaggcaggaatagaattcaagaaacgggactttcatgaagaagaccctcattctttgttggacattagattcaggaaaggagtcatggaaataccatgtttgccaatcgatgataaatcttctttgcttttcagaaatcttgttgctcttgagcaaacatgtcctcaagtcagcgacgacatcactgcttacattgtgctcatgtctgaatttgtcagtacagctgctgatgttgcacttcttgcacagaaagggataatagtccatcagatggaaagcgatgaggaagtgtcgactctcttcaccaaactttttgagtatgtggcatttgactttagaggtgaacactacctgaaatccttatattgtgccatggaagcacattaccaaagtcgtctaaataggtggaatgcatggctgtggcacaatcatttcagcaatccgtggttaggttttgctgcaataacttccgctttcatagtattatgcagtattttgcaaactgttcttgctttcttatcgtacacagcataaacctagataaagcaaaagagtatgtttcaggtgcatcccgccttcgcaccgcttttttttttttttatatggaatgattccattacctcatagacccagtgatatcactgctcaccaaaacctccacccctgggggaatatcgtcccacctaaggatgtcatagagttccacattacatctcagcaccgcttttttttttatcaacgcgtcctcgagtagtacctgttaatgaccaaatttggtaatatcagcatcggaagaggagtctagatcgaggtggagtcgaaggcggagattgattcgagaacagagcaagaatcggctgaagtccagatcggctacgattaggatcggctgggtctaagtcgggctaggtaggccgatgcagccgattccgacagtataatttggtatatgacattgggttgaattgaggtgcttcaagatgattgccgcacatggatagagtcctgataaggcaattgtatctattaattaggatgttttatgtaacttccttagagatatgtttgggcaaaagtctgccgcaaagacttatggtatcttagagtttgttagagatagtggtcgtgtccggtatggacatatcttgtaattctcgggtataaatagaccccgagccctatgtatttttaacacacacgttcaatacaatttcggcgcatcgccacctttttgctttagttttgtttcgacgagttcttgctttcgggttgagctgcatcggtttcgatcttcaacaagaggtaaaacttgttatgacgacttgtgttctcgagattagtgcttccatctttatgacactctaatcttgtctatataattcgtcaagttgtcatatatcttacataatccttggcaatatcatcatctaatttacaatcggctaacatctgttaatagaaggcagccgattatgttaaatagcgacgttgtcctagatcatataagatatctaccactttatgaaacacccagcggcttgattgtctagatattgttcttcttttcatacctaatgctgcatcagttgagtttgatctattaagtcgtgcttagaatatcaatctctagcatgtcctctgattgccgattagggtagtatcggagtttcagccgatcttatctgatttaaccatattcgatctatatgcttcaatgacatgttaaatccgccctttatgtcaggatcttattgtatttaagtatattaagcttttgtttggtatattatatttggtttgatatctttatataaagtagtatcggagtattaaccgatacatgctagatctatccgatcggctatgctataaacatatataatcctgttattaatatatatttcgatctaagtgatttatactatctcggcatgatgaccgatctatcccaatcacttgattaaagtatatattaatataagaactatatatcgttaatatctacagccgatcgaatagatttagttccttactatctatttataaccgccgatcgattcatagatgacatcggctcaaagataaatgatatttcatcggcacctagccgatcggctatcatttatagatttaaccacgaattctttgtctctatttcttgttgattataggatcaaatcaactggcacgctcatacattcgaaggcaagctttggacctgcactggagttaagcagatctcccaggcctcgtgttttctgtcaacagtaccatgaggtaccactttttttattataaatttggtacctcatagtacctacctaggtacctctacctagataccaagaggtactaaattttacactaaatttttggtacctcatggtatctcctcaagaaccgtagaattgctcaacaacttctattaagagctagttaggtgctaggattaagatcacaccctgttatggtaatacattgttttcaaatgttgttgtaatagatacactgttattcatttttaggttaagaaaacgtgcaattccttatatttatatgtcactaaatacttcctaatatttttcatatactaatgatgccaaattgatatatagatgcagtttaatgacctcttcggagacctggtaagtgcaaaaacaaggggactacatggcgattagacacagataaattattgattttcgtttcctcatgttgattagtattcttacactccatgtgataccctcatccccattgtaatccagtccccggtgtaatatattactacctcctcgatttttataggccgtattttatttttaaaaagtctaaaggatcacgctttggccattgatttctcataaatatattgttgatacctttaaaaccaacattttgttaaagtattttgagatgttaatatattggtataattttggtacattaaattgactaattgttgctcaaaatccaaaagaagttgaccttttcaaatcaaaatacaccttgtaaaaatctacagggagagtagtgatccttagggtgggttcgctcacctccaccgtacgtaaaacgaagcgacacattttgttatccctaagtattttttttttgaaaaatagattaatatgatgttttaaagaaactttcgtataattttttttttgcaaaaaaaaaccttttatcaatttgaaaagcatacgcgtggaatacgtggaaggtgagtgggaaagttagtgaaagaactcggttcccgtacttttaatcgttggtctgatcagcagggcacaagtcccttccttctacagccctagcaatctggtgtaacaaatcaaagtgcattttcatattctcttctttatcaggataatttatcaactcatctcatgtaatcatgttatgccgtacattaccactgatatctctgaattcatggaagagattctttagcatttacttgaagtaatcactgaggcgaataagccaactttttaccatcagctacatctctgtcgtatatgtacccaaaacctggtcggaagctagagaatgaacaacatcatgataatggaataaatgatagcttttgtttcaagaaaactatagccacttattgcataattctctcaaaagagagtaaacattcaggcgacccataaagactggcttctaacaaacacactttaagagaaaataattattgaagtatgtttgtaaatctccagccgaaaattctatatctgatattggccaaaaactcttctgttttggatgggaggaaaacatgctgcatcgacgattagtgagtttatttcacccctgcaggtcaatcggtggaatagagcaatggaggacacgtccaaacactagctgcttccgtccagaatgtcatctttgatatcccaaaaggctgtcctgctgtgcgcgacttctggtaaaaacaccttgttcctttcctttcctcagcaaagtgcgtcgaaggatttctggtagctgatccggaacgggatactcgcatcgagccaccaatctctcatgctgaggcctgagtctcccgaagacctgcattttcaccttttaatgtttttggattctattctaggaatatacctctaaaaaaacttattctaggaatatatctctacaaatattattctataaatatattcttttcgacacaccaatgtcattggcgccgtccccattgctcctcggtgaaaactaattcactaatatgaaggggacgacgccaatatcattggcgccgatgagctatttataattttttgaaaaggggacttatttgtaataaaaaaaattacaaaacaggacctatttgtaatttttttattacaactatatccttttatgttacaaattggttctttttgagtttttttggaaataggtcctcagcgtcaaagatactagtgtcgtccccgttcacattagtggcttagctccaccgaagggcaatggggatggcgtcaaagtcattggtgccgtcatattggatcacgacgccaatgacgtagccgatgcgaaaagggatcatttctagaataaatatttttaagggatctattggtagaataagtttaaaggaataaaaggtaaaaaaaaatccaggttggaagactgaggaattgatgacgtaacaacgcgtttcttttcccctaagtgacaactgaatgagtagtatgcagatcagcagatgtatgcacaatgcacacacgcattttttgtttcaaggaagtgtatagggacgcattcgcatatataaagtagtgatgtaaatgggttggcccatgggtttgtaactttttaccgaccaaaaactagggttaatcgaacttaaccctgaaaacaacgaggtagaaaaaaaatctacatttggtctataatttacctaataaaaaaaagaagtgggataaaaggttctagaataccgtgtgtatgaaaatggtaacagaaaatataagtggaaccattttctaccattacctttttgtcacgcataaaacttaacttttttagtgttgtatttatatcaaaactgaatagttaaattaacaaatatgatcaattaccaacttatcaaatgtcgttttgaaatagattttatcgattccaaacgtttttgaccgtttttatcctcaagtaggcaaacttgtgtgcctaatatgaggtgcggtggtgtgcgtgcagcattggactagaatgagtggtgcaacgatacgtgtaagagatcagtttttgaagcaataacaaacaacgtttggaatgacactccaactgcttcaggaatacataagcgtttgggaagtacttagcaacacgggaccgtgatctaggaagggactgaggatacaatccaatggagatggtcggccagcggctcgtacacggcaagctctgtgtatatcatgcaattatgggaaaaacaagatcggaatcagcgggcctcgtatggaagacttgggcaccggagaaacacaagttcttcgcttggcttcttgttcaaaatagaatatggacagcagaccgcttaggccattcacaatgcatcgccatggcgttcagcctcgacacgccaacacggatttgagccgccacgtttgccactgtcatactcctgccaggaactcggagcctaaggccctgtttagatgggactaaaacttttaagtccctatcacatcggatgtttgaatattaattataaatattaaacgtagactattaataaaactcatccataatcttggactaattcgcgagacgaatctattgagcctaactaatccatgattagcctatgtgatgctacagtaaacattctctaattatagattaattaggcttaaaaaaattgtctcgtgaattagctttcatttatgtaattagttttctaagtagtctatatttaatactctaaattagtgtctaaagacagggactaaagttaagtccctggatccagacaccacctaagttggctccccgttcttcgtcagaattgcgtctgggcccacaacattgtttcctacgccatcaagaaacagagagagaggacaggaagggaggcaccacagcgccgagctcgtcggggtggtggcggcgacccatcccgatctacgccgtcgttattaggggaggagagggcgacggagagggagaggaagacatgagggaggagagggcgaccgagatccgcagctcggcgccaccaccgttccactgccgctctgctcggcgcctcgccgccgctgcgccgccgtcatccacagcttccgcccccacgaggagaggtggaagcagggagagctgtcgcggcggtcgggaaaggggagctgcgccggcgatggtggggaaggggaactgccccgggctagatccggtcgccctgctgctgctccgcctagcgccgtcaccgctccgcccagcgccgtcaccgctccgtccggcgtcgtcgccgcttcggccaactctttgcccgggcgccgtcgccgagaaggacgccccgagccaccgccttccagatccacctcgacgcggtgtggtagggagagcggtggagggggagaggggcgccggcggtgggtgggagagagaggggcgctggcggcgcaatgactgaaggaggagggggagcggttcatgggatgtggggaaaggcagagagagagagaggggagagataacaagtgaggagagagaacgggtgggacccactgtgaagaaaaaagtagaccacatgcactgtggaggatgttgctcacgaagttcttagtctaggtggcagttttggctcctca

SEQ ID NO: 13315 - DNA, 5336 bp, Oryza sativa
atgcactgaaacgtgcgattgtttcctgccaaaatcatcacatggtatcagagcctgatccaatctaatctagccatgttactcgatggcgtcctcctccaccaccagtagcgccaatcgtctccagggaagcacggtgagtgagaagcttgggaaaaccaaccatgcactttggaaggtgcaggtttgtgctgcaattcacgacgcgcgtctacaggggcacctgactggcgcagcaaagaagcccgacgctgagattgccgtcacagttgacggcaagacggagaagaaggcgaatccggcgtttgaagattgggaagccgtggatcagcaggtcctaggcttcctcctcgcatctctttcaagagatgtgctcatgcaagtcgcaaggtgcacaacggcggctgaagcatggacaacaattgatcagatgtactccacccacaccagagcgcgagcaatcaacacatactatgtgctcaccaacaccaagaagggaaacatgtcccttcctgagttcttcggcaagatgaaggcgcttggtgacgagatggcggctagcaccgggcgacctgttgaagaagaagagatgatcatgcacatcattgctggccttggcaagggatacagcgaggtcatctcggcagtgtgtgcacgccccgaaccaatgaccgtgggagaactatactctcaggttgttaatttcgagggtcgcatggcactctaccgaggaacccaggagaacgtcgtcaaccttgcaagccgtggaggtggcggcaatggaggaggtcgcggtggcggcaacttcagccgcggcagcagcggaggcgctccccaaggcggtcgcgggcgcagcaacaatgccggaggccgctgaggccgcgggcgtggacgagcaccaggggctgcagatcgccgaccaacatgccaagtctgcttcaaacgaggccacactgccacagattgctggtacaggtatgatgaagactatgttcctgacaacaaacatgttgcagcagctgcggcagcgagctcctcctatggcatcacaccaattggtacatcgatatcggcgctacagatcacatcaccggtgagttggaaaaaactcacggtgaaagacaagtacaatgggaatgagcagattcacactgccagcggtgcaggtatggatataagccatgttggtaatactgttgttcatacccctaatagtcgcaacatccatcttaaaaatgtgctatatgtccctcaagctcagaaaaatcttatatctgttcatcgtctagttgagaataactctgcttttcttgaacttcatcgagattatttttatcttaaggatctggtcaccaagaaaatgctccttagaggaagatcacattgcaggctctatccacttcccaagccatccttgaagtatgcctgcaatgccgccaagatctccttccatcggtggcacagtcgtctaggtcatccctcctcgtcagtggttagacaggtggtcaataaaaataatctctcatgtttagatgtgtcaaatgagtcagtttgtaatgcttgtaagcaagcaaagagtcatcaattaccatttcctgttttatctagtgtctcccaacaccctctagagcttgtcttctttgatgtatggggtcctgctccagagtctgtagggagaaagaagtactatgttagtttcattgatgattttagtaaatttacttagatctatatgctacagcataagtctcaagtctttgaaaagtttcaggagtttcaggttatggtagaacggctgcttgacaagaaaattctagccatgcaaactgactggggaggggaatatcaaaccctaaactccttttttttttctaaaattggcatagttcatcatgtgtcatgtcctcacacacaccaacaaaatgggtctgctgaaagaaaacatagacacatagttgaggtaggcctctctatactatctcatgcctttatgccattgaaattttgggatgaagccttccaggcagccacctatctaattaatcgagtccctagcagagttatccaaaatactactcctttggaaaaaatatttcatcataaaccagattattccgctctacggatttttggttgtgcatgttggccaaacctttgtccctataataaacacaagtttcaattccgctctactagatgcgcttttcttggttttagcaacatgcacaaaggtttcaagtgtcttgatatatcctcaggccgtgtctatatttctcgtgacgttgtctttgacgaaacggtgtttcctttttctgaactccatgctaatgcaggagcttgtcttcggtctgaattatctctcttgtcacctaatattattagtggggatgaacaggtattccattcatgggctaatccacctgctaatccgcctaatatgtctcacaattttcctcaagatgctgcaacagatcaaacagccaaagaagatccgcctggcgctgactcccatgatgattcctgctcccgccctgacggatctgtgcaccgctcccctgcgcgcacgcctgacgcgtctcctgtccgccagtccagtgctgacacgtctctgcaccagcatccgtctgccgccgatcgcattattctgcaggggccaccgccgcatcaggagacaagggggcagcagtcaggcacaatgacaggcacagcgacgggcgaagagacgttgggcagtcctgtaacagatgttgaaatacttgacatgaatgacattgatactgatgtcacaggtattaatcccgatgccgacactatactgcctcatgttcaacagatggagactcaggaaccacaacaggtccgtcccagaacaaggctacaaagtgacattcacaaggaaaaggtatatactgatggcacagttaaatactcctgctttactagttcaggtgaacctagtgatcaaagaggccctaaaggacaaaaattggaaattagccatggatgcagaatatgaagcattagttaagaataacacttggcacctagttccacctcagagagggaacaatgtcatcgggtgcaaatgggtgtataaaattaaaagaaaggctgatggttctctagatagatataaagctcgtctagtagataagggattcaaacaaaggtatggtatagattatgaggatacctttagtccagtagtaaaagcagccacaattaggataatattatccattgtcgtgtctagaggatggagtcttagacaactggatgttcagaatgcttttcttcatgggtatctagaagaggaggtgtatatgcaacaacctccagggttcgaggatgtcaccaaaccacactatatatgcaaacttgataaatccctgtatggactaaaactggccccaaggacctggtttgctagactgagtcagaaattgattgaacttgggttcagtggatcaaaggcagacacttccttgttcttcctgaataaaggggaggtcactatctttgttcttgtttatgttgatgatataattgtagccagttcatcagagagggcaattgcagctttacttcaggatctaaagacagactttgccttaaaagatcttggagaactacactactttcttggtattgaggtaagcaagatacataatggtattattttgacacaagataagtatgctactgatttactaaagaaagtaggaatgatgaattgtaaactagcagctactcctttgtcagtaagtgaaaaattttctgttcatgaagggtcccctttaggtccaaatgatgctacacaatatagaagtatagttggtgccttgcaatatttaactctcactaggcctgatatagcctcctctgttaacaaagtttgtcagttccttcatactcccacaacagtacattgggcagctgttaaaagaatcctaagatatataaaacaatgtactaagatgggcttgaatatacataagtcagggtctacactggtcagtggattttctaatgcagattgggctggaagtatagatgacagaaggtcaacaggtgggtttgctatatttgttggctcaaatctagtgtcatggaatgctagaaaacaagccacagtgtcaaggtctagtactgagtctgagtataaggcgatagctaatgcaacagcagaaattatgtgggtgcagactctgctttctgagttagggattaaaagtccccgtgcaggtaaaatttggtgtgacaatcttggtgcaaaatatttatctgctaatccaatgtttcatgcaagaacaaagcacatagaagttgactatcactttgtcagagaaagggtaagtcagaaattgttggaaattgattttgtttcttccggtggtcaagttgctgatggatttactaaaccactgtcaactaatcttctggagaagtttaaagccaatcttaacctagcaaggttatgattgagagagggtgttagttgagtctgtttctatctctatgcatgtgataatgatcagtttagttgtgataagataggattagattttatctcttcctttacatttgttatcgcatgctagtttctctcccgagttggcgcggttgttgccgatctcgtgggcttctgtaatcgccacgatgaaggctattctaatcatatattaacgcgtaagcaacgcactgaaacgtgcgattgtttcctgccaaaatcatcacacgttcaacgccgccgtcaccgccatctgcatcgcaccatgtacgcaaaagcatgtcaaccatggaggagcacggcaaggtgaagggaactttgccatgatcatttggtcggcattcgtcgccgccgggctgctggcctactgctgctgttcatgctcatcatgaccggcatgctcgactctgccatcccgacgacgagcagtagaagaagtggacggaggtgatcaactaccggttcctcaacacgctcttcaccatcgcgtgcctgtaccagcagtccagcacgtcaagatcttccaccacctcgtgctgctcctccggtggcgccccagcaccagcgacgaccgcgaggatatctgcaaggtgtactgcaaggattgcgcgccgcgggcgcacgaccgcgtgcacatgctcgtcgtggcagtgcttcttcgcgtcacctgcttggcgcagcacttctgctacactctcttctggagctacgcgtgcaaggaccggctaggctgggctccatgatgccggcgtggggagaggagagagaagggagagagggaggaccaaagagggaaggagagaggatgacacgtgggccccgcatg

SEQ ID NO: 13316 - DNA, 23119 bp, Oryza sativa
attacgcaatgagtacttcagccatgcatctggtttactatatgctctttcttcggaggtgggtggatctctaactgctacaaataatgatagggtggccagtcatcttttcctatccatgccatagagtgaaaacacaggaacaatttagttgaccattcttgtctcttaaaacataataaagcaaaattgcaacagttctgcgaatccaaaacatcgtgtagtttctccttatcctgtatatttccatttacaagaatacaagaatcaagccacgcttgaaattctatatttgattcatattatagactagtctaccaacaaaaaaaaaaaatccatccttgtttttctgtttgttttgtgtatttttcatgtaatcattatttgtttcttcatgcaactctcagtttaaggatgtttgattacgaagatgttactattggatcatggatgcttgccatgaatgtaaagcatgaagacaaccgtgcaatgtgcgattcggcatgcactcccacctccattgctgtatgggacagcaagaaatgttcaagtatgtcttggtaaattgtgtttcgtgatcgtagtgataaaatagtcagaatgggaaaattcatcatcgctgatttaattatttatgaaatagtactatttcttccttttcctatttctaatattgcgattcctgatgaaagcaaaactaactttacatctgatatatctctgtgtagatgcactagctattattactgcatactccatccagtcatacatatttgacgtctaggacaagattcggtcaaacttttggtactttgatattaataatctgataatttctttaattcttaatctacaaataaaaagaaacaatatgtatagatttgccttgaaatgtactatgtactattaaattattagattttgtaaacttatgttaatacaaaattgatggcgaaagtttttattattagattttgtaaacttatgttaatataaaattgatggcgaaagttttaaaagtttgaccgaaacttcgtaaacatcaaatagtcatgactggagggagtaatatttttggtgtctgaagacttaatttgaatatattttttagtaattagctgatattgcaaaataagtttgattaaccataacctcatgcctttgacttcttttgatgcataaatgttttacattagccttgttgacttccagattcatgtaacacaactgagatagtaaaggcgcttcacaacactaccttgtgctcaaagagccctacattgccacctgaggtggaggatgagtagaaccttagtgttattttttttcccgtcaacagatgccaggtattgcctgtcgtaacatctgatttctagttaaatgtatttccataccgttgtattcattggtgaactcatctgagagccatactgttgcagcttcttgttgctgagagttctccgagaagtgtaccatcgcgagaatgatgtaggatttgtgtgcacactcccgatattgggataagcgaacaagacaatatgtaggttcaggcaaaatgtatactcccgactgatagaagtgggaacatttgttgtcttatgtgccatagccgattctggccatcgattctttcactggctatgttgttcattgatgtgtatataaccatatatataccccagtctgcattgttgatcatgaacttcatttcatgatcatggataactccagcttatttggattgatgtgttctcatagaaccagaacccagcttatgtccggtcggagtaataatgaccaattcatgttgctgattacactcctgagatatgattatctgaagtaaggaccaatttatgttgctgattacactcctgagatctgattacctgaacgcgttgcgtttccttgcgtgtatgtgttgttgttccctttgcaatgctgcgttgcaggtgttgcttcttgtaagaaactgagaaaagctgtgggcttttcacaccgttaatgctacactgtgaataccatgatgccgatgccccacttttgccattgcttgtgcctgagcctactccctctgtcaaaaaaaagaatcaacctaggaggggatgtgaccccttctagattgatgtatgtggacacccttatcttaggaggggtcacattccttcctaggttgatttttttttttggacggagggagtattctccaaccacaagctcgctgctattcatctgaggtgacctgagatcagcaaaatataggatccatctgaggtgacctgagatttgacctgagatcagcaaaacataggacgtgttcagattattatgtatttactaaatttgacaacaaactaaacaaacatagatactttttttttaactttacttaagaaatggtgaacaggcccatagagttaccaccgatgcgtttgcaccagcaaacaatactagcactatcaaattataatggcaccaacaatggagcgagcacactaagatatttatttgttactattaagatacagattttaactctgtttttcgttagcacatttaccaaactgttagatggtatatgttggcggatggcatgaggcccttcgaccaaacctgccgaaacccatggcgaaggctatggagcaagaacggcgcaaggcgaagagtcgtacaagcgccaggccagaagcgtctcaggcgaagggtgcaaggcgaagactatctgccgaaggaggacgacttcgccttgacaagttcgcccccgcgagggccgaggaagcctttccggcccatcaagcctaggggcaatagggccggcgatcgccagacggcccatcaggggcctgtgagcccctatatcatcatgtacccctgtaaatgtccctttcgtaagggtaatcatgtaaattcccctctatagcctaaaccctagtagtaagagcctgtaatagggctataaatagccccctagggccatgtaacgggggaatcccgagtgaaattcaaaatttaatacacttcgtttttccaaccactgttgagtaaccacgtctttcgacgtatgcggttgtcgtttcgataacagctggcgccaaccgtggggacctccgagcgaaaccactgagagcgaatgccaccgaagagggtcgtgaaggagaaggttgccaggcggaaggaaagcgacgccgggccggacatggccgccgaggagggagaagagccttcggcgccaatggctgaagatggaggaggaccatctgcttccacgactgcgccatcacaactgccttcggcccctgccgcctctgtgcaagtgcacggccgacatggcgaaggcggctgcggcggcgagggcactccagaccagggcggagatcctttcaacaagccaactggtagtgccccaagccgctccattgcagccaacagcgaccccaaccgcgctcgccgccgtgcaggcccaagtcagccctgaccccgaagcacaagccgaagccgacatggaagccatgcgacagaacatgacacggctccaagacatgcttcgccaaatgcaagaacaacaacaagcatacgaggcggcgaggtggaccaaggttacgtcggctccaatccttcagtattcggcagggtatgtcccacctcaagtccatccgcaagtgacgactcagccctttccgccacaagtcgcacaagcgccgatgtacttcgccaagcagcaattggccgtagcagcgcatccagcccctcacgtacaacagccagtcgctgctcaagtacaccatcaaccacttggccaagcgccacaaacagtggcggaaggggtttcggctctgcaggcgcaactccaagctttccttcagcaactcaaccaaccccactgcatttcaagtacaaacccatcggcccatccggaggggaatacaagtcaaggggcgcctaattggttgccaccgattcagccgagcctgggagtttcgccatggaatcaaggaccgcagttcaacttcgtcaatgctgctcaagcgctaaccgttcggcggcaagctccaactccaggctttggaacaaaccaagtatcaatccaagcggccatgacgtggtcgcagccaattttcgacccatccatggcggctcagcaagtatctccagttggagccgggcagtcgaatgccacggcccaaccccacgcacaagctgcgatttcgcccttcgccacaccgtacccgcagcaaggggcggtaaacaggacgggaggcgaaaaggggctactgctaagtgggggaatcaagactcgtccaatcccaccacagttcaagttcccacccgtcccgcgctattcaggcgaaactgacccgaaggagttcctctccatctacgagtcagcgatcgaagcggctcatggtgacgagaataccaaagcgaaggtaatacatctcgctctagacggcatcgcccgttcttggtatttcaatttaccagccaatagcatttactcatgggagcaattgcgcgatgtttttgtccttaactttcgaggcacctacgaagagccgaagacgcaacaacacctactcggcattcgccaaaggcagggggagtcgataagggaatacatgcgtcgcttctcgcaagcctggtgccaagttcaagacataaccgaggcgtcggttataaacgccgcttcggccggtctgctcgagggtgaactcacaagaaaaatcaccaacaaggagcctcagacgctcgagcacctacttcgcatcatcgacgggttcgcaaggggcgaggagaattccaagcgacggcaagctatacaagctgagtacgacaaagcctccatcgccgctgctcaagctcaagcacaagttcaagttgccgaaccacctccccccttcattcgccagtctcagccggcgatccaaggacaaccgccaaggcaaggccaagcccccttaacttggagaaagttcagaacagaccgtgcaggcaaagctgtgatggcgatcgaagaagtgcaagccctccgcaaggaattcgatgcccagcaagcgagcaaccatcaacagccagcccgcaagaaggtccgaaaagacctctactgcgcctttcacggacgctcttcgcacaccacggagcaatgctgaaacattaggcaacatggcaacgcacaagacccaaggccgcagcaaggaacgactgtcgaagcaccatgcgaagcagtttaggagcaaacacccccagccgaacaacgccaagatgtacagcgaagggtaatccaagtgattacaagggctgacccgccaagccagttgtccaaacggcagaagaagatgcagatccgtatgatccacagcatcactttggcgggtgagggggcgccgcagtatctgaaccagctaatttctttcgggccggaagacgcagaaggagttatgttcccgcatcaagatcccctggtaatctcagctgagatagctggtttcgaagtccgacgaatcctggtcgacggagggagttcggccgatgttatcttcgccgaagcatatgccaagatggggtttcctacccaagcacttaccccagcaccagcatcgctccgcggtttcggcggagaagcagttcaagttctcggccaagcacttttgctgatagcctttggctcaggggagaacagacgcgaagagcaaatactgttcgacgtcgtcgacatcctgtacaactacaacgccatctttagccgtgcaaccctgaacaagttcgaagccatttcccaccacaattatctcaagctcaagatgcccggcccggcaggggtgatagtagtcaaggggcttcagccttcggccgcttcaaaaggcgatctagccataatcaacagagcagtgcacagtgttgagaccgaaccgcatgaacggccgaagcacacgccaaagcccacccctcacggcaagataacaaaagtgcagattgatgatgccgaccccacaaagttcgtatcactagggggtgatataggcgaagaagaagttgagagtatcctagaggtgctcaaaaaaaacatcgatatcttcgcctggagccctgacgaggtggggggtgtcccggtggatctcatcatgcatcacctagcagtcaagccggacattaagccaagaaaacgaaagttgcgcacgatgtctgccgatcgccaagaagcggcgaaagccgaagtgcaaaaattgctcagggcaggggttatccaagagatcgaccatccggagtggttggcgaatctagtgctggtgcggaagtcaaacggcaaatggcgcatgtgtgtcaatttcacggacctaaacaaggcatgtccgaaagacgacttccccttgccgcgaatcgaccagctcgtggattcaacagctagatgcgagctcatgagtttcctggatgcatattccggttaccactagatccacatgaacccgcttgacatccccaaaacatccttcatgactcattcggcacattttgtcacctcagaatgcctttcggcttaaggaacacaggagaaactttcgccaggctggtgtacaaggtccttggcaggcagttggggcggaatgtggaagcttacgtcgacgacatcgtcgtaaaaagccgcaaggctttcgaccatgcgatcgacctacaggagacattcgacaacttgcgcgcagcaggcataaggctgaatccggagaagtgcgttttcggcgtccgcgcaggctagttgttgggtttccttgtttccgaaagaggcatcgaggcaaatcccgagaaaatcgatgccatctagcaaatgaagcctccgtcaagcgtacatgaagtacaaaagcttgcaggccgaattgcggcactcagtcgattcctctcaaaggtagccgaaagaggtttgcccttcttcaagaccctccggggggcaggaaagtttagttggacaccaaagtgtcaagcaactttcgacgagctaaagcaatacctgcaaagaccgccagctctgataagcccatccccaggaaccgaactgctattatacttagcagcttcgccggtggcagtcagtgctgccctcgtccaagaaatagagttcagacaaaaaccggtctacttcgtctccgaagcactgcaaggagcgaagacaaggtacattgaaatggaaaagctcgcttacgccctagtgatggcttcgcgcaagcttaagcattacttctaggcccacaaagtcatagtgccatcacagtaccccttgggcgaaatactccgaggcaaggaagtcactggccggctcagcaagtgggcggcagagctatccccgttcgacttacattttgttgcacgctctgctatcaagtctcaagtgttggccgacttcgtagctgaatggacagcggtacttgcccccaaccccgagcccgccgaacaattctaggtgatgtgctctgacggctcgtggtcgcacaagggagcaggcgttgcggcagtcctattttcgccgaatggtgtgccgattcggtacgcagcaagactgcagttcgacacaaccaacaatgcagcagaatacgaagccgttctcctgggcctaagaaaggcgaaagcactaggaatccggcgcctactaatccgaactgactccaagttggtaacaagccatgttgacaaatccttcgaggcaaaagaagagggaatgaagaggtatctggaggctgttcagtccatggaaaaatgcttcaccggcataacggtcgaacacttgcctagagaccagaatgaggaagcagacgccctggcgaaatccgctgcttgtggtggcccacattcgcctggcatctttttcgaagtcctgcatgctccaagtgtgtccatggatagctcggaagtcatggcaatcgaccagaagaaactgggcgaagacccgtatgactggcgaaccccatttgtaaagcaccttgaaactggctagcttccggtagacaaagcagaagcgaagcgtttgcaactcagagccacgaagtataagatggttttgggtcagctttaccgcaccggggtacttcaacccttacttcgttgcatctcttttgccgaaggcgaagaaatggcaaaggagatacaccaggggctatgtggcgcgcactaggctgcaagaacagtggcctccaaagtatttagacaaggagtttattggcccactgtgttgaaagtctgtgttgagcaaatcaagaagtgcgaaagttgccagtgtcatggccgaagccaagccgcaccccagtatgatctgcagcccattacgccgatatggcccttcgccagatggggactggacatcattgggccgttcccggtggcgcgaaatgggtataaattcgcgattgtaactgtggaatatttctctcgatggattgaagccgaaccccttggggcaatcacttcggcagcagtacagaagtttgtatggaaaaacattgtttgctgttttggagtgccaaaagagttcattactgccaacggcaagcagtttgactctgataagttcagagaaatgtgcgtagggcttaacctggaaatcaggttcgcgtcggtcgcacacccatagtcaaatggggcggccgaacgtacaaatggcaagatcctagaagcactaaagaaaagactcgagggggcagcgaaaggcaaatggctagaggaattgctatcggttctctgggcccttcggacgacccccacaagaccaaccaagtttagcccatttatgcttctttatggcgatgaggcaatgaccccagcagagctaggggctaactcaccaagggtgatgttctctgggggcgaagaaggacgcgaagtatcgctcgaactcttggaaggggtaagagtcgaagcgctcgagcacatgcacaagtacgccacaagcacttcggcaacttacaacaaaaaagtttgacccacggagctcatgcctggtcatctcgtcctaaggaagaaggcgaacccagtagcggttggcaagcttgaatcaaagtgggaaggaccatacctcatcaaacacaagtccaggaagggatcttttcgcctagcgacgctcgaaggcgaggagttcgaccattcctggaacgccacctctctcaagcgcttctatgtctagaatgggtggcacccaaatcgccaacttgtaaaaatgtgcatacagtcatcggcaaaaaaaaagaagaagaaagagagaaaaaagagaaaaaactggatgtagggctattatccgccatggaggcccgaaccagtataaaatctctgtgccctccaccttctttttgtttttttcgtgtgattgataatttgtggaaaaaccccaaggcaaacgcttgatcagcgaaaaaggccagggggcgaaacgaatcggccgaagcatcgctcgccgaacgttgaaaccgcaacagcttgcctcggaaaacaaatagccgaacgacgttacgaccgatcagcagaaaagcaaaagcgtttctttcgacatagagcgctacagatcgaaaacgaacgacgaaaagctgaaaagtcagtatacctatttcgctaaaatacgcaaaggggccgacatattccgacctaacaaaagcacgaaatgtgacgatgcgaaagaatagcgaaaaggaaataaaacacatctttattaacttcgaaaaaataatcgaagaatagaaggttcacaacacgatacatttcaccttacaagtaaattacatcttcacccccataatcactatctctccctaaggaatggtcagacgaactaggttcgtcatcactactaatatcatacacaaccctaagaggagtaggggcgaaacacagactaaactgtaacgacactgaaagatcgtttcctggcgtttagtcttctgatggtttcgccaaaagcgagccatatcctccaaacgtcttgaatgaacaagatcgtaatattctaaggttcgcccggggtgcgcccgcagccagttggcaaccttgaaaaccttatagttgcgaccgtttatctccatttcgtgataaacaggccgaaatggacattgcaccttcggcagacccttcaatgccacaaatttctcgttctgacttcgccagctcccagaaaggggccgaatgcatgattttcggcgaacccccaggtagacagtgcagaaaaggcaaaacacaacttacatggtaagaataggccaaagaaggggaagatatggcataatgggaaatgagcgaaataataatatgccaaaggctttgatcattaaaaagtggttaaaattgtgtcatacagtccaactacgcaaaagggcctcttctaaggtttagcggcagcttgccaaatatacaacggttcgccacatctagcgaacaccaaaagaaaactatgaaaatctaagagaagggcggagggcctcacacctctgggtggtcccgggcatcgcctccaccccctccggccgccgcgccttcatcttcacaaaggtccgccgcctctgctttcgccagctgctccaaaaggcgcgccttagcggcggagcggtcgtccttctgccaaaattgttttcgccacgcacgaagcgcaggcgaaatgtcttgcgcactgatttcccaatcccccctcgcgtacttggggaactcggcgatgtgctcgcagccgaactgctgcaggaggcccatggtaaaggccgctgacacgcgcgcacagcagtcgccgtatgcggtggcgcagtcagaaaccgaaccaccagcctgttgggtccattcggagaagtcgaaggctgaggcatcttcggaggggacaccccgcactttcgcgcccatatcagtaagggcgaggcgaagcgtttggcacgctgtccgcgcggactcggcggttttcaccatctcccgcaaaaaccgccgcgacttctctgcagcgcttgcttcggccttgcgcacctcctgccgaagagtctccatcttcggctcggtgaggttgtaataatctatgagcacggcagtgtgggccttttctttctccagttcggcctttaagcgatcgactttggccctggcttctttccctttctccagttccgattgaagccgcttgttttcaaccttcgcctccttaagggtgttggcaagggcctccatctccaaatttttacggcctagttcatcatccttggcccgaagacggcttttgaacccgtcaagtcgggctcacacggttcgctccgttgagcagtgagccgcgaggatctgggcgcagaatacgagcggcaaagagaacaagtgtcaattgtaaaaagaagagagaggaagagtaaaaataaagaaagggggaaaaaacgtacccgaacagccaggctttttatagcagaacacccctcatcgaactcattcagttcggtgaacaagctcggggcactagcgggcagtacaagattgcttaccccctccacaaaaggaaggaggtccgcccgcgtctcgaaatcgccaagggcgaagcggggtaccgagagcgaatattccgaagcggacgtctcagcgaccgctctctttcccttcgcctcaatcagcagcgacgcaaccggctgatgcggaggactgccgaatactttcgctgcggccgtcacaatcctttccgcagaagccgaagccccagcggcggtactaccgcccactccagcgacgccgagtggaggaatgggggcggccgaaagatccaggctgcgaccagtgggtgaagtcggagtcccgtcggatgactcatcgtcgctaaaaacgcgagcgacatcgacgagcctttcttcttagccacctttttgacaggaccttccttcaacgctgcacccgaagagaacgcaattagggccttcgccccttccaaatccttccgacgaaggggggagctgttcgactccaccctggtctcgttgtgaccgggacttggggtaggaatgtagccgggggtgtcgacgcggtattcgaccgcctcgttcgcggccttatcggccacatcctcttcttcctcctctccttcatcctcgccgtcgcgttcttcggcgtcatcctcgtcgtcggcatcggagtccgacgaagcaggagcccttcgtttcctaggggcaagcttcacttgtccgcgcatccgcttccgtgaaggccctgcatcgtcgtcggctttgtggagatttgcccgaggaggcaattcgccgttataaacccagttcgcccgcccggccgattgtcgtgttagcagctggctatactcgacgaccgacacgtcgccgatcatcctgcgggcttcggtttcagcttggtcaagggtcaacactgtaaaagtagagtgtgaagctatgtcaaaagtcagataaggcgaaataacaaagcacagcagtatatagcaaaagaacagtcttactgttcgccccctcaggaagtatcaggttcggcaaaccgtcgacctcttcgccttgatcaaccgcgacttgccatgactgggagaggggaaaaatgcgaagcatacaaaattcctccaccaagtcacggcagctaaggcgggagcaaaccttccgcagtagaacgaaccgcgcctccatggcgccgtccacagcgatcttgggtctccggttcggcgcaatcgccctgcgccggcaccggagggctttcactgattcagaaccagcctcaaaggggatggtgtgatagaaccacctcgccatccaatggcggtcccacttcgacatggcagcgttcaccgaccagagatcggaccgctcggggcgaacgttgaagttcacactcccgaacactgtcttcttcgttccagccggggtaatcaccgtcttcgagttcacggtggcgaaaaatatggcgccgaagagctcggcgttaggctcaaacccggaagtccggcacgcccagtcgaagatagcgatccgaacaagcgccaacgggctcagctgcggaagttccacctggaagaggcgaaggatctccggcaacaacacgttgcagggaaaccgtagccctgcctcaaaaaatacggcgaacaccaccgtccgattgtcgataggtttcggcaccacggctttccctggggcgaaagcctgcccctcgaccaacgctccggagctgaccagcttcgccagctcgacgtcgtccacaagagagacccctaaaaaggcggtgctgtcgtcatcgactcggccgggatctggccctttcgccgaaccagggtttggcttgcgtggggccatggtgaacggtgcgtttgcggcggcgaagaaagagaatgggcgaaacgctggagaggtcgagggatgctgtggaagaaagaaacggaggaagagagcgcacgcggtaaaaaggcaagtgtggcggtgaaaaggaaaggccgggggggatatatagctcgcttaggcgaccgttcgcctacccaccaataataaagcgccacgtgtcgcaagggtaggcgaaacggtaacttcccaccgtccgagcggcacagtaaaaagcccatgaagggaaagcccaatactgttcctttcggcccgggaaaagaaaatttataaaaaaaatgtgtataatatatatatatatacatatatatatatatatatatatacatatatatatatatacacatatatatatatgaatatgccaccaaatgcaggaggcgaaagcgcggcaaaacaataccagccacacaaataacaaacttcactcgcaggaataatgtaggtttcggcaagagcatctgtcgaaagggggcaccgcataccataccacatggtttgcacggtctcggccgaagctccaatctcacccttacccgtgaggggcttgttggcggatggcatgaggcccttcgaccaaacctgccgaaacccatggcgaaggctatggagcaagaacggcgcaaggcgaagagtcgtacaagcgccaggccagaggcgtctcaggcgaagggtgcaaggcgaagactatctgctgaaggaggacgacttcgccttgacaagttcgcccccgcgagggccgaggaagcctttccggcccatcaaacctaggggcaatagggccggcaatcgccagacggcccatcaggggcccgtgagcccctatatcatcatgtacccctgtaaatgtccctttcgtaagggtaatcatgtaaatttccctctatagcctaaaccctagtagtaagagcctataatagggctataaatagccccctagggccatgtaacgggggaatcccaagtgaaattcaaaatttaatacacttcgtttttccaaccactgttgagtaaccacgtctttcgacgtatgcggttgtcgtttcgacaacagtatatttcgtatgaagacattataaataaaaattgatttaaaatatcagataattaattttttaagtttataatcattaaaactcaattaaccaagtgctaatggctttatcgttttacgtgtctctacttaatcttcatcttcatcaaatttagcataggcatgttcaatttactgctaaaatcaacctttataaaaattatcaatgtcaatttttttttgtaagttagcaatattccaggttttgataggatagactaaatgtgatgtaatcaaaagtccctatacactaccaatgtttagtaataaactaaagcattcacacgtttgttaattttacaaaataatagtatggtttaaactgataccaatttgaacaagcccatatgtagaactaatctttctaagggcctagagttcaacaattttacgagacttctttagtgattattttaatttgtgtgaaattgcttgaaaatccatccatttcaaagaaatcaacgagcctatttataggagcttttatcagctacagcatcttctaaaattaaaaactttctaaatagttcagatttttacctaaaatttgagaagctggtttgtcaatttctttagatctcatcagctacttcttaaaatctaaaactcctacgaacaaacccctatgcttagttcgaatttacctataggatttttgcaaaaactatatatgtgaaagtttctttaaaaattaaataaatcatttttttatgattgtaatagttaatatttaattaattatgtgtaaatgactagtcttattttaggtgcaaattaagcctatcccttatttgaaaaaagcctaaattttactcgaatttgaaggatctcacccagtgtacaactatcgtgcgaatcgatttctacgagaaaagaaagatttctacaagaaaacaagaaagagccttgtacgcggaggagttagcagctgggctcccctatccattattacctttgggacgcgttgacgcgaccgcggaagaggtaggtttgcgcgtgagctgcgttgttgcaattgcatagcgtcggtgcacgcaaagacgccactcccgccgacggtttgccggcttgcaagttggaacaccaaatgctaggtccgccacaaattctaaacgagttgtggctgtttggtgtatactgtattgctcttgctcgatagtcaattcaaccatactcttttccttcactacgcaaaatggagtgacaaaattagtacataattaattaaattatagtattagttaaaaaaataaaaaatagattaatataatttaaagtaactttcttatatatttatttaaaaaacacatcgtttatcagttcggaaaacatacactaaggactaagggtgtgtttagttcacgtcaaaattaaaagtttggttgaaattggaactatgcgatggaaaagttagaagtttatatgtgtataaaagttttgatgtgatgaaaaagttagaagtttgaagaaaaaatttgtaactaaacacggccttaaaaaataaagaagtagagatgaggaagagtgagtaaagatcaacacattaaaagactgggcaatgcagatgaaactggttgtgttcagcaaactgagttaggaacttatcctttacgcacataaaatagtgtaactcattagttcataattaattaagtagtagctaatataaaaataaattaatatgatttctaaagtaaattttctggagaaattattttacaaaaagatacaatatttagcagtttgggaaacatgtacagaaaataagtggaatgaagctagaaacattgagtaaagaacacaccattgtccatcttatttgtggtaaaaagattagcatcaccaaaatgctggcaataaaagcaaactaaccaggcttgcttgtaaaactgcacttggctgtgttcggtctgcgttctataccaaaggcttctaacttccctccctcgttttccgcgcggacgctttttaaactgctaaacggtatgtgttttgaaaaaaaaaatttctatatgaaagttgtttaaaaaaatctattactagggttgggaacccatctccccgcacggaaaacggagcagtctattagcacgtgattaattaactattagctaatttttcttaaaaatggattaatttgaatttttaagtaacttttgtatataaactttttttaaaaaacgcaccgtttagcagtttgaaaaacgtacgcacggaaaaggagggagatgggttgggagtgagctgaaacgagcactataccctactaatatttgaatcatatcattaccaatctttcttttcttttcataaggtttacattgttgatgccgagatgatccagacaacccctaagggtctcatctttttcttaaacttatgcttatcagccaaaatttaaattttcatccttaaatttagagctgattttaaggtttttttttaatcgaagtttacttttcagcatttgcttttatatcgctaaaaacacgtatataaaaactttattcataaattattttttgtttgcaaatatgtcgttttgctgagtccgtgaataagcgaaacgatggctccataaatcgtatcgtgcaagtgagagattaattgataatcgctcatcgtaccgtaataccagtaacgatgtgtggagaaagaagcataggtaagggcccattaaaatcgcaggattgacaaaacgtaggaatagaaaaaacgtaggattctgataggaatgtaagtataaaacagaggattgcaaaatgcaggaaaaacacaggaatgaacgtttaattgaaccacaggaaaaacgtaggaattggattagagagatagactcaaaggaaagttatcaagaggttgaagctcttgctaaatttcctccaaaatctctataggattgtccattccataggaattttaaaggattggattagattcaatcatttgtttcaaaggacttcataggaaatttttctatagaattaaaattctccaaaattcatatgattttcctccaaatcaaaggggccgtaaatatgtaatagtagtcaacgtattacaaacgatacagttgttgaaattcaaattcaaattttggttatagctgataagctaataagcaaacgatgagatgccatggttaggcataaaatttgcctggtgtctatatggatttaaagagaaatacaaattgcaaagttcaacctaagatgttcaccgatgacaagtcgaaacttcatagtgcctcccaaaatgcacttgtaataagcaaccatacagattaacgaccctaatcgtacaaaaatagggttctctgctccctttttttttccctgttgccgaaattctttgcttcagacatacgtacatacctgacggctaatcccgatctgcatattaaacaatgaatactgaagtgtcacacgcagactttttttttttactacacgtcctttgcagttcagctagcacatcattttcacaccgatttcttggcaaccatttcgatcagattcagagagaggaatattaatgattgacgtaagacgcatcaagttggttattgccacacaatattagcactaattttaatttagacaagacagaagctgccttgcatgacacgtgagcgacgcttaccgaacaaatgtgacaatgtgattagcctggctacagttaactacgccattattgcttgtatattgaaatggaatatcttctaggactcgatactcctatgcttaagttaattggggtcataagtaagagtattaatccatgtgtttggttgctaatcattacgaccaatcacccattcgttgtgcttgtatcttgagttgcatatgtcggtgcttggtgttgattctggagacaaataaaaaaagtgtgcattatattgttggtttcaaatttgaatatgatatgcgcctcacaaactaaaacaaataattaagcgtctatggtttatcatcagtaagggggggatacattgtatagaaaaaagaacaaatattttgtacatgaacgatgcgtccttgtactagcttaattagcttggtcggaacatttgacgatttgcttaactgctgcatttgcagatctgaatgtttttagttgttaatatactcgacagctagatgctctattacttgccaaccgttggatggttcaccattggatttggaggagcctcaattaggtgaggtgtgcctagctatgtgtttttcacattattcaagttttaggaaatgacattacgaataatttaggttcctaattttaaaactaatttaggtgttttgatcattatatatttttagttgtcttttgaaccagtaggagtagaggtataaaacaagtctctacctaaatttattttcattgcgtataagtcatagctggccgacaaacgtcaaccaatcatgcggttttgaacatgaaacattatttcgaaaattttctctgtagactgagtgaaattggaaaacaaaatgttcttccaatttgaatgctactataacaaatattttatcatgtcaataacaaacttaatttgataccatagaaagaaaaaattgcttgtttccttattccaaacatgatcaatcatgtaagctcacaggtgatgtgctcaagccacaaaaatggcttgcattaatgaacgtgttcggctagccgtactactgcaagccgctacggttgcgacaattgtaagtggctgacggctgcagctactatgaactgttgcagctgcagccgctgctgatcaacccattgtatttgagtaaacaataccaacaaaaaagaacaatcaagctagcaaaacattgctggaaatatatggagtttacacatccctatttgattaaaaaaaatggttatccatttgtacagttcaggtgtacagctcgagctggatcaacatcctaaaaggggccatggagttgtatgattcgacatctctaccgtgaatgccacatgccgtgctacaacaacacgacggtgcatcggtcacaagccaacaaattttgagtttcctgctgaatgacattttcaggtagggataaaaaaaaagttttgtgttcccatgcagaatgatatattccctccttccctaaatgtttgacgccgttgacttttttaaatatgtttaaccgttcgtcttatttaaaaacttttgtaaaatatgtaaaactatatgtatacataaaagtatatttaacaataaatcaaatgataggaaaagaattaacaattacttaaattttttgaataagacaaacggtcaaacatttttaaaaaagtcaacggcgtcaaatattttgggatggaggtagtatatttcactagtgtcttggatatgttttgtgttcctttacaatattgacgataactgatcaattattctgataaatattggtcatattcaaccacactgaattttaaaacaaaactgctcgataattcgattaagtttcaaaaaggacatatattaaactttaatttttttgataaaatttattcaacattaaccggttttcgtctataacatttcagttatcacgatttttcgtctataacatttcagttatcacgatttttcgtctataacatttcagttatcacgattatcgatgaaaatccaaagtagcggctatacgtgcctaaacaatattgggaaccctgatctaaggagtgcgttctccacgcccattttttcttgtgggaattagcatagtacctatttgttgcgatggatgattaaaaaatatatattgtaagattaaaaatagggaaaagaattagaagaagttaggaacttaggttccctttaaatcgcaggattgagaaaacgtaggaataggaaaaacttacgattttgatagcaatataggtgtaaaaaagagaattgcaaaactcaagaaaacacaagaatgaccgtttgattgaaatgcatgaaaaacgcaggaattggatgagagggatagactcaaagaaaagttaccaaaaggtagaagctattgttaaatttcctctaaaatttctataggattgtccattccatagaaattcaaaggattggataggattcagtcccttgttttcgtgggtaatttggagccatgccattataattttgtaaagtttgagatatgtcatcggtatctcaatgacatgtaggacccacatgagtcaatgatatgtgcgtcaggatggcatatcttaaattttacaaaattataatggcatggttccaattttcccttgtttgaaagggcttcataggaaattttcctatggaattaaaatcctccaaaatttctacgtttttcctccaaatcaaataagccctttacagtggtgaataaatcccagagtaaaagcacaatgtcagtatatctctttatggagacctcgcataatgttcggtaaaatgtggcccaaaaattcccaaaaaagtgttgcaaattcaagcatctgttttatgatttaatccatgatcccgtgggtgggccaaagtgttgcatcaccccggaaccacatcagatttaattattatgtgtacttccatatataagagtttgttcatatatgagaaacatggggtttcccataaattaaaacctcgacgaccccttcatgtagtacatgtaccatgcacttgccctaccggattagtgaaataagctggttggttggaacttaattggaagacctcagcttatctgaacatgcacagtcaagttcagttgggtggtcgctaccatattacgcacacatatgtacctgcatttttctagttgtaacagccgaccattaagctaggtcgccaacgttgttcctgtatatatggtgcccacatgaacgattgacttttccttgctataaacataaagctacagtctaagatggagtttgaatagaggattaatttatcagaattgctaaatatcattcgattgaaaataagggttaaaatcttaaaagtttctaactttaggatccgctttacaattcatgctccggcaaccctagctccccctccaactccggcaaccccttctactttagctccaatgaccgtcggtgatccgacgagttatgatttagggtcctgtcttaggataggggttgggaggagggagggaaggagaagaagggggaatcgtcaggcttagaggaatgaccgtgggagatggtggcctcgcggtggacggtgaacatgggtggtcggtgaggcgctggcggcggcgctagagccgcggggatggaggagtgcaatggaccggtgtgggcggcgggagcaaaacaatgaaatggttacaatgcgcacttcaatggcactgttgagtaggaggagaggtggaggggaatgggttgagggaggacggatgaggttgattggcggaggagggtgatgttgattcctttggctagtcggtgaggccggacggcggtagcgtagaaggtagggaaagcggggccatgggcaaagtagcagtggtggcgcggagggatgagaaagggaagagaatagggatattaaagttagatgtgttgcactaatctcaaagcaattcaatggtcgagaatttacaatattaggaggtgtatttcggtcgaatgtcatacgggcagtctcttaatttatttataattttgatttcatttaatattcctttttattttagacataggtagttttggagttaggcacaatttaaaattgttaaatgatgtttttgccctactatcattacacatttggatagttgacggataaaatatggagttattcattacacataagggggtaatgttcgtcacttagtaaaacacgcaaggtaaagatgagagacaagtgttagattctacgttgacttacgtttagatagaaaaaagtaaaaagaaaaaatgtgccacgttagaatcaaaggtagtacaaatgtatttatacaaaagttctcctgctaatttagtttgtaaagaatataattaaaatcacaacagattttcaaaaccaaacgaggggtgaaccacgtgcaccatgttattcctgcaatgttttcccagcagcaacaggtcttcccgatcctccgggctgtgtcgatgataagcgaaaggggcaattaaaaccaaacacatgtttaattaacaggttagttagatctttaaaaatctcgctttaattttatacttggggcagatacatgaacaaaggcatacgaccagtcacttcctagctgttgtgcaacggtaagatcattatagttattgacaaaacatggtaaaaatatattgagtaaaatacaccagcggttcttaaacttatcaggaggtttcacttagatccatgaacttgtaaagtacacatcgaggtccctaaacttgggtataagggtgagagaagatgtgacgaccaaagcagaagtcgcagtaatatgggatcacaagctggggaatgtgacacctctggaagctgaaaagacaagcagacagattttacccaagatcttgcagaagaaacacagtcctgctgtgacagcaggatttcaccccagggagacttccacgactgtaagataataaattgatattatttaacctaccaagtatatggccatttgttatagcagcacctggaaattcatacacctggatttactttcattcatagaagttaccacttttttttttttttgggaca

SEQ ID NO: 13317 - DNA, 16520 bp, Oryza sativa
  unsure (1)..(16520): unsure at all n locations
tacatgtcactgttaagatgtcgactagcgagtaccatgtaatgccagtccaaactaacctaatagttcacgacaaacatttttctcatagtttgactcccttgctgatcagctccatgattcaagccgaagcaactcccttatccatggaaatgtctatatctttgacatattatcattaatttccattcattgcatagctaagctaaagtcctaaattcctagctggaactctgaacagctataccaaagttttgtcgacgaacatcatcaatttccgacagaaatgatcggtgaagattaattacagtctcactgtctccgattgcatcacatccttgacagctgctggactgtcatctttaactacagattccttgagaatttcctcgtcgcagctgctggactgaagaatgaactgaatattagctntgcttctagaagtgatagtagtggttagcaatcgtattttctcagaatcagtcagcagctagaatcattaattgttagtcaatgaagagtatctttactttaaaaatgatgaaaagcgtcttgctcttacgtagctagctagccattctccatttattttagtactcagaaaaaataaaattaaccaaatgtttgaattgaggatagattcagttttttgactattggcccggtccatgcttacccatttgacatgttagtggtgccagttatgtactgcagcctctgatgctgatcgagtgataggctcatagcaaacatagttgacgaaaacacatgaatgaccatatgagttgtctaggacaaaatattctgacaattgactaatatattaccccaatttgtccaaaacagttttgacatagtacactcggagagttttattttccttgtgcatgaggtgcaagaacgaaaagttcctcgtatttcgtactcctacatgataatatatactccctccgttttaaaatgtttgacaccattgactttttagtatgtgtttgaccattcgtcttattcaaaaaatttaagtaattatttattctttttatatcatttgattcatcattaaatatattttcatatacacatatagttttacatatttcacaaatttttttgaataaggcgaatggttaaatatgtgctaaaaagttaatggtgtcaaatattttgaaacggatggagtatatcacagcaaaacatcctgtcatagatcgattctcaaggtctaaactctagcaagatgctaaaattctaatcaacacttagtcacaaatgcatgtcattaagggtgtgttcgtctttaccacctcttcccaacttttactcaatcattttccatgcgcacgcttctcaaactactaaatacatttcttttgcaaaaagtttctataggaaaattgctttaaaaattaatattaatcaacttttaactttatttcagctaatatttaattaattatacactaaattaatattaaacaattcgaatgatatttatagttcaaactccgaaattttgatcgagtggttgttgaaaacaactaatcttactgtgtttttccccattagctgagtagctttttcggcccctgcagttttaattagtattcctcccagccattgattttgaagacaatattgaaaacctcaaaaagtcttttagctagttctacaatttatgtgctttgtcttgcacatgtattgagaaaggctagacttccaatcaattattctctaaggctccatttggtgttgcattggatactattctctagacatctcgttgggtacaattgttttgaacttgttattgttatgatgcaaaggataataatattttgtctagccttaatttgtctgtggaacaatactacaaacaattattgtctttattttcccaacaacttaaaaatatgagcacgaggcaacataacaaccacaaactgagtgtaccccttttacttctcacctagaatatataaagttcaactttctaaaaattgaagttagcaagttaaaataatgtgactatctataaaaacaatatcgattggtacatttattttcaaaatattactagccacatcgtcgtgctttgtgcgactattgattatgtttaagaacttatgtatatagtttattagttcagcttagcttttaaaaaggttttgacataagttaatttatttatagaatatcgattggcctagtcaactattgtcttttttaagttatatatgtttataagaggaattggagcctcctgttttaattcttcattatctttggcccctctctatttgtatcagtgtctaagatgagacactagaaacatacagaaattctcatatgtttagccatttgtgtttttttattaatgcatgtatcttttgacctaatgatcattggttatctaaactcttgatccgacggtcaatatgtttttgtgatgtagcacatccttatgcaagaaagcttgctgcttttactatacagtaatataagttcattaatatataacaatgtataattatgaaatatagtcaccagaattgaatgcgtgaacgaggagataacttatccaaagaaaatgctctctgcaaattaaaatgtttgtcatgtccttttttttcgttcacaccatgtttaaactatactttcattttacactgctgctctaagccaaaatctggtgttagagtgcaccccaacccaacgtcactctactctaacctaaagatcacaaaatttgacgatcactttatagtttttttagagaagggtattttttacccggcctctacatccaactggatatatgcagcctttttaatttgttaacttagaccctcaaacaactcaatctaaaattcgctcctatggagattcggactcaggactttacaatgctactcaggtcactggaagccctttcgcgacaatcactttatagatgcatagtgccatagtataaagtgcaacactcaaataacccatgttatataattagtgtttttttacttggtttgagaatatatctttacttgatttgagaatatatcagaaggcactatattttctactagtatataaaaaaggatcatatatacggcgcataagaatatgcagagaaatttatggcatgagcattcaaaatgtcccctaaaaattaacaaacaaacggagtaattaattaaaatcatttatctactcaatttacatagagtttgtaatcttacggcaggttgttgagaagactttgcacggggaagaagacgacgacgaccactgctgctgctgctgctggaattatgccctgtggccaacaagctgacatccctcttctcgttgagaccctgcaggatgccagccacggcatccatggcactgcaccccgacgacgaccccagcactatcttcagatgaagctcttgacacttgttcggtgaactgccctgatctgccgctgatctgctcgtgttgacctcaatcttgtcatcgtcaggtccgtcgtctcgctcgccgtcgccgtcgccggcgtgcagctgctgtgattcagatagcttcctgttcttctcctccagctcagctatcctcgccttgaggacgttcacgtagtcctttgctctcatcagcactgatgctttgtccttctgtgctcatcgtcgcacaagttacaaatcaattagcattaattaattggttaaaatttataaatgttactattaataaagcatatataggataactgatattagccatgctagtcatttttagctaagcttaagatattgataagcaccttatgagtagccaagctagcgagaatctagaaaaagctagaagctagattttcagcttctggtctccattttattttcttaattctataactatagtttgtattctgaatgctaattctgaattctatagctacatattctccaggtaacaatctagatttgagagagtttgggattatgtgagaatctttcgtcaagcaagacaacagattttgctcgagattctatatttacgtaagcttttagattaaattggtcggtaagtagacggaccttggtggcgggtgggagcacgtccctgagagccttgaagctatcgttgagcttctcccggcgcttgcgctccgacaagacgtgctgcagctgcagctgctggttctcgccgccgccgccgccggcggtggccgctggcgaagcccgcgcggccatctccatgatctggtagtactgcgcgagcctcgccgcgtggatctttgacagcaccgatatggccttcttgaacgccctctgtccaccgccgccgccggtggcggtggtcgccgcccctggccgccggaggagatgcttcttcgggcccaggtaccgggagtacggccggaacgcggtggcggcggcggcggcgccatggccgccgctgctccgccgtgctgcttgtcccggccgtggtagtagtatctgcgacgacacctccgttgtctggtggtggcaagaggcggcggcggcggcgagcatgagcgacgagttgtcgtcgcggctcgtcgtcgtcgtcgtcgtcccggcggagaaggagcggaaggaggacgacgacggcgacggcggcgtggcgtactgatgatcgtgctcctccatgtccatcagcatgtagatctgaatcaaataattcgcaacgaacacgatgatgaaaacatgattactccacaacaaaacaaagttcgtcaattactagcaataaacaagatgaattaatcatgaaaattgcctggctaagctgctgctgcatggcctgcgactgcgagttcatcatcatcgtcatcgccggctcctgctcgtggtggcgcagcagctgatcagtagtcgccatgtcgctccagctgcatctgatgcaagcacaaattaactaattaattaattaattacagcctgcagaagcttaagatatcaaggatagctgcatgcgtggcaacgacgaccaggccgccgccggccggtgatcaccgtgtaattaatacatatatacctgatcatggtgtcgccggcgccgccgtgcatgtcgccggcggcggccgccttgagcatccagctgccgccgtccatgcctgtacgtacgtacgcacgatcggatcgagctagctctagtcgcgttcaatcgattaattgctctttaatttggctgcttcttgagctatctcgtctttgattgggaatggtgtgtatatatactagctagtaggagctaattaagctgtgaacacacttaatcgtcacaaattaattagtgtgcatgcacaaccaaactagtacacataagcgctgattcgcgcgtattctaccgctccctccgtactcgtaaagtaagtcgtttaggacaatgtttaaatcaaatcttagaaatactccctccgttttgaaatatttgacaccgttgattttttagcacatgtttgaccgttcgtcttattcaaaaaattttatgaaatatgtaaaattatatatctacataaaaatatatttaacaatgaatcaaataataggaaaagaattaataattacttaaattttttgaataagacgaacggtcaaacatgtgttaaaaagtcaacggcgtcaaacatttcgaaacgaagggagtataaatcatgaataactctcaagttattgggtttgaaaatgtaaaaattatatgaatagatttgtcttgaaaaatactttcataaaagtatacatatatcacttttcgataaatatttttatagaaacaagaagtcaaagttgtgttttggagacagtgtcactgtccaaaacgacttcctttacaagtacggagggagtactaaatattcctatcgatttttaatatacaacgtcgttaacttctaaatatacgtttaaatactcatattatttaattgtttttacaaacataacaaaataagtcatgctataaacattttctataaattaattaaaaaaataaataatagttatataatatcttaaataaaataaatgattaatgtatataaaaagtcaagagattttttattaaaacctgatagtatatataagtaaggaaagtattctaaactctctaggagacatcccttattgtttatatgtcatttaaatagttatgacaaaatttgaaaaaaataaaaaatatagattaatatcttataaatcactccacaaacatataaggttaaatttaatttttacaaattataacgagataaaaaaatttaactataagtatacattgtatacttattagttatagtttttttttaacttgtacaagttaaaatctaacttacatatttgtagagtgatctattacatattaatctacattgttgaattttaaaaattttcttcagatgacatgaaaataaatactcggagtaacaaacgtatgtatcccgagaatttagaatccacgagtagatcgaaatgtatagtaagggtgtgtttgaggagaaggggattggagagattggaaagatacgtaaaacgaggtgggccattagtatatgattaattgagtattaactattttaaattgcaaaaatggattaatatgattttttagagcaactttcctatagaaattttttgcaaaaaacgcaccgtttagtagtttgggaagcgtgcgcgcggaaaacgaggagctttctcacccaatgtcactggaacgaacacagcctaagtcgtacgtggtgcaggctataactggaattaactagtactaggactagtagtttagtattttttaactgaactagtagtacgtattaattactcaactaattaatgaacgtacgaacgatgggggattaatcaatttatcgtaagccgccggcggcgtagcgtacgtacatgcattcgatcgggaacgtttcgcaatttcgcggacatcgtctatatatcatactatctaggattttattttaatttcgggatgaaactttggatcccttcaaattcagttcaaacccgttcagacttaaggacttgttcgaaactcaagtcaaatcatcgccgtccaatggtatatacgaattataaaaaaatctcatataagacggacaatcaaagttggacacggaaactcagggtttgtctcttttttttacggagggagtactagtacttttttttttttacggagggagtactagtactaagatttgtaaatcctaatactggacgaagctggctttgtcgttattgtgcgcatatatctgaattaaaaggtaagactactcggaatcagccaccattttgttggatagaagaggctgtaggtagatagaggccacagccacagaggctggaacaagatgatgacaagtcactcgaaaaatctctgctccatgcatactagtaacataccagcacagttaatcgtcagtcgtgccatcgtttatgagcaaactagttattccctccgtcctaaaagagtgtcattttagctataaactaagacatatagcaccgtagaaaatataatagaggcttggtctgatgaaagaataagaagagtgcacaagagaaggaagactgacttaattaagtaatattagcttccaatcctatggatcaagactcaaaataggtgctttgcatcaaaccagcccgctggactcaaccttagctgtaaatccattttctttataagcataaattgcaagtcctcgctagcaagccaaggtagcaatatgaggttgacacttatcgatagaggatgcgtctatacccacatgaattagaataagcacattactctcccttggaaatgtaaccaacattggcatgtttctatgacccaaaacattaggacgaccttgtttgaatcattaccaatctaaccttattaaaatattggtaatgacaagatttggtaaagcaaaatttaattttggtaaaggatggttgtttggattgttgctaatttttggtatctgtatgagcttgccaaaatttttggcaccaaatcagatagatgcttaccacattatggtcaccaataattttttggcatggcaagattggggataaaatcaaacaggttgtatatatcttccccacccgccctatgaaaaatccaccaactgcatacaaccctcaatttgttatctcccattgacttctgcaactcgttgcatgctatagttgtttgtccagcacatatgccaccacccttccacttcactagtggtgtcttgacgcttacgatgcataccaaaactaccgatgccttcctctaccccataaatacattcatctctaaggctccgttctgttcttcaactctaaacattaacttcctcgttttccatcgtcagcatgcttttcaaactgttaaattatacgtttttttttaaaaaacatctatatatatgttgtttaaaaaaaataaatttatttttcaaatttataataattaatattttattaatcatgtgctaatgaggtttctcatttcgcgtgcagtacgaatctcatccaggaggaatctaacgaagcctaaatcatctagcatgtttttgcttcaatccaatgagttcccgccaccccacccttcaagcctatttctttccactgctaggccattaccctgcctttctctatacctgaagaaactcccctcttctaccttcctaacccttcccaaccagcctccccatccctagcctcgcaaattacactaccagagattgtgaagccaccgcgtgcctctctacgttaccgagaggttttgcatactctcggtaagatttagaacataccgtgtgtttccacatagaaactcgggaacatcgaaaaattaccgtgttccaagccgatactctcggtatccgtgggacccactgtttcaccgtgacggggcatattatttggcttcgtaggtgatgatttccgtcaacgtgaaggatgggaagcgctattttcgttggcgcggaaggatggcggggctgcgattttcattggcgccaaaggaacagtagattcccgagaatattcagtgcatttgccttcggtaacagccaggcccacctgtgacccaattagcgatcacatcaaaaattaaggtagaaatagaaaagaagtgatatgatgccggaccgtacttttggtattatatatatatttaacatgaataaggcataaaagtgacaggttaagagattgaatggacaaatcagatgaggtttattgtactttatttttggaaaaaatacgaattaccccctaactattgtggtcgatcgaattaccctcataactcgaataccagatatatttcacaccctaaactttttaaaaccggatgaattaccccctgacaatatctagagtggtttccgtcctacgtggtatacacgtggtagtctaatcaatattttttttaaaaaaatggtgggacccacctacttctcttcccctcacccctctatctcttccattattcgtcgttctctctatctctctctctctctcatctctctcgcgttgtgtgcggcgaggatggtggtagacggcggtgaacggcggtgtcacggggagggcaccacggccggtgggccgcgccgaggaggatagtaggggcaacggtggcgacgactagctggaggaggcggggttcgagatgagggcggcggcgggccagcgacgaagctaggaatgggtttgagatgagggtggctgccacccgcgccgctcccctacgctcgcgcctgatgacagagagagaggggaagaggagagagagggggtgagagagtatgacaggttgaacccaccaaatttttttaaaagaaaatgttgactgggttgccacgcgtacgccacataggataaaatcgctctggattgggtcgaggtgggtaattcgtccggtatagaaagtttaggatgagagatatctgatttccgggtttagggggtaattcattcgaccatgatagttcgggtgagggtaattcgtactttttcctttatttttctcaagatttaaaaacataggggcaattgcgcctatgactccattttaaaggctaacaaccaatttaattattttttatcttgtttagtggttggccctcttttatcaattttactcatttgaccattctttttaaaactgaatatatggcctgaccttattctattaaggcaaaatttgctacaggttgaacccaccaccgcttgcttcgtttgtacgcctaatgagagtgaatgggagtatgagacaatcatattgcagtggagaagagattggagaggagggaggttgaccgatgaagagcgtaaggtgtacaatatctggtttgttagtttaggagggtataatccgaacagtatcaataattcactggggtaattcagactttttctttttagaaacaacacagacacaagtggtcatatactcacccctttaaacgtatgcacaacacatcctacccctaagaccggatacctcatacaacaagcgtctttgcatgaaatgcctaccactgaaacaaaaatagttgttaaggcgagtacgcatgccacgtattgaacttcaatcgggatgagtatgtttcactacaagaaatagcatttgtaattttagaacaaaatttatttaatttctttgtattattatcatttgcattttctttaatcagccgaaccctatatccttaaaataccattatcaggtccctaaagctggttgatttgtttttattttttttccaaagtattgttgaaacagacagatttatcgatgaaaatcaccaggctgacgtaaattccaaatggattttttttataacaggatgagttaaattggggttagtagatcacatagggctaatttccatatatctttatcgtttgtttttgtaagaaaaactcatgataacgtatcgtgccccacaaaccagaaatcgtgccgaaaatgtggcgggcaccaaaaatctggcgggctcttatccaaacctcttgggtggctaggtcacaaaacaatccccaatcctggcgtccaccactcatccccatcgacgcgcttcctagtccccccgcccccgcgcgccgccgcgccgcaaaccatcgagccccccgccgccgcgctgcgcgctaaccaggcccccaccgccgtgccgcccaatgccccatccagccccacgtagccgcaccacgcccccatccaagccgaggccgccgcgggcacatccccatcgaggagcacctgccttcgtccccacctttgatggccgtctccatcctctgctccaggtggaacgctatacacgaagtcgtagctccgtttgtgacccccgcctactcctcctaggacgccactgtggctgaggcaagcgactccgctcggccatatctacatcagtgtgcttcgtaaacgagaggtcagtaaagcaactccatgtttccatctgtggctctacaactttccacaaagaaccatggtatgttcatagttgatatgcattagaattagagattttagtatcagggtaaattagttctctttggtcagaagtttcttggttggggggagaacatattttgaatttgttgaacctcttgcagtcccgtttgtgcttgatggtacagattattgtgaagatttatttgccaggagtcatctagatattctaatgccactgtgcagtctttgtacaaagcaaacgaatatagtgttgcaaactctattgaatcgacatgttgtccatccttccaaaagagtgttgtgtgctgccatttccagatttgacttgtatctctgaaattaatatctggagactgtataatatgctaatggaaaggggaccaggttacagaaagatggaggatggagcggctaaattctttacattctggttagaaattatattcttcttgcattaaattatattcttcttgctgaattgaaattcagttactttcttgcactgaacagttatgcacacatttctacttggttaattataggtgctatttgactaggccgctgtgatagaaaccagtaattgccacatggcttgagatcatcttgtaagggggtggcacatgcagatggtgcaacattgctgtatgcaggatctctggatttttgttttttccctttagttcttgtttttatgctcttgcttcaatctgtgctatcaaattgctttgtaaagaatacatttctgcactaagattcacaagcagttggttccatgacagtatcctatctcctgtatctgttttagataaccaattttgcctcttctaaactgtaatcaggggtagaccataaattaaagatcgagttaagactgaagattgctaacaccctaatcagaatggaggagttgttctgttaattaattgctgcttgcatcttcttctattggttgtgttttgcacatattgtgtggattgaaactctaattcagtttgctacggcgaataagatttcaaattttccttatgggagagaggataagattcagttttttttccaaaaatatattaatttcctgccaatgcaacacaagatgacaatcatttcttcaagtgcataatattttaatgttctttttgcagaaaatcattgtttaaactatttggatatcatgcctgaattagagaggctacagaacatcatggaagcaatacatggacctgatagcaccaagcactccgcatggtcaggatcagggtgagatgtagggctagcgacagagcttggatgcaaatgattgctctatcccaacaattggttggatctctgtcttgattgaaggtaattttctgtcatggttattttatatcaatgtgttgtaagtttgtttggtacgaaagaaaaacaaaatgaagattaagagatccattatagtgttgactaagttaataatcagtgttgaacaaatgtatcatactaggagtctatttgcctgtgttgttgttaggccttcacaagaatcagtagcagagatgttctgcttcattcttttatctgtgcagtggtgtgtacacacacacattaagagatgcgcttgcaagttgtttcatgccacctctttgtcatatggaatttcatacttgtctcgcgttactttcattgacatgtttagtcaaaaaaaaactttcattgacttgttgcttcataatgtggtatgggaaactaactataatattatttggcactcagataacttttatgtctgatttcaggcatataatgatcatgccaaaggactgggattgatttatgttgtcaatgcacacatttggttagtcagccactaagatgtgtctattacctttccagcagaggttgtaagaactaaggctcattctgcttctcttgagttatgtgtagctagcgactttgtagatccattcatgttgtgttcttgcctcgtgatgttctcattaataccggggaatcttcaacttatgttcacatgatatttttctatggttctaatttatttctgtgatgcttgcctatgttctgcctgttatgtttgcgtgaaatctgcctgactgttgcttgtctcatatccgtgttgtactatcatgaatataagaaatctgtaaatccaggtgtacaatattatctagtgttcattctcagcaagttactgtgatgagctacacacacgggaaaaattttaacatccccgtgtgtccagtactataatcctctcggtaagctctgtcctgttaccgtgttttgcgtaccacacacggtaatgattgtttttttccagtgtttttgtacctctcggtaacactccgttccgttgcttctgtcccgtcttgtgccgttaaacagattgttgccgagtggctgtgttcactcggtaattttgaacatcatcccgactgtagaagcattgtcgcacgggaagaatctcacagtaaaggtgtgaagccaccgagagcgcgttcccgtgagcttgctctcggcaacttgtgttaccgagtgttttcaagatgttgccgagtgtttttggcacacggtagcttcgcagtctctagtagtaatttaccttgaatcctaactgattgctcatggtcctaccaccaccagagttggagatgaatcgagctctctagtcgccggaagtggagaagaatggcttggagagtagattttgttgccaattgacaggtaaggccgtaagggcaattcacttgttgcaaccaccaaaaatcatatgaatccaatttctactagcgcagctggcagggtgtgtcatctcaattggtagcatgaaaggctgaagagattcacgatggtaagttgggacatcatgtagccatttaatcttggattggtcaaagtgccttattactttttaagaaaaagaagtctaaatgtatttaccaatcagcggccagagtaaatttctacttacatactacctataggtaccgtaaaagggcctgattaaataagtccctactttagctgtaacatgtaaaatttggataattttcttgatccaatgggttgatatataggagtacttgactggttgacttcaactctagaaaacatattctagtataaaattgataaccaaagtttcaaaaagattaaccctacacaccaaacatttataatcggatagagtagttcttgattgtctaaatgtagaggctgagattatcccaaagcatcctagaagggtctgttcaaataactttaatttctccggaattttaaaaactttcaagatttgtgtgggacttttgggttgcaaacattggcccaagcctggcccaaatacgctcaatacactatcaagctagacagggatgggcttttgcgggccaggcaaagtttaggccctctttgtttaggcttagacttattggcctagatttttaagtcagtttattagcgtatatgatttatacgctggtggatttaatgtcctaagtttagtgatttagccatacatctacctcacataagccaaaaaaagcttctccaacctagcttttggcttaatagtgttagagtggcttatggcttaaaaaagacaaacggaaaagctgcctgtttgtttaggcttaaactttttgacttataagttggcttataagcctaaacaaagagggcttaggccctcttttaagcttaggcttaggcttaggcttattggcctagacttttaagtcagtttattggtttatatgatttataagccggtggatttaatgtcctaagtttagtagttgagtcatacatctatctcatataagtcaaaaaagcttctccaacctagcttttggcttaatagtgttagagtggcttatggcataaaaaaagccaaacggaaaagctgcttgtttgtttaggcttagacttttcgacttataagttggcttataagcctaaacaaagagtgccttagacaggtccgctagaaaggatgagggactttaagtgcactaattcctcagcaatttaatgcagtagtaagcagtgttctcccgacgaaaaccgatcaaattcagtgaaattttgacatttcgattggaaatttgaagcttaaacaatagatttggtcgaaattcagttaaaatttatcaaaagccgatcaaaatttatcaaaaactgtgataccgatagggctcgaaatttagtggtcaatcggaaatgtaaactctggtagcaacacgccaacaccacggaaagactgaaatgaactctggtagcaacacgccaacaccacggaaagactgaaatgaatacagtgatcagtacaagcccaacccagcagctgtctgaagcttaaccaaagcttaaacccaaagcaaaccagaggcagatcagatcagagctagtagcagcaagctcgcgatctcccccaacttctagaaccttctagaaccgccgaatgcggctccaccacggccgccaccaccaccactctgccgcggtcgccgtcgcggtagcggacgacgacgacgaggccaagccgcgccgcccatactccactttcgcctccccgcgcgcgcccacgtccgcattttccgccgccttctcaacccaccgcctcctcgtcctcttctccgtcgcctgcctcctcgtcgccgcggcctccctcgccttcgccttctccgcccgcgccgcgaccctgcagccgccgcccctcgccgccgtggccgaagccaccgccaaggtcgccttccgctgcggccgcgccgaggacaccctccgcgccttcctcgcctcctcctcggggaactactcctccgcggcggaggggagggagagggagaaggtgctcgccgtcgtcggggtgcacacggagatcggatccgccgcccgccgcgccgcgctccgggccacctggttcccgcccaagcccgaaggcatcgtaaggtttccccccacattgctttcctccattcccacctaccaacttggatctagctactcgctttgctctggattgctgctgctcatcttacgcttac

SEQ ID NO: 13318 - DNA, 6346 bp, Oryza sativa
ggcgcctgggagctgcacgagccagccatcacctcctcctccatctcctcatcttccccatccacctccactagttcttgcgctcgttggagccgtcgtctccaggaagccgcccttctctctgcggggcctcgcccttctccccccaccactcctttgcccccaccaccgccggagggatgggcccctcgctcttcggtgagccggcgcggctgcgaaaagggttagggatctgtccgccgccctccatccccgcgccgccgccctgtggccttgcgcgcgcgcgagagagggggggggggagagatgcggtatgataggtgggtcccacacttgtttttataaatatagagctgacgtacgccacgtaggacaaaaccacttcggattaggttgaggggggtaattcgtccgttatcaaaagtttagggtgagcaatgcccggttttatggttcggggggtaatttagacgaccgcgatagttcggggggggggggtaattcatactttttccttacatatatgtcatggtatatacccctaagatataccatctggaaattttaaatagacggtatatgtagttatgtagtacatactacttagacaaaaaggaggggaggaagcgcaagagcatgcatgcggggtacgcatgctacgaacacagaggcatcttttgcataggagcaagttcgtcttttccataaatctttataattatgactgtctccaaaagaatactcttatttctcatacgtgcagctagtattaccacgccgtcacgtgataaattagtctcgttgtgaacttgcattatatgcattatataggctaatttactgcaaatatatgcttgtataggctaatttactacaatttcaaaaatgggccttttttaagataacagaatataaatgtctaaactctgcacaatttcgaatggggcttgaaatgtggcctgtcgaatcacgggaaactatttaaaacctatgtttttttaactcaaattaatactgccgaattctaactattgaagccgatcgacaacattaagtcggatagatcgatgcatgggcggatataagagtagggctaattaaagctctactcctaaacccaaataccaattgaaaatacacttcaaaattaaaagaaaagatatagaaaatgaaaaacaaacttacgtaaactctacaagtatccaattctactcttaattaattattctgtctctgccatcgatcgatgatcaataaccgtgaatatctcagggggttactttatgtgaatttccctagctcacggttagcaaccaagaaatctggatttccccgactcatggttagtagccagaaaatctaaatttctacttgaggggtggccgtcaaaatatattgcgtgctttggcggtttacatgccatctttagcagtttttgagcgtcaaaaaattatgtattcttctagcgttggcattgaaggaatctccatctaccgctgtacgtacatcgcatgtgcagatgatgtgcatatgacacggctagcttggtggcagtttctctctctctctgcctgcagtcagaccaatcattgccgccacgtacgtactccgactctagctgcagcagctggggtacgtcgtcttcttccttcgtcctttattttaagctgcaatgggggtcttcttctagcttcgtctcgatccgtgggcagcggcgaatgtgcagagtaaatagcatctcgactcgggattccgtcgtgacatgagtaatcgccgccgctcgcgcctggatgctagctacacgcccctgcactgcacgtgcatcaccatggtcactcgcgatagatcgtacgcgcggctgcctcgatctacccttcaattttcaccacaagatgcagttcttttcactatcagaaaaaaaaatcatttttataacatttcctgttcatttttacctgccgacaaaatatactgcgtggacatattttttgccactgctcgtttgtaaagaaaattttctaggcggtcacctgcgaatataactttgtttttatggttagacggccctctcgacggttcatttgtaaaaatctgatttttaaaagtaaaccgttaagatggtcgtttgaaaaattttacaccatcgactactgtaaaaaaaaaaagaactcccatcaatatttatcctctcctctaccagactattactatcactcattatttatccttatcatctctctctccttctccatctctcaccaatcaccagagcgatgccgcgcatgcataagagttcatcaccgtcctcttgccactctccttacacagaagcagccacagaacgacgactcagagagaagagggcggcggtttggtgacgaggaggacccccaacaactttgtagatctggcaaccaagtgcttaacgatggagacggcaaccacggtaagagcggggtggcgaggggaggtgtggggcgacaatggtgaacgagggcaggagctcgggagcagcagcaacgaccttgaccgtgacttgatgacacactgctacgacaacgacgatgcccatcaaatgttgtttatttgcttgttgatattgaactacttgtagatgtttgtttgcatgtcaatgtagtgtatatgatgttgatttgagtatgataatagtggatctaatatggatttgaatatatatgatacttgcatgttgtgaaaatcaatttttttcctttttttttcttcgatcaaaaccctttttgtatgtgggtgacttaattttcacaggcgggtctttagagtgccttcttgagaaaatcgatttttctagacgggcgaaggcctacctgtgaaaattgtcgatttttagatgcctttgatcgcacacggagtatctagccgtctgtacaaatatgttttgtagtagtatttcttaattttcgacacattttaatattggaattacaccaaagactcacatggatatacaccatcaagcacaaaaatgtataccccatccataaatataatcatttctatgagtttttggggaagttaaggttgtgatgaaattactttgatacctgtggtggattcccctatcgggtaggatggggagtagttgaaaaatattaataaatatttatatttgtaggtaaatgctaatatttgtggatggatatatagaatatagaactcgcaagtacagctcttcccattaacgtgtgcttaaaagatggagggtagaacaataaattaatttgaccttgttgaatccttactgggtactcgactgaacttcatcaccataacaaagatgcctcccctctttacaatttttggttcatttggaaggcagaaactttaagtttcggactatttttatgcctctcggaaattcttttatgtgagataaattaaatgatttgccataaattatctacaaacaaaaaaaagtcctctacactaaacttggcatgcatttgctgttatagcacaacactcatggtaatcgctcagttatctatttcgtcgacaccaatttacttgtttttcttaaacaacctctacaagatagtgcaaacttattatcattttctttttcttaatgataccttcttctccatcattgcctgcctcctgatcatccctcatgaatcttccaagaaaaaagatagaggaattggatgatcatgcccaaaattaaagctagttggcacttagcacctcatatggtaagtagtttcttcactaccttagctgctgttcctcttttgatcccctggctgccaccgtcaccatcaaaagacctatgcaagcttcaacatagaccagccaggaaacaatttagtgctcacaaccccagttagttgatcttgatcatggagatgtacatagcataatacatatatatagaaatatgtgtgtgtgtgtgtacagccatatgtacaggtcattctattttgttttgcttcctgagatcacttgatgcgtcatcatatatagacacttgtaagatgtgcagctggacatgtacaagccaagtgataaaactatgtaccaaacactactacctaatgagccaacctctcaagtaataagcacctttttgatgtggggttgacgtaggactaagatgtttcaaaattcttatgatcataatttcgtatttacgtatgtgcggatgcgcttttagtagaaatttagtaagattactcgtatttatcgctggtttctacctcgatctttatcctacctaaggaaaacaaaataaaaagatctatatttgcatagtgatgtgtgtacatgcgcatcttctacctttcatgccctaaaatttaaagaacattcatctatttttcctacttgtttacaagagtatatgcatgatgcatgtaatgccaaaggagcaagtaaaaaaaaaaactggagtagcacatagactaaggaacccctaatgatgggaattaaacttgtccttagtgcaggaaggtcctcagtgtgcttagttgctgctgatcccttcctaataattaaagcaaactgttctttatatggacggctgatcttaagaaatcaacttggtccattatgattgccaaatttcttcccagcactgtttcaagcaatgattcatttcaagctatataggtaaataattagacaaatataatggttgatacacccaattattacttgggtggggccccatgttgcaaagtgcatgtttgcattttggtgacatcatgttgattaggcagtgataaagaacagttgatttgcatagacattgatcagttttaactttagactactgcttcatcaacttactttctgaaaaggtggtaaggaaggaaggaaggttttggtgttagggggttctaaaatagcttttcggttcgagtggaaactgctgttcatcatctttactttcttggctagtgaggtcatggagtaatgtgataatgtactcatgaggtggtgagctgcatgagtgggtaactgttttcgatactagaatattccagctgctggactctgctctgtcccttcccccccttcttttttgtgttctatgaaatcttttaggaatccgttcgctctcatacatgcaaactctgattcagtcggtgtttatttgatctctgattgtttcagtggttgaaaataacatgtcattatcgggcaatgaatgtctgccaccttcaattcattaaaattggttctgccgtgtaaacttactcctctggttctggttctgttttcttttaaattggttagttcatttttaaaccataacttttttcaaacgtgcaaaagatattgcacgttgatatattagaagcaagattattttataactaacgtcatataaaaggatggaaggagtatttactaaaccagtgaatatcgctatgtgaccaaatggacagccaattatacagtttatactaccgactgaaaatcgttatacttgtgatattccagttaaaacctaaaagtttgagtttgtgaatggaaaatttaatttgcattacaagtttgagattttgaatgacaaattcgtgtgattcccattgaaagtttgatgtcatgaattgaaaattttgcataatttaagtcgaaagagtaagaaataacgaatattttgggttgaaacttagaaccatgtccaagttggataaatcacgcgcgtgtaacttagcggttgacatgagtaacaccctccaaggtcccaatttaaaaggctggatataccggttggatatagaggccgcgtaaaaattatccttctctaaaaaaaaaagtcacgcgcgtgttcgtgcattaaaatttttataacatccaccttataatgaaaaaaatataatatatgtaggcctgatttactcacgatagatgatatgatttccgcgtgatctacaaccttgttgggctaagtttctgggacatgttaagagcttcagtatgaataaagtgcaaaccttgagttcagagtaatgcacccataaataatgctatcgcagtgcctataaatattacatatccacactatgtatgttactcctatattttcggtctctgtcattttgagcatggatagtaaatgcactcgtaggtgtatacacgtgttgtgcatgtgtactatagtgcgtgtcttatatgtgcaccttctgtgtaaccgaattatttatttatttagtttttgaaatgaattcataaattccggcctctgtcggcttctcacggccctgtctttggcccattagatccggcggcaactcatactgggcctgataaattgggccggttgctctcaagctaggaataagtacactttgactcc

SEQ ID NO: 13319 - DNA, 9193 bp, Oryza sativa
ccggccgacgtgggggagtgggggaggagagagaggcgggattcgaaaatcgaatcccggccatatcgggtgcgggcgcgagcgggagagagaggggagtgggtgcgggaaacgcggcgcacgcgtgggcgtggtcgacgtggcccgaaggaggcagagacgtgggcgcggcggcggttgcgagcgcggcggcgcgagcgagagcggcgggaggtgggggaaggacccgacaggtgggccccacctgtcggcgaccctggagaggagggcggcgggacggcctggctgggcctcggcctgcggccggcccagcagggaggggggaggaaaggagagaatgggccgacggcccattcgaaaaaaaagaggaaaaagagaggaaaaagaaaaagaaaaaggaaaaaggattttccctggaattaaaatattgcttgctcaattttaattggttaaaattatttctagagctctgaaaattccactaaaaatcctgttaatgaatttcgacatgtagaactcaagaaaaattccacatgtcaaatccgattattatttgcattaccttcttagggttttcttttgatttgcaccagcattttcttaggatcatttataaattaaattttaggcttgggaggagaacttcggggtgtgacaaacctaccccgcttaaacggaatctcggccccgagattcggaggagctggtgaagaggtgcggatgggcggctttcaactcatcttccctttcccaggttgtttcctcttctgaatgatgactccactgaactcggcaaaatcgggtgactttgtttctggttctcctttcactggtatcaagtatgcgaaccggcttctccacgtatgttaggtcctcctggatatcaatgtgttccgaatcagcctgttcttcaggtacccttaagcacttctttaattgggacacgtggaacacgtcatggatgccgatcatgttggatggaagttctaactgataagcaacttctccccttcgttccaaaattttgtatggtcccacgaagcgtggtgccaacttgcctttcgtctgaaaacggtgtactccccggagcggagtgacacgaagatacacggaatcccctgcttcaaaagtgagctcccttcggcggttatccgcgtagctcttctgtcgagactgggcaattctcaacctttccctgatgattctgactttctcttctgcttccgctaatacctctgttccgaacagttgacgctcgcctgtctgatcccagaagagaggtgtgcggcacttccggccgtataaagcttcaaacggtgccatctgtagactggtctggtagctgttgttgtacgagaattccgcatatggtaagcttttgtcccaagctccaccaaaatcaagagcgcaagctctcaacatatcttccaagatttgattgactcgctcggtctgaccatcagtttgcgggtgataggccgtgctgaaatttaaacgggtccccagttcttcctgtagcttctgccagaattttgaggtgaactgactccctcggtcagatacaatctttttgggtactccatgtaggcacatgattctcgaaaggtaaagctccgccaaccttttgcccgtatatgtggtatgtactggtatgaagtgagcaaccttagtgagtcgatccacgactacccagatcgaatcgtgacccgatgatgtccggggcagtcctgttataaagtccattccaatctcctcccatttccattccgggatttgaagaggttggagtaaacctgctggtctttggtgctctgccttcactcgctggcaaacatcgcagagtgcgacgaattcagctatttctctcctcatgctgacccaccaaaacttttctttgaggtcttgatacattttagtgctgcctggatgaatggagtactgggtctgatgagcctcggtgagtatcagatccttcagttccttgtcgtcaggtacacacaatctttctcccaaccagattgtgccatgctcatcttcgtggaaatcccgggcttttccgactctcatgttctttttcagctctgctatttcagaatcatttgcttgagctgctctgacttgatccacgagcgtaggccgtgcctccagagcggctacgaacccgtgttcaacaattcccacgttgagatgctcaaactcctgccgcaattcctcacacatgcccgcgatgcatagggcagtgcagtaacttttcctgcttaatgcgtctgccaccacattggctttacccgggtggtagtggatgctcatgtcatagtctttgattagttccaaccatcttcgttgtcggagatttaggtccggttgggtgaagatgtatttcagactcttatggtccatatatacttcgcagcggttgccaatcagatagtgcctccagatcttcaaagcatgaaccactgctgccaattccaagtcatgagttggataattcccttcgtgtggacgcaactgccgcgaggcatacgcaaccactctgccctcctacattaggacacatccaagtccgtgacaggatgcatcacaatagacttggaagtctttcatcgggtcgggcagaatcaaaactggtgcagatactagtttcttcttgagctcctcgaagctcttatcgcactcggttgtccatttaaacttctcatccttcttaagcaactgagtcatgggtcgggtgattctggagaaattttcgatgaatcagcggtaataacctgcaagtccaagaaaacttcgaatctgcgacacggtcttcggtggggtccatttggtaactgactccacgttcgatgggtcgactgccacaccctgagctgtaatgacatgacccagaaatttgacttccgtcaaccagaagtcacacttgctgaacttggcatatagctggtgctccttcaacttctcgagtaccagacggagatgttgttcatgttcttcttcggactttgaatagataagaatgtcgtcgatgaataccacaacaaacttgtccagaaattccatgaacactttgttcatcagattcatgaagaatgcgggtgcgttggtaagtccgaacgacataaccgtgcactcatatagcccgtaccgagtggtgaaggccgtcttcggaatatcctcttcccggattctcaactggtggtagcctgatcgcaggtctatcttagaaaacactttagctcctttcagttgatcaaacaaatcatcgattcgcggcaaaggatatttgttcttgattgtgacctcgttgagtgcgcgataatcaacgcacatcctcttcgtcttatcctttttctccacaaaaatgaccggagcaccccaaggtgaagtacttggtcgaatgtaccctttctgcagctgctcatcaacctgcttcttgacctctgctaattcgttggccgccattctgtacggtctcttgtaaattggagcggttcccggtgccaagtcaatccggaattcaatctctctcttgggtggcatggtagtgaggtcttcggggaacacttctggatactcgcagactatgggtatatcttccaatttcctcaagtttttctccacggtgtccactgggatttccgtctcaatctgattcaaagagaccccttgctttggtgagtctggtgatttgtacactaccgtttctcccttctcgttggtcaaggtgactgtgcgattcgcacaatcgatgactcccttaaacttggtcagccaatccatcccaagaatgacatctaggtctttggattcgagaagaatgaggttggctagaaatggtgatctttggatttctattagcactgaagggctaaaactgactgaggttgaactatttcccggggtatgaaccctcattggtgtgctaagctcttctttccttaacccatgcatcccgacaaatttctttgaaacgaaagaatgcgttgcaccggaatcaaaaagtactgttgcagggattgagttaacaggaaacgtacccagtacaacctctggtgctgcttgtgcctcctccgcagatgcgtggttgacacgagcctggataaaccttggcccagcacgcctaggcttcgggcatttgtcagcgaagtggccaagctcgccacagttgaagcaggaccctggttttgctccagtctccttcttggattgcgcgggcgggcctgactgtgccggtgccattggtgggcgtggagctgcaccgcggttggactgacctccatggtggttctgactgccactggcgccctggggaaagttgctagggttgaacgggcggtgctgacgaacgatcatggtggtaggtccaccctgctgcccaggagcgaagcgcggcctctggtgacttcccggaggtgccctgaactgtgcggccttcctcttcctgtccatcttgttgcgttgatcctcctggcggattgccttgtcaaccagcctctcaaagtcagcgtagtccccggatatcagttggttggtcagctcatcatccagacccgccatgaacttctcctgcttctcggcgtcggtgcggacatcctctggtgcatatcgcgcgaggcgattgaactcgtggaggtactctgtcacagtcctgttgccctgatggagtgcccggaattccctcttcttttgtgccacgaccccgtctggcacctgcgccttcctgaagctacagcagaactctgcccatgtgacttcagtacctggtgggcgggtggccatgtgattgtcccaccaagctgacgcgggaccctgaagctggtgtgtggcgaaagcgaccttctcctgatcattgcactgcaggagattcagcttcttctctatggcatggagccagtcattcgcctccatggggttggtggtgctggagaaggtgggtggtctgacgcgtaggaactcaggcaacttggactgagggggagggggaccaaactgctggtgctgctgttcgacgtgctgcatcatcctctggtgcatctgctggtgctgctgctgcatctgctgcatcatggctgccatcatctgagtctgatgtgccataacttgggcaagggtcggattctcgggaagtggtggcggaccattgccggaatcactgctggggtgcacaccgtcagcgcgttcttcgccgttgctgccctcgcctgttgcgcggctaccattcctggtgtagaccatctggagggaaaagcagacggggaaaagaagaaaaacagatgctcaggaactaagctttattacaaaggaattaaaactgcaattgttctgatctgaattaaaacacttaaagagcaagcaaaaatccttattaagacagccatatcataggcacatgatatcgaccgtcgactaaccccaaacaagcaacctaaacacacaaattaacaagcagaagctagacagtcgataaactaatggaaaacgagcctaatgctcggaacggctcctgcggtcggtggagtcgaaggcgtcctcctgctcgtcaccaggtccctctgagcgactcccggagcctggcagataagtctcgccactgcctgactctgagccactgggagtagcagacaaccaacctccattgccactggctggacccctggcggctgatgcgggagcgaaggagagagcggacgcgggagctggagctgcaggaactgccggagctgcgggcggaactggaggtgctgcgggagctgctgatggaggtgggttcctgggcgcaagctggatgcgcacgggtgccgtcgtcgtcttgcggggcgtagtgcggatccggactcctcctggcgctggaagaccctttagctgagcgttctccctcttcaggcgcgctatctcgtccttcagagcgacgatcctcatgagcttcccatcgttcaaggccttggtcgccttgtgcaggtccgagtgcatcctgtccaatcccctcatcacagcacacatgtgaccaaaggtggtgtcgttctcgctagctgtcggacggaaggagctgacgtcatcaccgttggctcgacgggggtggaagcggtacgccgtgtcgtggaagatgtagttgtggcgctcccgtagtctggccatcatcaagtaggctgcctcctgacaggcgtgatctgctgtgcctccagatgcctcgaccaccatgttagctaggcaggtacccacgtagccgtggacctccaagcgaacacggtgaggaagctcgccactgagcggtggaatcgtcgtgtactctggcgcgttggggtagcccaccaccagtgtcatgcgtgccaactctgccacaaagtcaatcatgccttctccgcggtggttgggtgggtggccggccatctagagaatacgaaggagtaggatcaatgcatgctcaaacccaaatttaaataaagcaataaaagactcaaacaagggaatcgaataagagcgaaatttttatgcatagatcattttgcatgagagcgaataaataagacagacccacataacgataaaataatgagaaattagatacatactaataataacaataagagcataaataccttgcaacccatgttcctgagctatgacctaatgcatttcacccatcaaatcccaactgactgacgaataaatcccaatagttttactaaaaccctagactgactcgttttgaagaatctcacttaaacgagcgaccaagatttttcccttgaaccacaagaacagatcccaattttcccggaacaaatccaattgcaaagaacatatgcaatgaaaaggattcagagggctcttaggtttttccatttggcttgtcctacggtcaaggtcggctctgataccaacttgtcacgcccagaaattcccgaatagaatttcaagcagaatgtgcattaaatccccgtccaggaccggccggggtacacaaacgacaatgttgacattcagatccacgtcttacaaacatcataaaagtcttacataaatgcagcggaaaacaaaagataactggagctaatccttgacttgaactgcagcgggaacaccactccacaggcatcctcgacggcacggacgaagcctactcctcggagaacccgccatcggacacaaactcgagctctgagattggggggaaaatagagcaaggctgagtactacccactgtactcagcaagtcataccggaatgggggtatgatgcacggattcaacaagggatagctaagcaggttcatttgcataaatactggcattaaaaacaggaattgaatgcgaaaacagttgtaataattaagcaatattaatcatccactgtccaacgctacaccacgttgcaacaggcccaaccatccacctataccatccaaattcattagactaaactaatgtgagtctaatcacggtgaatctggttgaccgcccgtaaccgcgggcacggctattcgaatagttttactctgatcagaggtgtacaactgtacccacaagacacagccccacgacacgtttccgtgcgccgacatgccaccacgacatcccggaaagaggccgtgacaggacccttcgcttaaccccctctaaccaagcacaccacacctcaggtttcacccccactcctcgcaaggcagcgggcagtcccctctcgtgcctaggtgaatccggaagccgcataggccgtcgcagggcccatccaaactccatcacgcccacccttgcctggatgcgtcggctagaggaaagctacgctacaagcccagccgttgcccacgctggcttgtggtaagtacgataagttcttccagggcatcccgcgaaccggtccttaactgccatgggtgcgaccagcaaaaccatgcacccacagcccaccatgtgattcattttatttaaccaacaccagagcggtggtactaatccaacattatcatataaacctatagtctaggttttaaatgagatttccccattgtgtgctagttgaactaagcatggctaagcaattcctagtccaaagtctaatcaagttataacccaagctaacaaaggagcatggtgtccaaaaagcatggctgtaacaaaaggtaaccatcccatagtataattgcaaaacaaatgcggtatttgaaagaaaacattaggacatttgcaatataggatcaatatgatcaagtgacaagcatgacttgccttgctctgctgctggaggaacctcggcgactatttcgaagtacaccggagcgtcggaagagccggaatctagcgacatacaaggcaaacattgcaaacaggctataagactactgaaacagggaacaaaaccatctttaatggattctacacatttttcttgatttactgagacttgattgggcttaaacggagctcggatgaattagttatgaattttagaagattcactgtgtttattactatagaagaaaaaccttaaatcatttattgcgcaatattccagggctgacgtcagcacggagggggtgcggcgccgacatgcgggcctcactggtcagcgactcaagggtggccggtctaccgtggaccgggaccacgcgggtgatccaccgccgatccacgggatcgacggcccggatcggcctggggccgatcggacggtgcggcggcggtcaggctaggctcggctcggcacaaagccggccgaccggtcacggcgacggcgcgcgcacgcgcacgcgcgttgccgacgacagcaaccgacggcggagacggcggcgcaaaggcggcgccgaagggcggtgatgctaaagcgacgactaacgggcggcggcgctaaagcggcggctaggagggagagggaggggaaaagaggggagggggtgcctcaccgagggtggccggcgcggaggaagacgatggcgaacagcgacggcaagccacgggaggacgacgtcggcgggcggacgagcttcggggtgccctaaggaaggagaagagagggattagagagagggagatggaccacggcgaccggaaaccatggccaaaggcggcggtggaggtggtgctcacccgagtgcgagggaacgagggctccggcgacgaacctcgacggaggagaggtggacggggtggatctcggccacgcgaacccgacggcggcgacggcgcggcctggcggc

SEQ ID NO: 13320 - DNA, 619 bp, Oryza sativa
atttaagccaacttatttaggttggatgcttgtcattcattatatgatctcatctcataattatccttgttagaaggcagtaaggtttctatctccattatctcctcacttgcaatcttttaccgtgctttaaaagatcactgcatcactgttttagagtctgattgttggggaaggtttccagtacttctgattctccactgacatggctgtgtggtttgctgattaaatgatcaggtggcattctgttctccaaagagcagaaacatggttaatgcaataaaggggttgttcatctcctggtaaggtccttttacaatcgataaaatttagctcgtttttcttcacctctatgtagtttgcacaatcaactcataaatcctttttttttccagcgatgtaccgatggcacagttcattgttaatctgaatgcttcaatgcccgcttcggacaagttcatcctgcacatgcttgaccctacacacatgtttgtgcagcctcatgtggcggagatgatcagaggtaagatatcagagttcagagaccaaaacagctacgagaaagccaacatgaaagatcattctaccccacagtaagatatcctgtgtgtacaccact

SEQ ID NO: 13321 - DNA, 1128 bp, Oryza sativa
ctacacaggaaataaaaaatggtggggccatgtggcccacatgtcatcctcgctccttcctcttctctatatcccctctctcctctctctcttcttcctcatcctccctagtccctccttctttcttccagcagcacgccgccgctgggaacccacctccgccgcaagcgcgtcccgagcatgctcctcctcgagctccgcgaggcatgtggctcaggatggtgtggccagcgccggcggaacaaatgagtcatcagggacctcttccttgcctccgcgaacccctcgcctcgcgacgctgccgctgccgccgccgcggcatcgtcatccttgtcctccgcctcgtcgctacgggggaggatgaggagaagggtgggggtggtgtgcgcggcggtgtcgtcggggcaggagggaagtggcgggggtgcagccgttggtggaggcgttgccgccggtggcgagagcggcggggtatgtggtcgggctgcgcagggggggacgcggaccacgacggtgctcggggcggtcaacgtcgccgaagcagcttcggcgaactccgccgtgcccggggtcgccgcggcagggctgcacaactacgtcgccggctgccgggagaggagaaggcggaggcgaagagcagcggcgcgacggggtgtggccagcggacgacgaggagagggatcccttcctcctccttcgtgtcccgcgactgcgagctcgccgtcgcacgtcgccaactcgtgcaaatcgatgcagcggcgcagcaggagtcagcggcggcggggccgaggtcgtgcagctccgaccgccgctccctcctctcccgtctcccgtttgccaccgcacaaagctccttctgccatcggccaccacgcgccgctcctcaaccgccaccacgcgccgctcctcaaccgcctccacgcgccgatggctgtcgccccccgtgcttctccccgccttctccctctccgcgtgcgctcgccgggctccccgctctattgctgccgtgtcgtgctcttcttcccgccgtccagcggccaccgcccttctccctctcggcgcgcctgaagagaggagaggaaagaagagagggcagatcgggagaggaggaagaagaggaggggttag

SEQ ID NO: 13322 - DNA, 967 bp, Oryza sativa
aaaaaggaaaaaggattttccctggaattaaaatattgcttgctcaattttaattggttaaaattatttctagagctctgaaaattccactaaaaatcctgttaatgaatttcgacatgtagaactcaagaaaaattccacatgtcaaatccgattattatttgcattaccttcttagggttttcttttgatttgcaccagcattttcttaggatcatttataaattaaattttaggcttgggaggagaacttcggggtgtgacatctactttgagagttctttgatttgtgtttcatcaggtttcggcggtctaaccggcgacataccggcggtcggaccggcggcaggcggcggtcagtccgacggaggagaggcggtcagaccggcggcgacttcacatgcggcaggcaatcttcaggcggttggaccgatggatcaacaccggtcagaccggcggcacgagctcggtcagaccggcggatcaacctcggtcagaccgatctacatcgaatttgagggtaacttttatttccgctaaaagattgggttgggtatatcaaccattcaccccccctctggttggcttagttcttatgattcgatcctacagcatactcttctaatagtatgaccgtatacatcccaaggtgtggagagggtggaagttttaagaagatgagatatctttatagagagcgggtgaaaataagatacatggacacttccctcggccttttatgtgcccttcaggccggttactgctaccatatggcttcttctcttctcatgctttaatatatgatgagagtccttttctaccttcattaatatacagtcccatcaatgcttgatctttcaaaaacaaaaatgatgataagacacttctgttgtacccattatattttggcaaaattggttatatagcattaaaagttcacgttttttgttttatagcgcccaagctt

SEQ ID NO: 13323 - DNA, 1770 bp, Oryza sativa
agctctcctccaatggaagctccaggcgtcgaagacgctctgctgcctctttctgccttcgcctacatttgtgagagaagaaggggagagaaagatagaaagagaggaggagggagatagaagagaggaggttagggagaagaggagatgggacgaaaatcgctaatatgtgtatcccacgtgctgacttagcaagtcaatcgtagttaaactgccacattagcagaaaatcgcttctaaaacatcaaaggagtagatttgcactggaggcgttatatcctggttttgccattaaggggggcagttcagccaggggcaatacgtcatggaggtaaaatagacttattcatgtccaaataaaattgagggctggagagattcctcagtaaataggcccattatctcatacaactagctgatctggactaaataggcccattctcttgacagcccaaaaatgcttttccttctgtttcgagatacttttgggcttactccggaggccctgatgatttgggctaatccaagagtacgaagaatatctactgctgtactgtctgcagcaaagaacaataggatactacggtgccaaataatgttgaccgattagggctcctctagaacgcctaaattttatacgattttcatcgaaatgaatctgattcccgtaagtcctttgaaaattggaatttcattcgttccatgcaaggccttaccctggtttctacctaattaagcatctgattattactagtagtattagcctaaccaagtcttattgagactattacacgcttgcatgcatgtcacaggctcacatctccggcttcagattcatgcagtgataagcaaattgaactttttaaattaattattgcttgctgaaagatcaaagatgcgtgtacgttgggtatctgacgaggtaggcaggcaggcaggcaggcaggcaggcaaggggtggctggctaatttgcttgatgcttagctacgcgtgcagatatttctcatccttaatttaattacttggcaaaggcacctcataaaaaggttaatttgcgtgtaaaccgctcttaattagcaggaaattcacaaagcttttgcgtatatacttgacttagctttagctaagatcatgactgtttgcttttgggtgacgtacacaccaacaccgtcacccaccccttcactctactttaatatcttatctccctctcactaacatatagtccactccaattatacattttttttcttacatacacgagcactttgcacatacatgtgtatacatcattaattatatatggtttgtatatattgcagatataattaattaattacaagaggtttatgaaaaatcaagattcattaagctggaaaaaagggatggtatatatgttatttatacatgaaagataatgaccaaaaatacttacagggtaattaaagtgcagtaacaagcgagcaaacaagagaatttgctactacagaggagatgaattaacagctgtaataaaaggaaaaaaagtattaattacatttagatccagacatttctgtcaaggccctccactttaactaaccttctcatcccagtccacccctctcggctcagtacactaccaagctgtgttgttattcaccgatgtatttttgcagccaaccccctctccttgactgaaattacgtacgtaacgtgggctgtgtatctactcaactacatggacaggattgagctagcggcggcggcggcggcggccatggccggcg

SEQ ID NO: 13324 - DNA, 18192 bp, Oryza sativa
cgatgctatataaccaattctgccttatattttcctctctttgagaggatcaaatttccatattactattataagatgatagtctacttttcctttttgaaaaagtgtttttttcctgtgtgattttgatgtagcgttgactgctttatgatgtagtcatctgccgttattcaaagatatctactacactcttatgcgcatgcacaatccaagtgctccatccgttttaggacatgaaatatgcacttgagttagccaacgcatagtttacttatccacatcccactgatcaatgaaataccctccttgttttcgactcatctagaattccatgtgatattttgttgctaggcaccgtaccaaaaaaaatattcatttttggttgaatagaagagagaaatagtgtaaaaggtcataaataccccttgcccttcaagtcagggtccacatctcccatctcctatctctctttctgctatctcttaggaaaccggtggcgcacgcgagctggccggcaaacgaaggtgtagttggcaacgcggcgctgtactgatccatcccttgccttcccgatcctgcttgaccttgctgccccaacgtggtccctcttatgaaatcaaagtgtgttttgattaatattttgtgataaacaattggcatataagataattggttttgatatttggaaatcatcggcgaagtggagctcactgactctgtggacctgtcagaccaggtggactaggctagtcagaccgacgtgtgttacacggttagaccggccaacccaatggtctgaccagtcaactctgtgtcggtgtcgattttgggttatttatttggatactcgtgcattaattattgtctctctagcaatgtttctttatactgtgcataatactgttgtttgttcaagttaagtcaagttgggaaagaacttatgctcggatatgatttcttgtttgagtgttgccggtgatagatcgagtctactttggagaatatgatgtctggacgatcagaatatcatgctggattcttaggctaaagaacaattcatgtgtttgatagagattccatgaggcatacgacagaacattgtatgcatatgggatgaggagtcaaatttggaaggagtccaaatttgggaagtttggaattcgaattgtgatgagataagtttgtttcttgtacagaaaggttttcttgttgattagaatttcttgtacaagttaaattcatggctttagactgcttacctcaggtataaatagagagggggttgagtcctcttggtattattttctgtgagttgagtttagggtaaagttagggttttgagtttagtcgaattgtgtgagaggtgtgcttttgttccactttgtaaacacgaatagaagtaataaaattcaatctacttttaagatatttcaatttgtgtttgatcgggtacaacggtcatatcggcgaattagcgacggtcagaccggtggcttcatgatggttagaccagcgatgtttcagcggttagactagtggtggtgacagacggctgtggcttgattgcgcgatcagactgatgcatccacaccggtcagaccgcaacatatgtactgttagaccggcgttgaacctttggtcagaccgatctccatcaaatctcgagggtaacttttattttcgctaaaagtttttagtttttggtgttgctaccatttaccctcctggtaggcttagttcttattgttcgaccatacacctctcaccgatcccatgctcgccatagctccacaacctcgtcaatttttcatcgctgtcgcggtctatggccacatctgcgtcctctttgtggctccggcctcgacccctcaccctctactgcggttccagatcgatccacctggtgtagaggccggccgccctccaagggctgcacatgctgtgaccccttggcgtggtagtctccatgttgctccttagattcgagggaaagggatcctaacggatttcatggtgatcactatcaccgacatcctagaaccagcagggaccgcttcttgtgggtgcagcgtggcccgcttgagaacaaccatggctcgacagctcagctgctatcacaggcacacatatggcaacctttgagaagttgtgctcgagatgaaacgaattggaagggggcattttagacatttcatggtgttctctctccttacatggctgaaatgaatgaaatagtagggggcagtgtctactatcaaatatccaatttaattagttttttttccaaacttgattttgcgatgttctacaaataatttcacaaagtgatgatgtcatctaacaaaatttgcctttttaagaaaatagcaatataataccctttattctttacacacctactctaacctttttcttcttgggactatatggttgttttcgctatttcggaaaggactcgatcatggttatcttggccatttccacgaaaactgacttactatatgaccccatgagttcggctcgaacaggacaaggctgctatggcgatgatatggagtgaacctctattattctccccaatctgctgaaactgggttgccgatagaagcattgtattcgacactagcttcgagactgaaaaacagtccatgcagaaggagttctgaactctgaagagtggctatatgaaacggctagtctttcagatcaagggtggatatatataggacacggatactgtgccttggtcattactattgcagagaattccttatgtgtattttatcagatttgagccactcatccaagaatggacgggaaagacaactcccaactgttgattcttcttcccaattttccacaacccaaaagaagagagaaagaaagggataaattgtgatttattttaaactgaaagaactatgcagtgcacgtaagtgcttcacaactagtattaatgcagaggatttgcatccctatattgtagtcttcagctcttccagttcattcccactgtccattgttagaagaagcaatgcaaacatcattcctgatgtctcctaaccctagatttggcttgtcctaacactcctgtatcattctcgtgattggtctcatactcttataacagcatcgtcctgtatatcttaaaggtgtggagggtggaagtaggagatcagagatctctccatagggagctgtcgaacaaaaaaataagatatatctgcacttctctcagccttttatttgccctttaggttgctgttaccagatggtttctcttctgatatactcctacttctgttaagaacaatgctttaattgatatgcgaacctatctctaccttcatttcattaatacagtcccaacaatgcttgatcttcccaaaataatgatgacagacaccttttgtataccaatattatttttatttcttttagaaggttgatttgcaatattactattgtataacataataatatgttttttttcctcttttaaaaagtatgtttctgtttctcaaaaaaagtatttttctgattgattttgagagagtgttgactgctctaagatatattcatctggggttaagttgttaaacatgcctactacaacgaattaggtcatgaaaaatactccatgtatccgaaaatatagctaccttagtagtgcgaatttccaaacgtggttctaaaacgtagctacattttagaatggaggggatagtttaccagaaatttgtgaaagtaaattagcaggcctaggcccgcaagaggcagaaaaagaagttgaagagaaagactacttttgactcctacggtttatggatactcttttgtgcacgctctgtccatatgctctgttttaggatgtgaaatacttgtgttatcaaaaacgtattttacttatcttctccttgtttcggactcagctataattctgtgtaacataaagatctccatcgagagtttgctatacccacatgtgagaattgtaaggtcgtgacatgagatctgcacacgatgcattgtgatgcacatgtgtatggtgacatggggtttatctgttgacaaaatattttggtatggagcacacatgaactacgaaatgataaaccgtccctacatattccttttttaagataatagaagtttttattaaactcggtcaattagcccacatagtgtcgtaatacttctactgtaatttattgaattggtgatctacgtacattaggttgtcagttatgtatatatggttgttaacacatggaaattcgactgttttcttgttctggtcaagatatttttagcaccttatcataacaaatattgtgtgaaccactcaacttctttgcgctagttgaccagcgaagtcaagccagatcatagagcaaatgcagcaatcaaagactaggttaaaaaatactaaatctgaagatgctacagaaaagaaatacgtggagcatcagtcctagaggtttttgttcctatgcagagcacatgcatcatttcaccttcaacactgagatccatccatggtagcggagcactgaaccctataggtcttgcaatcagggtttgaaatttcgtttcaaaatttccgaaatttcgcccccccaaccagcaagcttatatctcgcctgaattttgggtttttttttccaaatttttatgaatctggtcaaattttattcaaattcattcaaaatcagttaaaatttcaaataatttcggccaaaaaagttcaaaatttccgaaatttcggtctcgccccccccccccccccccaaagcagaaatagcaatttcgagatttaaaaccctgcttgcaatgaagagattttcgactggacatgcctacgttttcagctcttctgttgtgctctgatcatcccaggtcaaacgatgcagcgctagaatcattccggatatctcctaaccctagatatgtagatttgtctgtagagtacgtatagaaggttttaagaaaatgagatatatcctcatctccatggagagctagcttttgaaactaagatacacacgcagacacgctcttctcaacctttaatgtgttacagagtgattcttcatttcatactctttaatatatgagaacatatctctaccttcattaataccagcaatgcctatcttccaaaaaaaatgctgctggacacgttttacgtgtttgttttcattttgagaatatcaatttctgttgtaatatgatactgtactctttattttttagatgtgttttttagggataaagaatattgattgctttgtgaataataatctgaggccaggcaaaagggctttaagaaaataactacaaacaaatatattttaaataatagatagaaatccgacttctaattactagtacaaagcaaatttgactagggaccaaccaatgacagcgtttgaaacaataaaatagagaggaaagatttctcgatcttcacacacacgtttcccgagccactgaacgtcttttgaaaaaaataggagagttttttaataaattatattaatctatttttaaatttaaaataattaactcttaattaatcatatgtcaatggttcatctcgttttacttttgggagttttgaacctcaccggtttgtttatgtacactaaaatccacacgatagaaaggaggaagtttccagtatctcacccttataaactgcaaccaatacaacgaggataatttcattcttgtccttactttcatgtttatttttggttttgccctgttttttttcatttttacctttgttttttctaaaggaagccaaattatgcctctactttggataaacaggccaacgatgtcaaagttattggtgaaaggacatctatatccttacttccggttgcacaattatctctctacttttttcattaattgtgttttttcctccatgtcgtacatgcatattgcaatttgatttttacgacgatgtttaaaattaaatgatttttgactaactttaatgaatataacaattttgatagaatatcaataaaattttgtgacaaatttgacacgattttgtcacaggtttgatatcattttgacataatttggacagaattttgacagcattttcacatctttttacgcaactagcagttgtcacagctcttcctgtgcaacctgctcgctaccgagccaagccattagccgcagggtcaccgccatggcaacctgtacagttcattgccatgatggccaggtccccgtcgcctcgccgggtggctaatcaccgcggcaacatgtggcggattagaactatccctcgtcgaaagatagaatgctagcttcattcctgatggctcctattcctaactggagttggctttattcactactagagattactcatcttttatctagtgccccagatcataaaaatatcggatgtatcaataaccggtactaaaaactctttaataccggttctaaaaacccaagtcccaaaaaatatctaaagatcaccggttggtgaccgggactaaagattgtcccagttcgtgttatcaaccgacactaaaaatgtatttttagtatcggttggtgttaccaatcggtgctaaaaatgtctctagtgttagtttaaaaagaatgcatcactatccatccaagttagatgtgtgtagtaggtgtgatggtagcacgtgtaagggttgtggtgagagattttgagtttaaatcccctcacatcccacattttttttacttagtatataaatttagtaccggtttcttcaaccggtacttaaaaaaaatcaagtactctcgattccctacatcaaacattaataggggttgagaaccgatacatgagatcatatctgtccaagtgatcattgtcatgatttgtcgtatacacacttataatataggttgtgtatatatacctttaaggtttggaggttggtagtttgaaaaaaaaaataagatctccatgcatagagacctaatgaaaataagatatatggacactcttctcagacttttatatgtcctctatgttgttgttattacggaagacttctttgtcttctcgtacttgaaactttttatgggtgcattaaagaattcaaaattttaagatatcattttagaagtgatgagtaaagaaaattaattaacaacgtggttttgtgaaactcaagttccataatactaatacacaaggtcatgtgcaatataggactataatatctgggttacatgaaattcactctgtattttacataaattctagtaattcttttttcttgtttgtttacaaactttcgttatccaaattttcctcttggaccatatagttgtttttggctatttcgaaaaggatcgaagcacggtaatcttagccatttccaagaaaactgacttgcgtacttgatatactttgacggattcagctcgaacaacacaaggctgtaacagcgatgacatagaacgagcctatgtttctatccaccattctgctacaacttcaattccagatagcagcattgtacgtagttgacgacacttcgacgtgtgtctttcatattcttctttttatttgtagtggatgtcttacatggctaaaacctatacatgtttggcacaagcgctatcgatcttggctatgtataccaatttacagaataaagaccgaatttctatctattattagaaaaacaaatgacaccgatttcgtgaacggagaactagggcaattggcacagctgaaactgattacacagtatgtgccaattgccgttcttcagttctccgtttacacatattctcatgcagctgaaactaatttacacaggatggcaatatacacaggatgtgttagctgtatgatcatctcgatcgcatacctaattagtagtaggatggagtattcagttagcattcgactctgattcgaccacttcaacgggaacacatagatacataaccactacctgtagagcacaactgcttctgaaattgtatccactaacctaccttttttgtatatatagaatacctacagaatacttgtgtacggccaggtacatcacagaatgtcaggatcacgcctaccaaactgtggttatgcacaataacagcagatgcaggcatgcagctggagtgagtcataaaaaaataattaaaaaaacttcattgaacataaacatatatactcaacaacaccttgctattattatcagaagattcttttataatgtgctcataaaaataaaacccgggtatctacaaaattcattttttttaagtagagtgtaatatttagagatgctcccaataggattagtttcgttacgttgtatagacttgtagctttatcaccatggttcttaaaatgaaacgataaccgctcgattatcgtaattactccctccgtcccaaaaaaagataaaccctgagtttccgtgtccaatgtttgaccgtccgtcttatttaaaaaaattatgaaaaaaattaaaaagacaagtcacgcataaagtattaataatgttttatcatgtaacaacaatgaaaatactaattataaaaaaatttcatataatacggatagtcaaacgttggacacggaaactcagggtttgtcttttttttagacagagggagtatgccggttcatatacggtaactgttcaataaacatgctagctagctaagatttttttaaaaaactcagaataaacctgaagtttctgtcgataaccactctgttactgcaatattcaactagtagtgctaaccaaattatcaacccatgttaatttaccttgagaactatggggcggttagttagctgcaagctatctatgtgcttattgtggacacggtgatgcgcagggaatgatctgcctacatattcttgttcatactgtcacaaaataccattaggccccatttggatccctggaatttcgaggaatggatttcttttctattcctaatagagttaaacaaaacatggcagtcaaaccgataaagcgtctttgatagaatctgtagtttataaggcaaacatgtttaatctagaccattttttagggaaaatctagaccaattttggtattgtaattcacttggttttgcaactccattttaactctcttttaatttactttgaattcccaagcactcgtggagggttgatttgttgaggctaagatcccaatacctctcaatcctataaactgcactcacagaaggtatctttgcatgagtcctactggggtaggtatctgatcaagcaaatgcctatacaagagtttggcctgaacatcatggccatatatatggggattggatgctagcagccacagcaacaaaggtggcactcacagtacaaagagttcaataacaagccaatatattaacataccattgcagtgtgtcaatgttttctttccattgatatttgattctcgtattcttttgtcagccttttattgaatgcccatgtggcattttgagacaaccttcatgtggaagttaattcttacttatgcattctcatttagagaaagtttaatacaataggctaggctgtgttctttattttcccctctttctcaactcacttccctcgttttccgcgcatacacttttcaaactgttaaacggtgtatttttggtaaaagttttctatatgaaagttgcttttaaaaaaatcatattaatctctttttcaagttttttaggctaatacttaattaatctcactataattgcgtgctttattttccgtgttaggaggtaaggttcccaaccttgcctcccgaatacaacctaaaagtacatgccaagtcatctgaagataactccatatatagatgtaatatacaataagtagttcctaacccaacaaacaggatatgcgatttattattaatatatttctcagctaattttctctcggcctcttctatcccttcttcctttacaacattgtccatcaaaaactcaccacccaaagtaccccagcttgcttgccaatcaccaccagcaatgtaagtacttctcaaaccggccatcgaacttgagcaaactggccgtcgaacttacaacgtttgggcggatggaggctctcttctgatcactgttcaacgaaacaagagtatagttggggctaagttcccgatacctcttaatcctataaattgtaccatcaccatgcaattgcagttgatagctagatgactatgcaaatgcttttgcaagagtttggcctgaacatcttggatatatatataggagctgggtgcgttgtcatcacaacaagtacgaagagttcaatttaggaacctacagtagccataggtgtcaaattaagctggctttgaatttgtcatttgattattttggtatataatttgatagcttttttaatttttgaattaatccgtgtgtgcatgtatggcattttgagacaatattcacatggaagttaattcttacgtatgcattctcacttagaggcagagcaagttcagctataacaataagcaaaaatcgtctgaagataaagaagaaatataatttacaaatatatttatcagctaattatatctaatagatgcatatatataatgacatgcatgtacctatgctgccaatgcctgtgaggtcagtgcacagatatctagtactatataggaaagttgttctagaaaatcagattaatctatcttataattttttattaacacttaattaatcatatgctaataagctaccttgtttttcatacaggaaaaatgggttacgaacccacatgttcgagcacgacctatcttcatacgcccattctaactgactctggagcagcgcatggcagctaacttgtggcccgtacactgctcctgagaattgtgaggtcttgacatgaaatttgttgaagcaaagaccgagtttacccattatctttaaaaagttaaaatataaatggtacgttgtgatgcttatgtatataaagacatgcagtttaatttatgtgtaggcaagcaattgtgttcattggataaaaatgtgagttacacaatgatcagcaccctgcattcctggaaacactgcatagtgttgcaataccactagtgtaatttgccaaattggcatgatcaatgtcaggtcacaatttggaagcttaagatgccgcttaagattaagatcttcatgtggtacttacttaaaggggttatgttaacaaagacaatttagcaagacggaattagaatggtagtttaagatgttgtttttgtatgaaaaatgagaatattcaacatcttttcatagattgccattatgcaaagtttatatggagaggaatacaatattcttttggtctatgcccttctagtagtatatcacatatttttgatggttggcttttgggggtggacaagaaaaggagtaagcttatacttgtgggagcctctgcaatatgttcgactctgtggttgagcaggaatgatttggtttttgacaaatcaccatctattacatatatgcagggaattttcagggcaacatattggctccggtgttgggcttagctacaaaggtgtgatgaagatgacaagtttatgaaggttgcatgccgtaggcttgagacgacagttatgcaactttttgccaattatggttggagattcacaaatagacttcaataacatgttctccttattttagatgggttattttttatttaaagtgtgtgttctcaatgttttgttgaactacactatttttttagtgtaacttgtaataattggctgtagctcgttttgagcaaagaccgggatattttattccattatctaaaaaaatttatccccgcaaaaaaaatgtcaggtcacttgtggcaccatgaggtcaccctagctcatcactacacttgctgatccgagtgccccacaactacaagccagtaaaattggagaagattggtgacttggtgacagatgaccatggttttcaattttgattttgtcctaaattttgctcattttggttctcccgaaagttcagaattttcggcatattttggatcgaccttttttgaaattttagcataatttagctgaatttgactaaattttgaccaaatttgtaaaagattgagaaaaaccaaaatttttagccgagataatcacttgctagggggtccgaaattttgaaccgaaaacgcaatccctggagacgacctataatggtggaaatcggtcgagagaacgatttgcacaacagggttaccgaaaagcagtggacaaaaggaataaattgtgatttattttaaactgaacacaaattactaccaacaaaaccaagcgtttgagcataggagagcatcacaactactaatgcagatgatctgtgtgcctatgtgccatatttagctcttcaattgtattcacaccgtccaatatcagaagatgcaatgatagaatcattctatatgtctcctaaccctaataaaagctagtaaaactggagaagatttgtggcttttggtacgggtgaccttgaactgtggagaacggtcaatagaaaaacttgctcaacgaggttaccatgtgaatatcgttttatcttcttttgtgtgtttgctgctcctgtaaaggacttcttttaagtctcttctcctaatatgaaatggcagagctcctgcccgtttcctcgaaaaaaaatgatggttaacagaaaccaaggacttgagcataggattgcatcaaaactactaatgcagatgatctgtgtgcctacattgtcatgtgtagctcttcatttgtatccgcaccatctcatgtcagaaaatggaatactggcatcattccagatgtctcctaaccctatttagcttgtcatagcacttgtttgtcattctcattattggtcgcttattttcttataacagtatatggttgtcttaaggtgtggtgtggagggtgcaagcttttacaatatgagacattttgatgaaaataagatacatgcacactcttatcactcttttatgtgcccttcaagttttgcggtttccacccgatggtttcctctcttctaatgctttaatattaaaacctatctgtaccttcattaatacagtctgagcaatgcttcttgatcttccaaaaacaatgatgataggcacctttcttgtaccatttttttctttttgagattgttggttttcaatattactaataagatgataatatacttttcttcttttaaaaatatcttctctgaccgattctgaaagagtgttgactgctctgtgataatgtggtgttaaggtctctaagatacctacgataaaccacaactcgtgagttacaaggaacaatgcctaaagtctaattgagcttcctgagatagagcaaggagaaggaaggaaatagatcttcttctcgtagggtcgtaaaggggaaatagatcctctaacttactgccttcttataggattgtaaagggctttctcaccccaaaagctagctaatgaggtaagggactcccccctaataatattagatccattgcctcccacaatctatgggactatttaacaatctcccccttcacacattggtctctctcagtcgttcaccgccctttcaccgtacacgacggtccctcaggtatacaggccccgtaggcacccactgtctaacaagccttcatacactttgtccctcggattagagatgttgaactagccaggctttgataccaattatagtatcgtcaagagcctttctcacctcaaaagctagctaatgagatgaagagcttctccacttatatattaggtctcttatccttccacaattaatgtgggattattcaacacttctgactctaagtagctaacatatgagctccatagctcgttgatctacatgtcagcgacccatgtttgagaacaataggtcagatgagcctcatctgagaaggaaggttgtgtgctttagttaataccggctgattgagagatggaacaacgagagtgaattctctgacaaattggtgccaaaattttgagttccgtcaaacaaacttcagaaactacggttccgtgttgctctttataaaagcctttgttctttacacacaccttgtcgcctcctggacaaagtacatatggctgttttggctatttcgaaattactaaagcatggctatttttatcatttccacgaaaactaacttactaggtaccccttcatttcaaaatattgcaagcatttgattagatgagacctaatttagtactaaaaatcttaacatagatttgtttaaatttttaatattatgttgtgtctaatccattaatagcttacattttgaaaattcaatcggtttgaaaacgagacacagttgtgcttaattaggatggtaattaaaaggcctgatattttatcctacaaaatttaagggtagagtttaatatagggtgagctgactaggctgtggcggcgatgacacggaaagacacagctgtttgtgtgccaaattttttttatatacggacacacatttacattacagtattaaatatagactaataataaaataaattatagatttcgctggtaaactgcgagacgaaactattaagcctaattaatccgtcattagaaaatatttactgtaacaccacattgtcaaatcatggtgtaattaggcttaaaagattcgtctcgtaatttacatgaaaactgtggaattggtttttttccatatttaatgcttcatgtatgtgtccaaatatttgatgtaatggaaaagttgaaagtttgaaaaagaaagtttaaatctaaacacggcctgggtttattcccggagaagcattctactattcatcactagcttcgacgtctgtctttcatcttcccttttttagttgtacatcagacagatcagtggatgtcttccaggtttaaaagttaagtagtacgtgtttggctcaaacgccatcgattttgtcaaccaagatgacgtgctgcttcgacgacattagtttatcagaagatttagagaacgaaagaatggcaattggatttgcactgcttataaactaatcaatctcatgatgtgtaatctgtaggctcatctatcgcatattttattccaggtggtattttttactccagttctgccattacatgagatgcgataaaacctcggcaagaacagttggataaccgaaaactgcagaacacaattgcctccgaaactgcaatttacagattttacagtagtagtgaactgtcaggtacttgttccgttcaagaataaatgtagggatttcaagatttctatattttttgagtaaatatgaatgaaagttaaataagcatttgtaaattgtttagtaaatatgaaggttaaaccaaaagatttttttatgtcacttcagctgttaaaatttgaattttaaattgcttatattccttttctaagcatctgatcagttttagaatcatttgataagaatccataagccataaggaatctctatatcacgtacaaatttaaatcctacaaatccttatgttaacagagggaatatacatcacataggaatctctatattacgtacaaatttaaacccttatgttaacagagggagtatacatcacatgatcacaccaatcgaactgttgttatggacaatagcagcagatgcagagatgctgctggtgccaattcatttaaaaaagataaacacctttcattagaaaaaggaaagaacaaaaaaatatatatactcagccaacaacactctccagccatcaccacctcacataagtcacattagcaacacttgctgtggtgatcatatggttgggagcttgggggcagtagtaggagctacaagcaaaagctatacatatgtgtacattacaatgccccggttttctatcagcgccagattagtctcacgcccatgaaaaacagggcatgttgttgtgatatgagccaaaagctgctactactactctgtatgcgttgttgtgcaactatcttcaaacccatggcctctggttttcaggcccagattgcaagggatgacatggagagagcgccgaggaacagtgcaatgtatgccatcacctgctgccgtgtcgatcctgtcattttcccgccaaggaagtccgcggcgatgagatcaaccagcgacatgtatattaggatgccggccgacacggagtcgaggatgccctccaccactagagcccgtgggctattggcgttgtagaatgacgccacaccggcaccagctgcgatcccagctggtgttgtgatggcgaagaaacatgccattatagctgctgatagtgtcttgaattgtgcctgtggtcagaagatttgttagtgtgtaactaagttatactgatgagaaaggttttagaaccactaagatcatcaagaaaaataacaatgaagcaaaagtataaaaaaggtgctgtactcagcagatagacatctcacttaattttctgatagtacccacttgaatattattggcaaagtagttggccgttatgagaagcatagcagtctaatcaatttatttgcattgaccaattaagttttaagagaaaaaaattataatcccaaactattcataatattgaactcaaatggttcaattgtcatacatcaatacctttcaacttcgagagtattacaaagtggacaaatacaacaagaataatatttctgggaatatcaaagtccgattagggtcagaactcctgctgtcaacatcatggcatgctgccaacaattacgctattatgccggagataatattgattttccccacgaattaaaattctaaaaataaaagttcaacttcttacggttgctatggagagtgacagccaatttgaagcttggagacttagattacctagactacgagacatatagtcgtatggtaataccagagggacctaatagtaccaactaatttgtgaaccagattttttttatagcaaaattccaatcacaaatggtggtagtgaaaataacaggatagctaactgcctcaaacaaattcactgttctagaagccacattttatacatcatgaaagatgatttgctcagatggaaaatgacgtctatgtaaaagcctgcatccatactatcaactctatgttcgtcttaaggcttgcaagttgaatgtcccatgataactttttaaataaaaaggttaatcatttaacagtaaataccatctggacagaggtcaacttgctagtaaaaatatagttgttgcacaataattacaacaaactttaacaagatgagcatacgacatctgaatccaaatgtcacgccttcccgaaattcaaataggtggaccccatgtgccaaaaggccaatgccatatacatacaacaaacaaacaatcaaacaatccctgacaacaagaacataacatatagtcacatgtaaaattgttatgtataaactatactcaattggatttaccacggttaagcatcaattaaataatttcatcaatagaggaaaatatgtaaataatgagaattgatgcatgacgttctgctgaatttcctcacctgagcaatgcatccgccaagcgcgaacccctcaaagaactggtggaacgagagcgccgccaccaacggcctgatcgtgcaggggctccgtgacaccccgagcgacaatccgatgatcaccgagtgcgacacgatccccatctcaagtatctgcaagaaacaaattcatcagacatcatgcattgcgccaaaaaagcattaatgaactcagcctccaattcagagaacagatgaaacacctgcgacaccacgacggaccgcacttgcgccggcacctccccctcaccgccactgccctccggttgcgccaactcgtggccatgcccatgcccatgggggtggctgtgtgagtgcgagtgaggttgcagcagcggcgccttgttgtcgttgtcgtcctcggtgacggtgaccacggtgatgtcatcgtcgctagccgaggaggcggcgagcgcggcggcggcggcggccttgacgcgttccgtctcggccctgtgcttgccctcgtacaacctggtggcgaggaagtcgagcacgagtcggggcgagcgcggcgg

SEQ ID NO: 13325 - DNA, 1603 bp, Oryza sativa
catgtgacacatatgactttgatgatttattattgatcatacttcaattggctaagtgttgtgatgccatgatgattattttttcaaaagccaattgaattagtattcatctagacatattagttggatattatgatttttcatatgtctagaaaggagttttggttcaataatttgatataccaagcatctggctattatgtgaagaaaaatttatatactaaaagccgatgcttgatttcaaaagtttggacgaaattggcaaagtcatagaccaggggcggtctgactagcattgcacggccggtctgaccggtggtagccagcggtctgaccggctctgcatggccggtctgacagggcagacagggtggtctgaccggcattgcgtggccggtctgaccgatctcgggcagagagctgggggcacgttacaattgattaaaaggccaaattaattatgaattcggacatttgtgctcatgagttagaaatagcttggagaattcctttgattaaatatttgaaagatcctacacttaaggttgatcggaagattcggcggcaagtgctcaaatattatatcgccgaaaaatagatatagtattacttagataatgatcaatctaaagttgctaggagagtagtacatgaagggatttgtgaaattcatcaatatgcccgtaagataaattggttgcttaggagagtggggttttattggctgaaaataattgatgattgtttcaaatgctatagagagattgaagcttgttaacggatcggcaatgttcaaactagcgcctatcgctatattgaatactatcatcaaaccatggccgttccaaggttgggctttggatttcattggtcaaatttatccttcatcatcaaaagggcattggttcgtgctagttgcaatggattacttcactaagtgagtcgaagccgtgccactcgagaatattacttgtacggagataattgactttattttgaagcatattgttcatagattcggtattcctcaaacgttaaaggagcttcttttatgtccaaagaagtgagaagttttgccgaatcttatgatattaagttgttgagttcttctctttactacgctcaggctaatggataagccgagtcgagtaataaaacattgttgaaattgccgttttgccagttgaggtaaatcttggctctcttcggtatttcaagcaaggcgacttgtcggttgaagattacaagaccttgatgggaagtaatttttgaagatgtcatcgacgagcgtttgaagactttgagggagatgaagacacttcaagacggtgttttcagagatcaattaatgggaaatacttgaagaaatacttctcgagcacttggcaagatgcttaggaagtcctatggccggtaattggattatcgccctgagataacatgttctatgctttcaggttcacgtctgttcaccaaaaaagcaggggggcatgtgtttacacccaaatttggcatctatggacgaaatagggaaaaattgccaaagtttggaaagtgacgggtttccttactcgggaaggcaggtttggtgtttcctttggtt

SEQ ID NO: 13326 - DNA, 3051 bp, Oryza sativa
catcacctgttaatactgttagtcatactactccacatatccctaatgcttacaatgattctaatagaagatattctcctgatactaggtatggccaatataacaatattgcgccacaaacacaacctattaggccaccaagtccaccaccagatccaccaaggcctgaaactgtggagaattggtttagaaatattatcagggagaatttagcaaagctaaggaatcgctctagggactaccgaaagccgtatcctgattattatgacattttcccatatcctcgtgattataaaattcctgaatttaccaagtttagtggtgaggatagtaggactacatgcgagcatgtagatcaattcttagcacaatgtggtaggttaaaagtgatatttttaaattgcgcttgttttctttatctttgtccggtactgcttttacatggtttacttctttaccggcaaattctattgatacttgggctcaattagaacaaaaatttcatgattattttcacactaataaaactgagcttaagttatctgatttaacatcggttaggcatgaatacaatgaatctgttgctgattatattgaaaggtttagagatgttaaaagccgatgttttagtttgaaaataactgataaagatttggccaacattgcatatgatggattgcttgattctattaaagagaaattgaatggccagatatttcttgatattgatcatgtgttgcatgaagctctggctcaggaaagccgagtggatggcaatagcttacaagctagtttagatgaaaatgcaatatcatgtatagccgaaccaagcgatggttcggattgtgttaatgatttgtgcaatgatgcaacaaccattatagccgaaccaagcgacggttcggattgtgttacttgtttagacaccgatggaatagccgaaccaagtaatggtttagattgtgttgctagcttagagagtaacatcattgaaaatatagccgaactaagtgacggttcggattgtattacaagcggaagtgaaatagcattgtcacctaagaccgaatcacaaatcggtcatgtggatattggaaaagataatgacaatgtcttgtgggatagtggtgaaatagaatccaaagtagctatgcatacatatcaaaggccgtatcctgaacatgtagattcggtcccatacccgcaaggatttgaggtgcccaacttcacgaaattcacaggtgagaatgctatgactacaatggagcatatcggccgctttattgattaatgtggtaaagccggtagcgatgatttgcttaagttgaagttgtttcccctttctttgtcaaactttgcatctacatggtatagtttacttgctcctaattcaatttctacatggtcacaaatggagcatgagtttcatgattatttcaaagatgcaagcttgatggagcaaagaccgattgatacttcatcggtcacttgtgaaacgatttcggttacatctatgtctaagatcggaattgttagtaatcctctccctattagtcctattgatgttaacaaaaagaaagggaaaagtgttattattggggatcctcggcccaagactaggatcaataatgcgaaggccgaagatcataaagttgcaaaggatgagtcatctagtttgcaaaggaccaaaaagccgaagctcacttttgagatgcttatggctaagtacgagaaaggattagcgggtcaacgatttgataatcaaactagtgattcaaaaataccaagatcatctcgtaggaagagatttggtcaaacaccaaagcaattggagccatcaactataccaactccatgcaaacctccgattgtgatgccatggtatccatatccaatgtcactatatggttatccttttatgtattatatgccatggatgcctcaaccacctatgctgtgtcatcaaggatggaagcaatcacctaggacggtaccaagtcattctaactcaagacaagaccgtttcccacgaaagaatcggtccggtggatcaaaggtgaaaaaggtgaagaaggtgtgggtgagaaaagaagacaaagctccggaggtcgttgctatcaaggagaaatctcaggatattcaagtacctactgaagatgcggcgaaaactatacaagcggagaagactgaagccgacgccgttgctgtcgacattggcagtctgaccgagccagccggccggtctaaccgccagactacggccggtctgaccgacccttctagccggtctgaccgacggcttgtggccggtctgatcgggcccaaaggccggtttgaccgggcggcattggataagagtgggaaaattgagagcaacataggagcttccacttcgaccaaaaatatgaagaataattgcttagctcctggaaaacaactacagccgaagtggataccttctggcttatctcgctctcaaaagaggaggctacaacgtcttcgggccataggtaagaaagaaaaggaggccgaagatgtggagaacaagacatgcaataatttagagtctcgaacagcacctagacaagtgtggagacccaaagaggtaaaagttaagagaccggtgatttcccatagaagtaacaaatccaatttgatgagagaagaatcatcggtcattagagataagtctccttcacatgatgctatgggtgttagtgcggtattcgtcttgccttcgaaatcgcacaatctagaaagccgattttgcttggggggcaagacatcaatatgctcatgagggaaccaagggaagatgaacggcgatggatacaacatcacatctttgaaccgccgtttgttggatgctaaggcaaggtatgagtttattgtgtttaacattatattatatgcatatgccatgttattagaacattgcttgctatctagcacatgtgtgtttttgcttatcaaattgatattatacatacatgttgcaaatgccaattctaggtagtagaattggtaggttggcatataatttgtttgaag

SEQ ID NO: 13327 - DNA, 6100 bp, Oryza sativa
tcagggaacgttccgacccgacagatagaaggacgagctgtcactcgccctgcagattcccgagcatccaggacgaacacgagggaaaggcgtggttccttgaaatattggattcaagaaggacatccacatgtacaggagtcggatgaggagcaagagagataccgaggcaaagattgcagatcttgattatagggtatcgagctacgagctcagcatgcaagagaaggtggcaaggaaagtggatgaacgcatggccgcacatcggtgccacgatccccagccgtacattcctcatgtaataatcagcccctgaggcaatcgtagcagctgtgcctctgtcacacccagaaattcacgaaccaaaatttctaagctgaatgtgcattaaacgacaattgttgacatacagatccacgtcttacaaaaatataaaagtttacaaatgcagcggaaaagaaagaaaaaaaacgagctaagcctgaagacttgacttctgcagcgggcgactccattccacaggcatccttgacggcagcgacgaaaccaacttcttcgagacatcttcaactgaaaagaacttcaactctagggtgggggaaaagagagcaagactgagtactacccactgtactcaacaagtcataccagaagagaaggtatgatgcaggatatatccaaggaggctaaaggttcttttgcataaagctagcatttaaaagcggtagttgaaagcagtaacacagttgtagcaattaatcaatattaaccaatcactgtccaacgctataccacgttgcaacaggcccaaccaaccacctgaactacaccagttcattagctaactaggggtgagactaatcacggtgaatctggtcgaccgcccataaccgcgggcacggctattcgaatagttttactctgatcagaggtgtacaactgtacccacaagacacagccacacgacacgttcccatgcgccgacatgccaccacgacatactggaaagaggccgtgacagaacccttcgcataaccccctctaaccgatcgcaccacaccttagggttcgcccccgtccccagcaggcaacgggcagcccccctttcgtgccgcggtgaatccggaagccgataaaccggacaccccggccgacccaactccatcactcccaccctcgcctgggtacgtcggctagaggaaagctacactacaagcccagccgttgcccacgctggcttgtggtaagtacggtaagttcttccagggcatcccgcgaaccagtccttaattgccatgggcacaactagcaaaaccatgcacccacagcccaccatgtagtgtattttaattaaccaacaccattgcggtggcactaatccaaagctatgccaataatcaaagtctatgcttgaatgtaattccccttttgtgtactagttgaactaagcatggctaagcatttcctaagccaacatctaatcattttgataccccagttatcaatgacataaggtaaacaatatatggctgagtagcaggacccatcccacatgacattgtaaaacaatgcaacatttaatagaaatgcgggacatttataaattgggtacaatatgatcaatcgtaatgcatgacttgccttgctctcgtactgatggaaccacagcaatgtcttcgaggaaccacggatcgacgaaacggccgaaatctacgcgacaaacaaagcacacaagcaaaacaagctataagtctactgaaacaggaaacaaaaccatttttaatggattctatgcatttgtatgaatttactgagacttgaatggacttaatcggagctcagatgaattagttatgatttttagaagattctctgtgtttattactataaaagaaaagccttaatgagttttattgcgcaataaaggatcccagggctgaagttatccgggaggggcggcgccgacaagcgggcccaacgggtcagtgacacaagaggaggaggaggtgacctggcgggtgggtcccaccaggcagtggctcaggggaaggggtggcaccggccggtctcggctcggcttcaagccggccggcccccatggcgagcggcgatgacgcggacgggaggcgggaaacaacggcggtgaccggcgcaaaggcggcggtgcacatgggagagaggggaaaagggaggagaggggatcatcagcggcgagcacggcggccggcccgaaggatgaaggcggcggcgatgacccgacgagcggaggggcagacgggcggcggttgcacctacggaggaaaatggagaggagttaggggttgggaggaagcccacggcggctagcgtggccagccggagatgggaagggcggcgaaactcaccggtgcacggagagagaggcgttccggcagcgggattggatggggatgcggcggccgaggtagctttggcggcggagaagctaacggcggcggtggctctagcggtggcggcgtgcggccggagcacggcggcgagcggcggcgctagaggagatcggcgcgggtgcggtagagggcgtgcgagagcgcggtgaaaaggggaaaagggagagggggatgcggggaagctttataggggctcgggaggggcggacacggccgggaaacccccccgattcggccggcgacgtgggggggagagagagagagagacggattcaaaaccgaatcccgccctctcgggccgcgcgcgcggggcgggaaggcgtggggaagggggcggcgacgtgggcttgacgacgtggggcgagtggaggaggtggggcaccggcggtgcgggcggttggagctgcggctccaacgaccggaggtaggagacgaccgacaggtgggccccacctgtcagcgcccgaaggagagaggagggagggaggacttcggggaagggaggagaagcgggctggtgtgggaaggaatggaccgacggcccaagaaaaggaaaaaggagggaaaagaaaagataaaaaggaaaaaggattttcccagggatttaatattgcactttgcttattttaattggttaaaattatttctaaggctctgaaaattctactaaaattcctgttagcatattttgacatgtagaatccaagaaaaattccacatgccgattctgattattatttgcatttattagtttagggattcaactctaggttaaattaaacaatttcttcggacgatttattttatgaatttttaagcaaggaggggaactttagggcgtgacagcctcaacggggcaggtaggatcacagagcatggactccatgcaaactcaggatgaaaccacttgccccgttgatgagatcacgtagcggacaccatgtgagctacatatttccttcaagaacttatcagtcaaggtatgctcatagttttatgatttttgacttgtacattccgcaagttgctgcttcggttgattactaatagataacctctcatcacgtgaaggtggcatcaggaatggccatcccaactgacccttcagggacttaccactgcaggccgattccagcaggatactcgagggtcgaagttgagctggtggaagacgcttacgaggacctcgagttggactaccctggaggagacggtgagacgcatctacgagactcaagccacgccattatactatggcgcaagcggtacatcatccaccctgggcgacaagcagcgtctcgtgcaccatctcctccggctccgccatctcctccgctacctcctcctgcaccatctcctctggctcctccgtcacctcctcctgtaccatctcctccggctcctccggctcctccgcctcctccacctccaccatgtccgcctgcacctcccaagacaaggtctcgtcaagctccaccgcctgcccgcacaagggcaacgaagaaggcaaaagttgacgccaccaaaaacaaggagccgctgtacaattgcagtcaagaggagcttgacgcttatgtggcagcaaaagtgaagaggcaattcaagcctcggagtcttgaaaagaagatacctattgacccgagcgtgaagaacttcttcaagaaaatgtccacaacaaacaaggaggccttaaagctatcggactatgaccgaacacttaagaaagcctattacaagaagtccaaaccagttcctcagcttggagaacaacctaaccaagaggtcgagccgttggtgtcggcaaagaaattggcataacataattcatttctgacaccggtctaactgtggaacagttgattagaggcgcaccaatcccgaagacggaagtggcatacaagtttgaactcggtaaaccgcttgtcacgcctgagcagctgcagtccctaccgacacagatgtacaaattccatgaatggtacatggaaatgaacgccaagggtagagagatgttcggagcgaggataagaaactccgacttcttgcaaggagaaaatgttctctggatccatttcaaggatgtcttcgaactataccatctgaacgccctgaacgtctctcttctgagcgcatggattttgtaagtatcgttgagttcgatttgtttcgttcaataattagctccttgcatatatgtaaacaataataatttccttttatcgttgtagaatgaagattcaaaagacccgacggcggggggtttgcgatactgggttcatcgaccctcagaaaatcaacgtcgaaatgatcgacaagtacgagaaagacacagaggacaatctcgtccatctcctgacgcagcagcatttcaagacgttcatagtactgccgtacaacacagagtgagtttttactatcgttcgaacaaacttcgttcccatacatataacatgtacattttcatatatcatctcacgcatgttgcagattccactgggtcctgttacttttcgacttggatgcatgcagagtcaatgtgtatgactcaatgaataaagagaagacttttgacaaggttttccaacttatagataggtaatataatgccatctattccaaagccgcatggatttttcctattgctattatgcggatctcggataataaataatcatagcttgcaactgcatgtagggcttgggatcggttccgtcaattgttccgcgggacttggaaagaaaaacttggacggagctttaattttccaatcagtacatgcatgctccgaaattatattgaattgaatctctaattacagttaatataagtgtatattaaatctcttgtcctttcttatgtagtgtgcaaagcgggaccagggaactaacttgtgcggctactacgtatacgagtatgcccactgcctatcaacccaaatctacaccacacgagagctcgatgtacgtatatataaaccattcaaaatttcattgcgtatcgatttgttgtttattaatttcatatattcatatgtcattatttttcgaatgatagcgtattcacatgagggacaatctctcacacaaggattttatcacggctgttcaagtccttaatcccaagggtgaattctactacgacggatcgacaattcataacgtcggtccttcttcttttgacataacgcccgcgtcgaagtcgtagctaaatagtgagcaaatgaattgtactatacatgcatgtatatgtttatagatgtacacatttactttagtgtaaatatatattttggtaatatatatgcacataaaatgttaagtgctttaaattatacatgtgtaatatatgtatttatacatatgcatatatatatatatatatatatatatatatatatatatatatatatatatatatatatatatatgtatcccatatatatatgtgcgtaatatatatgtaatatatatagggtaagacaattctacacccggggtatagaataactattctatacccccctccctcttaagggccacacccacctccccctcctttccaaggcttaaaaaccacctctcacctcggtcaaacgctggtcaaagccccctcccgccggtcaaagctcagccaaaaccacctactaactcccctcaccacccaccttttct

SEQ ID NO: 13328 - DNA, 957 bp, Oryza sativa
ttatactccattgaccctggtagtactaagatgtaccaggatctcaaggaaagattttggtgggcaagtatgaagcgtgagatcgcagaatatgtagcggtatgtgacgtttgtcagcgagtcaaggcagaacatcagaaacccgcaggtttgctgcagcctttgaagataccagaatggaagtgggaggaaatcggtatggatttcatcaccggtctacccaaaacatcgtcgggccatgactctatttgggtgatagtcgactgacttaccaaagtggctcatttcatcccggtaaggaccacctattccggaagttgtttagcggaattatatatggccaggattgtgtgtttgcatggggttcctaagaagatcgtgtcagatagaggtagcaagtttacttcgaaattctggaataagctccaggaggagatgggttccaagctgaattttagtaccgcttattatccgcagacagatggacagaccgaaagggtaaatcagattttggaagacatgttgagagcttgtgctttagacttcggtggaagttgggataagaatttgccttacgcagaattctcgtacaacaacagttatcaagctagtctccagatggctccttacgaagcactgtatggtcggaagtgccgcactcaccggtgcaagaaactacgacggacgacgacgtacgtcggccggcgacaagctccgacaacggcaccggcttggctcgacgtcgacggcggcgctgcggcggcttgcgacggtggcgaaggggcggccgaggtgatcctcctccgcgcgaacccgacggtggcgacggaaggcggcggcaacggctacaacggcggcgcggcgtggcttaaaggcattatctacggcagcggctagggctacgcgccggcgacgctacgggcaacgatagagctcgggacttgaggggaaacatag

SEQ ID NO: 13329 - DNA, 2492 bp, Oryza sativa
aggagaagactttgaagagttacaaagccagcaaggcaagtcacacagatcccaaacaaccctttaagcatgttgatcccgtttaaagctactgtttctataaaactattgcatttattttcgaatgtcattgggtggaaataacctattgccttgttatagcccttttgctattgattccctattctttgtcacttggttaataatttgattagctagaacattatatggctttagctaaagtgaataggatgcttagccatgcttagagacactagctcatataaaggggatactcatgattcactattatttaatgttggtttaatgatagctcacgatggttaatcgtgattggttaattaattaatttgccaactaaaatatgataatggtgggttgtgagcatatggttttgatggttgtgctcatgacaattaaggaccggttcacgattttcggttgtgaaacatttaccgtgccaaccacaagccagcgtgggcaacggctttactttctgtatagtatggttcattgtagagcaccagactgtgaagtggtggagataagcccacgggggtcgctggggagtgcactactttgaattgtgttatatagagggtattgtcacaatctctattcgggtacttgttaagtatcacgacgcatggttgacatgatgttgtggttgtgtcttgtgggtacagtggtagacctctggctagagtttaaactattcgaatagccgtgcccgtggttatgggcgggtctaacaatgtcttttgtgattagtttcacacttctcaccataataaatgatgctgttaataatttgtttagctcctggtctggaatggtatattcctggtttggagatagaactgtgcagccgggattggttgttcagaatggttgggcctatgcaacagggtatgttgtatagcgttggattaatactgtttaattaatattctactgttttattaaattctgaaatatttattaaatgctatttatgcaaatgagactatactatgccatcctttattatcctgtgcacttgcatatttgctgcgtggcttgctgagtatgtcatatactcaccttgtaatcattcatcagaggaggagttctacagtgatgccgatggtgtgtaggattacgcgtagccctggtcaagctgcctgtggagtggagtcgtctgcgccgtttatcttattttccgctgcttagaactttattgattgagagaaactatctacctctgtaatgacattatattcgcttattaattaaagtaataattgtactctattatcaatttgttattgtgtgcctcggctgattcctggacgagggtttacacacatgtaagcgtttggaattttggatagaaattccgggcgtgacaaatttacacccaaacttcaccatacctctcatcttctcctaggaaacatctacatggggccactagacagccactcatacttggttgagtgaagtacaagtgggatcacagcctcaaaccactgccaactcctttaaatcgtttctaatcctcatgttgacaactagctctcactttccaccttcacttttaccattcactactacagccaagatatttgtgtgagggctaaaacgatttttgcacgcgggtaggcggcccgcacgcacctaggtgtctgggaaaatgatgatttttggcgcaccaccacgggaaaacaaaaatccgaaataacataatttttttataccaacaaaaccctagaatccggcggtgggcttccgcccgacggccatagtgctgccggcctccgcgtcacccgctgtcggatccgcgctcccctccggccgcaacgccgccgacgcccctcccctccgccggatctaggcagggaagaaagggaaaaggaggggagctagatctggcgctgggaaaaggcggcccggctgcgggatacatgcggggacggccgccaccgctggattcttgcgttgacgtccaccaccgttggatccgtgtaggcactgccgccgcccaccggatcccacgccctccaccgcctccacatggaggaggccggcacgctcctactcccaccgccgccgcgcctctgctgtcgccaccacgccgctactgtcaccgcgcgccgccaccgctaccgctgtcgagaggagaggagaggagagtggagagaggagaggagaggcgtgagagagagaagactgagaggagatggtctgcgtggaaattttaaagtggaaaaagggatagaggggaggggagaggagagaaagaggggaaattttaaagtgagtgagagaggaaagagggagttagtatttttgcatgcggctctcttaataggtccgcatgggaaaatcggctcattttcacgtgctgtccatttaagaggaccgcatggaaaaatcgatttttcccagaagcaacgagttgccgcacggaaaaattgatttttccgtgt

SEQ ID NO: 13330 - DNA, 1596 bp, Oryza sativa
  unsure (1)..(1596): unsure at all n locations
acggcatttgattgacatctctgcaagcagctcatcaaatagctattctataccccgggtgtagaatagtttttctaatatatatatatatatatagcctatttcctactaccgagagtagttactccctcctattatggatcggattcagttaatggagtgacgaggatccaataacgatgaatacctgtgttgtttaattaaatagtttgttagttcagatagttgctaaatcatcggctgcatgcaaaccaacttctcggatgcagtttcttcctcgcacccgctcgtcctggcatattatcttctgctcgtgccggtggaacatatatattagccggccaacagaaaaaatggcagagcatgaattaaaaaagaatgacnagaacattcaactttaaaaaaaaaaattttagggccaaaggaaaaaaacacaaaggccccccccaaacccccccctcttaaaaaaaattttttgttgtggttttttttttttttttttttttccctttttttcccccccccgggggggaaaaaaatttttcccttttgggggggggttttttttttttttttttttttttttttttaaaaaaaaaaaaaaaaaaatttttggggggttttttttttgtggggggccccaaaccccccccccaattttggaaaaattgggccttttaaaggaaaaaaaaaaaaaaaaaaaaattggcttttatcaaaaagatagatcccatcatgactatattttaactatatttgagcgttgttactgcatgtaaaacacagtgttactacacggtgaccgtcgcgttactgcacagtttcgcgaaacgagagcttctttttccacatcgccgcgtgaccatcttcgctatcaataggctggctgccaggcccctttccaaacactactttaagatctttcaccatagcaaacactgttttcccactgcgatgtttaggcttcgtacggtggtccgccttatgttcaaagtgattgcctttcttccgtacagggtggtttgcagcaaggaatcgacgatgacccatgtacgcaaccttcctacagtgcttaagatacgtactttctgtttcatctatacagtgagtgcaagtcttggaccacttattagactgccccgataggttgctaggtgtaggccaatcgttgattgttacgaacagcagcgctcgtaggttaaactcctcatgtttgtcctcgtcccacacggngacactttctttcttccacaacagtttcagatcttcgaccagtggtgttaggtacacatcgatgtcgttaccaggttgcttggggcgctctgaaataaaataaaatttcggggggccaaatttccaaaatttttaaatttgtggttgaaaccccttttttttcccccccctttttttcctttttttttttcaaaaaattggggggcccccaattttttaaggggggcccccccccccaaaggggaatttgggggggcgggggggggggcaagttttagatacacatcataacgggccaagtgctatggccgntgntaatntntncnanngnnnnaatccataagaacgttaagacaatcgtac

SEQ ID NO: 13331 - DNA, 776 bp, Oryza sativa
  unsure (1)..(776): unsure at all n locations
gggccaaatcagctacatcttgggctttgatgaaattcggggcttgaataatatgtccaaagacatcactcccagggcccactagcaatacgtccgtctgcttggcggttgtgcagtatatcactgagtggaaatgatgtcaccaccgttaccgagtgaccttgaaagtagtgagacagcttcctggtagtaattagaataccatataacagcttctgaacctgagggtacctcgttttgaagttggctaggacctcgctgacaaagtaagtcggtcgctggactttctggacatggccttcttcctcgcgctcaacgaccaagactgtgctcacaacctgggaggtggctgatacatacagcatcaacggctcctgcggatgtggtgaagctaagactggtggctcggtgaggagtttcttgaaatcttcgaaggccttctgtgcttcgggtcccggtttggagacaaaggatttatacaggttcaggccttcttattcaagaagtaataccctactcctgtccggggatggatccgccgagtgtattattgattgtatgattgggagaaaatcaacctatgccccaagaggcacccggaccctccttatatatgggaaggagtccgtgttaaaaaagataatctatatccctaacggaatatgcagatacaggtaaaatacagtcgtaaccgactaagtctcaaggtgtttccttgatgtacaagttaagaaacgaacccgagatgattgctactggaactgacntcacccctc

SEQ ID NO: 13332 - DNA, 3258 bp, Oryza sativa
tagtctcctctaggttagttcgataagcagcacggtttggcaatcctgggggtatctcggctggaaagacatcctcatactcctgtaaaaggttagtaacaacaagatgtatcgaactagcaatatcatctaaagaaaccaaggcttgtttgcatatcaagaaatagcacatatcatcatctgaattttcagcaatgtcacatttcgttgcaagcataacaccacccttcgacttaattcccttagccttagaactaggtgaaagattatcctttttaggtggaaaaacagttttagccacttgctgattttcagattcatcaagtttcaaactagcagctcgctctttatcagcttctacaatttcagcaggggtcaaaggtagcaaagtaatttgcgtcccattatgcacaaaagcgtatttattactcctaccatggtgtgaagcatcattatcatgttcccaaggacggcccaacaaaagtgaacaagcttgcataggaaccacatcgcaatcaacagaatctgcatatgagccaatggaaaacgaaatcctacaaacttgtgttacctttgctcttccggaatcgtttaaccactgaatatggtaagggtgtggatgtgtacgtgtagtcaagccaagcttcttgaccaaatcagaactcacgaagttgttgcagcttcctccatcaatgatcacacgtgcacgacggttgttgatgacaaagaaaatctgaaacaaattatggcgttgcaacctgtcatgctgctgtacctgcgtgctgagcacccgctgcacaatgatggttctgtagtccgttgtgtcatcacgaccaaagcttcgccatcctcatcctcaacttcttcttcctcctcttcctcttccacgtcggaggtggtgatgtagccatcttctgtagcaacataggcccgttgactagggcaatctttctgcacatgcccaaacccttagcaacggtggcactgaatgcgtcccgtcgaggcgacatatgaggcactcttggcgggtacctgcgaggatcctttacctgactctgctggtcgtggtggtggagatggttttggtgccgcagaagctccggatgctgctggtcgcttgcccgctggctgggaggatgcccgaaacgagatggccttgggcagtcccgcagatggcgtcgtgcgcggagtgtatgtgcttgccttgctcttgccctgatggtcgcacccctgtaattccttctctgcaagcataacaaatcgaaacaactggttgacagagttaaattccttataatcaacaatgttctgaatttcctccctcaaaccagaatagaaacgacaaatagcatcctcgaccccctccactatgccacagcgtctcacacccttttgtagctcaccatagtaatcctgtacagatttatccccttgttccaaacgcatcagtttcttgcgtaaatctctatgataagatggaggaacaaacctatcgcgcatagctaccttaagttcttcccaagcagtaggtagtaccccctcatcagataacccagcccaccacataatagcaaaatccttgaactcactactggcttgtctaactctatgttgctcgggtacaaggtgggcattaaacttttgttctaccgtcatctcccaatcaaggtatttctcagcatcataatatcccgaaaaagatggtattttaaacttaaccttagcataaggatcatcgggcacatgattattattattaccttgttggtggcgagtgccacccatacctgtgcggtttgtgcgtaggcgatgtcgtagccatgcttgccttgtagccagtgcatcaatatagccactggaatcatacaccgtgtcttcaggatgagcatcgtcgtcaccactcaccacttcctcattggaaggtgtctccaacgcggcgacctgatcagatagcgtggatatccgcttgtccaacctctccatgtggttcaggaaaccgattttagtgaaggcatcttgaacagactttgcaacggcctccgtgatgtccttttgagtattttgttggagagttcgtagttgctcttggctgacacagtcagcaaaatcctagggactcttctcaccttcgttacctgacattgaaacaccaaaacataaacaaaatggtgaaggttatccctaataatctactacgcaggtgtagtggtgcctctcaacgattctaagcaatatggagttcctaaccaagctcttataaggttcttaccagcaaagcaaaggatacctagaaggcgtagtcagcgattgcagggatcaagaacctgtgctgtgcagaagtaatatgtggagctaggaaggccaaatatatgtatatgagtggtacacaatccaatgacagatagtaatgctgaataaaaatcccaagtcacttgcccatagttgctagtctactcatgtcctagacagtagtgataacaaagatggctcaaagaatatgacactagtaaacagcaaagaaggactggcaggcaagcttcggcgagtttcagcaaaaactacaaaaccgaactggcaaataagctcaacggagcgcgtcatgagctcaatgcactagtggaaatcaacttttctttttttttcttttatttttttgatatttttttcttttttcagaacacaaaaataggcagacctccaagttacagcttaatcggagtaggtatgtggcctatggatttttctgaaaccactataaacaaggtgcaggaacttgtgagctcgaacagacaattttgcaagccaattttcggaattttggattcgccaaacccgccgaaaattttgcaagccgatttttggaatttttgagaaaatttttttctcttatctgaaaagttaaattttgcctgattccgagtccgtatgcaaaagttatggccgtttgaagtttcggcttctggctaggttttccaaaggggatataacctagtctattttgcggtggaattggggatatggtggcagcggagttgtagggtgttctggtggtgatctggatgggtgtttatgatggcggaaacggctctcaaaggatgaaccctagcacacggtgaaaggtagcggctagggttacgaaaggacaaacacacgactagactaaaacacgcattagaccagcaataggaatttagactaggactcaaactcaacactacggactctgaaaaggaatcatgcaaaggctaaacatggtct

SEQ ID NO: 13333 - DNA, 594 bp, Oryza sativa
atcagtgcgacatcttctggggcataacgagctaagcaattaaagtcatggaggtactctgtgacagaacgggatccctggttgagtgctctgaactctctcttcttaagggccacaacacctgatggtatgtgtgtcttcttgaaagcagcagcaaactcccgccaagtgataggctgtccctcggctctgtttagacgaaactggtcccaccacttagcagcaggaccatgcaactgatgtgaagcaaaggaaaccttctcctgctcagtgcactgaatcaaatctaacttcttttccacagcatgcagccaatcacctgcctctactaggttagtggtgcttgagaaggtaggtggtctcacacgtagaaaatctgccaacttgttctacggaggtggtggttgattgttgttatttgcctgttggttctgcgcttgctgcactaacagattaatcaactcggtttgctgggccaaaacttgggcaagtgtgggatctccttcattgtgaccatttccacttccacttccacttccagtgcgggtgttcaccatctgaagaaaagcatgggcaaaaggaaagaacgacaga

SEQ ID NO: 13334 - DNA, 2780 bp, Oryza sativa
agccaaaagaagacttttaaaaccttttttcaatttaaattattcatgaaatgcaattccatttattaaaataacttccatggctcaaataaatcccagaaaaacctaggaactatagaatcaagtgaagtatttaataaaattttatctagcccacttttatattggaatttattatttaaaattagatcttttcttctaggcttttaaaatcatttctaataattccaattaaacaacaatttatatatttagggatttttagggtgtgatagatgctagggtcaatcgtcactgtgaaagggggttgcccatcaaaccatgtcctctactccgatgatttttctttttcttgggagaaccatgtggcgcttcggctcgtcaggccctttgcccttttttcctttactagatatgtcgttgacgcaaaaaacttccgttacatcattgacagggacaaacggttcgtccgagtatccaaccttgttaaggttaaccgttgtcatcccactgtcatcaatcgttacgcctccaccagtcaacctaacccattggcaccggaacagaggtaccttgagaggtccatagtcaagttcccatatgtcctcgatggcaccgtaataggtgccagttgtaccatcgtgtcccatggcatcgatacgaacagcaccgttctggttcgtgctcttcatgtcttgggctctcgtgtagaatgtgtacccattgatttcatatccctagaatgttgcgatcgagccagatggtcccctcgccaggaaggccagttgttggttaatcgtctcgttacccatgagatgttgtcgcagccacgcggagaaagtatcaatgtgatgccgtgtaatccatgcatcggatttaccgatgtttctggcgcgaactagagccaagtgctccttgatgtagggagccaccaatgaagattgttgcagaaccgtgaaatgggctttacggaataaattgttgtctaccatcattattgctttccttctgagagtcccctttccccgtagtctcccttcatggcgtgattcaggtatcccgattgggcgaaggtcttcgataaattctacgcagaattcaatgacctcctatgttccataccccttggcgatgcttgtctctggacgagcacggttacgaacatacttcttcagaacgcccatgtacctctcgaaaggaaacatgttgtgtaggtacacaggcccgagaataccaatctctttgacaaggtgacaaagcagatgcgtcattatattgagaaatgaaggtggaaatatcaactcaaagctgacaaggacattgcaccatattattctgaagggcttctaatctatgcggatcgatgaccttctgcaaaattgcgttcatgaaagcacatagatttgttattgttgaccggacattgtctggaaggaaaccccttattataactggtagcagctgtgtcatcaacacgtgacagtcatgagactttaggtttgtgaacttcttctccttcgtgcttattattcgctttatattcgtggagtatcctgatggtaccttgatgctttccaagcattcaaacatactgtttacacccaaatttggcatctgtggacgaaatagggaaaaattgccaaagtttggaaagtaacgggtttccttactcgggaaggcaggtttagtgtttcctttggtttctatcccgagttggatgtggagaagggcctatagagggtaagaccaacccctatataagggacaaggccggttcattgtaaaacccccgaatacaatctacttgaatcgttcttttactatgtcttctattttaccctagtttagtccatctttgtcggtttgcgccgtaaaccgtccgccgccgctacgagagtgcgacacctctttgtatgtttgtcctgaaaaccttccgttttgcccacgagacgggtagttatcctcatatcgatctaaatcggcctagaggctgattttgatctctaaatcggctccgctagccggtttaggttttgtttctacaaaacccatcttgatttggccctttggctagatcgaggtggttggcgactccatatcaccgcaaggcgtttaggtgttgcgatcgtgcttgtcaacttgtcaaaaaagttgccaacacatactttccttctctgccttgctaagagtgtagctggctggactcaaataatgtcttcgtttctcctttggtttcgggtgaaggtcgccgcgttgttccatatgcttcagatcattacgtgcttccagtgtatctttcgactttccatatacacatcggaagccaagaaggtttacgcaaaggttcttagtgaggtgcatcacgtcgattgcgtggtggacgtccaagaattcccaatagggtaactcccaaaatatggagtttttttttccacatcgccacgtgaccatcttcgctctctataggctagctgccaggcccctttccaaacacaactttaagatatttcaccatatcaaacattgttttaccgctgtgatgttttggcttcgtacggtggtccgccgtatgttcaaagtgcttgcctttcttccgtactgggtggtttgctgcaaggaatcgacgatgactcatgtacacaaccttccgatagtgcttaagatacgtactttctgtttcatccatacagtgagtgcaagccttgtaccccttgttggactgcccgaataggttgctaagtgcaggccaatcgttgatagttacgaacagcagcacttgt

SEQ ID NO: 13335 - DNA, 1225 bp, Oryza sativa
gggttggtggtacttgagaaaatgggcggcttgactcagagaaattctaacagtttggactgtggaggtggaggaccaaactgcaggttctgctgctgctgctgtgcttgctgatgcacctgctacaacacctgatggtgctgtcgctgcatctgttgcatcatcattgtcatcatctgagtctgattgtccaacacctgagcaatcgttgggttctcgggcggtggagatgaactgctgctagatgcatcgcttgcacgtgctccactgatctgctcttcgctgccactggcgttgttggattcccgggaaccattccttgtcttcaccatctgaagggggataggtagaaatatgagaaaaggaagaaaaacagggggctcagaatctaatctttcttataaatttaggtacaattatcttaattttgattaaaacaccgaaaaggaagcaaacaactcctaattaaggcagccataccactcacacatgatatcgaccgccgactaacccacaagcagcagacctaaacacagaaactagcaaacaacaaactaagaaagacgataaagctaagggcggcgactctgaagctcggagcggcgcttgcgatcggagaacaggtctgacatctaaagatggacaagggataggaaccaattcatgctcaaatccaaattaaacaaagcaacaaatgactcaaataaataacctagcatggctgatttttatgcatagaacatttttcgtgaactcaaatgaagatactgatgcaactggctaatcaataaattaatgcataaaatagatgcatagctataatgatacgcataaaattgccccatcgaacagagacacgacttagtgcatatcacccgttagatttccgactgactgtcgaataaacctcaaataaaattttactaaaaccctagactgagctaattttaaagatccgatccgaatgaactaccaagatttttcccgcaaaccaaagaggcaaaaccccaaattttcccgaaacaaatccaggtgcaaaaggcatatgcagatgaaaagcggttcagagggctcttaggtttccagttggcttgtcctacggtcaaggctggctctgttaccaacttgtcacgcccagaaattcacgaaccagaatttctaagaatttttcctgggattaaatattgcactttggtgatttttaattggttaaaattatttccaa

SEQ ID NO: 13336 - DNA, 1454 bp, Oryza sativa
ttcctaatcacaatataatcattaggtagcaatctattctcgaattcatacaaagaagaacataggaacgagctcacctctaaattcaattgtcgcgcacgagctcttgttatcggtccttgaatgaccgttggaggattgctgtgtgtatccgaggtagtgatgtccgcatcatcctccccctcttgaattgaagtcgtccttgactcaagctcatccttttctcccaagtatggcttcaaatctgaaatgttaaacgtgggactaaccccaaactcaggaggcaactcaagtttatatgcattatcattaatcttctcaacaattttaaaagggccatcaacacgaggcatcaacttagactttctcaattctggaaatctatccttccgcaagtgcaaccatactaaatcacccggttcaaacttaacctcttgcctacctttacttccagcaattctatacttttcagtcatcttttcaatattgaacttggttgactcatgcattttcaaaataaattcagcgcgtgccttagcatcattatgaatcctctcactagtaggtaaaggcaaaatatcaattggagcacgagggttgaaaccatacactacctgaaaaggacttaccttggtagtagaatgtgttgcccgattgtatgcaaactccacatgaggcaaacattctctccacatcttcaaatttttcttcaaaatagccctcaacatggtatccaaagtgcggctgactatcttcgtttgtccatctgtttgtgggtgacatgttgtagaaaacaatagctttgtacccaacttgttccatagtgtgcaccagaaatgacttaagaattttgcatcacgatctgaaacaatagtacaaggcataccatgcaagcgaacattctcatggaaaaatagatcagcaatatgaacagcatcatcacttttatgacatggtatgaaatgtgccatcttagaaaaacgatccccccccccgaaaatactatccctccccttcttagttctaggcaatcccaaaacaaagtccatagaaatatctgcccaaggaatagaaggtacaggaagaggcatatacaaaccatgtggattcaaacgagacttagctttctgacaagtggtgcaacgtgccacgaacctctcaacatcctttctcatccttggccaaaagaaatgcatggccaaaacatcttccgtcttcttagctccaaaatgtcccatcaaccctcctccatgcgcttcctgtatcaacaaaagacgaacggaaccaactggaatgcatagacggttagctctataaacaaatccaccattgagcacaaatttgttccaagtacgtccctctttgcaatttatcatcacttcattaaaatcaggatcaagcgcatattgttctttaattaattcaaggccaaaaatccgacaatcaagtgggga

SEQ ID NO: 13337 - DNA, 1920 bp, Oryza sativa
atgaggacccaactgctgtgaagcataagaaaccactttgccatcttgcatcaacacacatcctagcccctggcgagatgcatcacaataaacctggaaatcttttgtctgatcaggcagaattaaaactggtgtggacaccaaccgtcgtttgagttctttgaaactcctgttgcattcagcagaccagataaacttttcttccttcttcaagagctgtgtcattggcttggcaattttagagaagttctcaatgaaccggcggtaatagcccgcgagtcctaagaaactccgaacctgagtgactgtccttggtggggtccatttggtgactaactccacatttgttggatccatagctactccttgagcattcacgatgtgaccgagaaactgaacttccttaagccagaggtcacaattgccgaacttggcatatagctggtgctctcttaacttttcaagtaccaactgaagatgctgctcatgttcttcctcggacttggagtagataagtatgtcatcgatcaaaaccactacaaacttgtctagaaattccataaacaccttgttcatcaaattcatgaagaaggcaggtgcattagtgagtccgaaagacataactgtgcattcgaacaacccataccgagtgatgaatgttgtctttggaatatcctcttcacggatactcaactggtgatagcctgatcgcaggtctatcttagagaaaacagtagctcctttcaactgatcaaacagatcatcaattcttggcaacggatacttgttcttaatagtgacctcattgagtgcgcggtagtcgacgcacatccttttcgttttatctttcttttccacaaaaataactggagcaccccatggcgacgtgctcgggcggatgtatcccttctgtaactgttcatcaacttgcttcttgacttccgccaactcgttggctcccattctgtaaggcctcttgtggatcggtgcagttctaggtaccaagtcaatccggaactcgatattccgttttggtggcattgttgtcagatcgtccggaaaaacctctggatattctctgactatgggaatatcctccaacttcttagtggttttatccactactacctcttgttcttcactagtagcctggttcagactgatccctggcttctgcggtactggagacgggaaggttaccacttctcctttcgcattggtcaacttgatggtgcggctagcgcaatcaatcactcctctgtgccttgtcagccaatccattcccagaataacatctagatccttggattcaagaaaaatgaggttggctggaaaaatcaacccttggatttcaactgtcactgacgggcaatagtgagttgtggtcatgccacctccaggagtatgaactcgcataggtatcttaagcttcactaaagataacccatgtgcaccagcaaaacgcttggaaatgaaggaatgagttgcaccagagtcaaacaatattactgccggtgtcgagttgataggaaatgtgcccaatataacctctggtgctgactgcgcctcctctgcatacgcatgattgacactttccaaccgtgtgtccgggtttgttacaattgaagcagagtttgggctttcctccaaacctctggggctgttctggctgagctggcagagctgactgaactgactgatctggaatcattagtcgacttagagtaaggttgaggctgtgctgcttactgttactgtgcctgccactgttgttgatgccgttgaaattacccgggtggtacggacgatgttgccagataatcatggtggaaggtgcaccctgacatcccatcgtgaagcgaggcttctgacttttcccctgggaagtcttgaactgacctttttttacggttcattttg

SEQ ID NO: 13338 - DNA, 6063 bp, Oryza sativa
atgcaactataggaattcaagtgaattcgtgtcagactatatcggtggtgtaataaattgataaactgccttaccatgttgtctcaggatttagctgattgtcaaagcaaaataaaatttttaaaaaggttttacccatctacagccaactttgacagaaaagttcagtatactgtcgatagcatactgtcgttgtaagcgtcaatagcttactggtttggggctttcccccaatccatctcgacagcatactgtcgttgtaagcttcaaaatgtaatgaaccccctcttctttcttaatgaaattggttgactgtatctttcggccgacccggcaaaagaaaagttcagtatatggtatccctgtttgattcatgtccacttattcagttcaggaggcaagctatctgtataactactgctgacagattaagatccattctaccatacatcattgccttaaaccatacttcacctgaagatctagctggggcaggatctcttggtttaggtcgcaagcttgatgactggccagctttcggcaatgtaagcttctggacacggttcaccgccctagtcctgcatgagaaatagcaagttacagataaccagtggaaataaatttcacattatacaaaacaagtttttttagataatgacattatacgaaacaagtatgcaataaagatgtcaaattcagaaaaaaaaaagagttagctagtataagaacaagattggaattactcacaaccgctctttcgcagcagtgttggatgttttctcttgctcttgatctgctacattgcttactgaactatcagcttctgcacccatggaaataccatccgaagcatcgcttaaccttccatccgagtcgacatccgcaaggccagaaatctcaggatcaacggagagcatggacccagcttcagattgcctgtcactggtgtcggagaagttatcaagatcagaagctgccccactgccaacacttgtgcccttccctagggatgtaatgcccggggaagaggacgaatgcttcaatacggaatcagcttgtctcgttggcttcaatctggtgctactattgagtaattgaagcctgtcgatttcctcatccttctttgaaatggtatctttcagaagtgaaagctgcaaggagaacattacaaaacaatagatgtaacagtatttttcatggtgaattactattccattgcttacatcacataatgttttgacattcccgaacaatattcttaaccttttgccatttcaatactgagaccattatgtcaagagaagtcagaagtgacttgatgattattgagaaatttggttacctgatccattaattctttgacatcttttccctccttcccctccttattgctcctagcaacaccaagttccaccccagacactcgttccgcaaatttcagagtacttaaagtctctgtgtaagatgaaacatctgggttgacctgcacaaacattagggtttttgcatgcccacctgcatatcaaactatgcatgtcaatacaactccgtgtatggcatgtaaaatagttctcaagtgaagcagaatacccagtgaagtctgcaggacttgtgtgagcttgctatttctgtatggtacatgagcattcttttgtgataaagaaaatataacatccccaagagcagccaaagacttgttgatgtgctgtgcttctttgagcctgtcccctgtaactgcagagcggtccaccctctcacttccagcaaggtccacaagatgtagagcgccacgcaaagtgtttccagtcttcagatcttggcctcggacatgaatggtcacaacgctgcaaaaaaaatatgatctctagtaagaagggttagtcctacgacaaaaaaagaaaagagaaaaggcaagtaaattacctgtgagacctgctactcctctcattcaaagctgttgcactcatggctctattgtcatgccctgtttgcattagctcgattacatgagaagttgaggtgacaggacacattgttgcatcaggaacagcaagtccattgggttggatggtgttctggatccctagtgtgttggaagttaagaaaaaggaggatatttcttcacatcaattcagtctgcaaaaatcaatgtatggaacttctcaagcaagatgatcgcactagaatctgatgaaggatggccatcgtgtgtgtacacaataaaaaactgcaaattttattgcagatttaaattctatttggtgaaaggctacactaatgcaagtctgggggaaaaggatatttcttctgcacgccaccactgccaaggagatcacggatttgctcattgtagatctcaatcatctgaacaccaagttcgtaagtgattgtgtctctacggtcatgagaaatattgaaaaggtcatttaatgccctataattgactccccattccttctcagttgccttttcaggtcccatctgagaaattgatagaaacagatcgttgtaaacacatagtgactgtagagaaatcttctggcacgcaaactgaaataaacagaccaaatgtttttgccctgagcttcagcgtaccatagtgtatgtttttcctgatccagtttgcccatatgcgaaaatgcagacattgtagccatcaagaactgatctaattagtggctgtatgtccttgaagacagcatctattaacaaaataagagggataagagaattgatgtatatgacatacactattatgggatataattttttgaaggatttgttgaactaatttgatgcaatagcttcaatggaaacccaacagaagattaagttgtactgaccacttatcatgtaccttgtgtagtgatagggccaaaaactttgttaaatgtgaaatttttgcccccttccttcccttgttttgtagggtttgatagaactagttcaccattgtccccaatatattcaactgaactggacttgtcatcctccccaggtcgaaaaggtcttatccgacaatatactctgatgtttcctgctcagaaatactatgccaaggtgatatcttttgacctagataaccagacaaaatggactgatgattgtagttcacatgtaccttttagttcctggatctcattgaacaattttctgttttctgcaagagctccatgatacttttctgcagtatttgttaccaccttaaggctttttcctgttgaagattgcaactggtaatgttagttgcaatccatcgatgagaaaagaagtatttgtatatgaaacccacaagtaatcacaaggttaattcttaccaaggccagctagttcttcagaccacttgttttgacaatttaagatttcatgcctaacggaaacagaagatagcttcaaatcctgatgaaacacaacacttttgactaactgcagaatttaagaactccgtaaaatttgaaaaggaagaacaaaaggaagttatttttctaatacctgaacattctgtacttgcaaacttacaaattgatcgatcaccacttctttctttttccagaattggattctagtttcggataattcctcaagttctattcttctcttggtagaatcgtctaacataagctttacttcttctatcctctgttccaactccttacttacttgtgcagccttagtctctaattgctgactgtgtgcctcatgcaatctctttgtttcttcaagctctttcttgagttctgaaattatactgtcattgttttccttgtctgtgagaagcctggccacatcttccttcttagattctaacaacctgcagctctcctcgtatgatgatcttaatgtttccgattccttcttaagtttcaaaatggtattgttaccatcttctttctccttcatcaacctcattatctcagccttatccttaattgaccttgctgcatcttcatccgcgattttcttcaattcagccttattttccttctccttgatagacatgaacatgtcttccttctgcttcatcaaactaattatatcttccttttcttcaagcaacttaattatctcttccttctcctttgttaacctaactactatatcatctttctccttaattatctcttccttctcctttgttaacctaactactatatcatctttctccttaatcagcctgtctttattgtcatctgccatttgctttctgtcctcatcctcaccttttcccaagttaaccatatcttccttctccttcataagtataattatatcttccttttcttcaagcaacttaattatctcttccttctcctttgtcaacctaaacactatatcatctttctccttaatcaatttgtctttaatgtcatctgtcatttgctttctatcctcaacctcccctttttccaagtaaaccatatcttccttctccttcataagtctaattatatcttccttctcctttagtaacctaaccatctcttccttctcctctgtcaacctaagcacaacatcattcttctccttaatcaacctgtctttattgtcatctgtcattttagttgtaccctcaacttcacctttttccaagttaagcaaatcttccttctccttcattagtctaactacatcatccttctccttcaacaaccgaatcatttcttccccttccctcaccaatctatctaaagcatcatccttctccttaattatcctatatttatcttcatcttctattcgttgtgtttcttcagctttgactgttttcaagttaatcatgccttctttctccttcagcaatctaaccatatcttctttctcctttagcaacctaaccatatcttccttctctctcagcaacctcaccaaatcctcattttctttcatcaatctaacaacatcatcctggtacttcattaacctttccatatcttccactgctagttgccctttatctccaaacttgtctttctccatctgcataataagagtaaatcaaaattatctattgcttctcaagaactaatgatttaaagacctgtcatcttttacagagtgaacaagaatcccagtcattctgttgacatatcaatctcagagaaaaataagacaaagggaattgtatcagcattgccatttgtctgccattttatctttttaatatttattaattaatggtgacaggaggatcttcaaaacctcatttaggccaggtgaatacttcacttgaagtacacaaaattcttgcaacaacccaaagtcaagatagatggctcagagaagttgctggagtttacatgtgtttgcccacttaccccaccagctaacacctctagcactcttatccttgactgatacttctcttcgcgagctttaatcaggttattttgctgcagacaagtaagaaatcacaaaggactaatctggtataagaacacatatagaaaatatttatcttacgttccgtatatgcccagcctgggtggaaatgcgcctctcaatctctagtatgaccttcctcagcaagcaagcaatgcgctacaatgaaacatttacattcatttgtacaagggaaggtgttaaaaacatgaaatcacttaaatttggaaagaacaaactaactgcatttcttttctgagaagcctacataaggtatttgtccattcttcctctcaatgctctcatcaaggatgctgttgaaaacacccagaagtgactgcgtaggtgcattctgcaacaagccagcattgggtgacaatgtaaaaacttttctaaagtaaaacatggtatctcattactagtagggataattagatgcacttacatccaagctagtggatttcagcaagtctgaatatttgccaccgagctgatcagcatatcctccttgcttgagctgaaatacctgcaacggcgaatacggatcggatcctaacacagggctggatggctctgaatacaagcaaaagacaagaagatgtctctctctcagccagcaattggatgattcaccatcacaaaatcagttgcaattgtcagtttgtccactccaggtatacctga

SEQ ID NO: 13339 - DNA, 517 bp, Oryza sativa
aatagaaaacaaactaaaataaaaattaaaagaagtaaaacacattaaaattagtttaaaactttacaaatagtttttaagaattatttggtgtaatattttatgatttttgtatgaataaagatatcttataattattgtatgactgtcattattgtaagaataattatttgtgtgcggtttttttgactcatgtagatggatcggcaatggatgtacgctgatcggcggtccaaagagtttattgacggcgtgcactattttttgagagtggccgaagctaacaggcaaaggggttttatttgttgtccatgcaataagtgtaagaatcagaaggagtattctgcatccaggactattcatttccacttgtttgagtcggggttcatgccaagctataattgttggacatcccacggagagcaaggtgttgaaatggaagaagatgaagtggaagacgacaatattccggactttgctcagtatgttggatttgaaggaaatcaaacgggcgagg

SEQ ID NO: 13340 - DNA, 11923 bp, Oryza sativa
ctgcaagcagttcatcacaaatgaatatctcggagaccgtgccaaagtccaaaaatgttcatattttgggacggagggatgcagtgcgaaggaaagggaacataaggaggacgcttttaaagaagtagagaaatatcatcatgtgattaatagcaggattttctagataagtttgtacggataacaaagaatagaaatttgaaaatgcccaattctacaagattattcttggtagatttcaccgagagaaaaaagaaatccaaaaaaaacatggcatgaatacatgcaggcgtgggtgtgtgttagatgagaagagaatatataacaaccaaaatgtggtatagtcggtgataccatctttagctagctactttctgtttagtttaggccattaggacggtggtccaaaatacatgtaggagtataaattgcagaaagaaaaggtaggtaggtaggtgtggccggccaggggccagcgccgccgcggcgcgtgctgccggccgccgccgcgccgtcaaccttttggacggacggacggacggcgcagctagcagctcacaaagattatctgcggtcaattggccctcctgccgtcccctgtactgcttctgctgatgtgatgaccacattttatgatcacagttgtgacttgtcatactttttaaataatatatttcatatgccatagatttatttttttaaactttttggctagcaatttatccaccacacttttgtggctgtcataatttatctaacgttagttgtggtaaagtgtggctggcaactaaacatgtaagttttcgtatgattaatcacattcctaaaaaaaatatgcaggtccagatgctaccatcgttgtgattcaaattatttgtgttttacatttgtatcttagatcattattttataagatatcattcaaagccagctcctaccattcgtacaacgtgcttatcggcaattttacaaaattataatggcattgttacaattttcccaataaactaaggcccggtttagatctcctgcaaattttgcatcctatcatatcgaatgtttggacatatacataaagtattaaatatagacgaaaaaaataactaattatacagattacgtgtaaattacgagacgaatcttttaagtctaattgcgccatgatttaggcttaataaattcgaattaaatttgaaaatatattgttcattcaattttttgttagaaatattcggtatgcaaaatcttttgcacaaatataccatcggtctcgcacaaccattgcgtgaaaataacgtggaaatgacattgcgaccggtatcgcgtagtgaaagtgcgagatcgcacagtctcgcgcggtctcgctcaagcaaactgcgataccgtgccttgccgatttaattagcgattaattatctgataacaatccggcccaggtggggttggccgaggctcgataacttaaggttgcccggatctcaacagttcataggcacacccactcggggaaatgtcccatctccctaaaagactagtccaatagggaaatggtggctctccccttttaaagtggcttcctcctgtcaagctaagcaaggtgggattattcagaggctcacatggtcgccgcccaacttttgcatctttgccagcgggtaatagtggatgatgtcctcatcattatcctgattagcgatcgctaatcaaatggaacccattggacagtgtcgttgattgcttcagcgagaccgttcggtctcgctcttccattccgcgagaccgtgcggtctcgcgctttcaccgtgtgataccattttcgcgcaacgaatgtgcgacactgacggtatatttttgcacaagtttttgtatcctgaatattcctgagaaaaaattgaatgaacagtatattttcaaatttaattctaataaattcatctcgcggtttacaggcggattctgtaatttgttttgttgttagactacgtttaatacttcaaatgtgtgtccgtatatccgatgtgacacgccaaaactttacacccatggatctaaacacggcctaaactaaacatttgattggggaagacaaaacaagttccttttttttgacaaaaataaatccgtgcggtattatttgaccgcacgggataatcgattatcccatgcggtccacttaacccgaccgtacgggaaaatgattatcctgcgcggttgggccgcccgcacacgaaaatattcatttttccagacacctgggtccatacggggaaaacctccgcacggaaaaatcaatttgaccacacagaaatatagtttatgtagtagtgtggttatattaatcagctatcgttgcatcggagtttgtggaaatagagaataaatgtatttggaggacataaagagaaataattgcattgaaatttgataaaatatggatattttagttcttttttatgtgttgatatgtgtgcgatggatgaaaaataaatatatttttatggcccctttgaatcaaacgatttttggagaaattttataggtatttgaccctttcatacaaaggattagagctttttaaatcatatgaaattccatggaatgactcattgcacatagattttgaaaaaacacttagcaagaactcaaaactcttagaaaattttctttgattttatctctctcatcagattcctttgttttttatgtgattcaatcaaacagtcacttatgtatgttttacattttcattcctatcgtaatccagtattttttttctattctttttttttctttttgcgattcaaaggagaccttagggcatgttgatccaaccctaaaattttacgccctgtcacatcaaacatttaaacacctacatgaagtattaaatataggcttagaaagaactaattgcatagattgggactacttggcgagacgaatcttttaagcataattgctccatgatttgataatgtagtgctacagtaaactatggtaatgacggattaattaggattaataaactggtctcgcagtttactagtggatactataattagttttttattagtatctaaacaccctatatgacaccatatataataattgatgtaacactaaaattttacacgtagacacccctttagcatactacaaatcggtagaacaacacgtgagctgagtagtacgagtaatcgagatcaggttgtgatgtgaccgaccaaacaggacgacgtgtatactgttgcagtagtacattgcattggaggcagattaacttgtccacgtggcgaccggctggcaaaatttgggctttcttggcagaggagaggagcagtagcagctttgcaaattgccattgtctcgtgttgctcctctctgcagctggttcagttggtgctgtgtgcctgtgcaaaatgaaaatgcagacgagacgacttcaccaacgcgagaacgaaaatgcagacgactccaatccaccaacaagacaacggtttctatgaaatcgtagcgtttttgcctgtatttctattccctctacttctctactgacaatgttggatttgatattaaaacatcgattttgctatatctcactcgaaagattttttcttatctctcactcgattttctcactcaaatttacagtgtgttttcttgtaagttacaatataatttatgaaatttgcacggtaacttttgtaagttacagtgtaatttttgaatcttcgcatataagttttgaaatttatattggatttggtctttttttttctgaagatatggtaatatagtatccattatggtgtttcttagttgttttttgcatttttactgtgtctattggattttaatctaaggattaaaaatctgtgtgatatgattataaaaatctttcaaaagatacatagacactcccttaaaacatgccattctaattttctcggttataaatatacgctacacctgttgggccgtgcagcccacttgagtaagcctgggccgatggcaccatcgttcgttggaataagttcatctgacgtcctttaacttgtcaacaaatccgattttcaccttcaagatacgattggtccctcaattgtcaaaaccggtgtaatatagatctcaaggtggtttggatgacggttttaattgacgtgacacctaagtggctaatttgactcggtcttcatctgacatggcatatgaagcaaaaatttaacaattttaaaaaataaaacaaaatatatagacctacatgtcagtcaaataataagattaaaaaataatggaacccacatgttagtggcccccacttcctccacctcatcctttccccctctcttcctcttctaggcttccatcctccatccttcggtgctcccacagcgacgacatcccacgacagcggcgtcgaagtgggtgaccgttggccacctatggcttgcgggctcaagaacgtcagcggtggtaagaggaatagggagaggaggacggcgagcgcactgagcggtggaagaggaggggtgtgcagcagtcggcgggagtgaagcggatgctttccttttcctctagatctccgccccctctgctccggctccaccgccgtcgaccaacgcttatgcgcggaggaggaccgaccgcccgcgctgtcccttgctcctgcctcatctcccatagcctccatcctcaccacgcggaggaaatacggaggcggtcacctgcttcgacaacgacgccgcaagcgatgggcccccgccgactacttgtgcgactcctgggccagctgcgtgagctgtgccttagctttcactacaccacaagcacatgctctgataactaccacagaggccgcggacaacaacccagtcgctttccttcttaccccgttctcctcctgcacccaatagatctgccaggtcactaggagtgtagtgtggtagccctagaggcatgacgtccgatggaagagaagaggggcggtggccataggggagaagggcggcgaccggcgggaaggagctaagcaacggccgcgacgtcaccgagttcgaccgccgcagggaagtctagggacctccgctcctacatcgccgtcgtgcctcctaagctcccaccgtgggtaggctaagcactgaacccacagcaagtcagcaaccacgcggatttgggtcccctcccgatgatgatggatccgatagccagtcaccgctagatcccctcccgccgcgtctcctcctgctgttgctagtcgttgagttctccttttcgaaggccgacatgaccattccctccctctacatagttgcttccttcgccccgtaggcggtggtctccattacgatggaagaggagcaagccggcggcgacctcgtctccctttgagcggcgccagtgaagccgcccgcctccgttctccctctccgcgtgtgctcaccggtcgacgaggaagctcgaggagagaggaaggatggctgggaggaggcaccgacactgccgtccgtggaggcgatgagccggtgacaggagaggacggtgggatccactgatacgtgggtccacctatttcttttatcttttatctaactgatatgtaggccctacatgttttttaatttttaatttttatatgttgcttttagtgcctcatcactaccacagagaacaaggacaaattagccacatatagacctcgtttgctttgtaagttggaggactagttgtatctggtttttgggtggaaggacgaaaatctaggcaacaaattggacgaccacaagtgaacttattcctttcaattttaagttctatggttacaaagcccatctgcaaactgtgcaatttgactgatagaaactcatttgccatcaacacaggacacaaggtagcattcggcaacccaggttaacagaccttgatttctccatatcattacagctcacagcaagaaatacgatgtcaaaaagagccgaataattcacttaatcaatgaccacaacaaaaggcccgagtgaagaacaagaccaataaaccttgtgccagcgaactaagagcaggaaagctgattaagagccaatttatagggacactgagatggtatgttgatcaaagccaagtcacagtaaacgcagcaatgtaatgtaacaggggggcatatgtcaaaatgctcaaaaaacttttttttctagcagatcaatccatattctgcgaatagcgacaaggagatgcgctaaggggtacaaaaattgatagtgggcggagaacttaaggcagctaaggtggtatgtcaattcaacaccattgcttacttcttcttgcctgcatctccagcctttgtctgcaaaatcgacacaagcaagcagtttagttacatgtagttagcaatgcggtttataactcttataataatagaacttggcggtcaggtaagtatatagaccttcttcacaccacggatcttctttgctctgttcttcctctccttcatctgcttgcgagacttctcaaccttggtggcgaggccattctgtaggtatggcagcaaaaagaaaatgagaaagacaaaatacataaaacatgggctttcatagtgtttcacgagttaaattgatatgcatcatggaaaagttgaattccaaaacccatgaaagtaattaataggtacacctgccacctgaagctttaggcaatgaaactcattaagtttggcagcatgcagtaatgcataaggctagtgaaacagctcggaatcaagcactacatgcaacagtatattatgcatgtcaaaagatgagtattcaagcatgatttaaccaatttttcatgttataagttctgtaatcatcatgcagattagtagaaaccaccacatattgcagtaattcctagaataagatgggaagtcaaacccacaccaagcttcagcagtacatgttttacacactacccaatacaatcgcgctaacattctgaacataaaagtcatagtttgctaacaaaggcaacgatgctagtaaaatacatcatttatacgcataagaatgtgattcattacttccaaaccacattttacaagaaatggtgctctactgatcaacataaaaaaaaacaccgatcaacaagaaccaacaatactatatttttcaaaatggtaatcccaagtgaaatttactcctttttcccatcagacaactactctagtagtactagattgttcagatttcagcatagcatcacgattaaactaaactatcaagagcagggcgagatcaacgagacaagagaggcgcgtaccctgatgagcctgtacttgggctcgtacttcttggcggcgtcgaggttgtcgtagatgagtccgaatccggtggacttgcctcctccgaagtgggtgcggaacttgaacacgaagatgcagttggagtccttcacctcgtacagcttcgccagcttctccttcagatccgcctgcacacacgcacacgcacacgcacgcatgagcctcacgccggcggcgggaaaccctagcccggacggtcaccggaggaggaggaggacgcgacgcaccttggagacgttggcgcggcccgggtggagcacctcgagcacgaactgcttgcgggagaggaggcggttcgtcatgaacttgcgggtgcggagcgtcaccgccggcgccgtcttcgtgtcggccatgcttgcgtcggtggtgtcctcgccggagattcctcgctgcggcggcggcggcggcggcggcgagagaggagcggcgagcggtggcggcggcgagggagacgcgggttggggtggtgggggcttatatataccaccccgaacaaaccctaggtctggcttgggccgcttggtagaatgggaatattgggccgattataatgggcctgaagagacacataggcccttttgttattgggcctctcagctaccggtccgatcatatctaccagtcaaacctggcacgtgcagatgagcacagcatagtatacagctactgagctacctaaccaaatttccttttttttagaagtaacctaatttcttgcacatcacatgtagcagtagctagtagggccgagtttagttctaaatttttttcaacaaactttcaatttcttcatcacatcaaaacttttttacgcacacaaacttttaactttttcgtcacatcgttccaattctaatcaaacttttaattttggcgttaactgaacacattctacctagcttgctctaaactgaagtgaagcgtaactcaggtatatatagctgctgctgctacttgaacattagctaaatccgattgatcatttcagtggcttaatttagtatatggttttagttagtagaaaattaagcgaaatcgcgatcgatgtgcccggcggtgacgggggcgacgctgttcgcggtgggggtgatgctgtgcccgttcccggcgctggtgccgtcgtgccggaacctcaccgccgtgctgccggagctatgggacctcctcgccgccgtctacttccacatccgcgacgagctccaccagctgctcgtccgccgatcgccgccgcacgacgacggatgatatacatgatgatttgatccatgacaaattcgagatcgatcgattcttccatatgcatatgttagatatattcgcgctaattaagttccctttttccttcgaattgatcgtgtgggtcatgcatgtgtgtgtgtgataaatagctcactcttgggtccttggatccggattgattgatgttttgaatttcttgtggagaaattggtaagctagctaacttgtttttggctagcttgtttggatgaataatatatactccctccgtattttaatgtatgacgccgttgacttttcgaccaacgtttgaccatttgttttattcgaaatttttatgcaaatatgaaaatatttatgtcatgcttaaagaacatttgatgacgaatcaagtcataataaaataaatgataattacataaattttctgaataagacgaatggtcaaatgttggacaaaaaaatcaacggcgtcatatattaaaatatggagatagtatttgattgggttatgtatgatgatcatctcactcgtaccgttggtcacgcgagtgcacgagtgcagctaccaatactgcaggttttgtttcattaattgttgaatgcttttacgtcctgattgtttcagcttaagattattataatctatattattaaattagattactttaagctgaattataataagctaatataaaataagctgcgagttgtttgtttctccggattattgaaggcatctaagggtagtgcgtcattaaccaccaataatatgaaaaaagcttctccaaaggagattattagattatagtaatctggcttacaaattataataatctatcataataatctacttgtttgtttcagcttactcataataatttagattataataattttaaactgaatcaaataggaccttagccttggttgcatctatctattgagtgattgagttatctggatcatatgatatgctatttggttagtttccgatggatgcggataaaaatatggatatccaaactttgttgctacactgctatccacagaacacaaaatgtacatcatcccgcttgtaggcctagttctatagcaaactttctcattttcttaaagagaaattgtatggttcttgaaaaaaatatctcaagataactaaattttacatttatattgttggtaccttgagataataaattttacagtagaaaatctatacctccgttaccttctgaagaaatagtaaaattacccttctttaatggtgctttagcctacaacactagcgcatgctgttaatattatttcaacttgcaaatagcaatctaaattaataggcatgtatttatgtcgcttcgttaatttcacatgtatttatacttgttatatcgatcgtatgtgttgaattcaatcggcatcatttagcctattatctaatggtttatttgaaattagctaggttttcatgtttcaagaaatatttatttccatacttgtgtccaatattaaatatttatttgtattcaaataatatgtatttatttcagttattcatattcatttttgtctttaattaaaaatataagggttaattagatccacgccgctgtaactttttttttataaaatgcaattactatttgtctatttggagacatgtcattacaatttgaccgaaattacagatataccactatgtacatcttcaatgcaattataaaatatttggatcgaaattacagatatgccactgaaaatatgtcgattcagataaataccactgtaattcgtcgattcagataaattcatcttcttcctccatcttctccctccctttttttctcatctctctccaccacctcaacggaggggactaggtgggcatggccgccatggcgaggtccagggccccctcgttgtcgacatggactaggcggtgctgccatcatgtggtcacggcttggcggcctggatccgcacccctgtggccgcggcggcggcatagccaggcccagcaggtgatcccgagcagcagcgacgctagcaaaggtgcccccggtgagccctagcattgacaatagtgaccctagccgcggcaacgctagcgacgacgccggcgaagtccctgcattgcccgctgaggagacggccgccacacgtccagatctgctcctccccacgccaccagacgtaccgccgctccttgaccgcttgttattccgccagccgccaccgctgggaacattccgtggcgagatatgagaaaaaaacgaagagggggaaaatggaggaagaagatgaatctgacatgtgggtcccacgtgcagatgaggaagaagatggagatggatggaaaaagtgacggcattggcatgattccaattttgtaaaatttcaatggcacgactatgaataaacgaattgttatggcatttatctgaatcgacatatttacaatgtcatggattcaattaaccctaacaagaattggagctttttgcaacgatttgtgctgcggcaccatggacgaatggatgatgagtggagaacagagggagcgtccgtccggtaggctggatgggaatcgccggatcggaccagtgtaagagatgacagagattagtgagtggaaggaggaagaaggggtgaataaggaaggaggaggggtaatctggtccaattctgttttataattgcattgaagggatatgaagtgtacttgtatattttcaattttgaccaaattacaatgacatggctctaaatagacgaatagtacgtaacggtatttttttaaaatcgaaggagttataatagcttgatccaattacccagaatataaaaacaaatacggagcgagcattattcatttgtatccacactgttttaataggcttctggggaaacaaaaacttgccaggtctgctggaaagtgttgtgtattatgtaaagtttttttttcttttttttacaagtagtgttatgtgaagttcaaaatcccagcccacacgagccgagattgaggcccatgaagacacggcctgaaggtgacttgctcagattgttaggccctaaagtcagccaataggcagttggatgctgttatacttcataagtaggaaaaagtacaccgaaggtctcatccccacctgcaaaaccagatatctgatgtcttttaactaatcaaaaccggtcacaataggttctttggtggttttgaccccggatttatcctacatggaggatgagtcagcgtgggatccacatgagccacacatgtcaggatgccacgtcatctttctcccttcctcctactcctccttcccctactctttctctcac

SEQ ID NO: 13341 - DNA, 19363 bp, Oryza sativa
atcaaatatgaaaagaatgatgagatctcaacattcacttccttgtatattatgctctcatataggcttgcagaaaaaatcttaataaaatcctacttccatatgtaacaaatgaactatggagtacctttttacataactgagacagctcacatggattggcaaaaccttgagcagttcaatttaattcaagaatttaaagatgaacgaataaagcaacaatatatggcatcctatctttaatgctatgtcctctctagaagaccagttctatatagaaccattgcatgttatataaaaagcgtgtgctcaaaagcaagaggtacaccaaactgcacatactggcatatccacacattagaccactgggatgtttaaccatagagtaacatacaataaactgaagcctaaactgaatggtcccgaatcccgattcctgattctaataaatgttttattaaagaacaggttgtgatggaaaacatcttcaccaatcaccattatatcgcaggggaacagataaggtaagataacatggccacaaagctctgataaccaaaacaacttttctcaaattattcaggtgaaactggagagtatgtacctgtagaaatacaccaggtgaactctctgatataaaacgatatttccctcccaaatcaagaagcctgaaagttcttattgtggaagcccgggtctaagggaaataaatcaagagaacattattacagtgaatactgatatactcagctggcttgcaaataagaaaattgattcctttaagcactaaacatcctcctgcggtaactcccctttcatcagggaactttaatattccaaatttctaatactctgttcttctataagaaagctagaaatagcattgataatatgttgaagaaagcagtctacagtttagcattcacttcagataggtgccacattcactttgcatgcacgaatacatgaaacccacctttccagtcaccgtgataacgtttattccccttgaaactgcctctctcaaagattctattgattcttcatgcgggtatccttcattatccacaatgccttaacatttatatagaagaagttacctgctagaactaggaaaggtccaacacaaacagcatacttctatatgctccatcaactcaccatctatatcacatacgatatggctcagttttggttgatgaacttcccgtaggttaatttcatctgaatctctactggcctctgcatgcaatggggaaatcagtgggaactccaattagaagaaattgactgacaacataaagaaaaagcatgctaaaatgtgtgaagatacctaccaacataactttgtgaatgatccatgtcatgaatggaatcatatgcactcttaataagtcctttccctttccaatctagagaatttaagatatgttcttccccgctctccatctcttcttcagccactttgctgagctcatgatcaaagcccaataaatgcaataatccgtgcacctgttggagttcgttagcattgaataggattacaatctactccgaaattgggaattaggaaataaaataagatgatgaaaatgcaccggatcaccacattagaccaaaataataataataaaaagtgatgctagaaatgagcgaaacaaaccatgagaattcttatctcatcatgcagtgtatggcccctttcttccgcttgccgttgtgcagtgtcaatagagattactatgtcacccaactgcagctgtcaaacaaacacaaacatatcagaaaaaaatggtaatcaaacaatatgttagtcatggtattcatcgactcaatggtacacatacaatgggaatgtccagcccggggatatgctgcgacattgatagaacatccgtagcgtgatcctcgtccctccattccttattcagtttccgaatgaaatcgtcatcacaaagcagtatagagacctcaacagtatcgtacttattcacatcgcttatacaattgtctctggttttgtactccgagttttcgaggtggtcaaaggccaccttcgctgccttagcaacatccatttgaagcgcttctgcaatgctctgcatagcaactcaggtcataagagggacaaacaatttcaacatttttcagtgcaagaaccgtatataataaacagagcaaattagcttcaaatcgtcaaatgcgatagataattttatatggaaatggtgagagaaacgcacgcagaagctactattaccaggatagtggggtcgtcggggagggcttcctcgatgccaatctgcacgttgagctcggcggggccctcccgcggcggccgcctcgccctcctccgcctcagcagcatcggcggcgctcgcctccggcgtccaggtgtcgacgacgcgtagtgccgcgaggccgcggcgagcgaggagtggggcacgccgcgaccaccgggaagcggagaaggaggagaaggaggacgcggtggcgaggggagcagcggtgggaggaggctggaggagggcggcggacacgggaggaggtggtggtggagggggtgggaggcgagcgcgcgggaaagaagaaggtggtggaggcgcgccatggaggagcgcgaggggtctagaagattctagaaggtttttagccggaggaggaagacggtggcggcaggagggaggagggagataagaaaagggtttagggccgggcctccattggccctcctaaatgggccggtttaactaacggtttgcgacacagttggttgaaggaacagcgtggacactagacagtgcatgattgattttatttcaaagtatttttgttttactagatttgaagtttcaaacatatcatacaggaaatttatgttgtgtattaacggtacacgaatacaaagcaacatttcattcatttcaaagtttaatttttgtttgtagcacagtgtacaccataggagtacttctcatgatggcatgagtgcatgagacatagacctgcctgttcaaataaaacccatatactctgagctccgtataataatgtaatctcaagctttattacttagtacaaatgtacaatatagtattaattggtcagaacaaccatcactgttattgccaggttatagactgatacatggtgacatgttttgctaatggatagaggaccaattgttaatctttgcatataggacacagataactgaactgacctgtgtactacaatgatagcaacaatactacagactttgctgctcaccaattaaccaagattattacgatttataatctcagggacacatcccagttgcttccctagtatccccagtgtagagataagccaccctgttgtcgagcattgacatcacctgatgcgcggcgagtcctgcgtagcacttgtgatgtgccgaaatgcagatgtcagtgatggccctggacatttcatcctcctgatggaatggctggctgacaaattcttcgaccggcatccactgaaaatgattatagcgggcataacccaaaaaatcattagtgagagctcaatcatctaaactagtagtacaaactacaaagtatctgaattatggttagggagtacccttgctgcttcaatctcggactcgtcgatagatatgtcagatgagagtggcttgagtgtgcatatgaagagtatatccgatttatcgaaaaggacttgatgcgcatgtctgtatgaacagaggcagaaacgtgaagaagaaaaaaaaaacatgaaggaactctcagcagtaaaaggttcgaataactccattgattgtacttgacaattacctgaaagcaacgacatccaggaaacaactttcgatctgaaaagtggagttcttgtaaaacatcaaaataacatttcatcttaagtagcatagttcagtaaaacaagtcaaaacagtgtaattaccccagtttcttctcgaacttctcttatggctccagaaaacaaatcttcaaactgatagcagaaaaagaaataatataagattagtaaagccaacataaacagcttaaacaaaacatagaccttttcttgaataagtttgacatgacttggctattggtttttacacagagaaaaaaaattggcttttgacttatcatagatcaataatttgttttactagggagtctccgctctgtgttttgtaccttatctataaagcccgtagggatcttccagatgtctgaacagtgcgatggacattttccttctttgacaacaagcacctaaaatcaaaggcatacattacaaacacaatacatacgcagataaatggttgcttttttctttcgttcagaaagtatatgacaaggcaaataggcataatccagaaattatcaaaacctcgtttttgtcattcatgacaaatgctccaacaccaatttgatgcaatgaagtggaaggcaaaccgggaggtccatctggaagccagaaagttagcatcacgtaccctggctctgcatgatgataaacaaagcccgcctaaaaaaattgtaaaacaaataaagttaaggttgcccatctaaaaaaatgtaaaacaaataaagttaaggttaactgcaatttttaactgattagttaagaggtaatgaggtattgttatcaaacaaaagaatgtaagagacatgaaaagaaaattggcatagacggttttttttttcctttccagcaatagtggcatacattagccagccttcagtgaaaagaatattatgctctttcagataagtctgatgctaaactaaggtcgataagataaaaaaacttataataataagattaacttgcctttattgcaattggaactagatcagcttgatcttcctgtatcttcaaccaaaccccccttttcccctgcagtaatgaattaatcaacccccttttatatccatctactttctagcaatatgtatgtgtattacctgcttattccaataacaaagtgaggactggagtgatgaagaaaatgcattggatgtatttggtaaggaagtagggttaacaacaatgccaccataatcatcctcaaaggcatccagcacatcaatagttccaagcaatggtgtatctgaaatagctgcattagttcccttgcttaaggtcttgccaccactgaatattgacaatttcaagcaaggctgtctgaacactgaacctgcaaaatataacactgtaagatacagctaccagaatctgagaaaaaattatgcataatatagtaaggtagtttggcgaaatacattgcaaagctgagaaaaactatcacactgaacaatgagttaggagatcaatcaaattgccagaccctcaggtttgctattccaaacaaaccaacaaacaaagtaaaaaaatatcagactaataatacttaaatagcacaaatcaacatgaaaaacataagaaactgattgcagcttcttgtttctctagaagcagatgcagtaatgcacactaacattttttctttattagaaagttgaataaagatttcacacgtcatcacctgctgctatgccaaaactaacttgttttgtacttgaaatcctcggatgaggcaaagaaagatagctctttgaatatgatgagggcaaaacaaatgccattggttttcactcgctgaacttgaagttgtggcaatcctaagagacctatgcgtcttaaatagatctgggaaatatacaaatcacataataatatacaccacctacacatgtccaagtggtgtcccctgctgttatttcaaggagaagccatctaaaatctcactccaatttggaccagaaaataacctttttaagtgggagtacatgccatattagcctccacaacggaatgattcccaactttgcatattgttaaggacctattgggatcacagagaattgagatcagaactccaatggaatacacgactatattgcaagtaaacctcacataattcaaaataattgggtggaagtctccggaagcatgttctatcaactgtcaccattggcaatttcatggtctacttgtcaaataactgtaaaattctttaaacacacacattataaaaacttatattacatttaacttaaatttcatttgacattaaaaacgaccttagcaagtatcaaattttaatttgtactggaaaaatatagcttattaacttcccaaatctgcagattacactcttaagattgtcctttctttgcttagtagtagtggttatttgtccttgtctccacaaaataaggagacatgctcagctcaaataaatattaacaaaaatcgagttccatcatatagttcaattccttggattgagaaaaactaaacatagttttgattaaagagtatttgaagttgtgtggcgataaacctttcttgctgttcctacaattttgacaatgtggtaaagagtccaagaccaactgattcactatttgatccatgtctggaacattgggccttacaaacaaatataatggcaggtcccaaaccatcaataaatgcagtagaaaaatgatggccagaaggtaccgttgatgaacttttaacaaaatacagtgagtaaagaacaatattctgtactgagtatgttgtaaaagattgaagttgtcattgcatcactctattcctgaatgtattcacttttacaacatatactcagtacagaatattgagaatgtgttaggcattcccttttaatatgcatattccccaacacaatattcttacgtagccactgagccatccagaatcaggcaactgcagccaccattcttttgctatgctgcttcttttttttttttaaagagcactatatcaaatattatggtagaaaagataggattttatgttcttttgaactttgtttcgaccgcaaagcaataaagaatagttagaaatatatatatatttttcaaaacgtctgtctccctgaataatatagcatcagtaaattggtaacgatcatgaaaatctagaattgatggaagggaaaaacaacttaacatcagatttgtccatagaaacatgtttgtatagaacgatataatgcaatgctattgcaagcagcacacaagttcaaccaagaacaggacatggatcatgatgcaaaatgaagtatctgaacttaagattaatcagctgtttccttcaccaagttactagttgtgattataatacttgtgctagcagttgtgtcttctcagtacaattttcactgaacagatgctaacatttagccacatattttgcaacacccggcaacctaaattgaagctacgccactaatccaacagagtgctacaactctaaaattgcaagattcggtatgcatggctatcattcatttccaatgtccaacttgactccagacgacataagtgaggagcgagcctcacttacaagcaactggcctattggtgcaacttactaagacactccgaccatcactactcactaagttacattgagcaaccattacatctgacaaatggaaacaatactaccatgggaagacacagtatggcaaaatttacagtggcctgattaaacatagagaattgagcttcatagtgtgacaaactacatatcaaaccaaaggcttgtctgtatggaaactactgatgtccaggtaacagtaacattttcagcaacagaagctcttttaaaataaaaagaaatcttcaccagttggcagattacctgacaatttgaaagcatattctaatgttgtccagaaaggttgacagaagcaaatcctacccacacaaaaggtcatccatatcttatcctattgaaacagaaaattcttgtggcaaattgcaaggattgagaatacaatgaaataagatatttacaattgtttggaatactatttcttttcaagctgaaactagttgggaaggaatctggtttcattcctcttgattgctacctgagtggtgacagcaggcacaagaatatggactactgcaaatgttggactaatggaaaagatactggacagtgaaagtgttacatttgttctgttttattaatatagtaacttgaggtcatacaataggaaacacaatggtattaaaacaaattaccactgagtgccaaaggaattcttactttttaagaataatttatacagctattgtacatactgcagaaagaaataaagggggtttaaataaatgctacaaccagtaaccaggcttgctacaaactccaaaaacagctttcatagccagcaatagaagcattacacaatagaaactaaatgaaaaaattaatagaaaacaatgtagcaggaccaaacatttgtggacataaataatacaaaagctacataggaacgttacaacatattttataatgtttggttgattacagtagacagtaattactcagtaacaggcccccagggtcccagacagcagcatcactatcaatgaaaattgaaacatggaatgttctatatactactacaatacaatgtttgggtaaccgtaaacatttgatcagaacaaagcaacaacaaataaaaaattgcaaaagaggatcctctctgtggccacatttgggacacgggaattatttcctgattccagtaggtgaaatgttccatttaaaattcccatgatccaaacagtaactaaaagaaacaatagatccatgttgtttcagccctttaacgtcaacagaccttataagaaaaacacattcagggcaattaatagctaaatgtacagttgtacgtatctacttgactatttgacacagattaaggatgtgttcgatagtaggggttgggatcttctctcacgcacacataaaatggagcaagttattagtgcatgactaattaagtattagctaaaagaatttgaatatcgattaatatgatttttttttcaagcaactttcccatagaaaagttatgcaaaaaaacataccatttagcagttcgggaagcgtgcaagtggaaaacgagggagtagaggttgggaaaggggagaaacgaacgcaccctaacattctttgcttgaaattgtgtggctccattagggctacaacttggttactttgttttatgtaaccagctaatttctatagtaaatcatctatgcaaagggatttttttttttttgcggggaattgaacaatgaaaaaaagggagaaaggtgggaaagagaagaaaaaagaagaaaggaacgtatggtcctactcctttttcaattaggcatatctcaaatagtgtttttttttttagtcgaacatttcaaaggaaaaacttttaagtggaaaatctagaaaccggacagtctagagtgccatacatctaaataccactttcctggcctaattgggaagccaaaaaatcctggtccatctaacatggcgagtcaggattctgggccttcccaaatgatcctaaaatattgtagcatagtatattgatattgtgacagtgttactaaattatttcagaattacatatggcctttccactgtatattgaggtgggaagcataggtatattctcgtggaatatcccgtaaaaacaccatcacagggcaatccaatcagcctaataattatctgacgggaaaggcagcttttgtacaaaatgtactcatcaaatatctgttgattagttataactcgaagaaaaacaattgatgtctccatgtcaccttaaatatttcaaatttcacaaatacatcccaataagcggaaacaacatgcaacttctacaggtaatccgtaatcaagtagtaaccttgtaggtcaagtttcgtattatctgtgatatgtacatcaaatactacagaaacagttggctataatgttctccatactataatcatcctcagaatatagggaagaaagcagcagggtttacatcttaaaaacaaattggctgcataatcagcacttagagatagtgaaaaaataataatgaatactagttcataaccaaatcatctggttactgtaaatatgatctccaatatttaaaagatagcttgtttgcatgttgtagaagcttatatgacttcaaagcagaactcttaccacttttggaaatgtcttcaatatcacaccagaattttctcttgtaatatgatgaaccttaaaagatacgaaggatgcattcattacatctgccatttccaaagcattgtaactacatgaatctgcatgccctttgaacttgaaatgaggacactttaacattttgaaagtcgatggcacattaaatgcttagaatcagggtgtaggtagctgcgcagtatgcctgatccagtgatccttagctatcattctggaggagaaagtgaaccaaaattttcagttgatggtttgatgccaatctggaaattatgcacagtccccagatacacatcacagaaggtatggacctgaagaactagggagctccctggaaatttaccaagccatcctcatctcaatgggctgacaacccaacctgaaatccgagttggcttacgtattcttactgttcgttgagatctactttccagtcgctcaagtattgagtaagttattgagtcggggattaacccttgttgcttcatagtttcataaagtttatgagcttcttctgtctttccacgtctctccagacaatcaagtaaaatgttgtaagttacaatattaggggtgcatccctctgatatcatctcatcgaataagctgcatgccatctcaaccttattggattttccaaagcactcgattaatatgctataagtaaacacatcaggatcatatcctttctcttgcatctctttgaaaagcatatgggcttcatcaagatcaccatgttttcctagacagtttatcaaagaattgtatgtgacaacatcaggcttacaactgctagcctccatcacttcaaaaagttcagacgctttatcaactaagccaactctaccataacttgaaatcataatattgtaggtaaaaacatcaggaataattccatttgttttcatcttgtcaaagagattgctaatgaaagagacctgcttgagctttccaagagctgaaaagaccatattgtacatgccaacatctgtaacaatccctttttcaggcatcatatgtagcaggtcgatcgcctctaatgttttctctgcattacataacacctcaagcattgatacaaaagcatccctgtcccctttctcatgggagttccacatgcgacagaatacattatgtgcctcacttgcatgaccagatttgcagagtgacttcaccaaatacgaatatattgatctgttcataaatctactacagatatctagaacctcattcagtctgtgcagctgcccttctgttgccaagatatccagtgtaatgctgtatgtgaattgattgggttggcagtcattctcgaccattttggagagtacaaaaattaccttgtccaccattttgttcttgccaagagcctcaataatagtattaaacgcaatcaggttaagaacacatccttttgataccatttcatcaaaaaatgagagaaattttgaggtcctcccagcctttccagacattctgataagtatagtatatgtgtatgcatccggtacacagtgtttttgtttcatatcttcaaagacttggaaagcttggtcaacctaatcaactaacaaaggtcagctgccaagttttgaggaataagcactgaacgatatgcactttcaagatgcatggtatgtcaaatataaaaaaaatatagaacaggatgagatacaagaggcaagattcttgttgaacggcaatggttagaatcagacaaccaaacaattttctgtctgtgctccactaccactcgattcatatttcacaatgtgcaagttatcaagagaaatgcttctccacatgtattcacacatggctacatgtactatactaaacatccaaaaaaagcttcaatatttggcaaggacacctcaatgaattaaagacgagttggttactttgcatttttgaaagtttgcatcaattttgatgtggtgatagtacatttaccagcatgtacatgtggaaaacccattctcggttatcaaacataatcttctatgtaattggaacaatattacacaaaagagatatcagagtctactatttttgtacaacacaaccaatttccagtattacttttaaaatcaaccttgacatgatattcctctatgccaccctaacaaggtactctgcctcttcctcttccattccctccccccggtttgccactgttcaccacccttgtctcctctctcactgcctcaggctacagcgatggcataggagtgtccattttgcatcatcccaatggcaaacgaaaatactgttttgtcaactatgcaaaccaaccatgcttgatcttttagtacgtgaggaactgatgctcaaaacttagcaaatagctatcttaacttagactacattactagcaatatatgctagtatgccaaaaccattggcaatgggagtttttttcttaaaaaaaaatgaacgggctaccatcaatccatcatagagggcaatttcagtttataagcaagggcattatattgttgcaatttcagtttgatcttggtattgatgtcatcttaggtcacataacattaggtatgatgtcatcttcatacctaatgtttgcaaatatgactccaattctaggtcaaacaatcagagagaaacatatcgacagcatgaaacaatgattccacagagacattcctagattagcattcattccacaaacaccaccaatttaaacatatgcaaaagttagccgattatcgtaccattccagccttggcaagcgcgtcgagaagcatgttatacgcaaagatatccagcttgtagcccttcctccgcatttcctcatacacctggaaccccttggacacctccctgctcctcagatgcgcctgcacgatgcacttgtaggtgtacccactgagcctgagcccccacttgctggccagctcaaggcacctctccatctccacgccgccgccgcccatcccaaccagcaggttgatcgtggagatgttgccggcgacgccgtcccgctccatgtcggcgacgaggcgcagcgcctcggacgggccggccctggtgcggaagaggagtgccaggatgcggttgtaggagaaggcgtcgtggcggaagcccgggagcgaggcggcggcgaagcggaagaaggcgagcgcgaggggcgggtccccatagagcgccttgacgacctcgaaggcctcggcggcggtgagggtgaggcggagcccgcggaggtagtcggcgaggtctaggagcggggacggggaggcgtgggagcggaggatgcgcgcggcggcgcagacgaggtggcggcgcgggagcgggtagccgcgcgggtcgagcggcgtcgggggaggggtcggggcgacggtgacggtgagggaggggcccgccggggatggccgcgcggcggcgatgcggccggagtaggtggtcgcgaggcggcggggcattatttttttttcgtcggcgaggggggagacgccggcggagtgggcgccgccgccgtgcttattacgggcttcactgacaggtggggcccttgtatttcggccaagtgaggctcctaaaagggccgttcgtgggcctgtagcaaattactggattgttgttgagtgggccgaatctaacccatccatgtgttgtatgggccctcagtttttttctttaagacaactgttgtttttctttgtttgaattcattttttattttatttatcaaaatatttagaaataaaacagaaaacgaagtagtctattaacacgtgattaattaagtattagcaaaaaatttggaaagtgaatcaatatgatttttaaaagcaactttcatgtataaatttttttaaaaaaaacacacgtttagtagtttgaaaagcacgagaatggaaaatgaagagagtgagttgttaactcaaagaaactaactgagcctaacacccttccagaggaccactatggagcttcatgcctcagcaatcttccgagagctcgggcgtacgataacgttgcaaacgagtgaaatgtggaggtgatgcaacgagggtttctaggaagtcgatgccgcgaggtgaagcgcaagcgagtgaggaatagattgggggtgggggggggggggggtaattaagggccggtttagatcccacccaaaaatttacgccctgttatatcgaacgttggaacacctatataaaatattaaatactataggcttaaaaataactaattacacaggttgtgactactttgcaatacgaatcttttaaaactaattgctccatgatttaacaatgtggtgctacagtaaatatgtgctaatgatagattaattaggcttaataaattcgtctcgcggtttagtgacggatattttaattagttttttctattagtacttgaacaccctatacgacaccttgtataatatctgatgtgacacgtcaaaactttactcccctgaatcaacccccctcagttgggcactgcggatacaattttgtctgtggatctagctcactgcccaagactgaaccatttgaaatgccactggcactgtgagagccgttcgcaaacggttttattttagaacaaacaaacggttctctgggcctatttggcacatgaattaagttcctcgtatgtgtggcgtggcctacacagctacactcacagctacactcatcgcactaaaattccaatcctattttactataaaaaaattatcttccactaactacttaagcttaacataacatataaagatgctacatcatcatccactaacaagatgtcacatcatcctccactaacaatcatcacatttaaacattatgtaaacatgttgtatctttataatttttataatttaagagagcttttcaaatacaaacatgttaaattatcatccaagataattcatataatgtttcaatgtatatctttattatgttttatgatatcctatatatttatatagttcatcctcacttagttagtgcttaaatgattaatctatagtttaaattatctttctccttttttcctctaatgaagtcatatcacatcaattgtttttagtctttagatgattaatctacggtccaaactatctccctactttttttcttccataaaatcatactaccttactttttacgtttgaatcaccattttacatactattcaaatttaaatttttcataaaccatattaatttacttaatctgatattatctagctattttacacgttatttttttattgttatcataataaattcccgcagtaaaacacggggtttcacatagttttcttaatagtgtccgccgtctcacaacattgctgctcgtccaagcagcagtagcatagttacatcttacatgtggactgagccgagtatctctcttgtagcataatccttttggcacaacattgattttctcgtcgccaatacctcctccgcagtactaggcccattcaggccacgggctatatatcaaaaacaaatatctccttcctttagtacttcaattaattttaaacacacttttaacaattaattttattattaaaaagttgtataattatcatttattttgggctgcaaaccgatgtctgcatccaagcccaaaccgccggggccggggttactgcgccctggcggtaagcacggttaccgcgcggtaaccgcggtaacagtgaaaaaccatacaaaaccgtgcaaaattcatcaaaattttaaattattttttaaatttatttaaatttaaggaggttaccacggtatttacattaccgtaccccgcggtaagcccgataaccgcggtaaccgcgcggttaccagcggtatggtgaaccatagtctggactagagtagtagttaagaaccacgaccgcgccaaaaaggagcctggatagttaagaactcagaaggatatgagtagtttgatcagcggtcagccaacagctgcttttgcttggtcattatcaccattcacgctcactcatacgtcgtcacatgctgttcatcttctgcttaattagcttaattaatctcctgttttatcagtcgcgcttttataattcgcagtgccaatggcaacaacaaatgtacttaagctcggtgtgctgcgcactacgcaactaattgacgcatacaacacataacaaatctcatttgatgcttatatgatgaaagtcacaagtggtgtagttattaggagtatagcgtggctctgcccttagtacttcctaagctttagtttactttttttgctttttttttctcttcccttggcataagtcagtctggttgattgcgttgtataacataaacttattttcttctaatatattgacgtgtaattattttacgcgttcgtaaaaaaaataagtggtgtatcagctagtggctacgtgattttactcgtcaggttttaaattatagttatatgattattaaatattgcgatcatgaatttacccatggtttttgtccctttaaacgtgcgttacgtatcggtgggcatgcgagtatagtgtgcgtatgtagtgtgtattgataggaaatgattttttttaatagaggcagtacttcagtggtgcatactcctgcttggtcaagattaactatggtagaagtatttattttatttaaacaaatggagtaaagatcgaatcaataaacaatcacgcggtcaacgatcttgcatcatccttagaagatcattccagtgttaaaaggtctcctctacctgtcacatgtatgtatatatacgtgaaatgattcgttggactccgtgaaatgtgttgactttcctccccttcttcccaagttccaacccgtgcattgcatgcatctccatcacaaaccaaaaaaacacctccaaatctttcttttttgtgattttggactatttagggtcatgtgttcacggctaagtatccaatatcaaaatttaaatgtaccaaaaaaagttgttcctaaattgttggtttgcagtgagtgtggtccaaacataccttacaattgttccctaaccatattttgccacatttataaccaatactttagcttaaaccatccgtggcaaattaatcatgtgttaaaaaaacattctaatatctttaactttttagaggtatcttaaattaaaatcaagaaattgagatcaaggtgtgtcgctagtttccgctttgatttaaaacatgtgtgaagagacatattcgtagggggtgtgagtgcggtgtaaatgtgcgtagtggtgtgtatcaataaatgaaattaaactaaaaaatcaacataatctcacttgaccttttatcatctttctcacaaataaatatattactccgctaaattaaaattttaaacaaccagaagagaaaaaaaaaaccatcaagccgccggcaccagccaacccaagaacccaaccataaaaggcgcgagtcgcctcatctctcattaaaactcaactaatttaaactggagcagtcaatcacctcctcctcctcctccgccgccgccgaggacgacgacgacgacgaggagaagctgatcgtgatcgcgcgcgcatggagccccacatggagagggcgctgcgggaggcggtggcgtcggaggcggagcggcgggagctggagggcgtggtgcgcgcgcaccacacgttcccggcggcggagcgcgcggcggggccggggcggcggccgacgtgcacgtcgctggtggcgcagcgggtggacgcgccgctcgccgccgtgtggcccatcgtgcgcgggttcgccaacccgcagcggtacaagcacttcatcaagtcgtgcgagctcgccgccggggacggcgccaccgtggggagcgtccgggaggtcgccgtcgtgtcgggcctcccggcgtccaccagcaccgagcgcctcgagatcctcgacgacgaccgccacgtcctcagcttccgcgtcgtcggcggcgaccaccggggcgcctccgcaactaccgctccgtcacctccgtcaccgagttctcctccccctcctcgccgccgcggccgtactgcgtcgtcgtcgagtcctacgtcgtcgacgtccccgaggggaacaccgaggaggacacgcgcatgttcaccgacaccgtcgtcaagctcaacctccagaagctcgccgccgtcgccacctcctcctcgccgccggccgccggcaaccaccattagtgattgatcatggtgtagtatatccacatgcatgcgtgcattctgcatagtgttgcttcttctttttttttcttttttgcttcctttttttttctctacctaaaagttgagtaaagagatgaggtgtttataaattataagtttgaaattatttacttatatgtgcaattctgatggggtgatgacatcaaaagaggatgcaatgcaagtttggtgttagttttaaatttgtgtgtgtgtttctatatatatatatatatatatatatatatatatatatatatatatatatatatatatatatatatatatatatatagacacacacacactagtattaattacatcgttatcttgcaatgtcatcatggttattggtacttctctttagtttgttttgtggatctataagatttggtagtgtttactcatacttttgaggaatcccttttctgttatgctttttctaggctcaactaattttcagttggaaaaagatcgatcacaaaggactgaaggaagagcaaacagtgcaagttggtgttcattgctaaaaggattgttttttcttcttggatatattaatgcaatgagcctttcatgtgcttcatttgataactttaccctcattttctagattcaagttagcggacctcacgatcgatatcatcaatcatcgcattgaaaatcttatcccttaatctgcattggttgcacttatggtttataagctgagaaaaaaatggcaaagcaacaaaaataattttagagcgacttagagcctgtttggattagggactttttttttgttcatctcacatcggatgttgggacactaaatataaatattaaacgtagattagtgacaaaacccattccataaccttgtactaattcgcaagacgaatctatttagcctaattaatccatgattagctagcctatgtgatgctacagtaaacatgtgctaattatgaattaattaggcttacaaagtttgtctcgtgaattcgctctcatttatgcaattagttttg

SEQ ID NO: 13342 - DNA, 5362 bp, Oryza sativa
gacaaggcgggatcttgcggcgccttcctccaggggatctcgctcgccgcggccgcgcctcgctcgtctcgtcgcccaagaggtggaagaagaggtgggattttactcttttttcttttatcttcgtgggtggctctgggcgtagcgggtgggcactaattaaccaaagattagtgtagtaatcaccgggtgtttagtttactgccgccgctgcgtctgtctgtccgtatgtgcgcgtgtgaggctcgcatccatgtggcatctgggcagcggcagctgcagcttctcctccccactgagcccttttgtcctcactcgcaggtggcccttgccctttctctcttcttcttcttcttctctgctgctgctgctgctgctgctgcatacttccagcatccagggagtggctgcctcctggctttccatttgagccgccttcgattctgatctgggaccgaggagcaccccgcttccttccttcctcggttcttggccgtttctttggtcttctttgggaggtgcggtgatggagttctgcaagaattttgggagtcctgtgtttgttgttattgtgattgctggttcgggtgtgttcatttcttgctgctgatttcttggatgcagggatcggagaggggtgaagatgtcgggtgctgctctcgtcgcaatcgcggcctccatcggcaacctgctgcagggatgggacaatgccaccattgcaggtaaaaaggttttacttcccgtgtcgtgctagattggttatttggttgagagtttgtgagtactaggaaatatgaacagctgtcaattttttcttaattatcagtgttggtgtaccttctaaatttttcagattaatagactgctttagatcagatgtttgttgagtgctaattatggtcttctagtaacatgtctggtgttgttgtttgagtcctaagagcaattggcacaattgtttatcagcaaactggatcgcatgatattaatagtctcttaatttttctagatctgtactaatcttattgaagaaagagatgttctaatcataattgttagctattgtgttgtctgttgaatcattactgtttgccattctttgttctgaacacctgtaaagattgttctatccaacaagaaagtgtaaatgttaacaaggcacaattattaaacttcttcaggtgctgtactatacataaagaaggaattcaagctagaaagtgagcccactgtggaggggctaatcgtggccatgtcactgattggtgcaaccatcatcacaacattctcagggccggtatcagactggatcggccggcgccctatgctcattctctcttcaattctctacttcctcagcagcctcatcatgctatggtccccgaatgtctatgtgttactgctcgcacgccttatagatggattcggcatcggcttggctgtcacacttgtacctttgtacatctcagagacagctccttcagagatcaggggtttgctgaatacactgccacagttcagtgggtcaggagggatgttcttgtcctactgcatggtgtttgggatgtcactgttgccgtcacctgactggagaattatgcttggtgttctcgcaatcccttcgttgtttttcttcggattgacaatattctatctgccagaatcaccaagatggcttgtcagcaaagggcggatggctgaggcaaagaaggtattacaaaaattacgtgggagagaggatgtctcaggtatgttttgctgaaaattttgatgttcatttcacccatatttccagctgaccagtttaaaaacaatttctcccagattctaaactcatggttaatactagaaaacatgtgtggcattggtaactgttaatttcttgacacgaacttaacatatgcagaaatagtgtatttttgaaaaaaaagggtaaaagaaatcaaaatctattaagcgccttctatcggtgctcttttgaaaaagcttatgaatcttcaagtaaaaattactaagtacacataactacactaattcattttccatagaaggcagaacatggaatgtacaatcgttatctcaccaggtagagcccaaatgaggtgtcccaactttttgctgagtcctaatctggagaaaaataatcaggtgatctagatagacatcgccctcttttttttttttttggtaagggtaactctagaatttggggggtgggacctgctggtataatgtggatgtgggccgacccacgggtccttatctactctagtttaactaaatgaactatattttgcttttgagattttaaaagtgaaattaagtccatctagttgacctagagtgggtcaaggagccccacagcggccatgcctaacaacagtgattgttcagaaacgttagtaatgatttatccttaagttcatgctttcctcaaactaattacataatacatgtgtcaacatcaaaataggcatatgctgttagcaagtggtttctctattttctcctctacaacagactaaatggacagtattcggttggctgagagcataatattgctgttattttaagttcatcgaacttcgctgtaagctggttgtccccagctgcactatgctagctttctattaaagctgggcccttatatttctgttatttgtttctggcacaccattcatatttatattgctgctttattcatagttactacttatttatgccaatgtttataccaatgtccaaataaaatcatgtaatctacgtgaaaaaataaagttgcataatcattcaaattatcaaattgcgcaggagaaatggctcttcttgttgaaggtttggaggttggagctgacacttccattgaagagtacatcatcggaccggctatagagccagctgatgagcatgttgttgatggcgataaggaccaaataacactgtacgggcctgaagagggccaatcatggattgctcgaccttccaagggacccagcattcttggaagtgtgctttctcttacatctcgtcatggcagcatggtgaaccagagcgtgccacttatggatcctatagtcacgcttttcggcagtgtccatgagaacatgcctcatgctggaggaagcatgcggagtacattgtttcccaactttggtagtatgtttagtgtgacagatcagcaccccaaggttgatcaatgggatgaggagaaccttcatagggatgatgaggaatacgcgtctgatggtgctggaggtgactatgaagacaatgtccacagcccgttgctgtcccgacagaccacgagcgcagaagggaaggacattgcacaccatgctcatcgtggaagtgctctgagtatgagaagaagaagcctcttggaagagggtggcgaggcggtgagcagcactggcattggtgggggatggcagcttgcatggaaatggtcagagcgagaaggcgaggatggtaagaaggaaggaggatttaaaaggatctacttgcaccaagaggaagtgccaggatcaagaaggggctcagttatttcacttcctggtggaggggacgctcctgaaggcagcgaattcatacatgctgccgctttggtaagccaaccagcactttactccaaggatatcattgaacagcgtatgtccggtccagccatgattcatccatcagaggcagctgccaaaggttcaagctggaaagatttgtttgaacctggagtgaggcgtgcgttgttagtcggtgttggaattcaaatccttcaacaggtagagatgataccaatttcataattcttttttgtactgtccaacattgacggtgtttaagatttgtgtactattaagaattcactaattccttttatgttctttccttgtgcagtttgctggaataaatggggttctctattacactccacaaatacttgagcaagcgggggtggcagttctcctttccaatcttggcctcagttcagcatcagcttccatcttgatcagttctctgaccaccctactgatgcttcctagcattggtttagccatgagacttatggacatctctggaagaaggtactaacttgtttccttggtttgcatcatcttagtactaccaaatataccaaacaagaaatgcacccaagttagtattaattacatcatacattgtttcctttttaggtttctgcttctgggcacaattccagtcttgatagcatctctagttgtcttggttgtgtccaatgttatcgacctgggtacagtggcccacgccgcactctccacaatcagcgtcatcatctacttctgctgcttcgtcatgggattcggtccgatccccaacattctgtgtgcggagatcttccccactagggtccgcggcatctgcattgccatctgcgccctgacattctggattggtgatatcatagtcacctacagcctccctgtgatgctgaatgccatcggcctagcaggtgtctttggtatatacgcagttgtttgctcgattgccttcgtgttcgtcttcctcaaggtccccgagacgaagggcatgccgctcgaagtcatcaccgagttcttcgctgttggtgcaaagcaaatgcaggctacaaaggcctaattcttcagcaactctgctttcaatctttatataacactgtaaattggaatctgcaagatcacaccatgaggctggaggagctttttgagttgtaaatgagagaagaggattgctattcatgctccttatgcaagggaaaagagttcattactggcacagggcagctgtaaagtaggaaattttcatgttattcatgtccacttcttgtttatttagtactgtgttaggtaatgttgttattcatcagtagttgctgctagggatgttcaaaaataagcttgctaatctgattttgagctactatgttggggttcataataaagtaaattttctgtgtcaccttgcaagcttttgcactttgttgtaaattgtatggggaagtttatttattaatggtgccgctctaaaagcaactacagaaggctctctggtgtacaaccgatggtgattcttttgttcagattttatgtcatcacagttacaaggagtaaaaatgactgttggactatgaagaaacagtaaatattttaaaacactgatatttttgcagtgcatcaacaaattacaaaaaaggattggacttgtactccatttcattgtgaaaaaccatttcattcttcatactaaaaatatccacaaggttttctcattctttgatatcaatatagggcacaacatctagccagtgtaagcttactatttgcacaagaaaatcagatggcagcttgacttt

SEQ ID NO: 13343 - DNA, 7753 bp, Oryza sativa
  unsure (1)..(7753): unsure at all n locations
atgctcttctttagaaggatttaatggtggtaacagtgaattttctacccaaacactcctattgtaaattttacaaaacacttcttaaactttttaatactaaaaaaataaatctaaatggatagccacatataaaatcaaaataaggtgaatacttcccttatcaaatacataggtagcacacttcaaaaagatattttattagtagtaaagcacggatatttagctagttgaaactgaaaaaagaaaagagacatggtagaatccaggatgaaaacaaccttcattcaaaattagatatcactttttcccatcaatctttcacaaaccctgtgaagtaccaccagtacttcatcaacgaatctgaaacaagtataggaaagtggacacagtgaaaatggatagccaagaataatggcattctatttctttttcttttaaaactaccaaatatactgacctagacctaactagcagccaaggaaaggcactaccttaactgatacactggtgctcgctcagtctcctcagtcctcccacaaccacaagtccataactccagagcctagcctaagaacttcatatttgagcttccatggtttctcaatcccagagcttctcttatcctgaaagcaaccgaaaggcatccttttttttctttcagcgtatgatttgatgaagatttgggcgccatctgttcaagtctccgtctcctgacaaaatctgtgacaaagtattcggtgtgtcaagggtggttgttctcttcaactcctcgccaattgctcagttcatgacagacgagctcttccatggcagagaaggtgccaaacaacaccggatagacaaaaagaacattttaaatgttaaatttgaagggtgagagtacaagacatgcctcaagaatgctttcaaacctgggatgcatccggttccacacctgaaaagatctttgcaaaccaatccaacaccatattcatatttataggtcagtcaatttaagcagaacgaaatgaaaggataagcacagtacagagtgagtgcacagaaagcaaaacctccatctggaaggccaattcagatcacttcatgtccacttaagcgtatatcaccattctcagtaaggatcgtcccagcgaccacttctgcaacctccatgaattcagtacagttgctacttgccaagctttcaattccttctagttttctttcatccttctcaaccacactttctgaaggcgcctgctctaaaattgtttgaattggatcattttcaacattgggcatcaagcagccaggtcagctagtttcatcaaccaaaccaatagtgccaactgctgcacagctgttgcctgatacagtggacccctcagatccatgtggtgaagtggagcaattagtcagtccaaaatttgcatcatcatgcaactgaattgatgcttcctcacaagccgggctaactgaagcccttctaacagatttgaatgagtcaacgtcagcacctccaacagaatgatactttcgcttgagctgacccaccagagatgctgtcgttgtgcaaacttcagagtcatttttatcagactggtcttgctgctctgcacatattggcgttggtggacgagttttctggcagccctgttcaaatacataaagggggatctccttcttacggacatgagtgacagctagatccatcccggatttccactgtgtatacattccaatttcatgcataaactcgtctactgttccacggatatcaaatttttgaccacgtattttcattccctctttccttgataagcccatgtagaaggcacagtgagcacactgtattgaaggatctgcatattcacatgggttaggatggcattgcagcatccctttagtgtcccgctcaatctgcatgttagaaagacaaacttgcataagtttctaagtatggaatattcatagacctcattttaatgttcacttcaaataatataaaaattgtagtttatccatatataggagtaataagaaactactgctactacaatacagcaacctttagagtcagctgtctcaatcgagattcaatccatcccttccaaagccgaagatcatcatcatcatctgcaacaatgtcaaccactagatatcttgtatatgcctcgaaaaattggaaaggctcaaacaaagaactccagctagccttgttaagctcaatttcctgcatcaaagataggcaatgagaccatatgcagaatttagtgctctgaggcataaagttgaggcatagataatgcacctgacaaatcttattaccaaactgaaattgctccataataaccctcaatgtgctagttgaaacattgtaactagagttcatgcatggatatgctggcgtgatgataggcataacatgtgatctatcacgaggattcttacgtggatcccacacagcaaagccaaggttatcatcgttctcaatggcacaaagcatcacaggatttggccactgccactgggtgaaaactctgaagaatcttgaaaccagcatacttggcacagcattgggataaagttggcagacacgagcaaccaatagggcccagctgacaccccccagcaaaccagtaacctaacaaggaaaccatttggcgtcataacgattcagcaccttttgatgctaatggttttgatccaagcacaaacacatttaagtgtatcatagatgataaaaccaggcttacattagaataaactcctcttctctgtgcccagtacttcaaacatctgagtgttttccggaagatctacatagcatatatttattacaatgacatggtttggactgtataataagagaaatggtgatatcataattaaattacctccgcatttggaacaagtcgaagaatctggtctgccaccctgcacccattgagacttcgaacagttgcttcatcaacatcacaaagtacagatccttgagagatgtcaaaatcctgcaatggtacattaaaaaataataaatatacaatttaacaagttaaaactccctcatgaagtaaaccatacagattaatgtaaacattgtataagctggcaaattaacttttgcctttggcgtcacctataggctatagctgctaatgctattaaagttagcttagacattatatatgtccttcaacaacacttccaaatagcagccttacatagtcaacacattggttgataaaaagtttcaacatagcagatccatccatagttgcagaaactaatgggataggcaaccaatgaagagaatggaaatgggcaaactaacagatgttggattaggcaatcataaaacaccatctcaagcgtgtgttattatgcatagcatgcatttcagttcatgtacgaaatcctaggaaatgaaaacttactggtggtattactggaagagatacactggcatagagaaggtcaattggtagcccacgaaacttgaatttcataactggtacatgagcatcaggtacaggttgcagttcagtcacttcttccatttctgataatgcgccatatagcatgacaaaaaattcctcctggagaaataatactgttaatgtccatcatgaagacctaagtaatccatagacagcatgcaacaaaaagaagacttcacctctcgtttcacatatgagggtccaatacatagtgcatcaatgtctgctccaggcccatgaacctaacaaaagaggccactattcataaagtacacaaaggaaaattgatctactaggaaagtacttacagcaaccaaaaaatattattaaatacacactcttgttaccgtgagttcccgctgataaacagaaacaccacttttcaattttggcggtttaataatctttaataggtatctatgattttatttgtgccaaacatgaccaggaatgattctcagcaatttgtgagattattattgcactaaacagtatattaggaatgtattgttagagaaaaggatgaaaaactttaaactgcataaatatagcaaattttattcctgttttggcatgttaggcttttagacctatccagtgaaggacaagagagatttctagttattaatcagttatagaaaccataggaagagcttccaaaatacattagtacgtgatggagctagtttcgtttgtggggttttttctgttttggtgcaaaaggtctttctctacccttgggtggttgtgtcgaaataagaatcgtatttcttcttatccactgaagattacttttttattctttctttctttattttttatgggtgttatttgttctttgatgtcagcctcttggacatcttttgcttaggttcagctaagtagtggacaaacggaaggaaatgaatatatggatctttcccaaaaaacaggagttgtccacactatcaggtttccttacaggaaaaaagctaccatcaaccaagcagcatctactacctatgcaatagattgtgaaccacaaatgaacagactctaaattctttctacacagctcttgtctcaaataataattatcagatattgttctactccagtctatcatcaatccagtaaaagctgcacaatttgaaaatagttgctagctccaaagaaccaagctagggtatgttattctgcttgaacaaatcaagaaaccaagtatcagcaacaacagtacttccatagttatattcaagttgtatatatatctaaatggaagctaaaaagactgacaatttcaggtgataacgaattggttgtgcttgactcactctagaaagaaacatcaacatgatcatttaactgtggtagaaggaaaaaggaacaaaaagaagcatttacccccagtctgtaagatccaaaagtgaaaaggactgcatttgcctctttaaccatttgctcactatatcctttctgaatagtgaccttcttcacccattccttgactatctgcaatatcacagacgcagagaagacctcataaaacaacaagaaagggctaattcttatacaaagaaaacaacatgtgagcatatacaaagttaatctgcattaccatgcgcaggtaatggcaagctccaaatcaagaatattttgttcatatattggtagttaggacttttgtgccccagaggaagcactagcaattggtatatcgtactcacgcaggcatcaacacattcatgcacagtaaatcattttggttagaataatataaaaccgaaacaacacaagcgcatgaaagcaatgctgcctaagcaaagtccggcaacaaagtgcatgaatttaagcgataattacatatccccttttgcgcccaccgcctaactcgtataatattcagagatatcaagttacattgggttaacaaataactagcactagccattgatagcaagtaagagtggaagcaacttaattacctgatcaatctcccgaagaacctcctcccgtttcgcggactcctcctccccttcataaaaggccggcttcaaccaagaactgaaaagcaaagttttcttagtgacacaaaagcaacatctatcactagtaaataacatatgcatacacctacgccgcaacacataatcaattactaacagtggatagataaataaccttctccaactcagccgtcttgtggagatcggcgacggtcggcatggccagagacaagggcggatccgcgccgccgccgccgccgctccgcttcggggacgaccgaggcttccccctgaccgcgacgaaagatcccgccattgaaaccaccacggaacccacccaaacaaacacacaaacaaaccctagacgcgcgagattaatggagtctccccccctcccacgcgcagcagctacctacctacctacctacctacctaccactctaccagtgcctcagagaccacgaatccccgccgggatcacggcgaggccgtggattttcctctcacgaaaaaccgaagccacgcgcctcaagcacacccctcccccacccccttggatggcggaatcctaacccggccgggttatccctaccgcgagcgagcgagcgagcactccggtatgacgagtgtgcaaaatcgcgccggcgagcaacggtggtggggtggtggcggcggcggaggaagaaaaaggtttcggttgcgttgcgggcggaggagaagagcatgaacagtggcggctggattaggacacgaggattgcacgtgacaaattttcatttttcctgttaagagtaagacccaatcgcttatatacaaagctgccgagaattgagcctcgaatcagcgtttgccgctggcgtggcccttgccggggcgtgacacgtcgtccggcccttctccggagctgaatttggaggctgcgcgttgcttgcttcctccgtcgttggatgcccatcgtgcgtccatgcctgcccgacgctgatcattttgcaaaaaagcccttaaactaattgataatttggttttagatctctggtatacagtttctacgttctacgttattacgtataggacctctaaaaatgaaatgttctaatcaaagaagcaaaaaacagaaaataggactgcgctcgaaaacatagaaactaaggggcttttctgcaacaacttgcatccctatcccggtccctcaccccacgaaaccctagccgccgccgttccgtcacctctctcttctcgctcgctctccctagaccacaccgncgnatncgcctncggctacgaccactcttnttgcacccagccaaatcgccgcacctcccccttgccaccgcgaggccagttccggcggagggtagaccgtgctcgccggattcgggtagccacgacctccttgccggcggatccggtcacccggaggcaagggcagggctagcacatgaggctcatcggcagtgtcgcggtaagctccatggggaaatctctgctccccaccctcatctttcttgttgctctccttnctaccccctccccctccctctctctctctctctttgatctagagacggcgatagatccagagccactggatctgttgatcttggcggcggcgatgtggcaccaatctcagacatttcgtgtcatcggtgttgctggcttgagctcaatggtgacacgctcagtcagcgaccgacgagtaccttgattcggcggttgcgctggagctccatgaccaggtgctctatccggtgccgcacagctcgatttggcgtgttgggcggtcaatgatgagttcgtcgatccagcgacggttctctctgtctggttgcacgctactctgagtattccaacaccgtgctagatttggcgaaatgagtaatacggtgctgcacggaagcttgaagccgctccgaccggcggcggcggcatcaagcaagagtagcattgtatgcggccaaaaaaggtcgtctccatgtgcctctccactgccaaagccatacaggattcatgtgtatctgagtcccttgctgtcgttgccgccgttatgaagtcgttctcatatgtgacggtgaccagtgggcagcggcacagacaatgtttcagatggctgcctgcttgcctcttaccaccactcctttccttttttgtcatgctttctctttctccctttgtatgtgtgttgcagccttgcaggttctcacaatcatgtatttctgaatttgtgcaggttcttagcaaataactcagatttccttgagcatatcgtttcagaataaaaagcataag

SEQ ID NO: 13344 - DNA, 9296 bp, Oryza sativa
  unsure (1)..(9296): unsure at all n locations
ccacgtacattatttagggtatacactacacggcctacatgccattgccacgcgtgcgcagaaatcgacgcacacgatcgtaagcaagcactaaatttttctcttcagatgattccaaaaaaataaaagaaatcccctctagatgagggatggataatctactccctttgtttaaaatatattttcattatttaataattataaagctaatcatatgtttggaaaagaaatataagtacttaaaatttaacaattcaaatgattataaaggaatattttgactttaccttcatatttttctaaacaacctatagaatccttatattttcccacggggagggagtagcttgtggaagccacagccaaatacaatatgaaaattccaacgatatgtgaaatacattagttaatttcaaatgatagctatctgataacttattaaagtattagaaaaaagagcatctacgttcgctctcacagcttaaaagttctcatgcttatcggagaaacagtaaaaaaaatccaatccatatataaatacaatttaaaattagctaaaattcagaataaaaaaaaggaaatattggaagagaagaatagagtccatacaggtacacagtatagagctaattgaaattcggagttgaaaataagaaaattaaaagtagatgttagaaaccatatagaaatacaattcataaataactaaaattcgaaattaaaaaataaggaatattggaaaagagtatagaatccatatatgaatacgatttagaaataactaaaattcgaatttaaaaatttatgctccaaagaataaattgtttggtcaatttcatacataatttgaaattatgtttgtgtgtgtgtaagaaagtatattgatgctaagtgtgtaatctgaacggttcaccatgctagtttagactaaaagaatagtccatataatttggaagaattcttcccataagacttttatgattaaataagcaattccaatgtcatcagtaaatataaatttttctcttcttttcagaatatgcattatcattttacgatggtttaataactctgaggttcaaaattattattaataccttaataattttatgtttttcattaacatttaccaagttgtactttataccaactcattgtacttataacggttattatttagtcctaaaatcaaaattacaaatattattggatacaaatatcagtcccttggatgaaaaacctaaccaccacttttaccagctgcattcatatattaacttattaaagtaataaagaaaggagcctgcacgtttgctctaacggcctagaaattctcatgttggaataggagactagagtccatacaagtatacaattttgagcaaattgatattcaggattaaaaaataagaaaattaaaagttagcgtccatatagaaataaaatttagaaataactaaaattctaaattaaaaataagcaatattgaaataagagtctacagtccatatagaaatataatttagaaattaccaaaattcagaattaaaaataagaaatattgaaagaaacatctagagtccatataggaatttagaactaattgaaagttggaattaaaaaaataagaaaactaaagtagagcttacagtgcatatagaaatacaatttagaaagaatcaaaattaaaaagaaagaaagattaggataagagtctagcgtccatacagtaatataatttagaaataattgaaattcgaaggtaaaaaaaagaatattagaagaagagtctatagtccatataggaatacaagttagaaatacctaaaatttggaatttaaaaataaaaaatattgaatgaagaggtagaatccatatataaatacaatttacaaataacagaaatttggaattaaaaacaaggaatatggaagagaagactagagctcatacagaattacaatttagaaataactgaaattcagggtttaaaaataaggaatattgaaagaagggtttagagtccatatatgaataaaaaatataaattgtgaaacttaaaaattttaaaataaggaatttatattagaagaggtgtctagagtccaaattggaatacaagaatccagaaataaaaataataatgaaccactatcacgtatatatataatacattatacattggttagtttggtcaagttcatacataatttaatattttgttgccattttaatatattttaataataaagtgtgaatatatatgctattatgtgaaaaaatgtaacgatgctaaccacacaatctgcgcgggtcaccatatatggtagtttacatgatgtgattacaatttttagataatacacgatgtgattacatgatcatgatgtgatatatattgtggttaattagatgagaaataagttatttattttccttccaagtgataatcataatatattccaagtgattgtcttccactactctaagaaaatgattatgatttgcatgatgcttattatcactactagagaaaatgacaattttggaaccggcactgatgtgttccccccgagttaaaaaaaaaaggaggccaccttgaagcatcggctcgaatcgagctgatgcttcgagtgcccccattcccaaccccatnngcnatntnnccccccctcccccccccccctctctctttttttttttgaggagaacgacggcaggagatctgtcggaatttaattagaaaggggaaaacaatacaaagccagttcagtccagaagaaattaaaagaaaaacagtacaacaatacacggcacgaaacaataaaatttaatgggcctaaaagccgaggtacggagatcaagatcttgttttacgatatatgccactgctctctctctctgagattgaaatattgttgaaaactcttctgtttctttctaaccaaacgttccaccaagtggtaagcagagctcctctcgacgtcttcttttgctccttcgatcccacgcaatcaatttgagcccaccaatctgaggttccgacagaagggccatgcaaaatcaacaagagcacacgagcatatgcacatgtcaaagaagcacatcacatactatgaagacaagaacaagctaatcacatcatatatcagaacaattcataacatagatcaaaatcttgcactatggctgaccattgcatgttcaacatatcggactcaccatcccagaggatctgtcatcgtcgttgtagattcccttgctgctcatctcctttgagtcgccgctgtcgccatcaactccttccggtcagaccgccagcccccaagcacgtgcgaggtgatccatggcggtgaggtcagaggcggttggattcggcaagccctggcctcaagaagaacaaatccggtggtcccggcctccaggtgactggatccggcgcagctacggagaaaaagcccgaaggcgacgaggaaatggcgaggaggagagtgcaccgccagggagagagctcggaggtagcaaggaggagcgggcaccgttatggacaaagcgtggaggagcagcgatgtctccgggggagaccttggaggagagatctgaggaacagtgagaagatgttgggatggcattcgcaaaaaaaggagatggggagggcgaggagataggatgaggctagaagacttgggctctgtttgtcggggagacaggggagattgagtctcgttttccacgcgcacgcttttcaaactactaaacggtgcgttttttgcaaaaaaaatttctataggaaagttgttttaaaaaatcatattaatccatttttaaaatttaaaatagttaatactcaattaatcatgagctaatggctcacctcgttttgcgtatctttccaatctcctcaatcatcttctcctcaaacacacccttggggattgacgaaaaaaggagtaggccggagttaatttttttctcgccgccacctattgatgccggtttttctctccatttagtccatcggtgccaagtttttttaaaaaccagcactgatgtgatcagggtcgggttttttagaatgcacacgagtttggagggtacgaaataatctttatcagtgccgggtttaattaaaccgggaatgatagagacaacactgataggatgttctatagtagtgttatctcatgaaaactagatagcgtagtgctgaattcacatgtttccatcagatcgagcatcttttttccttttgccttggcaagttggcatcagagtatcattcactggagtatcggagaaaaaattgggttcgtcttcctcggcagtgcctatttaagctcaccccaccccaccccatgtcttgagcatccaagaatgaacatacttcacacaaaaattggctatctacaacattctcgccatcttactactactgtttctccccttaaagtccagctcccaatcgacggtgcagcccaacaccgactgttgaagtgtataaaatgaattgcccgtctttccctatcagcttaggcttttaggtgcaactggctggtgcatgcaacttaatatggtatcagagccagaggtctcgagttcgaatcctagctgacgcgcaattaaataaaataattgtagcccactctaatattccacgcttgagacttgagggggtctcacctcttcctcccaagtttccacatagccaaaccaattccagcctccatttacagcctcaagaacctgacttccatagacctctcttacaacaatctcaccggtgatttccccactgtgctatacgcttgctcagctttagagttacttgacctatccaacaatcaattatccggcagactccctgacgacatcgacaagctgtcctcagatatgcagcatctcaacctgtccaacagcatcgtgcccatctccgtaatcgctggtggcgtggtcatctttgccgtaggatgtgttgtcgcatcctgcagatgcagggctcgcaatgacgacatgactcctatagttttaagtgataaaatggaggatcatctagtccacaacgctgtggacgtaaacaggatcagtagcacaggcacaacgacaggagacccactgtaccgtttgggggttattaacgacagcagcgacacctacaggagattaactgtgaagaagatgcagaacgagaccaggagtgtggacgccgaactcgagaaccggcgccaaacggaggagaccacgctcggcatgatcgtccaccccaacatcattatcctgttaggctacattcggaggaacgaaatgatcttgattctgtacgaggacatggagaacggcagcctggacaagtggatacaccacaacacgcaggccggcgagaggcgcctgcgcccgccgctgggctggcgaaagcggctggccatcgtcattgacgtcgccggagcaatcctctacatgcatcacggttgtcgaaggccgatcattcacggcgacatcaagccggccaacatcctacttgacggcaacttcaaggccaagatctctggcttcagttatgcccggatcaatcttgccggccgcaacacgctgttgggaaacgtccgtcttcatgcaggggccttcgggtattttgctccaggtgaggcagcataattaattaatgcgtacgttcccaattcagaaatcgttaaactagttaacgatcatgttacttcaggattgactggctgccatttaattttgctgcagagtatgcggacaccgaagtgagcgagaaggtcgacgtgtacagctttggcgtcgtcctgctggagatcgtcacgggaaaagtagtcaacgatcagcacggccatctgacgacatgggcaaaagcctacttgaatacatgggcacggcaaggctacgacgataagttattcaccgacgatgtccttgacaacgatatcgcctctgacgcggcacggtacttgaaggagatgaaggccgtgttcaagctcggcgtggagtgcaccatgatggacccgcagcgcaggccgtccatgcagactgttcttcgacgcctccgccagtgtgcccgctggtggagacgattcccctgtttcgtctgatcgatcacttccatatcaaatcgtcttgtttattacccctccgtctaaaaaaatcaatcctacctacgaacatgtacacacgtgttcactagttgcatcattttctttctgttacaagcaaacattctcgtgcattgaggaggacgggtaaaatgttcccctccatgctttagcgtattcagatttctagtgtcagctaaactagatgttacctcgtatgttgctgtgagactttgtgtgaacaaaatattatatgatttgtgaaacgtgaaaacaaaaaggtgaaaaagaagccattcaataaagagttctacatattggtgggaacataatatgcaactctgagttgtttgtgcttgcgtggttagcgtgtagtgcttggacatgtactggtgtactgtcgtattttttcttgtaactttttctctttcttaatgtatccggatgggcggtcttcctgccgaaaaaacttaagcaatctcttagggttgccaatatgcataaaggtaaactgtactgttgaatttaaatcagagattgaatagaaatacatcatgctaatttggtaaacagcgaatggtaaagtggcaatcacttaaaattttattgaatgaacggatgtcaatccatatcatgactcatgagtgaaactagcagggtgccctgcgcaattacgtggctagtatccatataaaattatctattttttaatatatgatattacttaaaatttgttaaatagccttcacgttgtcttagaaccttaaaagattgaaccttatcatcctttaatttttaattttattgtttttagaagtcatattagccgctacctcttactcttgtatcatccttctattttgtttgcctgatctaccacagcttctacttatccttcttgaaatcttttaaaaattgggttaattaattggaccttctagtttctagagtccattgtctcatcgggttctgttattataatttttagaagtgtcatcaaacgtcgccattgtactcctccataacacgtccgttgtctcccctatttactgttattgggattttaaaaattaaacataattatcgttgggattcatttttttactttatagaagtcccgccaaccgccgctacctccggcactatactcctgtatccatatggcccgcgcattgccttccctatttattatcattgagatttaaaaatcgaataagattgtcattgcaatttattttttactttctagaagtcccgccaaccgtcgtgaccttgctacctaccggtctatttatcgttgctccagttaatcgtcattgggattctatttgtggttttgcttatagtttttagatgttccatcaaccgccgccattttacttttttgagaaaatcccttgtgtacccctaaaattttagctaatcccttctatgcccctgaatttttcttacttccttatatacccccataatttgattttgatcccttccatgcccctcccgtcagttgaccgtctaatttctataaaaatgatcattttaccctttggatgaacatacaaatttatgaattacattattggaaatgtaaaagtttgtcgcactagactattatagtcatgagtttgatgtgtgatacattatttatgacaaaatttacttttagataatgaaataaaatatatgtatttattttatttttaaaaaattcataaaaatgaggagcattcatacaaagataggactacgagtgctcaccatattctttttatgaatgctcccggtaaaaaaatatattgtcctattgaatttcaaataaaaattctttttttattttcaaaacttttgtcaaaattttccgcactaattatttagtttcattttctacctaaaatgcacatattgtgcactcaactgaaattttcaatcgttttcaagcttatattcaaacctaaatcatcaagggcattaaagatatttgccaccaacttaacggtgaattgaaggaaaatgtgattgtaggggcatggaagggatcaatttaaattttcaggggtatagaaggaatcaggtaaatttgagaagtataaaaagggattgagtgagttttcaaggatatacagaaaatttactctactcttttacgagtatattgcttctctcctttttatagttatttgtcattgttgagttttagatgaactactttttttatgaaaatttcttatttttcattgcaatatttttttattacttataaagtttattcctacttgaactcctataattatttttatattttttaaaaaaaattattttttatttcaaattttaattaatctcgtattccgttctatataaactcttcttccaacgttacttatttttagtccgaatttcagctattttaaaattgtatttctacttgaactcttataattattttttctatttttgaaatttattttattttttattctgtattttgatttatctcctattcgattctatatgaaatcttcttgccgcctctcaccccgctgctaccggtgggtaaagaagagaaaagtagacagaacaaaaatgaaaagagagaatagaagaaaaaagagatgctgactaggatgtgggtcccacatacttcttttttctttttgctatctagcatgccacgtcaacgaaaccgggcatccaaactgtcttggaacctttttttgaacggttttacatagttgaggggtactcattttttgaacggttttacatagttgaggggtacacatttctggtattacggttaggggatcccacagactcctcgtacaattgagggacgtcagataaacttattcctcttacaaaacacttcttttttttgagaaacacagtacaaacgcaggcgcacactcacccctatgaacacacacatgcacaccctacccctatgagcacctccggaagactgggccggcatatcttgagattgtttttttagaaacacagtacaaacgcaggcgcacactcacccctatgaacgcacacatgcacaccctacccctatgagcacctccggaagactgggccctatgagcacctccggaagactgggccggcatatcttgagattgtttttttagaaacacagtacaaacgcaggcgcacactcacccctatgaacgcacacatgc

SEQ ID NO: 13345 - DNA, 590 bp, Oryza sativa
aggggtccactgtatcaggcaacaactgtgcagcagttgccactattggtttggttgatgaaacaagttgacctggctgcttgatgcccaatgttgaaaatgatccaattcaaacaattttagagcaggcgcttcagtaaagtgtggttgagaagtatgaaagagaactagaaggaattgaaagcttggcaagtagcaactgtactgaattcatggaggttccagaagtggtcgctggaccgatccttactgagaatggtgatatacgcttaagtggacatgaagtgatctgaattggccttccagatggaggttttgctttctgtgcactcactctgtactgtgcttatcctttcatttcgttctgcttaaattgactgacctataaatatgaatatggtgttggattggtttgcaaagatcttttcaggtgtggatccggatgcatcccaggtttgaaagcattcttgaggcatgtcttgtactctcacccttcaaatttaacatttaaaatgttctttttgtctatccggtgttgtttggcaccttctctgccatggaagagctcgtctgtcatgaactgagcaatt

SEQ ID NO: 13346 - DNA, 2087 bp, Oryza sativa
tctgggtagtggtgggggtgcgactgctcctcattctctcccgctcgcgcgctcaagccgctggccaccgccacgtccgccgcggcggccgcgctcaagaccctgcgtgtgctagccgccgcctcgtccccgctcgtcgtagtcatcgcgacgtccaaggcgacctccaagtcctacaaggcggcatgcacactcagtctcgccacatgcctcccttccctcccttccgacaagtgcctgaaggccgcctttgccgccgccacgtcgcttctctgcctcacggccggcgcgccgcccccctccccccgtcgcttcccccaccgatgtcgcggccctcgtattcctcaagtctgggtacaagctgtccaagaacacgacggcgacgacgaagacataggtggatacagccgtggcgacgacgacagggaggatgcggcggcgacgacacgggagaagggaggcgacggcagctacgacgcttgagaaaggaggtggtggctaaggcatcccgtgcgacctcgtggtcggaccgtctgagtggcccgggaggcgtcggcggcggcggcgcgggcgagctcgaggatgaagatcccgcgcggcgacgaggtgagcgaccttgacggcatcacacctgctgtcgatgacccctacctccccgtcgacgcccgcgcacggccgctgcacgcctgcaccgttctcgcctcgctatcgcctccccgggcccatctttggccaccgcggagctccgccgggaggccgccgtgctttctcactgcggccgctatcgccgccgtcgcggcgctgccctcctctcccgcctcgccccgccgaccggcctacaggtagagagagataggaggaaccgaggaagaaaagagggaggagagagatgatgtggcagcctgacatgtgggcccatgtgggtcccacactgactcagccgccacgtaagataaaaccagggtcaaaaccactgaaggacctattgtgatcggttttgattagttaagggacgctggatatctggttttatggttgggggacaattttgtaactcaatgataagttgagggaccttcggtgtacttattcctcataagtatttgctccacgcgctttgcattacgagtccatgttagtgttagactttagaatttgttgggctggccatgtaaattccatatctcttctggaccaaaaacctgctcgcctaggcccactgctcgcgcctaggcccagtgtaattgcattgggaaattgaaaagatttttttaaaaaaaggaagaataaagcgcttgaagtcactcgcactaaataaattatcatctaatgaattgaaagaaatagcgtcaaacaacactacaagttggaaactggcctggccaaattggctatgtgtggtcgtgcatccagttcaactgagattccaattaattctagagtcgatatagtgttcaccagtttttgaaaaatatacacatgtgtgtgcgtccaatgaattcatgtgtaccacattttgagaatttgtttgggcaatttgaaacatcggaaactaaattgatactagagcaaaactctacgtaccgtatcggttattcacccttaatatacctacaggtacagaaacacgaatacttactctactataaaaaaattcacggaaattttagcagcaaattgcaaggtttgtgtaaatgtatgaaggaggatatatacaaaaccaaaactaggagcaagcaaaccgcaagatgagatatttttgggagaaaattaaaccacaagatgagatctgaaagtcgctagagtccaactatccataacagttggagacttgtatgcctcgccaaccttgtataaataagatgcaaggccatgtaaattccatttctcttcttgctttccatgaatatgctgctggtctcctcagaaattctccaacaatatatgatgacgaccgaggcaactctaaataaacctttgtaccaaataaaatgtcaaatcgtacttctaacattcgggtattcatcgagggtctaatttaagcttagaaatttcatctgctctctctgatcataaccatttaatgt

SEQ ID NO: 13347 - DNA, 3636 bp, Oryza sativa
cgactaaaatagtattataacatatcttatagtgaaaaaaaaaagcttatactccccccgttttttaatagatgatgccgttgactttttctcacacgtttgatcattcgtcttattcaaaaaatttacgttattataatttattttgttaggagttgttttatcattcataatactttaagtgtgatttatatcttatacatttgcataaaaaattttaataagacgaatggtcaaacatgtgagaaaagtcaacggcgtcatctattaaaaaacggaggtagtatattaaaactctaaaatcaaaatagttctttatttgtcaccctagttgatggcttgacgccattgcaaaaccaaaatagtcttctagttatcattcgcaaccatgaatggatcgcggggactttggggctgtttggttcgtgtcctaggggccacgcctgagaaaaacttacgccgaataggcagcgttgggagatgtaacacttgcctcatcaggcagcctgaagctttgtgtgtttggttcgcacacatgcctgaagaataataaaatatcaaaaagcaacttttaccagagcaaagtatggaataaatgacacatgcatcattaagagtagctgactgaagctcaggcgtccaaattcgatggcctggctcaggctaatgaagttgcctgaggatttagcaagctaatgaagagtcaggtcaggctagctcaggatataacagcgcacaaaccaaacacatagttgttggagctcaggcggcgctccggccaggcatacaagcatcaagacgcgaaccaaacagccccttcctccctataaaagcagaccaagaggagttggtctcattttcttggtaacaacaaccacaatactccatttgtcctataatataaggtattgtgttattttttagaaaaatgaagtaagtgctttggtttagtgctaaatcttgccctaccaaattgtttgtacatgtgtaatgtttaaattgattccaaaacttgccaaatcaatagaaatatgtcctaaaatattggtagttccaaaaattatctaaaacttggcactaggtaaggtggcaatccaaatatgctcacagtaaaaggatatgtcctcgaaaaaagtaaaaggatatgtgatgttacaaaatgtgttaggtgaataaataaaatactagtaaaatagtgatagatgtgaaataaacagtataaagatgataggtgggggagtaaagtactagtatcttaggaccttagagcaagtagaataaaagaattgagtaggctataatatctccaccatgataaaaatgatgagccggagagaataagaagagagaacttgagagggcgatcatattagcgtcgactgtatttagcctttgagactaggtgagaccattgtaattggctaaacttagcacatgtcggtggatctggatcatctaatttactaaaggaacgttacatgcgtgcagttatgctatatttgccatccattttcatctgacagctcctgctggctctcctccttgttcatatgtacaaaagaacttctgacaacattattggatttaggttaaatcatttagcatcatctaccgtgaagtgcgaataaaattacatcacgatattgtcccaaagaaaaggcagcattttggttcatgtacaaaagaacttaaaaaattaatcagtgtaatttaaaattagattaaaaaaacctctaagccaattctaaaattaagctctaaaatttaaaatagatttcctctttgtaatgttactggtgatatttattttgacaagtgcttttatttgtaagtttgatttacaagtgctttcatatgtatgtttgttttaagacaataatcacaggctacaattaaattttaactattaatattatattttataaatattaatattagttttacccgttacaacgcgcatgagcaatactactagtattaaataaaatacaaccattaaccctgaaaaagaaagtacaactacaaattggccctaatttgttaatctcggggtaggaaaaccaaacaaactctaatccccctgttgcaattccaaatccccgaatttgcatcgccattcgcacatgccacaacatgtgtagcactagtacaccggtagacgtgacgtgagcaatgagcttttcggccgtcgcgtgcgcgagccgccggctgctatgcctatgctagctaacccaagtcgagtagtagtagcaaagtccgacccgttcacaccatcaccatcaccatcaccaaatcgatctaaaaatactcgccttcttctccacccgagccgagcagagcagcgaagagggcagcgaagtcgccgacgaggaggaggagaaggagccatggccgccaggagcttccaggcccggtcccccaaggaggagtccgacgccgccgtccatggtaatcaaatcccatcccactcaccaagctccgaaatccccatccatggtagcgggatttcatcttcttgcgcggaggaggaggagggatgaggtttagatgtagtagtagtaggaaggacggtgtgagatttcttgggagaaagagagagagagagagagagagatcagatcactccccttgattgggggtttttgggttcgccgcgttgtcttcccaagctgtttatagtggctatctgatgatcatggttcaattcggctctgtttatctaaggcttcccacttctgggtgcctcaaacacaaattcacttgtgatgttgctagattgtgtgtgatatatggtatgcattgttggttgaggagaaggcaatgtataatgtatgtagtgtgcgtaatggttcggtgaagtaagctgcctgagttccgaattccgattcatgtatgcgcggttgcgcacaatgccagtatggttgatttctttgtgttctgttcattgcagaggcagtcacgctgggattgaagaacgcagccatatctggtaccgtggttgcggtccccacggtatgtactagctgtttgtcatgccaatgttatgtagtttcattctttagatcaatagtatatagtttcaagtgcaatttcttcctagaagaaacatatgtacgttggccacacattatgttttttttttcccacctttacaaatcattgtttccatcaagtgtttgcatcttcgtttcaagtatcaataataatgacggaaatggaaatctagtctaaattactactactaatttattacaatctggctcaatacctggtcatatgttggaacactttgattcatctggctgcatatattctgacatctgcaaaaataacatttctgctgcagttggttggttgccgtgtccttccttgggctaaggctaatctcaactacaccgcacaagcactcatcatatcagcaggtacggtttactatactactgaaagttatcatttttcaaattgtattatactagttattatgaccgaagacctactataaagtgctaacatctcgtagaacttattttactggtaccttggatattgggctaaacctaatggagccaatgtcactattttaacttgctggatatatactgttttactccctccgtttcgaaatgtttgacgccg

SEQ ID NO: 13348 - DNA, 4381 bp, Oryza sativa
tggtcaaacagttcaaacaaaaacttaaaatcccttataatataggacggagggagtataaggatttctagaatttaaattttataccataatataaatgtatttttgtgctaattccaatgaatcccatcatttcaatgattccatagccaatcaaatgcacaatgtgaaaatatgagcggatcttaggacatcaacaatgtgaaaatatgagcggatcttgagcccctaagacgtacgcaattcaaaaaaaaaaattgccaacctcagaactatttactaaatagcctaaatatccttataatttggaactgaggtagtactaacaacaatcaatcccaaattttttaactgatttttttactgcagcctactcaactgaaaactcagcaattcgcatcgatctcccaatgaggtgctcatgatctaccgcgaaatgcgatcactgcaccggcagcttttatatatactgaaaccatcgaattaaactgagttacaattggtgatcgataaatagatcaatggcattgattgatcttaatccgcagctaacatcgccatcaaaccaagccaaagctctaactggttaactgaccacatcttggctgttcatatgctccattgctagagcttgatttccagcaccaccacccgagctcctcttcagctcctcgcacatctcctcgatcattggcttccatagccgaactcgagcgtttatgaaccaattcgacacctaccatcgccgcgcaaatcgaccgaatcagccacggaaaatcaaaaaaatcatgctaaaatgtagtacaacaaatgtgttttcagataatataattcagccaagaacatgatcactgggtctatgatttatcatctttgcagttttgtttcgtcgaaaatgcggagaagcgtttggtttacgaatcatttttgtttgacaaaagtttggaaatgagttgtatatagtactcccttcgtttctaaatatttgacaccgtttactttttaaaacatgtttgaccgttctttttattcaaaaaattaaataattattaattttttcctatcatttgatttgttgttaaatatatttttatgtacacatatagttttacatatttcataaaaatttttgaataagacgaacggttaaacatgttttaaaaagttaacggcgttaaatatttagaaagggagtattacctggttcctgctgaggccgctccttgctgcgagcatctccttctcgctgtctttcggatacctgacgcaagaacaccaaaaatgaatcgaatcagattgtttgatgaaggtgttcgatcaaatgcgtgatgtggcaagatcggcgtcaatggcggcgtgggtggtgcttacgggcggaggaagttctcgaacatccaggccttgaggacggcgacggacttctccgggaggccgcgctgcggccgccagcactgctgctcgccgcgccgcagctgctgcaccgcccagtgcttctggatgaacgccgactcccagctccgctccctctcgccgccggtcaccgccgacgacgactcgccgccgcggcaaggcctgccggccgcggcggcggcggacatgatctcgccggcaatgcggcgcctcaggccgtggtacattgccgacacggcgcggtgcgcgaacggcgcgcagatgctgctgctgctcatcccggcggcgcgcgccgtggcgtgcgtcagggtgttgaacctcgccgtcgtgctctggatctcgtcgaggcattggttgtacttctgatccatctgcgcatttgaattcgtatcgtcgtcaaaagatggtttcaaatttgattcgaaatggtagtacgaaatttgcttgaactgatgcctcgggagtcgtgtggagaagggcgagctcaccagctggagcatggtgaggagctcgctcctgagccgctgagccgaagcgtcgccgccgccgtgcgtgtgctcgccggaggaggcgatgagctggttgttggagctcacggcggacgacggcgcgccgccggccaccgagcagctcgacggcctcgagctgccgctgtcgacgccgctggccgagtcggcggcggcgtccgcgacgccggccagcacgcagccgacggcgtcgttgagcacctgctgcgccaccgcggcgtatcgggaccgcgccaccaccacggcgaagttcgccgccgggtagtacggtacgagcggcggctcgggctccaccaccaccaccctgctcatttgcgtcagcccggaacggctcgccgccgacgagcactggtcgccgccggcgttgagcatgctgtccgaggacgacttggagcacaggctcagcgacagctcgctcgccgccgccgccgcggacacgaagccggcagcctccggcaccccggcgaggtaatacgaaccaccgtgcacaccggcgttgctgctgctccagttgcagctcggcttcctcgccgacgtcgagcaccaccccgccgccatgtcgcccggctggccgtggccgaggcacgcgaggctcaccgcgccgccggagctgtcgccgacggcgacgtcgtacccgccccccatctcctcctccggcggcgtcgtcgcgccgaggtagtcgccatgcccgtgcgccgccgccgccggcgcggcgccgaacagctgggtcgccagggacgcgagcacgaggttgttcgccgccgcgaagtgcgcgccgacgtccatcgccgccgccgccgcgtcgccgtagccgaagctcccgccgtgatcatgcggcggcgccatggccggatggaacagcggcacgtcggcgccattgccgctcgccgccatgaagtagccgccgttcatggcggcgtccaccgcaccgagctgcgagaacgatggattgccgctcatggccgcctcggaaatctccaagaattgcagaaactagtgataataatcaaaacctgagaagaagaagaagaacagcagcagcacacacgcatcagacattcagacacactgttcttcacgagatttttgttgttcttttgacaaatcaggcttgtactaggtgtacccttgaaatcaaagtttttgatcttttcatctactaccacttttagtttttaccttcacagtagcaaaagaatcaacagtacaagccacaaatagatcctcacagaattgttccattggaacaaaaagagattcaatcttgcaactaacatacaactgatcttccaacttttaaaacaagaatcttttctttttctgttctcatttgataaattcataaaataccagatgaactgatgcatggtgaataacacaatgcatcacaaagatgaacaaaaggagctgataccagaggtagaaaccaagaagacagtgaagcttgagttgttgagcacacttgcaggacctaaaatggaaagatgaagccttccaaaacccaaagagaccagcttccagcttctacttctactaggaacaaggaaacaattggggcagggagaagtgttatcaacttatcactcactcactacaagtagtatcaggtaggcctaatgaccaccaaagagaaagggaaagggaaaaaaccaatgcaaacatctcaaggccagcaagggagcagctctccctgaccttgacactgggtcagaaaattttttggccttggaggagaggctatcaaagaaccaatgggccctactcaggaggcaaagtgccaatgacaaggtgttggtgcccatacacaactagtagtagctcactcattatactactgtaggagtattatagatgccgagtgattcactatccgattaaaaccatttataaaccgataaaatatagataaatcttgacaaaaatttaaatttagtttgaaaattttaaacttgaccaaaagaccgagtagtttgtagctttctgacctggtcaagaaagtttggatttcaccggttttcatcggttttctaaacacagggcatacacctatggcttattactacttcctctgtttcataaaagataagataagacattttatagcataatgaatctaaacatacccaacatcacatctcatcttagataggagtagattttttatgggacagtgtaaaggaggagtggtgacaaaagcatatgggatttatcacctaatgattggtcactggggaggcaaaccataggctcattggtcagttatcctaatccaaaatacaacattgcattataaaaatgtggatcatgcatgtgcctaaaatctactaaatgactgtcccaccactcatcctttactacagttaaacaggtgctggcattgagagacactcaaacaagcaaggtaggtttcgcttaaactaatcaaaatccattcatggaaggaa

SEQ ID NO: 13349 - DNA, 7476 bp, Oryza sativa
atcctggaattaaattaagcccactatgtggctgcaggaaaatataacaaaaataaatcgtcgatcggtaaatttattgcttcgaaattaaacaatatacaataggatgcctctagaaacataagcaacttgcatcaaaaaatgttgagttcatcgatcatgacacataaacgtacaagttaagcattaaacacacgagcacaaacaaaaataaatattattgttagcacatactccctccatcccataaaaacgaatctattatcggatgcgacatgttctaatactataaatctagacaaatgtatgttcagattcgtagtattaggatgtgtcacatccgataataggttggttttttatgggatgaagggagtacttcctctgtaaaaaaacaaaccctagcatatcaaaaataatttaggaaagagacaaaaaaaactataatatccttaataaatgtaaaagttgtattgattaatatgtaggtgagaagtattgaaataataaaatttctcgatttacggattggtggtaggtaagacggtagaagttgatttattttgggacaaatttaaactctaggagttgatttattttgggacggagtgagtatattttcctctggcggtttcaaaacaaaaaaattcctctggtagatggtgcacacattaacaagtatagatatatccatcgctgtgaattattttgagtgtgattctaagcaacttgcatctaaaaaattgagtttatcatgacaatggcagatatctgatcattccataattatgtatatactgtataaaaaaatccccatatttttttaataatttcgtaccattagtgaatcctagtagtttctagaaagaaccacatgattcaacgatatatacattgctctcgttgaatacgattattatattttattagttgctacatgcattatcaccttctgcattaacgtacactttggacgtgtacttattacttaatctactcattgagcagtagtaatatacacccgtacgtgcaacttataattaagataatctcgtttcatgcggtagtttcacacaaggagaatactgctacaaagtcaaaaaactactttaatttacaatttggtcagattccagctagtttttacttaactggtccatcgaatctgccgcaaataaaggatgtattttgtagggggaaaaataaaggacatattttgaccatgccgtgtttcatgatgtatatatatgaacttgcagttttcaagataataaaaattaagttcgcagtatttaaaacatttcagcaagtttcataacttcaaacttcagtagcctgcatgcatgcaattaatctcgcaaatgatcgatcaatcgagcgtgctgttttagggctggtttggtttgaggcctaaattaggcttaccaatatttgacaatttcaatagtgttcagtatctatttggtttgaagccaaattttgacatgtctaaaaaaatagaccattttcaatagtgaatttaggctattttggcttcaatctaaacataactttgccttaccaaaattagtcatgccaaaacttaccaaaatttagcattgacaaaatttggtaagacctatttaggccacaaaccaaaccaacccttatctgccgtcagatgtcctcgcgattcgtgctattacggccccgatgctctcttctttctccggcaccctcggctcgtgatgaggtcagacaaggtggcagggggtgattgtcaaaaggcccagtgggacccacatgcagagacactcaagcaatgatcaatgctgacatgtctatctcgcaacactacagtgatgtagaaacgataaattggagaaggtacgaattaccccctcgaacaatcgtggtcgtctgaattacccccctaaaccacaaaaccagacattcttcatcctcaactatgcaaaccggacgaattaccccctcaacccaatacacggtggttttggtctacgtggcgtacacgtggcagtctagtcagtgttttttaattaaaaaattgtaggacccgcatgtaattctcttattcctctctctctcgcgcagcgcgcacggcgaggatgagcgcggggacgggcggtcggcaagaggctgcgccgcgtcggcaagaaggctctggctgccgaggtggatctagacgagggccacgcggcggaagagcgcgatgatggtgcggtggtgctcggcgcgttgagcgagaggtagcaggcgaggaggtcttgcaggtcctccaacggccggacgccattggtgcacaacatctcgatcatgctgtccaccagctccggctccgtcaactccatcaccaccgcctcgctctcgtgcagccacatccgtcgccgccgcggccgtcggctcggcttccccatgcttactgacgacgacgacgccggcaccggcgccggcactggtgtgccggcattgttgctgttgtggccaccgccgttgctgccgacgcgcgcgcggcagccgacccgagctccatgcctcatcaccgagctcgcctttggatctggggtggtggagcgggattggtgagtagaaggggctggtggagcgggattcccggtcgccatccatgcctgcgtcctcgatggaaccgcgtccgccagtctccgtcgccgatcctggcgcagggaggtgggatggggcgcggcacgaccgctcggaggaggagccgcggtggcggcggtgtcccaccgcgcgtccctgcgcgccactgccaaggaggagcccgctgcccaccatgcgtcctagcacccccacgatgaggagaaggagcctacggtggcagcggtgtcccaccgcgcaccacgcgtccccacgcgccaccggcgagtaggagcccactgcccaccgcgcgtccccgtgcgcccacgacaaggaggaggagcccgccgcccaccgcgtgtccccgtgcgcccggttggcctccgcttccttcgccggctgccgtcgtcctcgggccccctccgccacccacaactggctctgccccccgcgcaccgccgccgtcctcacctcgccaatcgaatcaacgatgcctccgcctctgccttcgcgccgacgtccgcgccgccacgctcgcctcacctcgctgaccgctcacgccgaccgcccgtccccgcgctcgtcctcgccgtgcgcgctgcgtgagagagaaaagagcgagagagagataatagagagagaggaagaagagtatgactggcgtgccccacaatttttttattaaaaaaacgctgactggactgccacgtgtacgccatgtagaccaaaaccactgtcgattgggtcaagggggtaattcgtccggtttacatagttggggttgaaaaatatccgattttgtggttcaggaggtaattcggatgaccgcaatagttcagggggtaattgatactttttccttaatataaagttagggcacgaaagaaaaagacaataacacatgattatgattaattgagttttagttactataaatttgaaaaaagaatttatttgatattttgaaacaactcctatataaaataatctcacgtaaaatatgtcttaacagtttttaaaaatatgctagtaataaaaatcgagctaaaatctgcaggttaatcaccaccgtacgtgctcaatgcatcaaatgaatcgcatgaacgagtctaccttaaaacaagaagaaaaaaatacagagagggccacttaataacgtgattagcaccggattaattactgcattcccagctaatgacgcatctggtggctcagctaatcacgtgattagcccttgccaatctcgtacatcctgcgtgccagctcatcgcatctcgaactggcactggcagctcatctatcttcccgcgaattgtgcgaagaactgggccgggctcatgccctttggcccattaggcctttctccttacagcaaaagtttaatagtagaactcaccacttactacaaatccatggtatacctaacctgtataacaggtttgctagtataaggttagctctatttttttttcttttctctctttctcacactataaattaaatgcatatttttgaagcatgtctagagctaactcttatatgagagccaacactctcatttttctttatctatcttacacacaagcatataacttatttataagtcactattatctttataattatatcgtctatgtaaaatgtgtgtcagtatgtgtgtgtgagagagtgtggtagcacggaatcctgcgcaagtaaaaattaggtggatttattttgttgctttgctagacttaaaatgctaagtattactttcgtctcaaaataaaattatttttcacccatcttacacataccaatacaaaacaaaaaaaaaagaaatacccttataatcaaatcccactacaactattactcaatttatctactcccaatacaattattattttttactttcacaaactctgatacaatgattacttaaaaagaacttatttttgtgataattgaaagaaactaaaaattaacttattacggaacagaggaagcaacaatttgcatatagatcaattatccagcggatagaaacgaaacagatgagatggcagagcttattattataaattttattagtagagagtgtgtgtgagttacaccatgcatatttaatcatccaaagtttagaaaaaaaaattaagatagcatactcgtgccatttcgaaaccttgagggttaaaaccacgcaactcttaccactacactatcaattgcatcttcaaatacaactacctttatatatgaattaggatgagtagatttatgggagaatatctaatatggtccctaaagtttcacttctgggtcattttagtccttaatctttcatattgttcaaacaagtcctttaaatttgttatgtgggctaatatagtgcttggtctcaccaaaacgccacatggacatgccatgtcaccttcctatgcaaaatctatatgatttgtccaatttacccttacgcatagaaaaataaaaaacaaaaggaaaattttttaaaaaaatatatggtatatgtaatagcaaaaatatacctcaaaagggtgaaaaaagaagtatttttttcctatggttatgtctaattcaccattatatttatttttctatgatatatataagggtaaattggacagttcatcatagattttgcatgaatgatgacatggcatatccatatgatgattttggtggatccaagaactattctaggctttatgacaaaggttaaggatttctttggaccatttaaaaggttaggaactaaactgatcctacagagaaactttaggactaaagcagctattctccctagatttgtaaagtaagctaagaaaattcaatagcattaaataaatacacttagtatgaagacttttggataagacattgcccctattattcttaacagaccactatgttttaatggtagcgggtatcttactaccaccgttaccaaacttaccaccgctatttaagtactagaacttaaaatggatctacagaggccaggaagaataaagaggggaggtagccaacaacaaggagacaatagtcacaagacggtgctcatcagtgtaccgtgatgcagactgaggatgaatcacatccccgttgtatttggacccatatatatgtgaacaaatgtactctccattcgacgacactggtagtacactatacataaaacatgggtgaccatgccatcctatcctcctcctgctgctgcatgacatgagccgtcagctcagaacacaacgctaacaatattcctgcacggccaagtggcatcacatccctctactgcaccttcagttggcagacattattatatcgttcagatttttgggtctttcttttgccattgtttggcacctttttttaggggaaaaaaaacctagaaatcgatctatattatgcatacagtaaatatccgtgatattattatttatccgtaaataaagagatttgcttcggtcaaaaaaaatacctcgttgtacttatcttgatgttcgttttgctggaccagagtaaatctcgtaaataaaacactaagccggcctcttctcatcatctttagacactacggtttaaatggatatggatcctccacggtattgtaggagtatttaaagtcaatgagatgggagcttagacgatacaagtaagcccacgtatcagtggctctcattaccctaatagtattgtaaagagtccttcatgaagatcatgaaatcagtttcacaggattttatagttcgatatcaacaggaaccatactatgttccagacaggctaacagggtctattgctaaatgaatccctggtatttttgctccaatgaactgtcaactctaacacgcattacgagtgggatgtttgcttgagacatgagaaccacgtttgtggcattcacctttaaccaagttagcctaggtccacatcggttgtccatattctctaataaactaaaacagcttataggggaataaaaagtaatttataggtaaaatttttatatatgtgttattagcgacttaaaaaccaatgctgaaaaaaaactatgttgaaaatatcttaaaatcaactgcaaaactaaatttgaaaatttaaattttagcttttgctttagcttgttagggtaaccgatggggctcgttgtatttggctgttaccccactttactataatttgccacatgtgtggccacgtaaatgcatgaattgccgcactctgccaaaacttttgttgtaaagtgagaatatcatcaaaacaacatttaaaattgttgttccctccatgctaaaatataaatagttcagaattttttcatgcgagaactaaagagaggggtgtttataattggttaaaataagaaagtagatgggcaacatataatggggaaattacacatgtatcgagtaattcccatggttttattctccgtaggattaatattgcaatcatgtatttttttggattcttattcttttttggattcatataattcaaagaagacctaaataccaaaagttgctatactttgaatggaggtagcacggttcatagggccgaaaccgaaaacatcacatgtgctctcatgtggcgatccgtggacgaaacctggaacaagaaatactccagctagctagagcctagatgttcaggtagctggattcagtgctgcaaatgcagataaaccagcaccacatttttgtaccttggcaatcccaaatccattcaaatttcacttcatagatgcatgattacccgatggatccatgctaaagaggtcatcctcccattcgcgctagctccagaaatactttactgctccccttaaaaaatattccctccgtcccataatataagggattttgagttttt

SEQ ID NO: 13350 - DNA, 802 bp, Oryza sativa
tgttgggcgcctacatcttcaccgaccggcttgccttcgtcgccgccggctggtgtccttgcctgcacggctggcctattatgccgccgttgttgggcgcctacgtcttcaccaaccggctcgccttcgtcgccgccgactggtgtcctcgcctgcacggctggcctattatgccgccgttgttgggcgcctacgtcttcaccgaccggcttgccttcgccgccgccgactggtgtcctcgcctgcacggctggcctattatgccgccgttgttgggcgcctacgtcttcaccgaccggcttgccttcgctgccgccgactggtgtcctcgcctgcacggctggcttattatgccgccgctgttgggcgcctacgtattcaccgaccggctcgcctttgccgccgccgactggtgtttccgcctgcacggctggcctttatgccgccgttgttgggcgtctacgtcttcaccgaccggctcgccttcgccgccgccgactggtgtccacgcctgcacggctggcctattatgccgccgttgttgggcgcctacgtcttcaccgaccggctcgccttcgtcgcacgccgactggtgtcctcgcctgcacggctggcctattatgccgccgttgttgggcgcctacgtcttcaccgaccggcttgccttcgccgccgccgactggtgtcctcgcctgcacggctggcctattatgccgccgttgttgggcacctacgttttcaccgaccggttggctttcgccgcggcgactggtgtttccgcctgcacggctggcctattatg

SEQ ID NO: 13351 - DNA, 21466 bp, Oryza sativa
gaattcctgcagccccatttagtacttgaaaatattgtctgaagttgttataatttgaaattcaaattcaaattatagaaacaaagtcatatagcaaaatgatcaaaacaaaagttgtagatattgatgagttatacaactttgttgttgatgactttttcatttgaaatcatttagtatttaaaaatgttgtttgaacttggggaggaattatggactatttggatgggcctttttaacttcggaaattccgacaaactttctggaatttttccgaccgattccgagttccgacggaaactgatattatcatattcgattccgtttccgaaaaaatatttccgttttcgattccgtttccgcgaaattccgaaaaaattccgaccggctgattccgttttcgaaaacaggtccggaatccggaaaaattccgaaccgttttcacccctacttttgtagggatgataagtcggtgcacaggctagctcatacatggattggcatctgcacggccagccagttgcttccatcgataagccaaatttccatttagcaaatatcatgattatgataattccattttattgtgatatgatgattcaagcttccattctatggtgatacggagagtagtatttccatgtacttgttgctatatctgtttcttttccattcgaatcatctaggaaatattattatgtgattaccttgccatttcatgatgacactgtggcaacacgcttccattcagatgagatacaattcacaattatttccattaacgggctagctgtaggattgatcgatcatctagagctaatcttccattttataaaagataatcaatgatcccttccatatatttatacaagcttttatatttggaatatggcatttgtgaggggtatgcgtacatgatgtacatcacgtacaccggctgggctggagcataggcaaccagtactatacaagtgtcatataatattcagacgtgcatacaggtgcatgtgcccatgtagtcaaggttgcaccattagtgataattaatcatcaattttattactaccatcgtttctgggatcaatattttaacacacctcatttctttttttattaaaaaaaatgtacaaaatatcatcacacagccacgtaggataaaaccactctggattaggtcgaggggggtaattcatatggtttgcatagttgggggtgaagaatgtccggttctatggtttagggggtaattcggtcgaccgcgatagttcgagggggtaattcgtactttttcctatatttttgcgcgtgtcgaagttggtcaacaccacatggcattccaagtgtggatcatctttgttgtgtgttgacaaaatttgtcttattataagaagatggtaataatcgtctaagaatagaccttatttgaaaaaacaaactacacagtacaagtaattatatattccctaggtttccatccattgaaattcgatgtttcatattcaagaagcgaatgttttcaatagaatatgactctattgcacattttaagttttgattttatgattttctctatttcaattattagggctcaatgtttcatcaaccaatattaactatggcactcgttgaatcatcggatgtataggtccttcgagatttttcttgttcatgttgcatatcattctcccgttctcccctccatgtcttgtataagtgaagtagaattggagatgagctgcttgcaaaagtttggctataaccatatgaatatctcaggtagttggattagccatgatcgaacgacacctgatcgagagaggtcggcagataattcactattattgcccgctcattaattccctcctgcgcccagctagtccccttaagttatctgtgctaccgaggctggctagaaaaacagtattttgaaagaagataattcactccggccggcttaataacaatattttagccttttagggtttgtctttcagcatgtctatggagttaacattttctagctaggctcttttctgtttttttcatctctttgtcgatgtctctcgctttcatggttatcattgaagactacgaaagacatgtctatcgggttgtcaatgattcaatcggtggcgttttgggtaactaatttgtacccatgtattcatgagagattgatatataggcaacactagccaacaattacctatctcaggggtctgaaccttattaaaaatgggagtacctatacatctttcgaaagatttttataatcgtatcacacagatttttaatctttgtattaaaatccgatagatataataaaaagcaaaaagcaattaagaaacaccataatgaacattaaattatcatatcctcaagaaaaagaccaaatccaatacaaaatttaaaatttacatgtgaagattcaaaaattacagtgtaacttacaaaagttacagtgtaagtttcataaattacactgtaacttacaagaaaatgcactgtaaatttgagtgagaaaatcgagtgagagataagaaaaaatctttcgagtgagatatagcaaaatcgattaaaaatccatctcacttcatgtggctacacacacctttatttacatcctcgtatcctgatccttacgtcctcaaaataaatcgtatatgtacggttcctgtggtagggatgtaacccatccatacatatagttttgcacgtactgaagttggtcaacaccacatggcattccaagtgtggatcatctttgtttacgccacgttcttttctaattaagatttagtttttagctcggttttaattagcacacttatcaaactattaaataatacatttcgtatgaaaacttaatttctatataaaacttattttaaaatatcaaacatattcatttattcagtttgtaatattaaaacttaattaatgatgtattaatattttttattacatacgccaacttaatctttattttcatcagtttcaaacacgttgacaaaaattatcttagtataaaaacatagtgacaatcatttaagaatcaaccttatttgaaaaaaagtaacaaacatagtgcaagtaattaatatatccctattttcccgtctgttgaaattcgatgtagaacatgactctatttctcattttaagttttgattttatgatttttttttatgtttcaatcagtagggctcaatgttttatgtaataattgttggtgttgcaaccaatattagctaggtaattgtcagggttatggataccatatacctagtagtagttgactaaatctcggcaggacccaccacataccatgtcttatacgaaaacaaccttcggatatagaaggagttccgcataaggaaggatgactagagttctacatggaaacgacaaggactactcggattgtatccatattggtttccctagttctagttggacaaggggatacctatgggtataaatacaaggcccctaggaggagaggggacacggaacaatagaagatcaatgtacaagccaacatacgccaagacaagataccagatatcgacttcagagataggcatggctagtcccctacggtgcctacggataccgtcaggagagatataacgctatctctgatctcgccggatgcggattcgaggaagaaggctactctgttgtcgagtaggagtcagaccttcagaccgccatgtcgacaacagttagataggctaccccaaatattaattgtacttgtgtgatccagatgaataaaaagcaacaccggtttcggccaacaggatgtagagttattacctaacaattcaggggcccgaacctgtataaaaatcctcgtctctgtctcttttactacaatcttgcatatattatagtaccaacgatcctcatactatgcaaataccggaatcgcgacatcaaacgtcaacagtaataccccgcgctttgctgcggattaatggatgagtatatgttaaatattattgaaatgatgaaagtttaaataatgaaaaaataatgtgaggaagataatttaacacatacttgtcgatctctataatataatattatagataacatgcctcttgtagaaactgatagtcgttatgatactcgttataatcctgcaataacgagtatcataaatttttttaaaaaacataccgtttagcagtttgaaaagcgtgcgcgcagaaaatgagatagttgagttggaaaaacttgaggaagaacacatatctttgctgtcgaggttgccttaaaaaaatattttgaaaagaagataattcactatggccagcttaacactgttctttaagattcagattttactttggttctgttagcacgtttttcaaataagtaaacggtgtgttctgttcgaaaactttgtacatataaatttctttaaatatcaaatataacaatttcctttaagtttgtaataataaaaacataattaattatgtgctaatagctttctaattttacgtgttcaacttaatatccacctttatcagtttcaaaaaccagtaaatgtgagaaaaaaaagaagagttacgggcacatcggattaaattactttagttgaagaaaaagggaaggactaaactgcaaaaataaccccatcttctcgaatctactccgtagcaaactgccaactgcgtacactaatgttacctttataaatagcatcctgcaattcctggaattaacaacgaaaccctccaaacatttcgcctccgccccctcgaatcatcggaattagcaatttagcccttgccgctctacccgcttcgatgtcgcccgcgtccggccccgcacaagccaatgtacatgggcagcacgagccccatctcgcccaggaggactccatctccagcgccgcccccacctcgatcgccgcgccgcccgaggccgccgccgatgtctccccgcctccctcgtccgtcgggagccgcctcccccagcagcccggagacggaggaggccgcggggccgacggatggagccccgccgctgcggcggtcggccagaaggggaagaagaaggagaaggtatcgggagcctctgatgatcgggagcaagtgatggttggctggctccgatctttccgtttttcgccgtcatggcgttcttgtttgtcaccttggaggttttcttgggggggttttggtggggtttgttcttgagcatttcttggtttccctgaaggcggagagggacgaggagaggaaatctgatttcctcaggaggaggagcgttcgtgttgcgtatcatggccacgccaaggaggaggtgaggagaaagttttgcttgtcattcttgactggtctggccggggctgggcattcttgtgtcatcttctgtgttggggaattttggatttggatcatctccttcttgtgaaaattcttgggatcatattgcatcatcgatttcataggttcaatcctgtcacttagatgctgttcttgtgtaggaatgtggaacttaggatctttttgctttcttgatttctatttacccacctgtttcattcagttgtgcttcagcgaagaaatattggttggttggaatgatgtggcaactaggcaattgttaggggggcaattcggctatgttctgtggaactttgattcagggaactgctttcttgttttctgtcaaaattattttagacttatttgctcctgcttttgttattctgattttgctgtttaatgtggttcattttaatcaaactgtaaaaatgtggggaatttattgggtgatgttcgattggttcatctagacgtactttgatacaggaacggctttctagttttctgtcaaaattgcttgacactttcgttaatctgatttttgctgtttaatgtggttcattttaatcaaactgtaaaaatgtggggaatttaatgtggtgattttgctttcattgtaactgaatcatccagatgtacttggggattgggattgcatcactggcgccatcgcatgttttggaatcttggagttttgggagcttgttcttgagcgtttcttggtttctctgagtaggtcatgtccaagaagctaccttgggatgatcccagacttcggaaggagcaggtgacgcccgtttccacaataaacaagtcacaccggaccagcgctcttggctgtatcaacaaagaggtaagcagaagtttatttgccattcttggctggctgagcattcttgcgccaaaatttgttctcaggatgctgttcttgtgagaaaccatggaaaatcttgcatccctgcttaggtgccaatttgcgtgttggaaatgttgaactgcgatattagctttcgtgttcctatttgttcctgtgaaatcttcgatgatttagtgtaattgagcacagatatcttagttcaaattatgctgcactctaatgttgagtcgaaatcattagtcatgttagggataattcgactttctgtttctacagtaaatgcttccacaatacccataagtgtgcctttttttgtgtttacttcttgccaatctaactacaaggctgtcaccaatacttgtaggaaatagatggacttcttgttgtagaaagacccaggtttggaccaccgtatgtggcatgtaatgaattcacacttatgtggtcactgaaaaatgatgtaagtaactattatataaatatttcatttaggtttaatttgggtgtcttaccgacaatttatcttgaataaaatgtacaggaaatttggtaccccttatttgctgaaatccttggagacgctgaccaatcaattgaatcggtaaagaaatatggcttcaactaattgctcttggttttataatgtccttatctttggttatgtgcatttgattttagaggaaggtgtgggatgatattaggcttgtgcgcaagttgaggcccctgcagaattcagagaaaatatcatcccgaacccattacaagatgatcctagttgcagctcataagcatggtcgaaagccaaatcttatctgctctagtttgttcactgaggatcgaaaggccaagggcaagctggaaggtttcgagatcccgcaaaaccttgtttgccccttgtgcggcaatgttatggttgaccctgttatgattgcaacaggaaaggtaattaatgggcttttccccctctttgttccttttctatttgcaatttttgtggatagagtgaatgaatggcatgtgtatgtaatatttgtagactatggaccgtcactgcgtacgggcttggtttgataagcatggacacatctgcccagtaacgtgccagccagtctcttctaccgtgctccgaaatgagcggattagaggatacgtggaagaatggcatgaagctgaactagaggttgaggaagatgctagggtatcatttacaagaccttaggctgatcacccaagtagtttgagaagtaactgtatcatactgtgaagtgcttaggctgatcacccaagtagtttgagaagtaactgtatcatactgtgaagtgatggtatttcgcttagtgaagcaaactgtaacatggagtagtgtattttgtgcttgctgattttctgtataaaatctgatctacttgcttattctggcagttgatgagttgctttatctttctttgagaaatgtacatgaatataataataataaaatgatggattgagccatcccttttcgatcaagctaagtaattcctcaagtatactataatccagaaacaatatgctaaataagtagcacgaatgagattcatatacataacatcctacgaaaaggtgcggacttgtttgcctgtctcaagaaggttcaacacatctcttagcgtattaaggactctttgaaacgcataatagaaaaaagatacaggaattaagtggcacgtttttctaatccttaaaaaaaatataggaaagataaaaggagcccttcgatagcatcacaggaaacaaacaaagtcaaggggttagacttcttgcttattttcttactctctattcatgtaaacattcattttgttccggtcacaaattcccacatatcctcactacatcaggtcatcacatatgtttttttagataatggattttcaataatctggcctctatatccacgaaggatatacacagccaaaaaatacacgagtacttcgactcatatctcaacaaggaggagaacacataaccaaaaaaagaaaagaaaaccaaacaacctcggcacatccatgcttctctacgtcaccccatattctcccgaaacggctagatttggcgagtggaagtcgtctagtcgtcgccgcccctagtgcgccgtcgatgcaaacctccattggtgccatctttatccattttaggtaagctgacgtcacgcgccaccagttagcccattttcaaccatcgtcattcgttgtttagccggaactagccaaccatacacgaaccgacaagatcggcccccagcgccaacgggagccgccgccgtcctccgtcgcagcccctagggccgctggcgccgacgggagtcgccgccggccgctggcgtcgacgggagccgccgccgtcttgaaccaccgcagcctctagggccgttggcaccggcaggagccgccaccatcctaggcctctagcgctgcctggagcccctgccgtcctgggtggccggcgccgccgggagcccccgccgtcttgggcagccgccgcccctagggccaccgccaccactggggcaccgccgagcaccgccgcccccgagggcctccctcgccgacgtcttgccgctcccctccgcccttccgaccacctccagccgtccccaactcacacggctaggcacgggcccggctgcctcaggccgccaccgccgcacctccgcctcccacctccccaccaccgccgtcctagccgccgcacaaacgccggtcagctctggcagcggcagggctagatctggggcgctggggagaggaagagacgcgttactgcacagccctccaggtttaggtgggtcatcacatatgtgacagcccatcgataacgagtcgaagtttttcatcatggataacctcatctctaacgggctaagtttcagatgagacttaagggacatggcccatcacaggtaacgacttatctatcaaaatctgagtacatcggcaatgagatttctgagtattttaaagagtatattatggttacactttttggttcaaaatcttactatgggtgtgtttagttctttgggtgtaaagtttttaaagtatacggacacacatttgaagtattaaatgcagactaataacaaaacaaattacagattccacatgtaaactgcgagacgaatttattaagcctaattaatccatctttagccaatgtttactgtagcaacacattgtcaaatcatggtataattagactcaaaagattcgtctcgcaatttaaatgcaaactgtgcaattgattttgtccacatttaatgctccatgcatgtgtccaacatttgatatgatatttttggctaaaattttttgaatctaagcaaagcctatattatctaattaagttcaatttgttcctatgaactaataatagattgtactactttctgaccaggccattcgagggaaaagaaagaaggtgaaaaaggtagcatcagaatcaacgtcactttattagcctttttctgtcgtaacgcatggtttggttcctaatttggtggaagggggattactcaccttcaatacgctgatgacaccatcttatttgtgaaggctggggatcacaatgtgttagtgcttaaattccttctattctgctttgaataaatgtcggggatgaaaattaattatcagaagagtgaaatgtatggttttggtatgaataaaggggaagagctgaaatttgctgatatgttgaattgtaaagtgcacaagcttcctgtcacttacctaggtctgcctatgcatgcaggaaaacttggtttgagggattttgcttgtcactcagaaagtggaaaaaaaggttacaatcttggaaaagtggttatctcacctatgggggaagggggattaagatcaactcttacttgtctagtataccaatgtataccatgtgtttctactggttacctaagggttttcatcacaaaatgggaactgctaggagcaatttttactggcaaggcctgagtgaaaaaaacaagtatcatatgatcaatgatgtggactagggttcccgatcatccaaaaggttctaataaccaacgatttgggcggagtcgcgatacaaatcgatccggcttcttgaacgaacacgctcttgagccccgcaatcgcagcaccacgtctcctctggttatcacccgtgtcgaaacacggatgacctcgccgagaaggctaatccctgtttgcgaatcaaagaaaacaaacaagaacaaggtagaatacaaccaaaattgcagatgaatgattaagctcacaagttggggtcttacaaaccgatctagcgccgaaactgttctcgacagaataatctaagcaaaacccaaaccataaagatgatgacgagtaatgatatatagagtttagggtcgtgcaaccaacccttgacgagcactaatggcctctaacacgatacatggcccaaagacccaaatacgatgatgcagcaccatgacagattctagacgtcaacttgttcggtcgattaccgttgactcggaaagaatttggacgtgtgaccaaaaccattagaaaggttatcttcttagctttccatccatataaagaatgccccaatccaagcacgtatgcgacctgggtgtccgtttcagtgcaaactagtcctggactccgaattgcactcgaagtcgacttggtttcttttctttcgcccaagcaagtacctctgcaaacgaaaacacacaaaactcattgtgtagcaacgtttgctcaattatataacaagtaaatctaatatagaacatatgcacctttagtggaataatacataaggtaatcatggttatatccgagctagttgtgtcctcatcaatcaagtgggaagctctctgcagacctaaagattatggtggaatggggttcttagacaccagggttatgaatatctgccttttgagtaaatggatcatcaagttggaaaatgggtctccagataagtatttgaacaatgcttgggggctctcagtagttcttccatagggggctctcagttttagaaagagttacaccattgtaagacttgggttgaaagacttgtggagaaacaggttcataagggagatcatgtttttttctggaaagatgtgtggtgtggagatattccactaaaaattaggttccctgatctttttgagattagctatcaacaaggggctctggtgagtgaagtgttcaatggaggagattgggatctagagtttagaagaaatctaaattcccagagagaagctgagcgcaacttattcaggggatttgtctagatgaaggagaagaccaaattgtttggccccatagtaagataaaagttttttctaccaggtctatgtacaggattttgacttttgggggtataagagatgtggatttatgggaaatctagaaatgcaagctccctctcaaaatcaaacattttcttttcctggttgggaaggggaggttaccctatgcagagcaactagtaaagaggacttggaaagggggtgataaattctgtaaattatggggcaaaattgaaactaacagtcatgttctttttttttccctctggcagtttttgattggtgtgtaatcaaagaggctttgaatcttcagactcatccttctaatttttgggattgggttaggttatgggagaaaaaaaaaggaacacaggctttggatttttctgctagggtgtctgttgggctttgtggataattaggaatgattgggtgtctgagaatactttggtttcctctcctttgcagactgtttacgaagctttgtcttttgcgccgaaatggggcgtcctgctaggaaatgaggagcaagcagtgctgggagggtggtatgaggcgattctggagaagtttaatcaacttagagttagaactttgcctgcaactctgtgaatgctcccaatcgaccatcgtgtgtggtgtgtgttgttgtgggtttctgttttcctgctatgccgaatgtttgtaagctgaaaatcccagccagtttagcttgcttccagtttactcccttcgtcctataatgtagcaacctattatggttactacattatgggataggttgctatattatgggacggagggagtatctttttgtaaagactctgtgtgtgttgtgtgtttaggctatctccagaagccgggtcaatatatttgatctgattttaaaaaaaaaatcatacagtctagggtgctatctatttataggattctgatcgcgtgagccgttgctttgtaaaaacgcattagtattttgctaatttatggttagggataattttaacatttatctttttgttaataatcgtacaatcactactaaaaaagtgtttttgcatgcgagctagaaggatcttttcatgcggttggttggtgcaaccgcatgggcgagctcttctgcaaaaatcgctctttggcgtaaccgcatgcgaaaatccatgcaatcgcatataccggccgcatgcaaaaataaattcggcaacaaaaaaataaaatccaaaaaacccccaaaccctagcccgtcgccggatccgtcgcccccgccgcccgctgtcgtcggcagcaccaaatcggcgcggggcagcgccgcccgaggaggccgccacggcggcgttgaggggggggggggaggcgccactgccgtccagatccgccgccgcgccgccgtcgcgcatgggaggtcggtgaagggaggtcgccgccgttgctgagcccgccgctgccgcgccggatgggaggtcggggaagagaggccgccgctgcctgtgctgagcccgctgcatgcccgtcgtccagacccgccgctcaccgctgtcgttgtcgcattgcccaccgccgtcgtggaagggaggtcgctgccgcgcatgggaggtcggtgaagggaggccaccgctgttgccgagcccgccactgccggaccggatgggaggtcggggaagggaggccgctgccgccggtgccgagcccaccgctgacgcgccgctcccgctcaccgtaccgcgcagcagccgcccctccccatccgtgcctcgccgtcggtaagagagagagaggagagaaggaaagagtgagaggctgagaggagaggagaggagaggaataggataaggatggggaaagttaaaatatcaggagaggaggggagagagaagaggagatgaaataatttgaagggaggagggaaaaattaattttaaaatattgaaacttcgaatagaattttatcatactaaatgaactcgtgtgaaaaaagttgtaaaaaaaagttgtagaactcattgagatataccaattttattttggtcatttctccatccgagtttgattgaactatataaaatttaaattttaaaatataagaaattaaaataatttttcaggtagtgaatgattttacatggaaaaattatcaacaataaagttgtataacttatcaagatgtataacttttgttttggttatttttctatatgactttgtttaaacagtttgaatttggattttaaattataacaatatcaaacaacatttattacaagtactaaataaattcaactgaaaaagtcatcaataacaaagtggtataactcatcaagattatttcttcatccgacaaagtgatagtaacattttcacaaaatttacatatctctcttatagtttataaaactatttgtcggatgaagaaatgactaaaatagaagttatatatcttgatgagttatacaactttgttattgatgattttttcagctgaaatcatttactgctttaaaatactatttgaagttttaaaattcaaatttttaattgataaaacaaagtttaaaaaatggcaaaaataatagcagtaagaacacagcaacatgatagagcatgattttagaaacatttaggaaaaagaattatccaatttaaagttcatatgagtgagataaactagtttcaaattttttaaattttattttttgatacgactccttaatatgcccgtataaaaaaaatcgatttttccatgcgggcggttaagtgagccacatgcaaagaggcctgtataagaaaatcgatttttctatacgggcgttttaagaagccgtccgcaaaaataccgttcgatttttactgacgcccctagttatagttatgatccatttaaaaaatcataatgtctcgtacagaaaaatcatcattgtagcagtgaatcagacgcccgtgtcaccgctcatttcgttccttcgtgctgtagctccgcgcatgcccgactcccggattctagtttatcttcaaattatttcatcatccttttataaacatctctcccgtatgaaaaataatttatctgtagtatttgcatcgatgcatgagagatgatgtacggatatgtagtcgctgatgtggcttggaccaagtcacggcaggtacaatgaagagcgatcgagatacacttctcgaatcatgcatggcaaacaaaaagtatttgcatctctttgatgacaaattattactattctcttgatgttgttgactctataaagaaaatgcgtaaccatgtcgcaacttgatcaagagatgtggtgtcattcctaatcaaagagatgaagacagttacggaatggttggcattgacaatttgacgtaatataaatcttaaaacaaatttgtgcaatactaggtactccctccggtttcattttaattgacgttttaaataataacacggtctataaatatttctttgaccttatttttctattataatatatacaataaataaatgcatgtttacttttattatattgctttgaaagataaatttatatatgttgttctagtctttttaaactaaatatttttaaagttattgatggtcaaagttataaaagtttagccttaaccttgttcaaaacgtcaattattatagaaccggagggagtacgccctaaactatttaccttttcgcccttccaagttcttatgcctatctgatttcagaccttttgccctgaccgcttgttagtaagaaatttataatatacattttcatgtaatggaaaatttacatgtatacattacatcgaacagataaatatttgatactgtatccaaaaccttactgcaataagcaaataaaaacgttgatataagccataagtaccttattatttacattgtcatatttgggctagttagcaaagactataatcctgccgcattctaaaccgaaagttaatatcaaattcgaaacaaattttcggtaaaaaaaaactgaaacaaactatacaggcctaacaaaaaaatgttcaaattaatgccatttcaaaccatacaattttttaattttttaagtaaagttctcaaaattatatatgcatttaatttcttgctaaactttgataaatatataagaaatcctgccaaaattttgataagttggtaatattactaaaattatggcattgctaaaatttgttaaagtttattttagctacaatcttaacggtcccaaaatatatacccaacaaagggcaaagtgggcaacaaagccttagacacccataggattaggctgagttcgttagaaggagatgggtacacaggcttcacacagctagagttggccagaagcttcatctcgaacgtagaaaatttgcgaaaaagaaagaaactacacgacttagtttatttatattcccatagaaataatactttcaaaaggacacctagatgaataaatgagggatgtgtttgtcgaaggttgagacgaatcaaaatagaattaggatagtaatctatgattcttaatgattttgtttgttttaagctgcactgtttaacttcaacaaatgattacgtgtgctattggggaaaaaagagaaaatgtatgttttccaaaattgcagcgatcttcatcaatcctaaaatttttgcacataattccttagaacttgtagtgttgcctgataatacatattctaaaaaataagttctcaatatcacaaaagtttgatccaatcttttactttatttctgttatttaatgtttttattttctataaagagtaaagtgcacgggcgatcttaaattaacttatgcggatatatatatcatctagctaggttcctcctgggttgttatatagggcacttatcttttgagagttcagtgtccacccgtacactgcagtcttctacaaatataggacaccaatgtggtcaggccaatttaacccacagtatgtcatattcatcttaagatttctacaaaattatttctaattctttactttcattttaaaatttttccttattctccagcgaggtgtgattactgattagtcagtaggcaatgcacaatggtgcaaaagccgcaggcgcaagggcctagatgcaagcagtccaattggctctcaaatcctatctttctgtatagatataacccactaattttaaaagttcaacatgcaaatatgccacctcatcatccactaacaataattgcatacaaaacttatgcaagcatgcaacattatctataatttattgaattctacaaatcaacatccaatcatcttccttcacattatttttcataatatttttaacatatatatatatccatcatatttataataattaatatatattcatccatataatcaaagtgcgggatatcatatttcatctacaatctcatatttatttctcttttaatatagtatgacaaaccagttttatttattgttaataactaatataatttttacttttagctcaattattaaaaaataataaaatttacttattaattttcacagcaaagcacggggaatcatctagtagtaatacccgtgcgacgtggatggatcgatccatccttgcagagcaacttgttttttaagtattcactccgtcccgaagtataagaaattttgattggatgtaacacattatagtactatgaatctaaactagtactatatgaatcatagtactaagatgtgtatcattcaactaaaatcttttatattttgagacgaagggagtatagttgaagaatagtttagtacatattttagtttttaagaatgggtatatctattttggatctaattattgtcaaattattccattatccttttatagacacttgcatcgtacatgagagagaggatgtacggaaacgtaagtcgctgaagtgccttggaccaagtcatcacggcaggtacaatgaagagcgaggtatacttcttgaaccatgcatggcaaacaaaaaataacaattattctcttgatgctgttgactctgtaaacaaaatgcgtaatcatgtcgcaacttgatcaagagatgtgctgtcagtcataatcacatagcttaagataattatggaaaggttggcattggcaatttgacaaaatataaatcttaaaaaaaatcgcaataatatgtacgccctaaactatttaccttttcgctcttccaagttctattatgtctacctgatttcagacgttttgccctgaccgcttattagtaagaaatttataattatacattttcatctaaaggaaaatttacatgtatacattacatatttacatcgaacagataaatatttgatactgcatccaaaatcttactgcaatatcgtcatatttatttacataaggggcggaactgggtaggcagggtgggttatatttgagctggttagcaaaaactataatcctgcctcattctaaacagaaaattggtctccaattcgtaacaaattttcggtaaaaaaaattctgaaacaaactatacaggcctcacaaaaagtgaattaggctaagttgcggagcgaggagggttggaaaccctcactcccaaacacgcaaaacaaagcggcgtttagtgtatgatctattaaatattagctaaaataaacttgaaaaatagattaatatgattttttaaaatcaacttccctatagaactgtttgcaaaatacgtaccgtcgtttagtagttgggaaaggtgagggaataacacagccttatatacccaacaagggcaaagtgggcaacaaaacctttgtggactgtggtgccggacatagcagtacgaaccagtagcatatatacggcacaacggcagccataggggagcttgattgccaaaacacaaactcactcgcggctgcaaattcacctttgcagagaagaggcctagctagagctcgatggcggagatcgccgtgagtttggttgggagtttgatcgccggcatctcgacgctggtggagaaggaggccaccttgctgcagagcgtgccggagaataccaggtaatcaattaggatgagccggcgccgcacatagagtttttctgtctcctccactcgcttttcttcatgaacatgagcatcggttcttgcaatgtgccaacagaactgacaaatggagaagacaaaaacacatcagaccattatctaagaaaaaacacacattagatcatgagagcaattagctcttttatgacaatttcactgttagagcatgtgacagtcattttcttttttgctttgttctaatatccctaaattagtcacttttaaaaaataattattgagtaatcattatggacaaaaggttaaaattggacaatatttaaggcagtatgatgcagaaataggtaaaagtttattagcttatggctttatgaaaatagcgcatttggagtacagaacaaaatgcatttgtaaaatatagagtcaatatatgtaaggtggtgttggtcacaaactcctactttggataatcttcaaaagttccctgaatgtccacagttattacagagaaaaccaaataacagtagacagttcccagaaagcaaacaacaaacaaatctaaatatttatgtgtattatggtatatcacgaactaataggagtttggtgaagcgatctaagttttaaaaagatattagatcctaaaaagaaaaaaaaagggaaaacactgtgcatgatcttaaatcaattttgcactacctccggtcaggaatatttaacacctgcgctgctgcgattagtgacactggcatcaaatattcttgactggatggagtacttatctttctgaagaaatcctaatgtttctatgttcagaggcagacaggtaggtccctaaactatacaaataaatatttagacctataatgttttagtgtgaacaataactacatatataagtatacaagataatatatagggctaaaagatgttatattatacacaactaaataataataggcattagatttgattgtgtgactaattagtatcggtatcataataacaagttggctcgagtttttaacgagctgaactgagctctactttcagttcagttatctaaacggccaagcctagcaagcttattctcctatcaagttttaacaagctgagccgagtaaagccaacttgttaattgttatccacccctagtagttgtgtccccatgccaatgactcaagatataaacaatgactgaatagaaactagggatggtttagcagttattttccaccattaggagtaaatggcatgagctgacaattagggcctgctggtcagcgatacagagaaaattaatatagaatcgcgaatcaacttgattcagcttgctggtggggaggatttgttggggctcaggatgactagagggaagggaagctgttcagtgttcacctgtcacgcggaccaatgctcactgaaacaattgaatcaataaaattaggaaagttatgtggaaacgaacttggaataagaacaattgtttcgataaaactagcagggtggcccgcgcaattgcgcggctagcacccaaacaaaatcatttttttttaagtatgattttacttaaaaatttattaaatagctatctcattgtcttaagagtttgaaagaccaaaccttataatccccgtgtttctaattatattgttttttaaaagtcacatcagttgctaccccttatgtcatctccttctttatttgcttgctcgatctaccactatttctattcattctccttggaacctttaaaaattggatcttatagtttttagagtttattgtcacgttgggtttcgtttttataatttctagacctcccgtcaaatgttgccattttactcctctatggcacatcctctgtctcttctctttattgtcattgagattttaaaaatcgaacataattatcgtttggattcatttttactttctagaagtcccgccaaaccgtaagcggctttgccattgtagttctctacggctcgcccgctgcctcccttctttattgtcattgagattttaaaatcgaacattattatcattgttttttttttacttttagaagttccgaacctttaaaaattgaaccatgtagtttttagagtttattgtcttgttgggttttattttttataatttttagaagtctcgtcaaacgatgccactgtgctcctctacggcccgtccaccgcctactctttattgtcattgtgattctaaaaattgaacataactatcgttggaattcattttttattttctagaagtcccgtcaactgtcggcagctctgcaactatactcctatacaccccgcccgctgcttctcttttttattttcattgagattttaaaattcaaatatgattatcaatagttttttttttactttctataagtcccgacaatcgccttgctcgtttgcttcacagcatgcttgtcgtccctccttttaatcgtcattaggattctatttggtgttttgttaacagtttttatatgtcgtatcaaccgccagcactctactcctttatagccatgatacttaatttatgtcgtcgtgtgttctagatggtcttttctttcaatagtctttatttttatcacaaattttagttatttataaattgtattcctaattgaaatcttttttctttttctaatttccgaatttatttttttcgtattgtgttcttttgatatttttattttttattttcatttttagttgtttcaaaattgtattcctactttaactctcttttttatttgcctaattttggattttattttatttttattccgaatttaattaatctaccaattttaattaatctcgtattgggtt

SEQ ID NO: 13352 - DNA, 517 bp, Oryza sativa
cgaaggtaagaatatagtctgccctctagaactggaggtgcagaagatacacgcatgtccgaatgattgtatcctctatcgtggtgagaagtacgagaacctagaagcatacccggtctgtaatgcactacgatacaagattagaagagtctatccaggtgaagttgacagacaagccttcgaagaggagagttgctgctaaggtgatgtggtatttccttataataccatggctcagatgtttgttcaggaacaaagagcatgaaagaatgatgcgatggcacgcagaagaacgtcaacaagacgggatgctgagacaccccgctgatgggtcacagtggcgaaacatcgatagaaagtttaaagactttggaaaggatgcacgaaacgtaagattcggtttaagtacggatgacatgaatccatttggagagatgagcagtggccataccacttggactgttacgatgtgtatctacaacctccccccttggctatgcatgaagaggaaatacag

SEQ ID NO: 13353 - DNA, 529 bp, Oryza sativa
aattattacttgccaactaaaacttgataatggtgggttgtgagcacatggttttgagagtcgtgctcatgacaattaaggaccggttcgcgagctactattgtgaaacattaatcatgccaaccacaagccagcgtgggcaacggctttacctttcgtatagcatggttcattgcagagcaccagactgagaagtggcggagataagcccacgggggttgctggggagtccatgcctctggtttttgagggggtgattatgatccaggaaaggtgcactgtggtgggttgtgttatgcgaggggtaatgtcacagctcctttccgaggtaccgtggtggtactgaggcacatggtgacatgttgtggggctgtgtcttgtgggtacagtggtacacctctggccagagtaaaactattcgaatagccgtgcccgcggttatgggcgggttgagcaatgtttttcgtgattagtctcacacctctcacaataattatggatgttatactggtaataatttgtttagctc

SEQ ID NO: 13354 - DNA, 5050 bp, Oryza sativa
tgcttctaggcgcagctcctgctcatcgttagcatgcattatggcatcatgattgattcactctttctcatagaaaaaaaagatggacatcagcactaaatcactttgattgaatcgaagcaaacagatcctcaaaagataatccaaaaccagaaacaaaaatgcctatactgattattagaaatcttatacgaaacctgatcgagtaccaggacctagtatcaaatggatgttggctagtgataaagcatacttgttaataatttacagaaacaaccgaaaatttcctcgcattcatttaatttgatcaaacaaataaatcaaacattgatcttatagcaaagtgaaaggaataagattattctctctaaaagactgtctcccaatgcagcctgtcaaaaacaatgaaaaaacaaaacagataagaactgaccatgctaagttctacccaaaaaacaaaaaacttgatcaaaatattcatccacctaaatagcataagtgcattatgcaacttctaagcaatcaattttctcaaatacaagaaacatgagtgctattttagaacattaattactaacgaaaataattgcacctattccattcgaagccaaatagcattgcatctagagtacggactttaactttttaagaaaactgatcgatttaccaatataattctgcatcaaaagggcaaataaatacacatagcaacgagtgttttactgaaataaaagaaccatagcacgccttgtgtaaaactttgaagtctttttaaagttgtgttgcaacataaagagtgatcagtgaaacaagacttgttggtgatcgcatctaggttctgaacatttctgtgctctctgaattagtttgaacagttatgaacttgtccatttatctgatgcttgaacggttccaaaatccatcacgatctttgcttgtctagagtgttacctgggacttagcaatatttccaaaatcctgtgcgcttgtcgtccaaactgaagtacctggtgttgcccgggttggcgaagcccttgccgttcttccgggtggtgttgttgaggtagctgtggatgcaactgacacaacattcatcaatggtttaccagttgtgcaacctacagttaaagaagtagcagggatcgatcttcaatgttcaaaaacatttaccaagttcaaaaatcttgtgtctaataagttttggaaagctgcttgattttatattttacaccccaaagttcgggaaccacattgaccacatctttattacatggtgtctcagaagcactgatccattctctgtgctatttatctagctaagagaataattcaagttatgttacaaatgcatgacagtaacaaaaaacaatgaaattggcaagcatgatcataaccaatgagtttttagctgtagcttatgttcaataaatttggcaagcatgattataaccaatgagttcaacggaaaaaagataacttcaaaaaagcaaagtgctaatgtctagcgctgcctccaccagaggcccgactggagaatactttttccttttttagataaacatggagaggatatatataggcagggatgaactgtacaatatggttgaaacaaacaaatgaaacgtcaaaagtgaatactaagttcctgcatgggcaatcagaaaaaagaaattaaaatgctggtactagtcagaaaatgcttgcctaatatcaaatccaagtagtgggttcagttacttctcgatatctcaaagcaaataacaaattaagcattctgttgttataactttttcacgtgcacactccataccaggttcccataacaaactttgcaccaaattttttggagctcgtaatctgacaaatgagaaaagaacgaattgtgaaggaagtattaccaggacatgcttcaatatatatatggaattgaaagttgggaaagaacgaattgttgcggtcctccagtcaataccaaatgtttgtattccagtatgtacaatctgtcatctacatgttcttgtttcagatttgtttctttcctacaaaaagaaccagctagccataccagaaggttttaaaaagacatgggagacatttcccatcaatcaaatttgcatgtcttatctgaatgaaattaacgtttgcagtatgctacactaacaaaacattgctacggtcagcttcagctaaaattactggcagttattcttcagcacccatgtttcagattttgcgcctctttgcgacaatgctatttccttcagcatatttacaaagaaaaggacagtcatttttacaaataaaaattgaggaaaatcatttgactcaaggatcagaattattgcttacatgaatccctgagcatcataaaatacttttcaaaatgtaggattcttcatctacctgatcaaaactatgctgctatggtctatttttccctgtccatgccaggacgaatttggttcagtctcaacggttgtctgcaactctgcacatacctgatcttgttgctagttatttgcaactttggtaatcacatcttcagacaattggctgaaaatattggatgttccagccaaatctttaccgtcatagtcttgcagcgtaaattaattcagatataagtgcaaattttacagagaaatttactattaaaaacaaaactacatacaagccaaaattcagtgaacaaatgacaaagcattactaatactatgctaaccatagtatctgcagagtaagatcaaaattattcatctgccaagtcatctctgaccggcatccagtcgaaacttggaaatgcagtcggttagaagttttgcgtcttaaggcgaaattgctagcagtaagggcatatcaacacagcaagtatctcctctcatctcctaccctatcttaatgttttaagactttatttaagcttctcttggcttaagacaaggaattgaaaaacgattcaacagaaaaaaaaaagttcatccaaattcaccttatttaagcttctcttggcttaagacaaggaattaaaaaacgattcaacagaaataaaaatttcatccaaattttaaaaaagctaagcgctagtgtctagcgctgccttccaccagaggcccgactgcatgcatatgccgtatttgacaacttaccgttgccgtattgacatcttaacgtggatgcagctaaccggcagggggtcgcctgccgtgccccataacgggaggggatcttttcactgctcctttatctttttttttttacagccattaaccggaaggggatacacacccagccgatgcccacatttgggatcttttcgctgtattcggtcggggtgggtgcctctggggaggcgatggagtagaatcgaaccgcgttgataaacaggtcgctcgctctcaaaattggcgatgtgggacaaaactcgatagctggacgcgattcagtccgagagcctacagacgccgcgcagaccctacctagggagtagaggcggggcatacctggtggtcttcgctgaagccggcggcgagcgcgccgtcgacctggccggagctgaagcttcccaccgcccggccgccgccgccgatgccacggagactacgccagcgggatccagatcctcctggagcagcgcgggcgcatccgcagccggctgctcgccgctggaagtcgggaagcgccgaagcggcgccgtcggaggagagcgagcgagaaggggaggggaagcggtgccatgagggaacgtcttcgctcgagcccaacccgcccaaggcccagttcacgccgaaccgcctgggtcgtttcttttttttttctttttttcccttttccccataggagtataggaccacctggaccggaccggtgggggctctggttccggttttttccggtccgatcgccggttcggtccggtccggtcttaataactgtgcataggactgttgtttttgctcaaattggtgggttctttgctttcgctgttataaaggggtgtgtttagctcacgctaaatttaaaagtttgatcgaaattagaacgatgtgacagaaaaattgaaaatttgtatgtagaaaagttttaatgtgatagaaaagttaaaagttgaagctcggccaagctgcagccagaattaagaggagagtaagcggaccgtaatgaagtgtagtagtgacgtataataggaattctaaaaattataaaaaagacaacctgacgagaccaattcttaaacagaaaatctacataacagcattacgtgggaacaggataacttaaaagttaatataaggcaaacgttttttcgatcaccgatcagatacacccatgatttctgactacgtggtggggctagcgtttcacctttcctgcacaaggatttctaactcacactgacacatgtggtcatgtgatccgtttgagcatatgaatctgttggcttgatcacatcccatctataccatagaccatccatgtgacttttttttcgttttaccttttctcttgctttgttttttaattttcttttttttccagttggaacgcttttaaggtttgactagaaagtacccgcggcaaagtcgcgcaacagtagatgggccagctcaaattgagcgtattgaatgtatgcgtataccttaacatcttagctgggatgctagcagtgatgctatctcattcaacacttagaaacacaacaacatgttgtcagcaaatttatatatgcatagatactcgaataattaagctgctcttatagtctacgggaactgaacggaagacattgtggatcacatggcatccctatttgttgaaatgttcttttttctagaggaatttgcaaatatatcttaagacttctattagtcaagtctatcatatagagtgtctattacatgggcatagatagttcaggagattaaatgatcagagcttttgataatgccccatttcatttttctaggcaatataaactggctaagagcacccgcaatggtaaagtaaggtgctatctacaaaacatgtacatctcagcaatagactagattaa

SEQ ID NO: 13355 - DNA, 1209 bp, Oryza sativa
gctcgccggcggtggacttcagacggtgtagtggtgctggacgttgtccatgtcgaggcccttgagcctgacggtggactccatctggcccttgagcgtgctgagctcgcgcagccgggccacctcggcgcggcgcttggcctgctcggcgatctccgagagctccctgtagctgctccgctcgccgccgccgacgccgccgaggtggtcccccatctccggcgtctgcagcccgtgcagcgtcctctgcgccgtcgcccactgcgcctccctctcccctctcccgtaatccttcttgctcgtgaaggcaatctgcacgcgcacgcacgcaaggtgtttgtagttattccgcgaggagaaaaacacatgcaggcaaggtgtttgttgttatggcaaggttaccttgtgctcgatgagggtgtcccaggcgcggccgctgagggcgtagcggacggcgaacttgaagatgtcgagggggaggaaggtgacgatgctgtagagccagatgacgccggcccacccccagccgatgcccttgatgtgggcgaaccccaaggtggcgtacaccgtcaccagcgtcgcgatctgcaccaaatcagtccatcaatggcggcaatggcattggcatttgcagcaccaaatcagtccatcaatggcggcaatggcattggcatttgcagttgcagcagctaagaacaagaagatggagatcgagatgcttacgatctgcgcggcgacgaaggcgccgcagagcagcatgccggggcgctcgacgaagcaccagctgcgggagcgcgtcacgaagatgagcgcctggctgatgatgctcacctgcaggtacagtgccgacatcatctcgtccttctccatcagtggcttcacatggaacgtgctctgcgcacacaaccaaattcaatttgaattcgatcagagcagtggaatcaaaaggtttttgaggattctttggatctgtttgtttgattgtttgcttacggtgaagaaatcggtgctcctcatggcccagaagaagaggacggtcatgacggcgaggtaggtgccgtagacgatgccggtgatgaagatctccggcaacttccagctgtccgggtgcggcgacggcttcaccctgtccttggatattgtcatgatcgttcctgcatcatcaatcaggtacatcagctaaaattgtgtgtgtgtgtgtggatcaga

SEQ ID NO: 13356 - DNA, 794 bp, Oryza sativa
ccggtcggtgaagatgtagacgcccaacaccggcggcataataagtcagccgtgcaggcggaaacaccagtcggcggcggtcgaggcggccggtcggtgaagatgtagacgcccaacaacggcggcataataagtcagccgtgcaggtggaagcaccagtcggcggcggacgaggcggccggtcggtgaagacgtagacgcccaacaacggcggcataaaggccagccgtgcaggcggaaacaccagtaggcggcggcgaaggcaagccggtcggtgaagacgtagacgcccaacaacggcagcataaaggccagccgtgcaggcggaaacaccagtcggcggcggcgaaggcaagccggtcggtgaagacgtagacgcccaacgacggcggcataaaggccagccgtgcaggcggaaacaccagtcggcggcggtcgaggcggccggtcggtgaagatgtagacgcccaacaacggcggcataataagtcagccgtgcaggcggaagcaccagtcggcggcggacgaggcggccggtcggtgaagacgtagacgcccaacaacggcggcataataggccagccatgcaggcggaaacaccagtcggcggcggtcgaggcggccggtcggtgaagacgtagacgcccaacaacggcggcataataggccagccgtgcaggcggaaacaccagtcggcggcggcgaaggcaagccggtcggtgaagacgtagacgcccaacaacggcggcataataggccagccgtgcaggcggaaacaccagtcggcggcggcg

SEQ ID NO: 13357 - DNA, 711 bp, Oryza sativa
cgccggcctgcctccgtcgccgccgagtggtgcctccgcctacacggctggcctattatgccgccgctgttgggcgtctacgacttcaccgccggcctgcctccgtcgccgccgagtggtgcttccgcctacacggctggcctattatgccgccgctgttgggcgtctacgacttcaccgccggcctgcctccgtcgccgccgagtggtgcctccgcctacacggctggcctattatgccgccgctgttgggcgtctacgacttcaccgccggcctgcctccgtcgccgccgagtggtgcctccgcctacacggctggcctattatgccgccgctgttgggcgtctacgacttcaccgccggcctgcctccgtcgccgccgagtggtgtctccgcctacacggctggcctattatgccgccgctgttgggcgtctacgacttcaccgccggcctgcctccgtcgccgccgagtggttcctccgcctacacggctggcctattatgccgccgctgttgggcgtctacgacttcaccgccggcttgcctccgtcgccgccgagtggtgcctccgcctacacggctggcctattatgccgccgctgttgggcgtctacgacttcaccgccggcctgcctccgtcgccgccgagtggagcctccgcctacacggctggcctattatgccgccgctgttgggcgtctacgacttca

SEQ ID NO: 13358 - DNA, 3402 bp, Oryza sativa
acaaatcacccacatattttggaaatcctctattaagggaattcgtttcactttttattccaccaaaaatgtttcacctagtatacttataatattttactatgtatgaatcaaatgttgcagtgaaccgaaatattctttcgctatttgctaaaacattgtttttatataaagtgaaacaatgtttcacgcccaatttaaacgattgaaacattttcgatctacttagtgaaacaattccgatatatctagtggaacatcatgcaacatttaaaaaaattcaataataagctatcggaatatatccatgtgtggtcttgttttgaagatttaattgcaatgaatttaatgctgcaaattttctaggatttaatggctttgtgctttctgtgataggcgacgtacccgtcgacagcgagacgcctatagtgactttgtcgatctccaggatttgtcggtccagtcttcgaagatacttatagggatagggtttgcgtgcgtgcgtgcgttcataggggtaagtgtgcatgcgttgtgagtgtctgtgttgtactgtgtaatttaaaaaaaatatgttctcaatttaatttacacattatagtggttgacacacatcagagcgccattaattgtaatcgatccacagctccgttgatctcagccaaggattaattaacaccgtacgttttgtacttgcgagaaagcaataagcatttcataggaggatgtatatacggttcaaactaaatatccgtctgaaaaaatagaagagtctcgtctgcagaaatggttttcttagtagtgttctagcatctccaccaactatagatatacagctatacttttttttaatgtttgcattttctatcggcctctacctgctttcctccttgtcatatgctatttcttaaaccagaatcatataatatgtagtcatttgacagtaatgaaatgatgattaggtcgatcatttcctcctgcaaaacttatgtcaaaatataatcacttttagcacgaatactactgccaacaactctctcacccttatcctctcttactcttatttaataagaggcaccaaagtcttttcttataaaccttaatctcttctaaacaaccaacgaatgcttatatctcataatagatggatgggaacataacatatacatataagattcatgtgcatactccatgtataccaactactccctccgtttcacaatgtaagtcattctagcatttcccatatttatattgatgttaatgaatctagataaatatatatgtttgagttcattaacatcaatataaatatggaaaatgttagaatgaagtaacaaatatcacaacaaattctagaaaaacaaattgtgcatatactttcagtattacacctatattgaaaattttaaccccagagtcattatagtttagacataacaaaaatatttaacagttttaaggctataagtctatctgaattttgtatttttctctttatatatgatgaatttaaagatgtgactttacgtgtagatgtgtaatattactaaaagtatttgtttctaatgtttttagtgatatttgttggttagggtgtacgatatgtacacgtgaagccctgtgtgtatatgatacattttcaagacgaagtgtatatatttcctcagtaagaaaactatatatgcacccgacttataaatcttggggagcgcattgaacgttcctcattgatggcatatatgtcatctgttgacatttagcactgaattaaatttttcacacggttagaatgagggatgccgtcttgttttctctactaccaacaataatcagaagtcagccaccattcgaaacatcgtaattaattaagcgatacaaattattttgtgatgctgattgcatacctgatgaatcattaaattatattacggtaaatgttaggacgccatttcagacacatgagacgtgtttgttacgagctagtttcgtgcgtctagtagattagtgaagaatgatgtactcaatctgcaatgcatgaaagaatatttacgagaaccactttacaggcttgttttagaatagaagtttttgatgaataaatttaatcttaaatagaattcaaaataaaattatctgtactgtggaccacaaatatgaaaatatgtggaaaaaaaaaactaaacagatggataacattacttattcagcctgcaaggttgttaatgcaaattttacatggaccaggaatttgttctgaagaaacctgtcgagcatgaaagcaagaccttgtgtttagcgatttagccaacgggtcgctggtgttttatctacaggcaaatctatgaggaactcctgtaaaaatcttggcaccgaactctctgtagctgtattataaagaagaaattggatcaaacccacagctttcaagtcggtccacaagttcctcgttgtacacagattgaccttcatttttttgttaacctgataacttaggctgagttcggatgggggagatgggaacccaacttctgcgcacggaaaacggagcagtccattaacgcgtgattaattaagtattagctattttttttcaaaaagggattaatttgatttttttaagcaacttttgtatagaaactttttacaaaaaatacagcgtgcacgcggaaaacgaggggaaggggatgggaaaaggtgcatgcgaacacagccttaaatgtttcagtttcagctactactctgagctctgaacgtttccttataatggaagcttgtggttcatacatgcaaattatctgtacaaatttaatttctgaaaaaaaaagttaaggagacaaatacatataattgttatgaaactattatctcctgccagagataaatatgggctcataccaaatatatagaaacgtatcctaatagaactcttcctattatatatatatatatatactgagagagagggcttgagaggttggttgatgtatccgcatatggttaaaacaataaagctgtgatgcccctctctatatccgtgttcatctactatatgattgtgtgcatgggatcgccgtcttctactccggatcagcgaataggccactagttattcaacacgttatcagcacgagtttgctcgttccgttgatccgggtaagtatttttgctagatcaatttttttttactaatcagattgatctactgtgtttatgcattggtctatcatcggccgagacgatcgcctccaagcgcagccgcgcaccgaggcagcccaccaggtgacacgcgtgcacgtcgcactccacgcgcgcgatagccggaggagcagccccgccacagtcgtccgcttcggagctcctaagccgacaacacatgcgcgtgcacatgtgtagatcgaa

SEQ ID NO: 13359 - DNA, 5035 bp, Oryza sativa
acagacagatatcctctccactccctgcaagcggggcccatggtcagacgactggtactgtgaagtgggccccacgaccccagcttggtgcgggccaccgtccaccgtccatctttcctggcccggctaccatccaagcgtttgcagtggattcttcccctgcttacctttttctcatccttccaaaattccatgggatccaccttgggaatccaaggccataaaaggccacatgaccaaccacacacagctaaattctactctcattttttttcctggagtttgtaggcacaacaaattaagattttatgccaagagaatatttttgataaaaatactaataaaacaaggctgcatatatgtgtttttttactactactagatttttttgtgcttgaaaaaggtgaggaaatgttgccaaggtcattgccttatcttccaggggaatagcttaaaaccgtgtgaacgcctatatctttatggttgagaagttctcaaagaatctgcccgcgtatatagaaataaaagtacaagactcgtcattttcacgctattttgttccaaatctatttgatgttgaaccactccttgggttctatatcttgtgagctagcgatggatactttttcttcatttcctttttataaaattgtattcattatctagtactataagatatatgtatcttttaagtaagtacacatttgcatgcatttattaatttgaactacttctatttttaaagataaatccaagtctaaaacaattaaaatatgatggaatattacctacatccctaaagactcttccttttccctttaatatgagatgttaatagctagatgagacttaagtcatattcctctaaacctgcctaccgaatcttgatattgtagagtagggcagccaggaatatatggcaactatccacaatagtgttgctgatggtgatggagattgtaaaatcttaccttacctacagagatcatgatttttttagacttggaaagaagaagagaaaaagttaatggtgtataaaaacaagctatacaaattgaaagaaaaaagtgcatatatctatatctaactggtctaatttactcgagaaagatgtgaggattcgaatgaacatctttacaaagagaatgctccaattgtgatcacatcaaatgcaatgtgaaataactttagtttcggcataaatgagaaaaggggttcgataacgaagaatgatatatgtattcagagcgcatttacactctcatggaaacaccaatgtggcaacctatgatgaatattataatcatgtgaataagcttaacatagttttaaaaaattaaattataagagaaaaaaatgccacattggtgtttactgttactattgttaccatggatccaccaccataggatgcgtgggctcgtcagtggatcatcaaaatgagaccctcactttacattttttttctcttataatttatttttttcaaactatgttaagcttatttacataattattctaatgaattatacacatttttttttcatattttggaaaatacatatttctaaaaaatatattactagagcaacttgttttaagatagtactccaagttgttaagcttattccaaaaccatgtaaataatccgcgacaataataatccgtttggcaatctaaatcaaacggcgcatataggggttgtttggttgatggctaagtttactatacctcactttgccacaagtgtgttatgccacacaaagtgaggctagcaatttgttagccacaagtgtggctaagtttggtaagaatttgagtctataacgcataggcccaatgactagtaaagtgaggcatgacacaagtgtgacaaccaaccaaacaatatactaacaaattgtgacatgtctaaggtttggcatggcaacctttgagagccaaccaaacagccccataatacatcgcagcaaatcaaatgaaaatacaactcactttttgcagcaaaccccctcacgatcacctaaatttcgaaaagatcctcaaagccccaacccttcttctccatcgcgtcgcctataaatacccccctcgccttcctctcacttcttccgccattcccctctcctcctcttcttcttctccaccgaataaacccccgcaaaaaggtggtgagttcgagagagagagagagagagagtggaaggctagggttagggttagggtttcctcctcgccgccgtcgcgtggcgcgatggccgccccgccgccttcctccccgtcgccgccgccggcggcggcggctgcggcgacgcagcagacgcagccgcacccgcagacgccgttctacgagctcgtcaagggaaactccggcatcgagaaggtccttctccgcggcacgcgcggcttctccgctgaggtatccgatccgttctcccccgccaatcccaacccaaccctcgcctctgtgcctctgtctctccttccgtttgtggtgtgtgtgtgtgtgggggggggggcgattcgtgcggattcgggcgccattaccgcagatccggcgggaattcggctgatccgcgtccgggggcttggggcgaattcgtaagagggctcgtagttttccggcgcgcgatttcgtctcggtggggatggtttggtggcgcatttgcacgatccgccgctcgcggacttgtaatctagctggttgagatgttaactgcttagttttgcgtaatctcaatgggatgatggcgcgatgtgcgatcgcagtagggacggccttcatgatgtgtccggtcgccattgatgtttcttggaaattcgttaggcgtgcgtttgcaatgtgtgaaatgctgcaatcttattctgaagattgtatgaaggtggtattgtggggattgttaagcgacggatgccctgtttacaaacctgcgtgccgaaataggaatttgcttatcatcgatataatttgacaaggacaagggattcttgtgttaccctgttctttttctaggtcaccttgtacagggatcggatttgtggtccatgtatgttttttagcccttgtatgtagaaatcatattctagatggaagacattctttctgacaaatttggatgtatcctctgttttggtactgttttgtacattattgcttatgtttcttatggttgtcatttcgatgtagctattttttagtagaagctaatgccaaatagttcatcaaattgtataatgctcagtagaggagcctcttgtgctgttcagccatttaagcttttggtttaggtttttggtacaaggagtggatggaattgttaatctccctttatatgtcatagtgtcatacagagtctagtccatcatttcaatatattcagataattttcatcttctgaaccctgtaaaatcatcattatgtaccagttttgtatctctctttttacatatgtaactctgcagttgtgttgatctccgaattgctgtagtagtgcctcatctctgtgtacacaagcgaagtgaaacacatgttgaaatttttgtctttgctgtcatgctcccctggatgggtccacattgcccatatcaaagtgaacttcattctgtgatttttcttatcttatttgttcttacctgttccactattttcaaaacagaaaatttatgccctgtttatgccctgaatttacatgagaatatactataatagccaaaaataaaatattttgccatgatgagtaatgactagttctccattttctcaggtctatctttatggagctcaagtaacctcatggaagaatgaccatgcggaggagttgctttttgtcagcagtaaggtgcacagtcattttctaaaggatcttatcgccaacagttgtatgaccaaattatgtcaatgaatgatctctgtatttcatagctcacccttgttttgcctctcccctgtaaggctgaaatgtctgcattattttttttagcaaaatatttttacctcattgctgcacgccattagtttttttcttctgttgtcacctcttatggactattggaagattaattaaacaaatcgatccctttttttcctgaaatattactagttgcctgtttctagttctctgatgttgctttgctggccatatgttcgaatcatcatatcttttgaaagtaatatattcttttgtaggctattttcaaacctccaaaagccattcgtggtgggatacccatttgcttcccccaagtaaggcaacctttacctataatgacttcatgataaaattttgtctgctcaaatcaccaaaacacaacttacaaatgcagtttggaacacatggaaatcttgaacaacatggatttgcaaggaaccgattatggactattgatgataatccaccacctttaccagtaaaccctgctattaaatcttttgttgatctgattctgaggccttctgacgaggatttaaagatctggcctcacaggtttgtgttataatatttaaattgacaattgattgtttattttattccgtttagtcatgcaatgtgttgaaggtacctgattctgttcttggcctattcattgtttacagttttgagttccgcttgagagttgctcttggtcctaatggggatttgagtctcacttctcgaattaggaataccaacactgatggaagatctttctcttacacatttgcatatcacacatacttctctgtctctgacatcaggtatgtgtttcatgatgttttatcttctccactttatttttgtagtgttttgacctctgtaatgatctgttccaattgttgatatagtacttgatgtgctggaaacctaaatacttttgtaccatggatgggttttactgtgttatgtatgtcagtcaaacagtgatctcattgtggatttttttcatctgtatttggtatcctttttgtgagaagcatagaaaaaaaatcttagttccttgttgatatcacacattggaaatgccacacatggaacattatagtagaaagtaatcattg

SEQ ID NO: 13360 - DNA, 1062 bp, Oryza sativa
aacatgttcaagtgacaagcatgacttgccttgctcagctgctggaggaacctcggcgactatttcaaagtacaccggagcgtcgggagagccggaatctaagcgatatacaaagcaaacaatacaaacaggccataagactactgaaacagagaacaaaaccattttgaatggattctatgcatttttcttgatttactgatacttgaatgtacttaaacggaactcggatgaattagatatgaattttagaagattcactgcgtttttactataaacagaaaaatccttaattgatttattgcgcaataattaaaatcccggggagagaggggacggcgccgacaagcgggccccatatggcagtgactcgggtggcggtctgcggtggaccgggtccacggaccggggaaggagcggcgcaccacgtggcactgatgtggcgtcgacgtggcgcacacgtggcggccacgtggcagccacgcgggcggccgaaccgacggccccgatctacccgagggtatatcagacggcggcgggagcgcgcggctggcgcgcacgggcggctcaagccggcacggtggccatgccgcacggcggcgctaccgcggggcggcggcagcaaacggcggtgaccgacggcgagcggcggcggcgcgaccccgagcggcgaggggcggcagcgctaggaggggaggggaaggacgacggggttctcaccgaggattcggccggcacggaggggcgacggcgaacggcggcgaggaatgagtgggaggcgacgacgaacggtggacggtctccggaaccacctagcggacatgataaaaggggttagagagagagaggaggatggaagagggctaggacgccggccgaaggcggcggccatggcggtgctcaccggtgcacgatgcggagtgggtgtcacgcccggaatttctatccaaaattccaaacgcttacatgtgtgtgaaccctcgtccaggaatcagccgaggcacacaataacaaattgataatagagtacaaatattactctaattaataagcgaataaaat

SEQ ID NO: 13361 - DNA, 25515 bp, Oryza sativa
gcgcgcgcgcgcggctgactggcccgcctgggccgaggagagagaagagaggttttgggccgactttcggaccaaagccaaaagaagactttttaaaaccttttcaatttaaattatttcttaaatgcaattccatttattacaaatactttcttagctcaaataaatcccagaaaaatctaggaattatagaattaagcaaagtatttaatgaaattttatctggcccaattttatattggaatttattaattaaacttagattttcttttcaagacttttaaaattatttctaaaaattccatttaaacaacaatttatatattttgaattttcagggtgtgacaaacctaccccctttaaacagaatctcgtcctcgagattcggaagaactggcaaacaggtgcggatgagctgacttcaattcatcttctcgttcccaagttgattcttcttccgagtgattactccactgaactttgcagaaacggataactcgattcctggttcttctctcatttgtttccagtatacggattggtttctcaacataagtcaaatcctcttggacttctatctgctcaatattagcttcttcggtaggtacccttaaacattttttcaattgtgacacatggaacacattatggactcctgccaaagattgaggtaattctaactgataagcaacctctcctcttctactgacaatcttataaggtcccacaaaacgcggtgccaattttcccttggtatgaaaacgatgaactcctcgtagaggcgtgacacgaagatacacataatctccctcttcaaaactcaaatctctgcggcgattgtcggcataactcttatgacgagactgagccacacgcaatctttcttgaatgatctttaccttttcttctgcttcccttaggatatccgttccgaaaacctgacgttctcccgtttgatcccacaaaagcggagtgcggcacttccgaccatacagtgcttcgtacggagccatctgtagactagcttgataactgttgttgtacgaaaattctgcatagggtagattcttatcccaacttccaccgaaatctagagcacaagctctcaacatgtcttccaaaatttgattcaccctttcggtttgtccgtctgtctgcggatgataagcagtactaaagttcagcttagaacccatctcttcctgaagtttcttccaaaaatttgaagtaaactgactgcctcgatcagacactatcttcttagggacgccatgcaaacacacaatccttgccatatacaattccgccaagcgacttccggaataggttgtttttaccggaataaaatgagccactttggtaagtctgtcgactattacccaaatagagtcatgtcctgatgacgttctgggtaaaccagtaataaaatccatacctatttcttcccatttccattcaggaatcttcaaaggctgcagcaaaccggcgggtttctgatgttctgccttgactcgctgacaaacatcacatactgctacgtattctgtgatttcacgcttcatacttgcccaccaaaatctttccttaagatcctggtacatcttagtactaccagggtgaatggagtataaagtatcatgagcttctttcagaattgcatcctttaaatctttgttgtcggggacacagattctctcacccaaccatacagttccgtgctcatcctccaagaaaccaatagcttttcctcttctcatattcttcttgatctcttgaatatcaggatcattaatttgggcttctctaacttgatcaattagagtgggcttcgcttctaaggctgcaacgaaacctctatcgacaattcccaaatttaatctttcaaattccttgcataattccaatggcaactgtcgtccttctgtagcattgcaatagccttttctgctaagagcgtctgctacaacattagcctttcccggatgataataaattcccatgtcataatccttaattaattccaaccatctccgttgtctcatgttcagatccggctgagtaaagatatactttaaactcttgtgatcggtgtacacttctgtacgagtaccgaaaagataatgacgccaaatcttcaatgcatgaacgactgcagctaactcaatatcatgagtagggtagttcttctcatgcggacgtaactgtcgagaggcataggcaaccaccttcccatcttgcatcagaacacaacctaacccaagtttggatgcatcacaatacacttgaaaacccttctttggatcaggcaaaatcaaaataggagctgatattaagcgacttttcaactcttgaaaactccgctcacattcttccgaccacttgtacttcacatctttctgaagcagtcgtgtcatgggcttagcaatcttggaaaaattctctataaacctccgataatatcctgcaaggcctaggaaactgcgaatctctgaaactgtctttggttgcttccaattggttacggattccacgttactaggatcgacggcaactcctccggctgagatgacgtgaccaaggaatttcacttcggacaaccaaaattcacacttgctaaacttagcatacagttgatgttctcgtagcttctccaatgcaaggcgaagatgttcttcatgctcttctttggttcgagagtagataagaatatcatcaataaagaccaccacgaacttgtctaagtattccataaacaccttattcatcaagttcatgaagaaagtaggggcattggtaagtccaaaagacataacagtacattcgaacaacccatacctagtggtaaaagctgtcttaggtatatcttcctctttgattctcaactgatgataccctgatcgaagatctatcttggagaaaacagtggcacctttaagttgatcaaacaaatcatcaatcctgggtagtggatacttattcttaatagtcacatcgtttagtgcacgatagtccacacacattctctgagtatggtctttcttttccacaaaaataaccggagctccccatggtgatgaactcggtctgatgtatcctttctgtagcaaatcatctacttgcctcttaacttctgccaactcattggctgccattcgataaggtctcttatggatcggagttgttccaggtaccaaatctattctgaactctatatcccttttaggcggcataccaggtaaatcatctgggaacacatcaggatactcccggactataggaatctcttccaaagttatctggttcagtcttgaccttaaagactcagatgacaatgcatgaacagttacaactcgaccatcatagctgttgagagttacttttctgttggcacagtctatcacacctttatgtctggctaaccagtccatccctaggatgacatcaaggtctttggattttaacaagataagattggccagaaatggtactccttgaatttctattctgacagaggggctacgttgcaaagagagtgcttgattacttggggtactaaccatcaaaggacgtctaagatattctacttccatcccatgatttcccgcaaaactcatagataagaatgaatgtgtagcaccagaatcgaaaagtactgttgcaggaactgagttaacaaggaacgtacccaaaatcacatctggagcatcttgagcttctgcagcagcgacatgatttacacgagccttggatgctggtacagcagagttattctgggcagggacaaccttcacgcgtcggggcttcggacacttgtcagcataatgtcctggatctccacagttgaaacacaccacgggcttgttgccttgctccctcttggcaggttgttgctgtgctggagctgcaacaggacgtggagcttgattacggatgttgttgccagcattgttgttgaagaactgacgttgcggacgaacaacagacgaagaacctccctgtggcatgggctggggtcctaaagtaagacgcggcttctgattatttccctgttgtgtcttgaattgagcaatccgacgtttcttctgctccatgcgattgtacttgtcctcctgacgaatagccttatccactaatttctggaaatcaggataatctccaaccatgagtgggtaagaaagctcatcattaagtcctcccaaaaacttctcctggcgctcttcatcattgcgcacatcttccggagcataacgagcaagacgattgaactcgtgcagatactccgtaacagagcgagatccctgggaaagcgacctgaactccttcttcttgagagacactactcccgatggtatatgcgtcttccggaaagcagcggtgaattcaagccaagtgataggttcagcagtagtcctgttaaggcggaagtgatcccaccattcagaggcagggccatgcaactgatgtgatgcaaatgagaccttctcctgatcagtacactgaagtaaatccaacttcttctctatggcatgcagccaatcactagcttcaacaggattagtggtactagagaaaacaggcggcctcacccgaagaaattctgctaacttgttctgtggaggtgcatgattatttccttggttttgctgattctgaaattgctgcatcatcatgttcataagctgtgtctgttgagcaagaacttgagcaagagtgggattctctccattgttgttgttattggggttgttgggaccattcccattgctacgagtgttcaccatctggcatggacagggcacaagaagagaaaccggggaaactacttaggacagagaattactttaacttttattgatcttaactgagtttcattattacaaactgaagactctcacaccactaaactcaccaacttcctaacactcaaaagcaaacaaacgcatgcacttacatcccaccactgatgtaaatcacatgcgagccacacacaagcaaacttaaagcaaaccaactaacacaacgatctaagacaacgacttaacaagtcactctagttcttccaagcatcggaggtcgattgaaggctcgtcttcatcatcttgagttgctacccactcaatcttggaattgttgcgcttagattcttcttcttcatcactacttatgatgatgaccggaggatccgcttgagctggagcaacttctttctccaccacacgaacctttggcgccagttgatagcgagggacaaatagagctctcttccttgcggtaagacgaatcctggccttctgcggcggtgcttctcccttcaatgcggctaattccttctccaaacgatccaccttgtcttctaacttgcaaatcttaccacgattccgatcttcacgatcttgagctgctaacacagtctccgcacgactttcatccatagcccacaacatctcaaccaaatgtttcgtggtagcatcattctcaattccttcagtctcaagataactgccacggtcacttccctgaggttggcgaggatggtagcgatactcagtgtcggcggcggcgcgaccccgagcggcgaggggcggcagcgctaggaggggaggggaaggacgacggggttctcaccgaggattcggccggcacggaggggcgacggcgaacggcggcgaggaatgagtgggaggcgacgacgaacggtggacggtctccggaaccacctagcggacatgataaaaggggttagagagagagaggaggatggaagagggctaggacgccggccgaaggcggcggccatggcggtgctcaccggtgcacgatgcggagtgggtgtcacgcccggaatttctatccaaaattccaaacgcttacatgtgtgtgaaccctcgtccaggaatcagccgaggcacacaataacaaattgataatagagtacaaatattactctaattaataagcgaataaaatgtcattacagaggtagatagttcctctcaatcaataaagatctaagcagcggaaaataaataaacggcgcagacggctccactccacaggcagcttgaccaaggctacacctaatcctccacaccatcagcctcattgtagaactcttcctctgatgaatgattgcaaggtgagtatatgacatactcagcaagccacgcagcaaatatgcaagtgcacaggataacaaaggatggcataatagggttccatttgcaaaagcagcatttagcaaacatttgagaattttaacaaaacagttaagtaattaaacaatattaagccaacgctatacaacataccctgttgtataggcccaaccattctgaacaaccaccccggctgcacagttctatctccaaaccaggaatataccattccaaaccaggagctaatcagattattaccagtttaagcatctttttcaatgatgagaggtgtgagactaatcacgaaagacattgttagacccgcccataaccgcgggcacggctattcgaatagttttactctgatcagaggtgtaccactgtacccacaagacacaaccccacatcatgtcaccatgtgcctcaataccaccacggtatctcggaaaggagttgtgacaatacccctcgcataacacaatccactgcagcgcaccttcctggatcataatcacccccttataaacaaggcatggactccccagcgacccccgtgggcttatctccgccacttctcagtctggtgccccgcaatgaaccatgctatacaaaagataaagccgttgcccatgctggcttgtggttggcacgataaatgtttcacaaccgaaactcgtgaaccggtccttaattgccatgagcacgaccatcaaaaccatgtgctcacaacccaccattaccaggttttagttggcacattaattaattaactaatcacgattgaccatcgtgaactatcaataatccatcatgaaataatagtgaatcattagttatcccataagtgtactaatgtttctaagcagggctaagcaattatatctaatatctagttgaaccaatataaataaagctcaactagtcaaattaatataacccaaggtatcaaggaataaggtaatcaagtacgaaagggccataacaaagaataggtcaattccacccaatgacattcgaaaatagatgcaatagttgaatagaaacaatagctttaaataggatcaacatgctcaaagggttgtttgggatctatgtgacttgccttgctggccttggaactcttcaaactcttcttctgcgaaaacggactctccggaaacgacggaatctaagcagaaaagagcaaaatcaccaaaacagcacataaacaagcatgaacagtacatgtggatatttttaatgtgtagatctcaattttagaaaaatttagagacttgaaccaactaaatcggagctaagatgaattagttatgaatttttaaagattaaatcggattaaaacacttaaatcggtttaaattgaattatgacgcaataatgaattatttttgaaaaggaaaagaaggattattgcgtcagcgggctagggtttgggtggaccggcacatgggcggcggttcacacgaacggacggccgagatctaaccgatccaagatggacggccgagatcgatcgggtccacggcggttcacggcggacggccttgatgacgccagcaatgacgtcaccgacggcggcggcggctcggcggagcggacggctcgggcggcgcacgctcaccggcgaacggcggcgctacggcacgaacggaggacaccaacgggaagcggacggcacggcgaacacaccgacgaccaaaacgacagcggagaagcaacggacggcgacggcgacgagaaggaagcggcggctaccttcgggttgtcgacggcgacgaagctccggcgggttccgacggctgcgaaggggcggacgaggacggcggcgacttggcgatgacgacggcggtcttcccgagcggcggcgacagctggagcgacggcggagcacggctgaagcggcggcggcgacggcgaagctagggcacacggcgctagagctcttccgacgacgagaggcgaaggcgagggctgcgacgggtagaggagacaccggggatccttttaaaggggctcggaggcgacggcggaggcccacggcgacggcaacggcgaaggaaaccttcggcttggagagagggaaaaccgatccgaatcgaactcgtctccgacgctttccaaagcgatttaaccaaagattccaaaggagaaaaggtagaggagatcccggagatcatttcccctctattgattcggccggagaaggaaaggaatggccggattggaaaggaaacggcggcggcggctcggcggcgcgaaactagggtttcggcccgaggaggacgacgactccgacaggcgggacccacctgtcagcgacagcgagggcgcgcgcgcgcggctgactgggccggctgggccgaggagagagaagagaggttttgggccgactttcggcccaaagccaaaagaagactttttaaaaccttttcaatttaaattatttcttaaatgcaattccatttattacaaatactttcttagctcaaataaatcccagaaaaatctaggaattatagaattaagcaaagtatttaatgaaattttatctggcccaattttatattcgaatttattaattaaacttagattttcttttcaagacttttaaaattatttctaaaaattccatttaaacaacaatttatatattttgaattttcagggtgtgacagtgggttctggcggcggtttccgacggaggagatttggacgggacggcctgcacgacggcgaacgcaacggcgtcgaaggcacggctcggcacggcggctagcggcggccggagcggtggtggcggcggcggagaggagggcgacggcgctagggtggtggagggcacgggagcgggtggttgcaaaacgaaaaagagagaggaggagacggggcgctttatatagaccagcgggggttgatcgtggtcgggatggccacgattccgccggcggagtggggagaggtggggaggagagagaggcgggattctaaattcgaatcccggccgtctcgagcgcgggcgcgggcgggagatagaaggagtgggcgcggggaaggcgggggggaggcggtgacgtgggcgacgtggcccaggaggtgcgggagcgagcggtgcggcggttgcgggatgcgttggcgccggctggaggtaggagacgggcccgacaggtgggccccacctgtcggcgacccgaagggaggagggaggaggcggccggctgctgggccttggccttcggccggcccagcggggagggggaggggaagagaatgggccggcggcccattcaaaaaggaaaaggagggaaaagaaaaacaaaacgaaggaaatgaatttccagggattaaatattgcttgtgctcatttttaaatgattaaaattatttctagagctctgaaaattccactaaaaatcttgttagcatatttcggcatgtagaactcaagaaaaattccacatgccaattccaattattatttgcattaatttattagggtttcgctcttgcttttacaccggtattttcttgagaccatttataaattcaatttaggcttaggaaaagaacttcagggtgtgacagtttcttcccatcccgtcctaaccacctctattacaaatctattccaacttagaaatgttaccatgtttctctttgcctattctttcgacaaactatcttgatcgctcctctaccttatttcgtgctaagaactccactggttcactactgattagtaaatctccttagttaaataaacatatgagaggctagcagctcccttacgacaaccaacattgctagctaacgttctttatcatctgtcgtttgtgatgatataaatgttagactattggtagataggcacaagacacggtatggttgcaagagtttggtctggtgcacacacacgcaacaaggattttaggatttagtttaggtcataaatttaatttgttttggaaaaggaaaaatttaatgtgtgactcaagatagagagctttaaaatatcgtcttaaggagcaggatgcacacgcttgcattaatcgtgaagaagcctagaatatatttggggtatctgaatttgaactggtcgtgtcacttctacaacatatagatgattgatagcttcatagctatatctctcttgatttggaaaccatttactctctcattgcaaggctcactaggcaataaattgtaactttctatgaaggctaaataaactccatttagaaacttcctttcttgcttttccacatttattcccaccctgtccataccacttgtactacaactctatttcaacttagaaatgttaccatgtttccctttgcctattctttcgataaactatcttgatcgggcctctacctgatttcgtgctacgaactccattagttcactaatgattagtaaatttccttattaaaagaaaggaaaatgaggggctggcaacccccttatgaaaaccgacattgctaggtgatattctctatcatccatcgttagtctgtgatgatattagagtattcacagataggcacaagacgcggtgtggctgcaagagcttgatctagtgcacgcacgcatgcaacaaggatgagaggatttagttcaggtcatgaatttaatttgtttctgaaaagcaaagatttaatgtgcgacttgacatggatagctttaaaacactgtcttaaggagcaggatacgcatgtttttgtattaatgataaagagggcaagaatatgtctgggtagccaaatttgaatgtgtcgtgtcacttatacgtcatgtggatgatatacgtctatatctctcttgacgtacaaaccatttactctatccctctcgttatggggctcaccgagcaataaatcataactttttaaaggctccataaactccaatttagaaactttctttcttgctcaccacatttcttctcactccatcctaaccacctctattacaactctatttcaacttagaaatgttaccatgtttccctttacctatccttttgtcatactatctcggtcactcctctggctgatttcatgctaccaactccatcggtttactacttattagtaaatatccttagtaaaaaaacatatgagaacctgacaaccccctttgacaaccgacgttgctagctaacattctctatcatccattgttagtctgtgatgatagaatgttagagtattggtagataggcacaagacgcaatgtggctacaagagcttggttaggtgcactcacgcacgaaacgaggatgagagcatttatttagtttgtggcatgcatttaatttgttttggaagaaatgtaatgcatgactcgagacagagagcgttaaaataccttctaaaggagcaggatgcgcacgcttgtattaatggtgaagagcacaataatatgtctgagctagccaattctaaactcatgtgacttatacgtcaagtggatgatagatagctatatctcttaacgtagaaaccatttactccctctcattgtagggcttaccatgtaataaattgtaacttcttaaaaggctcggtaaactctaacttagaaacttccttgctcgccacatttattctcaccctatactaaccacctatatttcaactctattccaacttagaaatgttaccatgtttccttttgcctattattttgacaaattatctcgatcgccgctctatcagattttgtggtacaaacttcattggttcagtactgataagtaaatctccttagtaaaaagaacatatgaaaggttggcaatccccttataacaaccggcattgatagctaacattttctgtcatccatccttagtctatgatgatagaatgttagagtattggtagataggcacaaccaatttcttattcgtgtgggaaggatgaaacaagattgtctaattcaagaaatccttctcacaatgtcatttcttacactatatgattagaactaattatttttggtagttggcttttaatatgccctgtccttggaacgccaaaaatatttttagtagttggcttaggggagtgcctaagatctatgaaaaaactagttttatttgaagctagtgcactacgttgatcaattttgcactgccaaataataaagtttttttataacaaaaaaactatctaacctcgtgcaagttatgtctagctctttcagctaactccaatattggtctatgatgataccacaggaagagcaagatattatgtataaattgtaatggtgctacactcttaggatctattggcaagagtatgttgttccattatgggtggcatatcgcatatattcttaatttctagaatatgttgccaagagtacatggttattctagcttttcagcggatttttattacttaagagtagatggggattttgtcccatcactctttttattcacttcattagaaacttattatccgacaaacatcgagcccaacctctattgctttaagccgtccccattgctctcctcctccatcccatgaatgtggcggccctcccactccactctcgtgaactttgcggtggcaatggctctaaagctcgatgtcaccacgatggctctcaggcttgagctcgccctcgccatggcggtccttcgctccaccccgagcttttgatctgctccacctcttccctcaaacatttgatttgtgtcaccatcacctcaatccctcgattcagcggctaccaacaaccatgccaacctctatttgtggctttgccgctagcccgtcctggatccacactgatgccatcgtcgacggcatcatctcgtcctcgatccgttgtgcccagcttcatctcgaccttgatctacattgcccgcttcattcgggcatctcttcgtaccactggtgtgtgatctctccctcgaggccaatcgtatcttgccagcgtcaatcgattagtgatggcttctccaaagcaagcaattggttttgtcttcgatttgcagcaccaccgccaccagctgtcggagatatgggaaccggggtctccatctccctcaggtcaccagggcgctgcagaatacgacaagacatacaagacacatatattcaagccaccaaggttaaaacacccaaagaggaccgctaagtctccaggcgtgccctgaacacagttggtgccccgggccatggggtgccccgtgcccctagggacagcggccacctagagaccaagccaaccatctctaggcctcgggtaggggcccgagcactcgtcgtgccctgagcagaggaccggacataacctttgccttgagcaccccatagagggcatggcaagactgaagaaaagctgacaagactagaagagttgctcaatcactcccttgcattaatggcagtatggcgcacgccttccacccatcctgtcgagaatgttgggagcgtggggaaacatgtgccacgcgtcaccaggtggtcccacgacagtgggttgagggcaccttttgactttggtgcacctcatccgtcagtcaacaggggagaacatccctcctcgtttggttcaaaagagttcaacaagaccaatcagaccgaatttaatggagtaggcttcactcccacatcaatgttggcactgtggactctccttggattataaaaggatgatctaggctaacggatagagggttcgatcccaagcaactaagtatagacactagaactcgagcttccacactgtaacttattctcgatcatccatccatgagtaggatattacgcctccctatagcttgaacctatataattctttgtactcatcttccgcgcgatctacacctagattcgaaactcatcccctggctgaatctttggagggagagtactcgcttccccactagagaagtttcatactccaatacaacaacttttttcactggtaattgttgttcctgagaaacgcttcgtctcccaaacggccaagaacactttcttttcactggtaatttgggtaaccgaatattacaattgtgtttccattacaaagggaaaaagaattcagtgctcccaaacaatccctcagtcttccgtttatgttatccaacatcggacaatagatgtgaatcttccatagaaaccacaattacatgatggttaatttttgttgcatagctagcggcagttcacaagaacccggcttgtctgtactatccggtctccagaacggacccacctgacagcaaaatcttcacacgtcacccccactctcacatgcctgacacatgagaccgttgcccgggccccacgagacatcattaagtgggcacgtggctaactgtcctgcttttgtacacagttgatgaagtagatattttttgggtttcaactgaatcatatcatcatcactaatatgtagctttttgtttctttcatcccacgagctcaggttttaaattggatagatctaccatggaaaggatttaaacccagctttctgttaacagccaatgtagcaccctatcttcagtttataagcataggtgaaaatttaaattttaaaacttaaatttagagctaatttaagtgtcttttatcgtcatttattttacaacatttgcttttaaatcgctataaatgtgttcaaaaaagttttatatataaattaattttaatcgttagtaagctgtttcgattaagcgaaacgatttggctgctattattgttgcctactccctccatccaaaaaaaaatcaatctaggtagggatataacccctcctagtacaataaatctggactaccctttgtacagattcgttgtcctaggatttttgggatggagagaggagtagttatcatataggcaaagataattcgattcgctgtgtactaaactcagatggagaccaaaatctcagcacaactcaacataaaagactaacctgatagataaaatgcgttgtcattgtttatattatttgaccatgatacaaatttcgcatgtactttgacaagtgacaatcaatgtgaaataaataatatatatatatatatatatatatatatatatatatatatatatatatatatatatatatatatatatatatatatatatatatatatatatatatatatatatatatatatatatatatatatatatatatatatatatatatatatatatatatatatatatgttgattgaattattactacggattatctatactccattagggagataaattaaggattttaaaaatatacttaatatataatctaaaacaagtggtctaaaacaatataaaaaattatataaccatttataaaacatattttagaatcatagagcaacaacccacaacaataatctgttaaaatagctgaaaataacctgacctaaacaagtcgtctattttatccccaaaaccttgtaaaggataaataggtaagcagacatgcttggtacaccttgtatgcaagtataatactccgagactttgaatgcttggtagtaacatgtgttacatgttggcatcataagaagtgtacgggtacatgatggagtcgtaatcatagaccattggattaggactttgcagcagcatactagcccatgttggccacacgtatatatgtatgcatgtcatttgtcaaataattttacaaaggtcaatgtatgctctctccgtctcagaataagtttatttttattcatcccatttgtcacaaaatagttcttttttgaaagtaatcgttgcatcagagtttatgagagtaaaaaataagtttattgaggaataattgcattggatttgaaaagataagggtattattggttttctgtgttttcttttgatacatgtatgtagaattagaaaaaataaatttattttgggacggagagcgccgtatcttgtttgttgtgtttttctgatgatgataacgtggcttgcagctgacaaccatgcttgcatgcaacgcatttccaacgcatgtggctctccggtttgtaaagtcgatcgatcgagtgagagagttgatgcacggcaagcagtgagagtgatctgagctctgtttatgtgaaagctacggcttaattttggttggagatagcgaccaaattagccttctccctgtaggctgtatatcatttgttgtgtctgcttaattattgattagtttgggcactaataatatcagctgtgcgacaaaatatcagcgcacggttatattaatgatttatcttctcttcgactatccgaagttggacagttttctttgattaatttcattggcgcagaaagaaattaagggtaggataggaaattttgatactacccttcatctcataatatatggcgttggttagttaaaaaaaattcaggagtaaaagataagaacgatcgaatctacaatactcaataatatctggttttcaacttttactttcgaaaccatttgcttttcagtcctcaacgataaaaatttcacttgatgtggttacgtgacctaaggctaaaatattttcaaagtataaaaaacagtactagtgaaagaattaaattttaattatgatatagaaaattttgacctactaattacgtgcaaataaacttaaattccttttgggctcgaatttagtcgggccaccacagtgatttttgaagtaatctaaaatatttcaaattacgacatggaaaaataactatgtgtcggtatattctcagctcgttttgtagccatattcatcctcttcttttagcaaaagtacgtataggtgataacttcatcggcttgctggagccaatatacttgatgtcattgatgtgctaaataagtgttgtgaggtggttcaaattgcaacaaagacaaagttaggtagttcaaagtgaagctttgataataataagatggctctaagtatataattcactcaaatttaaatttggatgaagctaataagaaaaaaaaaacagaccatgagagggtaacataaatttaaccatcccattagcatgaatacctctgatcaggatgagaaaatcgggataggctcattcatgaccatgtgcagtagtctaatctccccccattaatcaaactgttagatcaaggctaataatataaccgatcttttgactataagattctttatagttttctctcagtctatccatataatagttagctctttacaattaatataaggcctacttgtctctctcacagagtttcttggttcttgtgaccaagccggctgtaagtttacagcccgcttctcctctctcctcttttctctcctccacctcagcatttagccgacttatagcctaccattatactttgctcttaaccgattaattaaaacatcactgtcagctgagcccggccaaatctcgaccaaacgttcaagcgcagaggaaatggcatccccctatcctgggcgaactgaagctgaattttgatggggctttctttgatgaaggcaagaccggtggatggggatttgtagtacgggaccatggtggccactgtgtgctagctggagctgggagaattgagctggtgcatgatgctttgtgtgcagaggctatggcatgtctttatgctctgcgcgccgcagcaaacaacggaatttctcatgtctcagtagaaactgattgctctgtcctagtgcgagctctcaaatcagctgattatgatcaagctacggctggtgtcatcttcaagtaaatcagattgatgtctttggtggactttgtaaaggttgatttgtctttcgcctatcgattttgtaatagttgtgctcatgaactggctcgtcgaggggctaattgggacccgggtcagatgtccatttggactaaccccctcccgtgttttataagatcttttgtggttcgtgattacactgaaccagcgtatcaataaagagcacggtttgagataaaaaaaaaaacatcactgtcagcagcagacggatatcaagaggtgggccccacggggtcgccgtcgttgaccgccgacggggcctccaccgccgtcgttgcggacacgtgtcgggcgatgcggcgcggtaggcaccctagctagccgccccctactacttcactttcagttggaatgcatggggtgccgtgctgctgatcgacctgggccggcggttactgcagttacgttactctctctatgaccacccctcgattccataaaaaaataaatctaagatagtactactccatttatcttaaaatataaatatttttattataaatctagacaactgtgtgtctaaatttatagccaaaaattattatattttgggacgaaggtattataagatatgacatatcctaatattattacttcctccattccaaaatataaagcacaactactattaatctaaagactaagaaaaaattattatcatcttgtagtttggatcgtcctagtaaatgtaatgtatgcatccaataaaattagataatatgaaagtggagtatttaaaaaagtagtaatttaatagagaacatgtcatagttaattacatgcttgtatgcatgtctatattatgaaacatctaacaaaaaaatagttgtgccttatattataaaatggagtgagtataagcttataatagtattaagatgtatcacattttattttttgtttgtttgttttttataatacgaagaaaaataaaaatggttgatatattttctacgagtactgcgaatctagaaatgcttcctatctatttatatactcctatgtcccataaaaagccaatcctaattatgaacctgtattcgttggtatgattagattttttatgggacggagtgtgtacgttcttactccctccatcccataaaaaaccaacctagtactggatgtgacacatcctagtactacgaatctggacatacctctgtccatatttattgtactagaatatgtcacatcgagttctagatttttttcaggacagagggagtatactccatccatcccattttaagtgcaaccatgagttttcgcgtccaactttagtcatccgtcttatttgaaaatttttcgtaattagtatttttgttgttatgagatgataaaacgaatagtactttatgcatgacttatgtttttttagttttttttaaaaaaattttaaataagacggacgattaaaattaggcgtggaaactcatcgctgcacttgaaatgggacggagggagttttttttttacgagacagggtacttcgtaccggtattttctttcaattttctgctgttcagttgagcctcggagaccgtgcagtcagtggagtttccggtatttcagttgtgggagaccggagtagcggacagagtggctgacgtcgcctggcggttgctgttctggaaatcaatgggggcactgtaccttgcgtttcagactcttcgggcgaccgtgactgaatgcgttcggcggctcacgaagaagatttttcttgtttgttacgcgcatgtttttcaaattatttaaatatatgtttctttaaaatattaaaaattatttttaaaagcatattaattcatttttatatttaaaacaattaatacttatttaatcatgcgctaatggtttttctcattttacaaatcttatcttttttctcctctcaaatactcccttaatcatttattactaataatttgttgtccagagaattattagttgtccagagaattgaaataattttaagagtaaattttacaaaacggcatgtaaagactgtttgttttttatcaatgtatcataaaactatatatttaagaaagtgcatcacaaaactacaaatttaagatcatatttttcataaaactacatttttaagatatcatatcaggaaactatagatttaacatcagttttatcacaaaactataacttttgtatccttgatagtgctatggatataaactctacaatctgtggttatttaataactttattactaaaactatagttttgtgatacaatgctttaaatttgtagttttgtgataaatttcgtgctaaatctatagttttgtgatacacattcttaaatctatgattttgtgatagtttgcttgacgtatatgtagttttgtgaaatttactctattttaatttaaattttaagggtttttctagtgtagtttattttccagcataaatttataaccaattttgtccattttttagtatatttttcacggtttatcaactataaatcaaataatcaatcaacatttctatttcttatgatgtaccataaaatactccttagatggtactccacgtggtatattaataatatcaaatcaataatgctccatattgtgtatgctctctaggtctgtatgtcctctctctatctctctgaatcacctcttgttccctcggctcatgcctcataagtcaatactacatgatatgacaaagctgcaaagctttaaatattttttcttctaaattgttattcgattacgatcagatggtgcaattaaacattttaagtattttttcttctaaattattatttgatctacgatccgatggtgcaattaaaccttataataagatcttatatgattatattataaaaaaataaatatgttttaatcgttaaatttgatgtttcatgtgcaagagcgaaatgtatcacacattttattgtgcttcgcatatctttcaactatttcaatgatttaaaatttttgtttcacaacatataacttaatgtttcaccaatggttaactaaaatattttgactgcattaatttgttgatcttatttggcgcccgacgtctagatgccaccatattaaaaacaacggataatactagttcacgaacgctcacttatatgtatacgtagtgtcttaattaagctcgatatataataattatgtattcaatcttgacaattttatactaattcaatcgtggatacccacttgtaggatatattttgtcatttgctctatccgtcctaaaacaattgttttttctaagatttaaaatttatcataaaatagtttgtactaattatcccatcaatcactttccatttaaatttctcccttttgtccccaactatccccatttaattagggacattgtagtcttttctaaaccttaatatatacttaaacactccagaatgacaactgttttacgatgaaagtagtacctactttttttttcgggagaatagctactgtagtccctaaagtttctatgtagaatcagcttagtccttaaccttttaaatagttcaaagaagtccttaaactttgtcataaggcctagaatgggtccaccaaaatcgtcgtatggatatgccatgtcatcattcatgcaaaatctatgatgaattgtccaatttacccttacgtatatcatagaaaaagaaatgtaagggtgaattagacataaccatagggaaaaaaaatacttttccttttttcacctttttgacgtatatttttgctcttatatataccatattttttaactttttcttttgttttttattttcctatgatatatataagggtaaattggacaaatcatatagattttgcataggagggtgatatggtatgtccatgtggcgattttggtgggaccaaggactatatcagcccatgtgacaaatttaaaggacttgtttggacaatatgaaagattaaggactaaaatgacccaggagcaaaattttagggaccatcttcacaattctccctttttttttcatacccctatgttaaaaaaacggaatagcataataagatatgcaaaaatgaagaaaaggaacctaattacattctcacctctcctgcctaacgggaacagacagagcccaagtggtcataagagatcactctcgaatgaaatggaacatccaatcggcattattgattgattttcagttggcacaagaattactcaaaatgagttctgaatgaagaacaaacatcatgaattgaagtagagacccagaattactcgtacaagctgcacgatcgagaccaagagaatctttgtgtcaaacctgtccattggtcagatcgccgtcgcatggactggcagacggacgccttatgatgctaggatttcgctcatcacaacaagaaccttcatttgttgccagatcagatcgaagtcttactctgccaaatgttctgtaaagagattgagatcatcttactttacacagtgaagtcagagaagcacagtgcggtgactttagggtaatctcagccgcccgatttacagcgagcgcacgggatcgatcgctacagcacattacattaacacatgaacaatacttttacacagggacggagctagagaaaagatgagggggttcctgactttctctgtgtaataccggtatgtataattctaaagtgatattgtactaaatagttgtgtacccaatacatataagcatcatatctctaattgatggcaatatataacaagaaaatacatagaaaaattaaaaatatgcgtaccataatgaagaaaccatcttataactagccacttgctgtcatcctactcccctccgttcaatgcaagcaacaaacactaacttaatcaataatcatgggttatggatggtctagcaaaattgaaagaggggaccaacgggacttgacttatcaattggattttgatgctgcggcctacggtggtgaagttggtggcgaacggtgaactgttggccaacgttgggcatggtaggagtaggcgataccggtggccagcggcaggcacggcaagggcactagggcgggccgcactgccgcaggcgtccagggctgatccaggtgataggggcagccgacgtcgccgcgtcgggcacaatcaggggtagatctagacggcgagagactgaaagatgagggacgagtcgcgcgttttgtggaagacggaacgatgccgccctgatttctgggccttctccaaaaacacgtgcgatgagactcctcatctcctctcatctgggccttctccaccaataaaaaatggaataagttcaccggaggtccctcaacttaacagcaagatttttcgaggtcccttaaccacaaaaccagaaatatctacctctaaactcactcaaaccattcaccggaggtccctcggcagtattttcgcccggttttgctgacgtgacatcctagtcagcaaaaaaaattaaaaaaatacgtggggctcacatgtcagctgcacattttttttcttctcttttcttctccttctctcctcttctccttcaggctgagggcggaggcggagcaaccgcgcgccgtggtcgccgtcatcgtcggctctccaccatcgtcgtcgccatgagcgaggctacgcggcgcggccgtccggcggcggagcggaggcagcggagcgcggcggcggagcggaggctgcgggcggagcagccgcgcgccgtggccgccctcgtcgtcggctctccaccgtcgtcgtcgccgtgggcgaggcctagagttacatgcatatatgcattcattcatgaatatatacatatatattcgatcgatcgatcttgtcacattcaacccgtgcagcctgcaaatcaatcacaagctgcttttgctttggtctttttctctctattgcatgcatgtatccctcacttgagaacccatagctagcatgcatgcgttcacgggcttttggcctttcttctctcgcgcgtggagggacgccattgccgccaacaagctcgcgagtgaacctcagccggctctctcgcctctccggcaagaagggcgccaaggccgccctgcccgacgacgacgattacgagccccccgcaccgccgctcccacccggggacggcgacgatgacgaggagcccatcaacctcgtcttcaagggcagagatgaggccggcgagagagggggtggcacgccgcatcggcgaagaggtcgccgccgaccgcctgccgccgctccacagccacacttgcccctccgccgctcgccgaccaagccccccgctccgtcgtaatcgcccgccgccctccgcccaccgttgcttcgcctaccgcgctcgtggaggtcaaccaacacgacgacgacaccggcggtgaagagctagagcatgacgagcgccgccgctccgctgccactctcgcccgctgccctgcccgccgctcccgccgtcccagccgcctctctccccctctcccgccaccgctggcgcgctcgctccacgccgcccaccgccgcgcccgcctcctctcccctctctcgcttcttccccacgcgccgtgcccgcaccgccgcctgtcgccacgccctcatctgcccggccgcctcactgaagaagacgagaaaagaaaatgtgcagctgacatgtgggccccatgtactttttaattttttttttgctgactaagatgccacgtcagtaaaaccgggcaaaaatactgccgagggacctccggtgaacggtttgagggagtttaggggtacacatttctgattttgtggttaagggaccacagaaaatctcgctgttaagttgagggacccctggtgaacttattccataaaaaatctatgggctggccgactgggccttgtcgagtggaagttttgggctagacaatggaggggggttccttggtttgggctagaggggtgcccatgtggtagagatataggggttacaagctatttcgaattttggaccgggttcctgggcaccccctggtcctattgggctccgcccctgcttttacatagtatggttcgttgtttaccactgccgctacagccaataactgcaaatcactgttttgtactgtagcacaagacacaaattactgtgctcctctgcctttagcaccgagaggcagagaagctggatcctctttaaagagcactatattcttacccaaatgtgctggtaatatacataaagtgctaatatttgctaagagaataatatttgttatagttatgctttgtgtattatttatacttttattgattttgtaggagtaaatttaaaaatactttgtacgttcctacttcctccctcatcgtatacgaaaggagggagtatttcactattgactagtgctgttttaagtttgatcgacaatatttttaaattatcaaattttaatgagtgaaattatttaactagttaggaacagatggagtatatgattaatcaaatataggtcaatgtcaatattggagaaaccattcaaatcctatatactccatccatcttataatataaggggttttggagagatgtgac

SEQ ID NO: 13362 - DNA, 1123 bp, Oryza sativa
tatttggccacctttccggccagagccaactcggcctgctgtttgttgccccagaggaggacaacatggagacgatcgtcgcgcaggatgcgcttgtaatcacgtggaactcgtcgccagacaccgcagatcttgcccgtggcattctgatagacactgagagtgcccgccaaggtggtctccagttgatgctcctccaggattacacccgcatcatcaacgaattgaatggcacgcggacgaccgattcgcgatgaggtgtagaaggagtagtatagattcttcttgtggaacaggaaacgggcggtggccaccacattctgcggattgtaggtggtgtacatggacttcatttcctcacccttgaggaaataggaggtgcggcccgttagcaacgcagcgtaatctataaatagggatcaaatgaaaggtggagataatccaggtgttagataaatacaatagttctcttgttaattaaatgtaggagctggtgaatgggattacaatttcccgcaggatttggcggattctattgggatctgggtgggtgtccggtacttttgtacttacgtttcatgttgcgctcttcctcttcattgggcacgggcacatccaaggctacatccgtatctgaaagatggagggaatacaaatagagaataagatgatgctgggcgataaggtacgaccttaaatggaatttagatagcaacaaatgcttcaaagcaaccgaaccgccgccagccattcaccatccatccagccagccatccagccagccatccagccagccaaccaactatccatccacaatttgtggacacaattccggcattcaaccaaaattccagttgaatgggtgaatggtgaatggctgaatggacgaatgccaggggatcatcatgaatggcaatgcaactatcaggtagagatcccacctccgaactaagaccttccatttccacctctcgcttccacccaggtggcattcattaatcgtgcataaattgagggcaggtagaaggtagagtttctcgaacgggaagtctaacctacatctaactagggaagtgctttgtatttgaggatgtgcggactctggggttctgaattcatggga

SEQ ID NO: 13363 - DNA, 20796 bp, Oryza sativa
aggggccccttttttttggccctacctggaatggtggtcttcgttgttctgttgttattgttgttgttattcttcacagtgatatgtcattcaccgcaccttatattgttcccttatcctttatagggtgtccttttggattctttcttgagtaatcttctgaatttcttctatttcttttattcttcttccacgcccaaattattgatattctattatcaatatatattgaaaaacatatttagcttaaagaattctattcatctggctgcccatgaccaccaagatccatacttatctggaatagtgtagattccttatcttgaatagtgatctttgtcggggatgacaagatctttattcattatcttcgttgattatcattggtgctgattgcaccgtgtcaatctctgatgggtctgatctctgaaaccactgggccaagcgtttgtcgaactcttcttggagcattcatttccaaaatacagtttaattatgcgccctgctcccttgcagtattcataactatggctgtagaatttgctgataaaaatccttgtgatcttgttttggaaaaccagctgatattcataatctgtggtgatagcttcttcaatttctgcagcttcagaaaataatctccaattttcatgattagcaactgttgtatatatttcttcctcttcatccaatagtttgctaggaccgtcttcttgaaaattaaattgtcccttcatgatatatatataatgaattgctggacgaacaggtggtgtgaattttggtggtattgaggagaagataatcctgtatcttccatgtccaagtctcctgcatacatctttcacagcgtttcctaaatcagattgaaggatctgatcgagggttgcatatatggaattcacaagaccatgatctataatggtttggagagatatttcttcatggttgtatgtgggtaggttccggaatctttgaagatttatctcagctttgagaaccaggaatctataggatgggtcagaaattgcctgttcatctagtcttaagagagggagcatatatatgattactcgtatggctgggtttctttctctcccttctaagagatcaaagaaataatcttggagtccaaggaatattttcatttgtctctccttaaacttttgccaaacaagatcgaggatgtcttgcccaaagcaggataaagtttgttccgttttgaagcttaatctgggttggagattttcgtatgtagtactcatgggattttggcttttaagtttctttttgcaagaatctttgtaggcacaagatctacatggtgcttttggctgggtccggagtatatattgtggaaggaataaattaggatgattatgcagtatgtatggtgtttggggaatggtatcatgcctttttgtggatgatgatggtttattatgtggaaaagattgcaataggttattgatatttatgtggaaagcaaccatgctcgaagcaggatctgctgagatcaaaatcttatctgagaataccttggtattcttatctgttgccatagattgttcaacttccatgggaagtatatcttggccatcacgggatttctcctcgcgataatctagtaacctttcctcatgatgagggatatcttgtattttagcccttttttctgttatcttttgatctgagggcacgaaatttttgaaataatatgccaggccatttaaggcatgagctttttcttttttgttttttgtttgccacaagaggtttaataacccttgttgtagctctgttattctgaaaattgtgattaaatcgttctccatggcctctgggcagttggggcagtctccatgaactcatatttgtgagccattcagacttctgtgaagccatttccctgcatatatattcaaaatctttagtagctttaataaatatctatcttcccatgatgtcttacctggcaattccatagaattttggaagatatgatgagaaagaatagttgtctatattctcactaagctcatattcattaattctttcttcagactcaagattaggtacttctaagttgtcgagtttgggggagactccaccacactttcgtacctctgagatatatggaacattattttgatatgggataaaagtaattccttgctcatgtattactgtgggttgtactgattgttgaaggaaccttaggccaattatcatgtcatcattaatcattgacaaatctcttattgtaatctcatctattatatatttagttgcattaatgtaaacctccatattataagctaactgattatgaattttctttattccggacatgtctgtggaaacttctgccttattgtcgtcaattgtgtgaactatttcaggacatcttgtgaaatatttgtcatgaataatattctttgtacacccagtgtctactagtgctaatattttataagatactttgggtgtcaattttactttaacagggattcttatacctaatatttctttgaaaggcaatcttactatatatttatttccaaaattagttatggcatctcttagttgaattattttagcagtattactgtcttttagtgttatcaattgctctttaaattcggtgttttgtatgtccttattttctggtaatgctttaatatcacaattattttttaggttctctaattctatttctaatttatttagtctattttctaacactcgtactctactagataaaatcttttcatctgattctaattctatttcttttctccatttttgtttatttgcttttatacattcagcacaagcttgttttagacatatactacaagtcactctattttcttgactagggtaatatatgcaaaaagcacatttgatattatagtcaccctttcctctaatccaatcatgttcacaatttaattgatccatcatttcaacctttagacctgctaattcgtcaattaaatctaactcttcatcggatgattcatattcttcgttgatagtttcaacttcgtctgtttctatgatagaatatattgactcgtcatcttttatttcatcatcacatactaatatgttttcatttacgctatctataattagaaccctctcttgttcttcatatttactagaatatctcttttgatctttatttgggcatgttctacttaaatgatctggcgagttgcatataaaacatctgcatgttttgtcataggttttctttggattatatcttcttacatttcttttatgtaagaatggtgctctattatctgatcttcttaagaaataccttttctttgttctaatattattatggtttctattttgatgtttataaatccttttacttctaggcttgtcttctccatatgacaagggtatttgaactattttattgcagaaattgtaatccgagtgtttcatagatctttgggcttggatacccgtgcatatttttcttagttgcttaaacacaaaagttatggcttgagagatattgatttcagctccttcagtttcctttttatattcttcaaatatcatacttgctagtgggtcaggtaatttattgaagtaacgttcaactattcccctgttatatccttgtttagcagttgtagcattatataaataatgttgggagaattcttttatgcctttccaacttgttaacgttaatttttctatttcttttaacctttcattttgcaaagttgtataacctaattccggatcttcagctataataatgttagatataacatttgcaaaattatgcggattgctaccagctcttttcaattcttcataattattaggattcttttcaacccattgttcccatagaaccttagcagattcacctaaaaatgtttctaagtaggttatcatatcttcaactttacttcctatattgtgctggttttgtatatatttttgaactattaaacctttccaaatactaataatatataggccagtctatgggatcatgtgctgctagatttagtatagccccatcacttttttgattttgaaattttattggtttctcaaaatctcttcttttagtgcccatgtgcctatactgtcctgggatataatgatatgaatattcttctttttctggaggccatcttcctgctgccctggctggtctttctctttctccttcattttttacagaaccctctccgtatcttttcctttttcctgttcccaaatctacttccatagcttccattgcattatctagattatgcaaaccttcctcatccaatgagtctataaaatcattatattgttctgcattatcttcttcttctatattctctatttcctctatcaggttattttcttcttcataactctctagtaataatttctcatttacttcccattgctcttcctcacttaataccttatctaacttttggatttcttctcttggttcttctgactttatttgttctattttaatttcctgggttctgggggtttctatggccaagcttttctcttttttttgtttcttaatcctggatagttctctatagaaataaagtttcttgtctctaattttaggccactcacttttcatagagttattatattcatctgctatatctcttaatttatcttcataatattttatttcactttcatggtctaatttttccatcaattcagatatactatgtcttctgttatctataatatctctgtcagatgattctgcatccaaatcatccgaagctctggttttataatttgtaaatctaatactaacattccctttgctgtcttggtaacttatgaagttttcaggctgactcaaggttttattttttataaattcactaattggccatttttctcctgctctttcttcagagtctattattaaagggctcatgaattttattcctttagaatgcattttttctatcacatcatttacattgattttgtatttggaggcacttctattagtcaatcttcctataaattctatacttattaataaatttgttcccttaaactcttcgtatccttttgtttggaaaccaaaactcattttatctatgaattcatttacaggcatcattaaatcaggcgctatataggttatcaacatatttccattcatatctccttctagatagcctaaagatgctttgtttattgtgtcccatcttttatctaataaggttattagcactttagctcctaatttctttcttgtcattcctttgattcctattatgtacataccttggtgaatatacttatatcctgaatattttaaactattttcaaattctttagctactatttttaattctactggctttgttagaacacttaattctacttctctagatattctataaagcccattcttattctcaaaaaatcccatgcagtatacttgttgaggccttattgcccttaaagtatctcgttgatatctttcgagctgcttatctacttgtgcaacatctttcagctcatctatgtcatcatatttgcctttttgtttatcagaacagttatcatctctgcttgctattcttctaaagagactcctagatatgtccatttttcagaattaatggcttgtgaagatgagactatgccagatgaagccaaaactatttccttacctttactagagttgattttgtctagtaattctttaatataatcactattctgtgaaattttattttgccttatcttataatcttctaataattctaatgtagtatttagcttattattaagaaaagaatattgttctacaaattgcttttgttctttatatatatcttctaacttttgctctaaatcttcttgtctcttactccaatttatatagaaattatatattaaatctacaattaaatttagttggctattattagagtgccaactatgttcttcagtatggcttagtctacaccttatgttgatattatctttggtatttattaactttccaatattagcttctaaatttagcttctctatgattaccaggctctgataccactttataattaattcacaaattaattcataactattcactactatttttagtgctgaattcacttattatgagtacagaattacttcaataaacttcaataaatactcggagataataaatacctattctgtaccccctcccgcgccaaaccaccgcgccacccgaccatccaccgaaccggtgccaccccaccatccaccgaacgcgggcccaccacccagtcggttttttccgcaccccgccgacaaaatcaggattgctcatcctcctccgcctcctccgtatccacgcgccgccgcctccatcctttccacgtgccgctgccctcggctccgtcctcaaccgacggtggccgacggcggtccggtgcgcctcctcccccgcctctcctgcctcctccgcccctctcagtgcctcccccgacccccttccccccgcgcctcctctagggcttgcgtcaacagggaggggcgtgagaggccggcaacagggatactggcgacggcggccaacggtggattggctgcggcgcctcccgccggaccccgtcctcccctctcagcgcctcccgccatcccccttcccctcttctagggttttggggcagcggcaggggcaagggcagccggcagggctgcagctgaaggcgcggtagcggctggtggttcggagcacggcgtgggcgtcttccctgctagctggacaggtttctaacccatctttttttttctgttaactgaaatgctacttgtgctaagtatagttcagaaatccttcctaggaatgtattttgataatgctaaagtgaaacatgagacagattcttgctgctatattcttagtcagaccaaacatgtcaatgtgttatgcttgattggttattgaattaaaaaaaagttgaacgttcatgtgtacagatatatatgtgttatagtatttaagttctctcagaattttaatgtgtacagcatctaattatgtttgcttcaaattttcagttatcaattcttggaaagttggattgcctttttgtctgtttaatagtcccaatgagtgaacataatattgtctcgaggcattctttgaaaagtacagccgggtttttttttatctccatcacaaattcacaatgcttcaagctttgcaggatagatgctcattttgcttctgtcatcctctagcagtgataattgataatgctaaagttaaaaacacagattgtatactacaatttttttcttataccttttgatttgtgtcacagtggcgtttattaggaggaacctgtgagcaacttttgtatcaagtctacttctcgtgagaagagggtcgacaatgaaatgtcagtcttttatgcagtaatcgtgctttatatgacagtaatatatttttatagacatgcatggtttccgatacacattaaatgttttttctgttagtgcacggtgcctgattttatgttttcttagtaagatggttactcagtttacagttacatgtctttgtccctgcagtaacacaaaccttactttgcagtaacatattttattttttgcagtaactcatctatgtgctttatccttttttcatgcagtgggttcagttgttaaagacggcaaggcctagaaagttgcaaaggttgtatacagagatggtgatcataacttggaggtatcttttgacccaactcaaacccaacctagtgtaccggcaacgggaggggtagaagagggtgagccagtagcagcagcgatgggagggggagggggaggggagagtgaggtagcgacagtggcgactggagggcaagaggagaggcaaccaccgccagtagtgaaggctcaaaacaaatcacagcttcctatgcgtcagaagaggaagaaagtttttacaagagtaagagtccaagatcaagaagaagacaatgactttatggaaccagcttgtcaggtgcctataagttttcttttttttcagcctatgatttgtttttccccaacaactatgacatatttttgctaaatgtttgttttacttactttttcctgttacaggttaagagtaaggtagctgagaaagcaacacaagatcatacaaagcataagcttagtgagcagggaaccagaggatgaagtggaagaggaagatgaggatgaatatgaagatgatgttgaggatgaagatgaagaagtagaagaggatgacgacaatgatttcatggaaccagccctcaaggtacatgcaagtttctttttcctttttagtagcacatcatgttttttctttctttgcatgacatgcacatcatgttaactttgtttttctcttatccttttgccataggtcaagcggaaggttcctcagaataggaagacagaagcaatgcaaggttctaaaaagaaggttgcttcaaagcaaaagttgactaaggatgtgccggtcaggaagcgtgatcatttctctgtgaacaccagatgccagcctaatgccatccttgaaatggttggttcgttgaacaaacctcagagggatagattgcatgctttgggatttgattgggttttcaagtttcggatgaatggccttcgatctagggaactcattgaatatctaatagattgtcttgaccctgattctatgtgccttgatcttggtggtcgtgggaagttaccagtgacacctgatgttgtgcactgtgtgttggggctgcagaatggccacttggatccaccagtagtgtctgacactactccattggatcctatcagggaagaattaggtcttggaaaaaaggagaaaatatctagttcatccattctggataggattaagatggggggcactgacgatttcacaatgcagtgcattctgatgatcttgtttagcaagttgctggccccagactctagcaccgacatcacagggaatatagtcaacatggtgagcaaaaacttggagcagtacaaagacatggccctctacaagtttgttgttgatcatttgagatggtcagctgagaagtggaaaagtggcaagaggagtacagtctacggctgcacagctttacttgtggtaattctcatcatcttttgtttgcatcttcaatgtttatttatttgcagtatcacatctgttagtttgcagtaacatccacctttatttgcagtaacacatctattcagcttgcagtaacagtgtagtaatgcttttagatatgttctgcagtaacagttagtttactttgtagtaacatccacctttatttgcagtatcacatctattagccaacagtaacagtgtagtaatactttagatatgctttttttttcattttgtaggtgtattaccttgacaaccttctttgcaaggccatgatctcaaacaccaatacaccacgctcacaatttttcaactccagtcttattgacaaaattgagaatctcacaaaatcaacaaagaaggatggctctacctcttttgggaaattaaatgtaagtttgttttttccccactctctctttctttttttggttggatagtggttggttgtggcactaaccctttttttatctatacttctcatgcagctgaggtgtagggaaagcacttgctactttgtttcaaaggagaaggtgaagagaaaggttggagctgctagtgggagtactagaaagaggaaacacattgatgaattagcagctcaagaagcaactgtagcaagatccaaagaagcgcctcgttttggtggtgacttcccaagtcttcgtagtaagctaggaccacttattgagtcacttgggagtacccgcaagcaaattgggttggatgctcttgagcaatatgacaaggaggtcgagcagattatgggtaacctacacaaggctcaagaccgcctagtggatgttctaacttcgctttgctcgacaagtgatcctaagatagcttacacacggaaaagcaaaaagagaagagatggcctcccccctctagattctaatgcagtaaccgacaaaacatctggcagtaagttctcatcctagtgcagtaacatgtctttttttttgtaatcaaatctttttttcattcatgtggttttactttttcaggtggcaatgagaacacaacccaagcttctatcggcacacctcccactcaggccaatgatgttttaggagatgagcaaagtagaggcaatgtggagagctctcccccaatgcatgtcgaggacccaaaagatgcagaagctggacaaccttgcgagccagcaaaagatgcacataatgacagtaagattcttctttctttgtattaactttctttctttgttgatatcttttgccattgcccctctgtgaacaagtagcctttttttatagatgatgctgagttgtctaacttggtggacaaaatctgtacaaatgttgaaggcttagtggacaaaatatgtacacatgttgaaagtactcctatgctggccattgccccatctcttgctgcgaacctgtcgcctgcgatcatgcctattgagatggaaaagaggaggccgttggcaaaccccaagtacatatcccctttcaagtgtgtttccattgaaccactatgggatgacactggagacattgccatggaagtgtacaaaattgtatggaacggtcaactccctgatgttgaaaggtgaacatctttgcccttcactcctcttttttttttttaattttcctaagtgaaatgcgcatgtgcattgaatttttttgtcaacactacagtaataacgtacatacagtaaaatatatctaattgtgcagtaacatataatgtatcatgcagtaatattacttctcttttgtctttgtttttggttgtacaatttttagtgcgtatctcatcgaccaaatggaaggcgccattgtatggaagggcgatgaattgaggaattgtttttcagagggtggaaagttgacaaatgatataatgctcttctggtcaacatgtttgatttttgatgatgccaactatcggaaagacagcattggctacagagttatcattcccaccagcgccattatatgctaaagattattttcatgcatttctttttttatctgcatggtccttttgaaaatagttctctagctcaaccttttttttcttcttttttgttaatgacaggaagtgctgaattctgaaaaccacaatcttacattctcatttgatgctgccgtcaacataatctctcgtgaatgcaagagttttaacctacctaatgcaaaactggttagtaagattgtcatgatgtgtgtttagtaagattgtcatgatgtgtgttactatatgtgttgacatgcagtaccaaatcatttttttactatggggtagatatgtatttgtgttgcagattaatgtttaatactaccattgaagatgcatatcaactctgtagtaacgtcatcatagtttttgtagacatagttagtctgttactgtacttttgcactagtgttactgcaatatagttactctgttactgtacttttgcactagtgttactgcatatgcttcatatttctaatttttttactgcttgacgattgaaatgcttcttttgccaattggtcagagttttcttccaacgattaacaatgaccattggactattttctgcttcaacttcaaccacaaacgaatcgatatacttgattcattaggacatgacagagacgagaaagctctaaaggctatgaaagacagagtggtacgccccatttttttcctttttgtttttttttgtcctttttctggttttgtgttctcatcattagttagcatggtatttcccttgttttcagttgggagtaatattctgtagtaaccattctcttattttgtagtaacatgcctattagtttgcagtaattgttcttagcatgggatttttcagactgtgtttctaaactataatcttattatcttgtctctatttctaccctgcttttttctgctacaggttggtaggttccttgatgttcttgatgtgatgttcccaaagaagttcacagatgttaggaagtggaaatgctatcatgcttgtaaccaaaagcaagtcttgacaaatgattgtggctttttagcgatgaaatacattcagttctgggatggcaaagtttttgtgaagaaagtttgccctgtaagtgcatgcacatttgcattttttttataacattgcctacttgtgattcattccatcatattgtttctaatacaacaattgcatgcccccctctattgcagaaggatggaacaaaatatcgtgcggaggtcctctattacatactcttccacccactgaacgaggcgaagctccctgcggctattgagcgatataggcctaagattaggaagatctccaagtagttcagctctgttcttttttccaagttgtcttttggaactttgtacctaaatgattgcagtaacatacttagatgctggtagtaacataattagttggtggcagtaacaggagactgttaggaacattgccacgttttttaagtaatgaaggtgtacagtggcagtaacgtacttggatgctggtagtaaaaatacttagttggtggcagtaacaggagactgttaggaacattgccacatttttgcagtaacgaattatatagtggcaggaacataccatatattataagtcttttgtgtaattccctgttaactctgggttgtttcacatgtcacaacatttacatcatctcttgaatgttttgaaccatgttttctattcggtttgatagcagtaacggtgctaattatttgtagtaactcatatgtacagtgacagtaacacacctgattttgtatttattgttggtaccacaaatgcaacagtacgcccgtgtttataattaccaaagttgacaggaagacataatgacattgcagcaatctgcattacgtcgtgtatctatagttcacgacagcaaaacaagtttatattgttcttactttcctgctgtaacagattactaaatttacagtaacatacatgtatcatggtagtaaacaaataggtaacatgtaatttcaactggcatcatgacaaaccatttaaaatatagcagttctagaatcatgtcatatagcagtgatgctctgccctaactgatgggaggataacattttttagtaaccaatatgctaaatgacagtaacagttgggcactatggcagtaacatattacaaatgtccaagtcagcagccatgtactatgacagccaagtcagtagcctcacttactcttcttcctcttcttcctcttcttcctcacttactcttctacctattcttcctcgtcttcctcgtcttcctcgtcataatcatctcttgcttggcgggtggttgttttttgtcttttgcttctactagggcatgtcctagcattgtgcccttcaatcttgtgacatacactacacctcctgctgtggtctttcctctgcttgctctctgtttgtttcgatactagtttttctttgtctttcttccttccttttgttgttgaaattggtggcgccgtcaaaggtgcttgcactggatctgtttccatctctccaatattattttcttcattattcaataattgttcacatggaattccatcaatctcaatatccaactccttaaatacctccatggctctgtcgtagcattgcgttgattttgatgcctttttggcaactttcgtagcctcatttatcaacactgtgtggcggtaaatctcacttgtgctgtcaaggccaaatctccgatagtcatggtcatcaaagacacccccttccttggcacttcttgtgtacctcttcaatatatatctgggcagtattttttctacctggagatggctgagcaccctcacaatatgtgggcagaaaagacctgcagcaatatggtacatagaagttgcagtaacagagagtggaagttgcagtaacagagagtggaagttgcagtaacagggaatataatagaagtaacagagtataacagcagtaacagagagtgcaatttgcagtaactgagagtggaagttgcagtaacagagtataatagcagtaacagtgagtataacaatagtaacagagagtatagcagcagtaacagagagtatagcaacagtaacaggactaaacatttgaagtaacaaatcgagacctagcaacacacctgtgtgtatccacgttttgcactcgcattcatacagcccagactccacatcagcagtaacttggaaagcgtgttgcgaccacgggttctttcgaattgtcttaccatgggtcaccacgtaggctcccatggcgttggaaacctcattcacaagaaacgccgtgctatcgaacagtgtttccttgaataaggtgaagaccgcccttgtgtacaatttgctcagttgttcctcgaacgcatatcttgtgctcaacacgggctcacactgcagttgcagtaacaagcattgtttattgcagtgaagagacaattctggcagtaacagtaacaaatagaccacacaacagtaacatgcagtacaacaggcggtaaaatattgatggaaatgcagtaacagtgagtataacaatagtaacagagagtatagcagcagtaacagagagtatagcaacagtaacaggactaaacatttgaagtaacaaatctagacctagcaacacacctgtgtgtatccacgttttgcactcgcattcatacagcccagactccacatcagcagtaacttggaaagcgtgttgcgaccacgggttctttcgaattgtcttaccatgggtcaccacgtaggctcccatggcgttggaaacctcattgacaagaaacgccgtgctatcgaacagtgtttccttgaataaggtgaagaccgcccttgtgtacaatttgctcagttgttcctcgaacgcatatcttgtgctcaacacgggctcacactgcagttgcagtaacaagcatagtttattgcagtgaagagacaattctggcagtaacagtaacagatagaccacacaacagtaacatgcagtataacaggcggtaaaataatgatggaaatgcagtaacagaatagttgaaatgctagtttattgcagtggagacaattctggtaataacagtaacagtaacagatagaccagatagcagtaacatgcagtataccaggcagtaaaataatgaaggtaatgcagtaacagaatagttgaaatgcaataacaaaatggtgattcctacggcaaatgcactctcaaacaagctcacatgcagtcaatcagatagtaaaataataaaggaaatacagtgagtacctcttgagcattagtttctcagtcctccttttgtttcctcatctggatgcatctattcatctcagctgcaactctgtggagtgcagtgagctctttgagatagcctgttttaaccatatggttcacactctcgctccgttgagtggatgtcattcttgcgtagtagatctgtttgaagtaagcaggaatccattcggcacgcaagttataaaggttttccatcacctcacaaccttgaagttcaaactcttcaacaagatctttccatgcagccacaaattcacttggtgtcagcggatggttgatcacaaagtgcagcttctctttgaaatttctatgcttgaacatttcatagagcacacctaactgttttttgtacttctttagtacatgccatcggcagagcctatgaatggtgttctttagcacctcccttatagctgatgccatagctgggtcctcgtctgcatttatattggtagaacagtagccaagtgttaattaggcagtaacatataaacaaaaaagaggtaacaaaatgtaagcaaggtaggcatctgagatatttttatagttcaacgcacctgtgagaatacacatgggagctttgccccccatgcacttcagaaaagttttaaacaaccactcaaatgattcagctctttcatccctaaggagagcaacactcagaatcacactttgcatgtggtgattgcatccaacgaacaccgccaatggcatgttaaacatgttcgttcggtatgttgtgtcaaatgtgatgcaatcaccaaaatggtggtaggctgccctactacttgcattgcaccaaaatatgttctggatagcatctttctcatcagcttggatatcaaaatagaagttgttgttcttgactttcatttctttgaaaaacattagcagcttgtttacatcatctgagttctcctccaccttgttctcagccttcttgcagtaacacgctaactaaaattcagtaacatgatgtatactaaccagtaactcacaacacggcagtaaaaggaagcaaccatgttttagcagttacatgtaaactaaaatccagtaacaagatgtatactaaccagtaactcacaacacagcagtaaaaggaagcaactatgtattagcagtaacatgttaactaaaatccagtaacaacattgctaccccgtggaagtaatgcacatcaacaatgctaaaaacaaacaagtatagcagcagtaacatgcatttgggtagtaaaatacagcagcaatgaaaatagtcgaatagtgcagatttatcaaataagacagaaggcccaaatacctattcgcaaggtccttgttagtgaaaggaatgttctgggggccaccatgcatttttgatagtaaggacattattgcaccgtgagatacgtggcattcctgaagttgtctaacaaattgcatgattgatggatcataatttttgtgggactgttggaaaaccgccattgatggggagacatacagatgatgggtgtgatccagttgtgctcttgtgatttcccaaatgtcaccatcttgcttcacccttatcaatgctttgcacccaactcgttttgttgtctagtttcttaccctatttacctcctcgcctttgtaagtgtgattgccttggcgcgtgcaatgcagaaagcgtgcacgacgggcattgtcaaacttgcctttcttaatcccaaaacctgcataccgtgcatatctattgtaaaagctgtaagcagcatcttctgattcaaacatcgtgccaatcaaagggacaacatcttcaggaatatcttggccctataattgaaggaaaaaagtacataaaattcattatttgttatgcgtaggacaatactcatggcagagtagtaaccaacacaaaatatgcagtaacatactcacatgtgtgaatgtaaggttactgtcaggggtgatgcatgcctctggattgatagggggaggtggggtgataactgttctgtgcagtaagggatctatgaaagtttgatgcagtgatggtggtggggggctcactgctattggtaagacatcaagcacatcatcaattgctggcggcgaagggggcggtatgtcacctctgaggtgcacacccgaataagtagatgttgatgccatcttcttttgcacccgcctatcatatcgacatgcaatatcttagatagcggcagtaattttcatacgcaatacgtacagcaatgagcagtaaaaaaatacttgccataacagtaacagatagaccagtcagcagtaacatgcaggaaaacagacagtaaaataattaaagaaatgcagtaacagaacagttgaaatacagtaacaaaatggtgattccgacggcttcaagctctttcgaacaagctcacatgtagtaaatcagacagtaaaataatacaggaaatacagtaacaaaacagtagaaaagcagtaacaaaagctttcttttaagacaaaactcacatgcagtaaaccggacagtaacagggaggtctatagacagtaacaacacagtaaccacagatttttctgcataaagctcgcatgcagtaaaccaaacagtaacatcgcgatctataaatagtaaaaacgctgtaaccaaataattctatatgacaaaacttgcatgcagtaaaccagacagtaacatagtgatctatagacagtaacaacaagatttttttagggcaaagctcacctcaaggaaaaggaagggattcgtgggcggcgccgaaaggacgagctgagagggatgcttcgccggggttccccacgacggcccggcgcactggaaggtatgagagttattgggagagatggaggaaaggagggaggctggtagggaagcagagggagggagggaagctgggaaagaggagagggagggggacggagggaggagagggatggggaacgaggccggagggagcctccgcgcggcggcgcccgaggttggcgcgtgactccctcctctcggcggcagatgcaggagttttttctctcttttttttttcttttttcgtatttctttttgtttctctctatcttttcgctattttttttggtgggccggtggggcggctgcgcgagggcggatcgctggatgtttaggcgggatggcgggatggcgcctgggagtgggagagggggggagggggcgtatagaatagttattctataccccaggtgtagagtagtctcaccctatacatatatatatatatacacacacacacacatatatatatatatacatacatatatatatatatacatacatatatatatacatatacatacatatatatatacatatacatatatatatatatatacatatacatctatatacatacatatacatatatatacatacatatacatatatatacatatatacacatacggtagcgctagacagcgctagacacaggcgctccgcgccaggaaagtacgtggcgtgagacacagggataatccccccctcccagggcaagcaaccaactgcggagttaaaacttaactcgcgacaaacagggagtgttccgcagtcccggtgctagaaccgactgcggagttaaaacttaagtcgcgagtcgcgacacacaaggattgttccctactcccggtgccaactttccattgcggagttaaaatttaactcgcgacacacaggtagagttccccactcctggtgcgcacataccgatttaggagttaaaacttaacttgcatgcagttggtgcctaggttacgatgccttacagattcagttaacattggtgatatgttgatgctggttcctatgtttgatctgtttactcgtacacatttttggcgtgggattcgattgaagatgtacttcagttaaaatttaacgcataggtcttgtagcatgcaaagattcgatagatgtgtttgtttttttaccgcaatataaaaacggtggctctattttatttcattatatccaaccacaaatctcgggtatgtattcattagaaaccctttttcatatacatcatatgcttggtatccttattgagtaaaaaattaacttggtatgacaacaaaattttgactcaacatatacatcctcataatatatagcataagttaaatttttgttggttcttgctccagacatcgacggcggcgtgtcattaacgtggccgccgctgctcctccatatccatcaaagtccgagttcgccgccgcagaggtcacgccgtgggcgtgggggcggagcggtggcctgatccgccgccgccttgcctcctgcccatagtgacctgtcacagccgcgcccgccgtcacctgtgcaagatccacgcaggatctgcgcgcttggggcgcggagtggcgaccggatgcgccgcctcctcacctcccacccgtagtcgaccatcaccgccgcgcccgcagccgtgctgtgctggaaccgccgacgtcgcgcccgcccccgatcagcgatggaggtggatccgtcgcgcctccagcccgctgtcacccgtcgtcgccgggcccacaaccgtgctgtgccggatccgccgacgtcgcgcccgccaccgctcggcagtaaaggtggagacgtcgcgcctcctgcccgccaacgctgcgcccgcagttgcccgtcgccaccacgctcatagccatgccatgccggatccacctcccgcccgccatggatgcgacgccatcatgcctagcctgccactgctatggaagacgatgggagaagggatgatgttgcggttgcttctggtcgtggcggccgccggtggtgatagatccgacggcgtccctatcgacgacaaccatgccgccgttgctcctccccaccaggtcgccctgtcaccggccaccactcgggatggcctctctgcgcggtagccaccgccgtaccgtcgccagatccatgtaaatcgggataaaaaaatgaaagtgagaaaaagtaggatcgggatatgtggttggttacaagatgggggaacaacacatgtatatatatgctaaaagttgggtaacatcaagttaaaaatttactagaactatgagcatgggggagggggcgcaggggtggggtactatgagttaaattttaactgcgttatgtggacggggggggggggggaggcaggttgcacgagggtggtggcactgtgtgtcgctccacctagttaggtagcgcctatagcgctgtatagtagttctctatacacatatatatacatatacatatatatatatatatatagatgtatatatatatatatgtatatg

SEQ ID NO: 13364 - DNA, 1068 bp, Oryza sativa
atttttgaaaccccacttgttccaataatattacgtctagaaggtggttcaattaaagtccaaactttgtttctctcaaaattttcaagttcttcatgcatggcgttaatccacgattcatcagttaatgcatgtgacacatctttgggttcaaaataagcaacaaatacagaatttgcacaaacatcatgagtcgttactttagaccttgtagtccgctcacctatattaccaataatttgttccggcggatgtcgtcgttgaatgtgcaaaggagcagcgacttctgaagttgattcacgttctgtatcattactggtcgaagtagtaatttccggaggaccatctcgatcagcatcaacagtacccaaacccgatgaccctagccggtctgaccgctcctcaggagccggtctgaccggaggtgtgccggcggtctgaccggcctggcgcccggtcttaccggccgagccgacctcatcgtcgtcgtcgtagtcgctctcatcttcaataatacgaccatcctcccctgaacctgtgacagtgtacctgcaatatcgggtctagtacctggactagcctcatcaaaagaaacttcgcaagtctcaacaattttgttagtccctaaaataagtacacgatagccatgagtatgagcaaggtaaccaagaaataatccatcggtagaacgtgcctcaaacttatctaaatttccagatttcaagacaaagcacttgcaaccaaaaacacgcaaatgtgaaacattgggttgatgaccaaatcgaagttcataagaagtttttccaagtttagaacgcaagaaaactcgatttgaaatataacaagcagtgttaattgcctcagcccaaaattttctaggagttttatattcatctaacattgttctagccatctcaacaaaacacgatttttcctttcaacaacaccgttttgttgaggaacacgaggagaagaaaattcatgttcaagacctctttcgttgcaaaattgttcaaatgaagcatttttaaactctccaccattatcactttgaattcttttcaaaga

SEQ ID NO: 13365 - DNA, 27765 bp, Oryza sativa
agaggcccgggagagaggagaagatgggccgagagaaattcggcccatcgaccccgggggaggcaaaataaacttttacagaggaatttgatttggagggatttggattcggaattgaactcgatgatagatcggggatttgagatcttgagatggcacggacactagacaagaagcgaagaaacaaatttcgcaattagggtttttaagagatagttttcccgctaggcgccacgacggaacgggcgctacagaccaaccccctaacaagaatctcgaccccgagattcagcacctaagggagcagctccgggaactctgcgcggagaagatcttctcgctcccaggttgcctcatcttcagaatggttgctccattggactttgtagaacttgatggtcttccttcgagtctgacgttctgcctcttcaagaaccttgatcggtctttccttgtaggtcaaattcttttccagctcgatattacccaggggaacttgctgttctggaactcgaagacatttctttaactgggatacgtggaacacgttgtgcacatctgcgagactttccggtaactcaagctgataagccacttcgccacgtctggcggttatgaggtaggggccgatgtagcggggtgctaacttgccggacatcccaaacctcctcataccacggaggggtaatacccgcaggtatacatgatctcctttttcgaactcaaggtcacgcctccgattgtcagcgtaatttttctgacggttctgcgctgtctttaatcgttctcggatcagcttaacttgttcttctgctgacttgagtatgtcaggaccgaatatcagcgcttcgcccacctcattccagcacaagggagtgcggcactttctttcgaacattgcctcattcggcgacatctgaatgctggcctgataactgttgttgtatgagaactcagcatacggcaaacaacgatcccaagtgccttcgaaatccagggcacatgcacgtagcatgtcttctaggatttggtttaccctttctgtctgaccatcggtctgcggatggtaggccgtactaaaatttagatcggttccgaaggcttcatgcaactgtttccagaaccttgaggtgaactgagtgcctcggtctaacacaatcttcttgggacagccaaatctacatacgacatgggtcatgtagagttctgctagtttcttcccatcaaaggtggttttcactggcatgaaatgagctgatttcgtgagtcggtccacgattacccagatggagtcgtacccgctaggggttcttggcaaaccggtgatgaaatccattccgatttcttcccatttccactcgggaattggtaggggctgtagcagaccagctggcctctggtgctctgtcttgactctttggcaaatgtcacacaaggctacgtattctgcgacatctcgcttcattccagcccaccagaagtatgccttgatatcttggtacatcttcgtacttcctggatgaatggagtaggcggactcatgagcttcctttaggatgagatctcttaactccttcttggccggtacacagatgcgtggaccgcaccaaactgtgccttgatcgtctatggagaaattggtgtctttcttctcctgtattctttttattaactcttttatcccttcgtcgtccttctgagcctcccggatttgcgactctagggtaggctgtactgtcaagctggcagggacgcctgactataccacggtcagccttaacttctccagttttcccgctaggtgccacgacggaacgggcgctacaggtaatcagtaactctagagaacatcaaccaaacaaaaaagtttattgatcttttcgtactcaattgatgtgaagatacgtcgtgtccttaataaattataacataatgtgtaggatcgaattacaagaattaagctactagaggaggtgaatggtaggatatcatcaaaaaccgaaaatgtttaaggaaattgaaagttactctcaaacctgatgaagttgtgctggttgcaagatcaatgtcagtaagaccatatagaagcctatggtcaaaccagagtgttgtcgacggatacaacgccttgctcctacatgcctgttgcgcactgccgccgctgatctgaccacttgcctaacgccggttagaccactggctggttataccgctcgcgtaatgccggtctgactgttgggatctagagaaacaccaaacaacaaaaagcctcgaagtaaaccctaaatttctctgccaaaaagttgatatcttctagccgcaactcccatacttgcttccaatatggcttatttatgatcaatcaaacaccattcataatctggaagagatttaacaaaaacagattgcatcgtgattgatttcctgagcacgatgtcttacaaaactgcttttatatgctcaggttatgtgctatcaccgaggcctgatgcatgcttcaaggttgtatctcctagcgatggaagatgtgactgaattttccttgccataaatgtggccttcttaattacattttctacagctttgctaccatgattaatattacatatgaacctgggattgtatttggaatgtgtctagatttggctgttacctggttgtaagatttgtgttatattggatgtttgtcgggttgtgctatatgggttgttattgtgtttgattgttgggcttatatgggcttagcccacttgttatttgatattaatataaatgaatataatatgacgggctgaaaatggtgtggtacatgtttgggcctatatgggcttttacaatggacttgacccatttattatttgatattaaagcaaattgatacaatagaattgggctgaaaatatgctacaacatagatgggccaggctaaactttagtcgggcttgccattgggctaagcctataaatagggtgctcaatacatggattttaatgggccatcagatattttatgacgttttttagctagataatgacgaatatgagagtcacaaagttatgacgacagaatgatcgtcactagattaatgaggaaaaataaggtttcatcgttgaacgccattagagacgcataataagtgacgaatgaattttcgtcacgcgagcgtcacagattacgaaacgtgacgaaaaatttaatgtttacgacgtaaatgaagcatcatctatcataagatctcttgtagtgataccatagtgaaaaatcatatagccctttattgcaaaattttggtggcataatctacagctaccgtgagatatgctagaagggattaaatgtcttttaagcagtatggcggcagcaacatgcgcttcttcaacatagaaaaaccaccaagttcgtcttggttgttcattcagtgcttgaactctgcttgcacttatgagattaaaaaaaatgctgtggtacttaatttattgttcctcaggaaatggaaaattttcaccaagttaattccgagccgctccacgctcgaatttaacttggtgaggggacattttgttcgatgatattttgtacaccttttctctaattttaattttgttagaaatagggtgcatcaaaatattaatctcgggaacaacagtataataataaattagtgattaattatcactaatggtacaatctagcatacacgagcgtatatgtatgaatgttatgtgacacgtgccaatatctgctccagtgcctagaatacagacgtgtatatgctcatggtattgcttgaatttttctttttattaatctaaatggaagcatgccaccgagcatcgtcattagagaggatgctaatcacgtgatttgccggcagtggatcgcttggattgcttgcatggaaaaccatgtgcgtgcttgcatagaaactcaagaaatataaaggcaatgtagctctgtctagagaatcccttgccatatgcagtgtgtacgcgtatacgaatacaaggaattaatcgctctgcatcacgccggttcggaaagtggatcgtcccggtataatttggatggaatcatattgagtatgatcctcgctaattggaagaaatcataacatatggaaggaattgcaaatcgtagaatcaactgattggcttgccatccatatgtgagccatgcatgcactgggcagtgaactgcattcccttcacgctataacagaaccagccatttcacagagcaagggggacgggggagactcacgagagaaagaggaagagaggaggacacccacagcaacacacacaatgcacgcagcacatgctctgcagccatattgctgagagcaaatccatatacagagaagaaggtgaacatcgtcatcggcagcacatggcagtggtgctattacttgccatgggtaatgctatatgtttctttgtctcttgttttctctgtttcagttagcaggcaagcaagggcgatggattcatcggtgatgatgaggatcggtggtccgttgggagacatccatggcatcactgtcgccggtcatcacacccgcacggtcaaggcgtcttcactcctgccgtcaccaccggtgatgtgctcgcgcatcgtcgacctcctgtgttcacttcatggctgacactgatgatgagcttgaccccgtcatcgtcgccggcgccaaccgtgcgttcaccgacaacggtcgcaagcttgcagtcggcgctggtgtcatcatcaatcatcatcgtttatcctcacggctgccaccgatggcgaatctgatcctggtcatcgttgtcggcgccgaccgtctctccactgccgacacgctcaagcttggagctgtcatcggtgttgtcatcaaccatcggcgtctatcctcccggctgccaccaatggcgaacctgtccctggtcatcgtcctggcgccagtcgtttctctgccgatgacaagctcggccttgtcatcgttgccagtgccaatcgcgcattcgtcgtcaacgtgcaagtttggatccgccgactgttgtcaccaacgtgcttggcgtcttcgctggctaatgacgacctcgcgtccgtcgtcactaccggagtcatcctcacgtcaacgacgatggcgtcacgctcgccaacctcatctgttcgatgacgaaaccgttatatatgtatgccctgccaccgttcgtctactgccggcgaagtcctccgattcgttgctgccgccggcgtcatcctcacatgaatcctcacctcaccgtctagtgatcacgagctcggcatccccaccggtgcctgtcactccgcagcgcccatacacatgacggcttcttcgtgcccgccatcggcgcactcccgagtcaagccactacgatcggaggtggctcaacatcatttgagttcggccccgattgtcggcgcatatacaagaggaccacccagttcctggaacgcgtatcatcgttcccaggctaggctacgcccctaacatcccctaaaaccactcaatactaaatatgtgctgtagcgatcagaagtgactcctgtaccatgacgatggtcggccaatgccgtgcagactagaagggcgattctaccccatcaccagtgaccacaagcttggcatctctaccgacgaggctgtggaccgttgtcggcgcccacacacatctacaccaccatcaccgtcatgcatgggagaacgtgaagcgaagaccgatgacaacgaccagcgtagcttaatgagaggtttctcaggagtttaactcatgagagtaattaatcgggtgttttccgagaccccaggaaccaggagaacacaatcgccaattcagatccaccttgcctacaggccatggagcgcatttgatcaaggattttgtatttttgtaattctttgagaattataataaatgcattttccttcatctattttatttgtgtacttagtacactggcacgcccgcgcatcttattttattttatttccctaggcagagggacggaaaatttaatttttctctccaaacattcatgaacttatattttaagttatacagtttcgactcattggtgcaacaaaagtaaaatacctgcggaaacattttgctcttatctatggaacacataattttaattatccgagtatatgtttttctttttatcaaaatataaccaaatatcaatagtagaaaaatattttttcatggtgtcgcactataattttcactggtggttatatgctaaaaccgccagtaaaaacatcaagaggggtgggggttataggaccgccagcgaaaacctatttttcctggcggccatgttaagacgtccaccataaaaaatactctatttttcgaggcggacctcttaaatgtccgccagcgaaaaccaatattttttattggcggttactaaacagttccgccagcgaaaaaaacagttccacctgcgaaaaaacagagcccgctaaaaaaaatcgacgtcatttaaaatcacgcgcgctgagatattcccttcaaccacccactgcctctgtctcctctatctcctctccacccacccacctccctctccacccacccactgcctctctctctcctctatctcctctccacccacccacctccctctcctcctcctcccccactgagacccctcctcttccctgtgcggctgcgcccccagcctcctactcctaggacgggcgcggcgctgacgacggcgaccacgacggcgggaggggcgcggcgcggatgtgcacggcgacgacggcaactggcgacggtgacgacggtgagcacgacggaagcggcgacgacggcgaccatgaaggaagctgcgacgacggcaaccacgaaggaagcggtgacgacggcgaccacgaccatcctgtgcgtgctgtccttcactgactcgctatcgtacctcgggttccatgtcaggagcgtcgacaagaggcagatcagccgtaactacctctactggggcgccgcgccctcccatcccatcctctcccctctcccagatttgtctgtggggaggaggatgggcaatgggaggacggatccgccccggcggtggcgcgggtagcacggccgcggggcctcgggaggtggagcgcgaccgtcggccttgacctcgtcacgaccgacgccgccgggccgtgggcggtggtgctcagatttcaatggatttctgtggatttgtgtgcatttgtgtagatttatgtggcttgtgaatggaaaatatgtgttgatttgtgtggatttgttttgattgtgaatggaaaattttgactgtttttattgtaaattgttggtgtaaatttatgtgaatttgtgaatcaaggagtggatttaggaataatttgaattggtgttgacagaggtgaatggagcggtgttgctccgttatttttttttatcttgtgctactattttcacaggcggctggtataacacaaccgccagcgaaaatcaattttcactggcagctgataaccgctagcgaagattttgatcttcactggcctttactttgtggcggttgcaaaaaccgccagcgaaaacctaaaatagccgccacgaaaaatggttttcgtagtagtgtatggtcttgttgtgaagacataattctaacaagtacaataatgtaattagattataaatccgataggtaacttttaatgaaaaataattttaagttgttgtatctgaaaagttattagaaggtggtagtacataatggattcgtcacatacagggcaaagcatggaaactgttttaaacactcaggtggacgttcacccttttttgcatgccatataaatggttatgaaaaattttcaaaaaaaattgagatgacaggttaatatgtaatatatcacttcataaacatgcaagatcaaattcgacttctatatgttgtaacaaaaattacaaatttgactgtgaatatacatataccagttagagtttttttttgttacaatttgtagaagtcgaatttgaacttgcatgtttatgaagtgatatattacatactaatctatcttgcaaatttgtttggaattttttcataatcatttaagtgacatataaaaaatgggttggacgtacaccctgagagattagaatccatcttcggcacagcatgcatagtaacagaagcatgtgccgcagggtgaagggcaccccattttcccgtagctatttatgttatgctgtcacgtaacgtaagaaacgaataggatcccaacaactacgagaggaactcaaagtggacgtttttccttttctgttttgtcccaagttgggcctggcccccaaggttggatcccaaaaccggaaggactttatcttgggcctaccggtaccagaaacgagtccgagtccgactagatgaatgctagggttcgctgagcccctagtaataaataaagaacagaaatcagaaatcacaacgaacgaaccgtctgtgtgaggaaggcatcgagaaaaccagcgacaagaagaagaagaagaagaaatcctcccgtcgagcgccgagatggccggcgagaaggtccagatgccaacggaggcggcggcaccttccctgtctccggcgccggtcgaggggaagccgagggaagccgccgttggtgagaagaggaaggccacggaagagccggctccggcggagagcgacttattatccgatgcttctgaatcagcggcggcggcggcgaccattgctgacgatgggggcaagccagcttctgaagcggcggttgctgaagatgagctgccgtacgacgagtggaaaatacagcgcagagcgcttctggatcggctgtgggaggagaccatgtctaaggtcaagcttccagatgatcccaatctctactacgactactccgatgatcccgatggtctcctcctagattatgattctgaaactgacattgagatggactaatgtatctatctaactcggtttatgtccacatttatcttggcctagctatagtggagaactagttaatttaattagctcttctatgttatctggtctaaccatatctgaggctctaagcactgcacttatccttttgattgcattccaatataaaaaagttctatcttttatgtgtatatactattagtactgtactccatcaaagattactctagcactgtactccttaactatccgagctatttgtatatgtccttgtttatccatgttttctgcaattttgattttgggagcatatggaatctcctgtctcgcccatcaaagaggaggtagctgctctgagttctaaccgacatgcagaatgccaagttatccttgagactctcagtttaggattcactttgtcgatctgtctatacatctctgtacgcatttatgggagtggatcctaatccctcgaggggatatcccctcgtatacctttttctttcaaattcgatgcaaatagttgtgaaaaattctgaaaaaaatatacaatatagagtataatgatacctacaagtccaccaaaattcatgtttaaattcgatctacacatcgagaaacaaaaaagacaaatttagatataaacagtacgctactattcatacgctgaatttgtcttttttatatctcgacgtgtgagttgagtttggacttaagattttgtggagttgcatatatgtgttgtatggatgttgtcaaatttctccagaatttttcataactgtttagatgttctttaagcaaacgagggaacatcccctcgagggattagaatagtttccccgcatttatctatctttgtaagcagttatggcttggtgttggttggtcaatgatatgatctttgttttcatccatccatatctatatggcgccatgatctgtgttgctaattgctacgaattaagtttggaagcgatgaagagcatgattggtactgacgaactagtaagtgtgcagtaatttgacatcataaatcattgcactcttctttcattgaaaatttcatgtgtatgtttagcttttatttgttttcataaggttttatatttgtcatggcaattcctggttgcctgattagattggatggttcttgactactgccaatccaaaatatccacttggcatctgtgaagctctattcacttaaacaatgtgtttttcgttgttcctgtctcttgctgtttattgatgatttttttgaaaaattttgtccatgattcgtttgagatcattgttttttatttgtgagtaccagatcatatgggttctgtcaaacaggctcattgaaatgggcagtacatgataccaggcagcagaatgcttttcatcttgaaatactaagtttatagggttttatttttcttagtttctatagtgtgataattgtacggatctgtctttgtatcccttattaccctttacaatctgatgtatgcatcatttttcctgtatataatgctgtaaacataagtttttgtgtgttgagagcttacagttgctttgtcctttccgatgctgtttcagagcttgtaattggcttttttttggtaacctgatgcaagggttctgcaaagcagagtaacacatgctgtattgaccttgtatgcagttgtgagcaagatatactattgcactattttacaaggtttgctttctcctctactttcttcagctacctttctgcttctttaatttcctaaatttgaataatgcattgacatggcttcagagatgtatgtgcctttctaagctgttttgattgctcatcctgatgcagagtttcatgttcaggttgctgtctgtttgtctttatatgatttagaacttcagaacaaaaaaaaaaaaacaatctgttggcattgttgttcctcttgaaattgtcacgtctgtaccatcactttaattatttgaatccttcttgaccagccggttccatttttcactgaaaaattgacagggtttgaagtgtgtcttgatcatgtctctgaaggtaagaaacccccctgaagtacttgttgttctccaggcaggacattttcttgacagtttggatacttacccggagcagcatacccggtgcagccttgttttgcaatggatttctgccttcccaaacttttggaagatatctacgaggctctgttactctccaaacagacaatgagacaattgcaccagaaattgttgtgtttattgtcagatcctaaacctggagtgtggctgctatcatgttgtgctgattcttcatatattatatactccatccattctaaaatatagcaatatccagacaaatagttacaagttactatattaatactattggagtatgtgcctagaaacatagttacgagttgctatattttgggacataggtagtactttcttcacaacgtaagcattcgtaaatatttggtcctaccatgtcagagcttttgttgttttcgcaccaggaaatctcctagatatataggcctgttcagattgtagccaaaattttggcaagttggcaatattgttaaaattttagcatgatttcttttgtatttaccaaagtttggcaacaaactaaacgtagacactttttttataactatgataaaattggtatcgctaaaaatggcatcaatctgaatagttcctatattggatctctttcactgaataaacgtgattacaattatgatgatgatgaacatgtgaaagctgaaataaatgctgctccaaccctttggtaggtactctattaagataaaacgatttcgacgcagaagataccctactaagagcagaggggtaccctactgtagagatcagtgaccactgttctccgaccaggcccaaaccagtcaaaggtgagggtttactgtcgtcagaggtgacctgatctggtgtagcgaatgtttctctgcacaaaatattatgggggtatgtggatatgatcgtgcagcatatctgtaatcttgtgcctgtttctaggtgtgactccccccctctgtcagtttgtagatgggttccacaaccgataggtaccgtatcgatcaatacagatgctgcaatattccggtcagagaccagaacttcatctgtttatttgcatgcaatgagcttgtctcagggatcagtgccagaagttgctgaggcagtggcagtgcgccaaaccctgttcttagcaaaggaagaaggattccacaggatcatcctagattcagatcgcctttctgtcatccaacgaatcacgttggttgtgtgcaactgctcgagggtaggctgtataatcgatgatatcaagaaagatccaggccgaattcctgctctctttcattcatgtgaatcggtttgctaatgttgcagaacatattttagcccgtcagtctgtgctaagtccatgttcttctaatcgcagtgtaaccctggagtgcatctaggatactctatgcattgatgttaattaattagtcagtgaagtgctgcgattaactcaaaaaatatgactgaatcaaaatttcattcagctttgatggactgctctgactgaatcgacactagaggtgcccgaactcaagaaacatgtccttttcatctagtgccgacgatcgacccactacccacccactacctactgtacagcagtacatgtctctatttagacaccttctactctcatgtgtatatccattcatctacaagattcctttgaaacacttctccccttctaaccccccaaactatttctcttctttaggaaaacaaaacaagtacacaatcacaaattagaactggaaatgagcgacatcaggagtggaagtcttaggttgatgtacagggagagttgatatcagtttgcagtatctttaccaaggtctggtactgcccaagatggttttagatgttgcctcctgatcatgtacagcggaaacaaaacacaatcagagtgtggagtgtgcttgcaggatatgccgcgcgcgttacattttgagaatctgcgagtgagcggctgtcctggtatgctgattcagttcagtgcatggttgtagtctcggaagttactacttatcttgcctgagttaaaaggagaatatgtatggtggttgatagtctttttttttttcgttttgcaaaatcaatccgtcagatcctttcatcctatatcgatcattcttttgtaatatttaaatcgctaccatttgtagtgatccatctttagtgacattttatggtcagatgatagttgatggttcagcgcattcaaatgagaagtccatagacagtagggagtctaaggaacatacaaatttgcaacggtacatgagtatatatgattgtgacaaagatagttacaggtgtacatgagaagtctaaggaacaaagatagttacaggtgtacagcttgcttagttgttacccaaatattttgaagcatcggatatgattgtgaaacggttcttctccccttaactaacatcacatttttgtaaataacctgccggtataagctcattaattaatttctggtttccaattcctcctggtttttatagagtattgcgctatgggtcaaagaacatggtgagtggatcgatcccttcaaagtttttatcaaagagtgcagtgcaatagactagcccatgtgtttttatcaaagagagttgcatgtgggatctaattcatagtacaccagtggtccacccaagtagtgcggcacatcagtacaacacaattgcaaaaaacaaaacagaccagtcaatagaactatagtcaagtgtggctaaactttatgtcgttttctagtaaaagaaacatcataaatcgatgatgtcatcaacaaagctcatcaaatgtaattactctccatgcccgacacagatggggttgccgcccaattgagatgtgggtgcccgttgtagtgcaatattcaaaatttcttaggatcccccaatacatgccccttgggttctatttataggcttagtacttagctcatgtaccctagggttactaaatacaaaggaatttatatgactactcttatgataaagacatttatgagggtaattgtaacaattcacccaacgcttcatcttgggccaccaggtgggcctccattggtcggttggtcacttcggtccctcagccctttttggtctggggcaaaggtcctcggctagggggcaaacatccttggcttcccctagccattcgtgctgagcgttcgtctttgtgacaatcggcactttgccaccatgctttgccctggcggttgtgaactagtttcggcaagctcggtcgaaggtcctcgtgacatacctccaacagtagtgatcccattcaattcctgaacaaagtactaagtagttttagttgtagtagtagcacaaattgtaggtatgtgcaagggttggagtaatttgagtactggtgtagtcatgtttacttacttgcaccacagtacacgttttcagttatagtgaatctttactgctgtctcctcttgctgttccacaacactgttgcccatgaccgtgtcctttatcatcctgtctacgttggttcgtctcatttgaacattgagatgatcggggagatgattgtttgcaatggcattcttcgcagcaacctctgtagcctccacttgttctgccctcgcctccctacagtctacctcaatgacaagattcttgaggcaagccatgttctggaggccttcatagaagttgctgtctagagatcctagtgttcgtgcccacacgttgaaccgaaacttttcgagctttggcatagccccaacctcaaacaataaaggacctaagacatcttgccatgaatggaagtcaaattctttcagacattggaacccattgctgccgaagactagcctttcagatacaattgtttttgtcgtaattgaaagagataagagagaaggcaagtccccaaggatccgaagaacatccttccccacagaagtaacattgatgtccaggaatgcgacgttaaaaagcgtggccatccactctggaattatggggaaacagtagtaagtgatcatctgaaaattgtaaagcgggtaaggagggtgagaccaagaatccagcatgaaatccagagatgaatcatcacatccaagttgtaggtaccgaagcttgaatgtacacagctcgtcgatgcaagaaacaaagctatctgtgtatgttttcttgtcagggtatgcatcactaacacaccatattatatacagacatctcaggtcattcagaccacccagttcacgcaaacaatccactgggatgctgatatcaactttcacccctataagtttctgcaaagctctcatatttccaattccttctggtagagttatgccatcagcaaccaaaaacactaaatttttcagccgaactatgctcttgggtaattcttttatgcgggtacgttggagctctagtgtctgaagttcttgtagctcgcctatttcttcaggaagctcacttatgcctacttctctcagcctcaagcattttaactgaaataatctccctatatccctgagataacaatttttcagtttatcattgctttctatggcaattgtgcgcagaacatggaaggctgaaataagtggaatgtgttcggtggacccatacacaacaagtgatcgagcactcgaaagaaccatggttgctggaagtatagcatctcgctctcggcagtcgagggaaagtcgacgaattaccttgtcttgacatcccaataaataattatgagaaaatgaagtgatgaaattttcaacaactgatttagatataataagatctagaatcatatcatgcattcggcaagcatgagcttgcccgtcgtattggatttcgtccggttgtatcatgctcctattgattagttcattaaaatagcactctccgacttcctctaaagttcgtccaccttcaccttgtgcagtgacgaacccttcggctatccatcttcttaccaatggatcccataatatcagcacatcctctggaaatgtacttagatatagcaagcatgtcttcaaatagtggggcaggtcattataactaagagatagaatcctctgcatgttgcttacactgggaacgttctcagttgctgagcaaacagaatttctgtacctcccccattgttcttttgtgcgtggtttggtagccaataagctagctagagaaataattgccaatggtaaaccaccacatcttctcaagatgtcaatatatatgtctttcaaataagcaggacattgatcttcagagccaaaaatccttttgatgaacaatttttcagcataaacatcactcaggggtttcatttcataaatatttttgcagtcagccgagcaacatgtttcagctacagaaatgatacgtgttgtacacaatattttactgccacggtaattttcacagaaagcgcatctgattgttgtccaaactgttgtgctccagatatcatcaattacgacaaagtacctatataattaacaaatgataatcccacacataggcacatatacatgcgtgagacatgcgaaaattagtaattcatccggtcataattaaaatatgcctttttagagttggcgtagtaaaactaggctaacttttatttcgatgtatgaaagcatagccaaatttaatttgttattattaactaaaactttcgtaattgtgtacctgcgtaactattgtttggatattttacgaaaaataattaagcggtcataattatgtgttattaactttgaaatgcttaaataatagtattcttttttgtctggaggattaattactagtaaaccaccaaaaaaatgcacctataaaccttattattttatttaggcacgaagaggaattggagaaacaagagagaagtaattttgagtgaaatgtcatggttcgttatccattaattaatatcttcgaaaaagtacagggagtagttagtcggtgcattaacatgcaaatgttgaaaagagagctagatagttacatgtagagaaatgagaaaaaaaggttatttaccctttatacaagcctttagaatactagtgattcagggtagtagctcatggtcgacgtaacttttttgcctcgttgtgtcacaagttgagttagttgtatatgagctatatagtcgagtaaaatgaaattagttaattggataaatcatccatagtgaatggcaccactagaatagatttttacacgtgggcaaaacaggttttcatataattatatgcggctagctggctagccagcttatgattaggggatatgaaaaaggaaattttcactcgctagctggcgatcccacatgtgaaaatccattttcacaagtaggcgtattaggatggtcttatgtaagaacaattttcgcatacgaccgcactggtaggagaaacagatcaagatatttttataaacgagtcaccccttgatagtttttgcggccaaggtctatcccggtgtttagggatagggtcctggctgcctgtttggtatgagaggtatgagagggatggcatggttttgttctttttttcctatgttctactattagaaatatatgttcttgtcaggggcggatctacgggccggcaaacccaggcagccactcgggctggtcggtggttaatccattaaaatttcatgtaattagaaaattagaaatagaatttatgtagtaaatattagctatagtgaagtttgcccgagctccaaaatatttctagatgtgctactggttcttgcagtaacaaaatgctcatgggtgaagaaactcattcatctaagcgttttaggctattttctctttgaaaataatttgcaatgaccacctaatattttgaggaggcggttgtacatgtacattgataagagtaggggtaatgaaataaataattatcgattagggtaatagtacgaagttaaaaatagaagtgcgtaccttttatcgttgagaaattctctgagtttattgatgagccgctcctcatcccatgcatctatagctccgtaatcgagctctgttatattgatcagtatatttttgaatattttccttatgtcgggtttttgagaaactgatacaaatgcttggcaatcaaactgcccactaatttttccataaacttgacgggcaagagttgtctttcctagtccaccaattccaacaatagacaccacctgcagtttttgcagcaatttatcatccccttcggtcaaaaacctgatgagctctactcttggtgtatcaatgcccactaggttttcttcttctacatagagtgctggtaatcgaggatcgatcggcaccacaccaattgaacttgacaaggtctcatcaaagttgtacctcttgcgacgttcactcgccatgtcaacacgagcctttaactttattatttgatcagccatcttgtcgcgtgctcgaagcatccgcagttgtcgaatgctcttctgcaagaaacctttcatgctttcacgcctgtgggcatcaccatctacctggaacatgaaataatcaattctatcctcaatatcatacgacaactcccggatctggtccctccactccttcacttggatatcgaggtcatcgatgtcctctagcttcaggagtagagcgttcatactacttagctcatccttcagggagaggatctcactatctactcccttcagcctgttgtacttcatctgcaatagagtagagagtttcccaatcacagggcacaggacccctgtggcaacgctcaccatggtgtgtgccatggctgaagcgtgctgaaaaattaaccgctacaacttcttgcagatgctacaaaggattaggaactaaatataagctagagcagaagtattgtgtacacagagatgactatatatgcaatctggccgagggtaagctgagtggtgggctctatattaattaagcctgatgactgtccgatagttacaatgtactccctccgtccttaggattttgacattttgcttgcactgtttgaccattcgtcttattaaaaaaaattagaattattatttattttatttgtgacttactttattatccaaaatagtttaagcataactttttgttttttatatttacacaattttttttttgcataagacgaatggtcaaacagtataagtaaaatgtcaaaatccttatattaatggacggaaggaagtagaaagccgatacacatttagtactagtactgttattgggttgcaagttggatataattagcttcaagtttacacaataagagatttcaaggtaattattgtacggtatcccattaattcaaaccaaataatagcagacaagtaccagatctggtaccctattggtactagttgatacccatcgatactggatctactatccatcggtaccacgtgagacccctcgatacaagccgatacctattgtatattgttgatggtcgttatgtagcaatttcaactgtcaattagctcaacaaataaaagaggctagcatttcttacacacatattacttacaaataatgtagttccacttattcttcgataatacattgaatgcatggattatacaataaagtgaagtagaaaatatgatggcatgcaaaaaatcacaactccgaggaatcacgtgaaagcatgtatggattgaagggctcacaagtcagaccaaaccaacttaattttgctcaatccaccgtgcaccgccataggggtccacatagcagcctttgggacaaagtcggtggagagaggggtggcatagaggttggctgaaccgttatcttcccccctcatatccaccttctacgtggatgtcattgattgcctcctaatgacggttgtgagcgttaaccgacattggcaaccgtcataagcagctactagtttatacctcacgctttgcggcgggatgtgtggatgaatgcatattatacattgtagaaatgatagatatatatatttaaataatgtgaaaaagatatggagataatgatttaacattgcttgtatgacctgtaaaaatataacaaaattctaaatgatatgttatgtttgcatgatattcaaaatactatagataattattgctggtggataatgatgtggtacacttgtatgtgatttaaaatattctaattaataattgttagtgggtgatgacgtggcacacttacatgatgagctttaggagttagtggacatcatctatacatatagtacagataaaggagggaaactctcacttcacaacactcaagaagcaataatagaatagattagtggagtttaggcttagaatagttcttatgtttactagtcttcttaaatattcaggtatgtatttgtaagactacgagctcaataatagaattatcttctttatttaattgtgctcagggattttatgctcggttgtcgatctatgctgcaacattggtccgatgatgttaacgggtcatactagttcttacttgtccatatgtagagtgcgagtcctgaggaaattagtgatattatttagcaatgtaagcatagtgcatagattgattaaatatcgttcgatgtgggtgtgccccacaaaaagtgagataggcggcaggtggtgacagccttgtccgtcctttgtattcctccacatttaggtatgatgtaagatttggtaaatgccataaccatactagcagaccaacaggggatggtctctcggtagtgtctgggtgcatagaactatgtcctagctatatatatgtatatgattgttgtattgactaaacatgataaatatagaagtacatatgaaaccatagctattcattttgtctttctccaatcgctagtttacttattgaggtggttcttctgtgtgtcacgctacctaactattgtcatgattatcatttacccatattagaccatagtatattaactatagcatgattttgaatatatcggcctattcttcatattgttgtcttccctacggaaaaacaaataatgatactaaaaaggtcacttaggcctagagggagggtgaataggctagtttaaaaacataggtaaatgtggaagcaatactttttgaatatatccgaaagtattttcggatattcccaataatcacagagcaaatgaaagtcaaagagaactggatctagctagtcacaagaaagatgagcaagcacaaacaacaactagactagaagcggcacaagcaagcaaatctagagaaaggagtcagagggatatcaccgatgttcttgcaatatgaggtgttcctgaagttcgaatcctgaagggtattctagtctatgttgaggagctcacaaagagtcggatcttcgccaaccctttcctcaagaggttgcacaaagcactcattttttcactagtggtatctcttccctttccgaggtgagattcaactttcacaaacttctccccgccaaccacaagtagatcagtggcttaagaccgatgcctagccctctaggaggcctcaacccctaagagtaaaagtagaagcaagattctcttggggacgaatcaagtcctcagacaaatcttcatgaagtcaacaccaagcacgcacgcaaactcaaatccaacactctctcacacaaatgaaatctaaacatgaagatcggtggagaggaagaagcaaggctgaaagtagatctcaaagagttgcaagctgttggtatttcttgtggtcgccggaaaatccgcaagcgcacggataccgcagtagcatttcacccaagagaattcaaagggtatcgtatttatatttccgtagggaagcggtggtgtaaaggtagagttcatatatccttaatcaagctatatgagtagtgtgacgcacaagagattcatctctaataaagatacactaagcaggggagaaggactaaagagagctaaggttcatatgtacttccatactagtaatgtctagtatacacttaacacatacgtgtttacaaggctaggattttgttcccaggtacctaggtacatatgtgtttacaaggctaggattttgttcctaggtacccaggtacatacgtgttcacaaggctaggatttaattttccgtcatagccggatgtgaagaaatataaaggatggacatggctgtcaccacctgccacccccctcactttccgtgggtcatactcacatctaacaacatttaactaacctaagaaccatgcttatgttaataactaatgttactaattcccaggagactcccaactgtttcgccgaatcatcagtaccacctctctcaaccacatttcactgaggactgatatgtgggcccctaaggcggtgcccggtgatttagtcccactttaggtcggttcaagctaacttttgggcccatcaatccgtctgctcacacgtgaatcgcttgaggtgtgtttctttgggtgtcggctcatttctccttcactttagtttataatctctgcatacatagtatttatccaatacaagttgaactatattatttaattctaatatatgtgcaagaaatgttagttctccgtttgtttattatggcagttcacgatcgaaattggtacttaacgaccatcaccaacaccaccaagctaaacctttgctcatcctcgagtaaaggtaaaacttaggttgttcattaggagttgctactatgttttattccacaatagcactatgcctacaacatatcgttttacctagaatttgaataagttgacaatagtaattttacctctcttaccttactccccatggggcttttagcttatcctcgtcttaggtagttaagagatagaacggatcgtagagtatagatcacttactctttggtttactttatcagtaatgtcggaggaggttaacttttctcaggagaatgatatttgcgcttacatttggggaaatcttaagtactcttctcaaaagttttatgccccaaactttcaggccatgcaaccacctattcatttccattggttatggaagagaaaggccacctcgaaggttaaagtttgatggacaggttgaacacaaaatatatgttgaaccataaacattgcggcccccatgattgtgatatcagttgtgttctttgcccagctcaccccctttagaatctactgcatctctttttttaatgtccctttgcaaagtcatgctgagctgttctaggtatctcttgggacacatctttgagcttggacaacatgttggtgcactgaagaaactgttaccaaggccactgtttcatgtaaaaatttctttatggggattggaatatttggaggcaaaggaatggtttcatcttatgatcataaacccccttccttggcttcatggagacagctatttaagggtgatttccttgtgttgttgcttcgggtgaatgagaaagacaaagatgtagttcttaaatggatctctttgttgtaatttcccttttttatatactttttcttttctaataaaatccttttaacaacaggggctgtgttcctttatttattttctagtcgaagcacctattatttattttctttggaaattttcacatcagcgctccacagcctcttatgagcgtcagattggtgaaaagcactccggtgacaattagaatatgggagcaattgacttttggttgaacaagcttgggagaaaattctttcccacatgtgaaggtctcgggggctgctatggagattatggataccccatacacactcggcctgcttatccaatagattaggacttgggtgtagtgttgccttgtttgctacggcatggcctgtagtcctagttagatacaattaagtaatagttaaggaaattgatgtcgtattcggctaggtttttcctctttgtaactttgcctcctaacctatataaggtggcagagagcccctccaacgatataacacaacttgatcatcagatcaatacaatagccgacggatttaatccttaaaacaagagtagggtattacccctcgtcgagagggctgaacttatctaaatctttgtctcctttactgatccactttagatgtcgtgtactaccgtttttcctatttccgatctagaaaattgacaagtatccgtaaaatcacacggtgtttaactttgttgaggttcatggctaattgtccccctatgtatagtagtgctccctccatctcaaaaatactcaacttaggataacaaatctgaactaccctttgtcgagatttgtctagattcgttgtcggagaggatcacatcttgagttttttttacggagagagtacgtatagtagggggtgttttatatgcaagcaataattgaatggacttgtccatttaaatatcgatgtgacatatgtatgtaaagtcaagagagatgcgtaatcatctgaccaaaagcaaatactacatggttatatatatactttctccgttcataaatataaaccttttttcttacagatttagattgaaagggaaagacttcaatgtgtcccccattaaagagaatgaactaacttctaattggctgaattgacagaaatacttatttacacaaatattatcaaaattaaataatagtggttgggtttgtggaagtagtactgcagaaatattaatatttatgtacaaactttaaacgtcatacatgcttatatctgagggcacgcagaaaatatttaacatgtaatttcttggtgaaccccacgacctagtgtactgagcacaagctggctttgatcagaggcagcacctgtattgtactatagttctctgtcaaacttgcatcacggttatggaataatttgcacatagccgagaggattctgcctgatggagctcggcagttgggcaagcaaggtcgccgccaagtggaggaggctgacactgatgagagctgttgtggtggtacttgaccagatgtcgacgttgggggcgccgggcgataatcgggttggggaaaaggaagcgtggcaagggcgccattgcagatttgcagatataggtttgtaaagtcaagagagtgtaggatcgaatcataagaactaagctaaccagagggggggtgaatggttggcatacccaaaaaccaaaaaattttagcggaaataaaagttaccctcgaaatcgatggagatcggtctgaccgagattgatctgccggtctgaccgagtagatgccgccggtctgaccgcccgtacgctgccggttggaccgccgaaactcggtgaaacacaaatcgaataactcttaaagtggatgacgactttattacttctctctgtgtttacaaagtgcaccaacagcactccttacaaaaattttgactaaactcgaaaccctagctcaaaactcaactctattgctctctaaagcgataccgggaagcctcacgctcccccctctatttatacatgaggtaggcagcctaaagccacgaaccaaactcatactaggagtcctaaacaccttaggaaaccctctagtacaagaaagaaactttacataaccaaacgtaccaaatttggactccttccaaattcgaccccgcatcccatacgcacacaataactccatcgtatgccatatggaatctccatcaaccacgtgcatcaactctagcctaagtatcccgcatgatctctgaccaccacggacatcgtcttatccccaagccgactcccgatccatcacggcaaatactctcccgagacatcgagtcacctacacatggaacaaacaaagaaaccatattccgagaccaagctatctccaacttgactcattagcagcaaacaacagtattacatacgtatagtatccatctagaagtcataatcatgaaataaactcggatatccaaataaacaacccgaaaccgaaactgacacagtgtcggccggtcagaccgcgggccgcgccggtctgaccgcgcaatacacgccggtctgaccggccgcaccggcccggtctaaccggtccacataaattgataaacctgcgattcacctgtgaaatctccaatgcccaattgttcatcacagaataataatcaaaaacacctttgattttacaatctcccccttgatgaacacattggcaaattcataaaaagttttggtgtttggaaaaataaaaaacaaaagtggtaaaaagcacacttcgtacaaatgtacacatcgtgctcaaaaattcaaaagaaaacttctccccctttttaaaagaaagaaattcccaattgaaccaaaaacatgctcttctcaacaactctccaaaaattcatctcgcttctcccaaaaatccaaaaaatttcacattacttctcccccttttgacaatgatttcatcaagcataggaattatgttcattaatgtgaaagagcatagcatacatatagcatctcaagtcacgtgttgcaataaaaagaagatgaacccatctataacagaacaaccatgcattcaagtataaccatgaaccaaagattttacaattaagcttaaatcaacaatcaaaattcatgatttcatgtgatttataatgcaacatcttaacaagcacataggttgaagaataaacactaaacatatatacctattgcatttatcactctttctcaaataacctttagcacaaaataaccaagagaattttttaaccttttcttttcttgagcctttttgctcatatttttctcttttattccgggtacgtccctgtcgtcaagactgtttccagggattcggcacctattattttgctcacattgaatacgtccttgtcgtcaagactgtttccaaggattcggtattcattttttttatattttttattttctttttcacaatgagcaattaaatctatttgaggaataacaagtcaataaagcatatatatagagcatttatagatcaaaccatatgctagcatcaacattgcacattttcttaattcaagtataaaatttaagtgtcatgcatcatctcccttaaaagcaaaaattaaatctcatgaaaagactagaacacatacaagctatgctagagacaaataaaccttcaaagtattgctagcatgcacaagaaaataccatatgcataaacaaagctctcttttatcaattttttcattatcatattattgcttgataaaaccatgaggtacaaactccccctcaaaccatgccaaaaggatgaattacgcccaattcaccacgaagaaaagcaaagcgattagaatccaaaggtttagtgaaaatatcagcaatttgcaacttggtgtccaaaaacagcaactcaacatctcctttctcaacatgatccctcaaaaagtgaaaacgaatatcaatgtgttttgtgcgtgaatgttgaataggattcttagcaatattgatagcactagtattgtcacaaaagaaagttactttctctaaagtaagaccataatctttcaaagtagataaaagccaaagaatctgtgaacaacaactagcagcagcaacagattcagattcagcagttgattgagcaacactagattgtttcctagaagacgatgcaatcaatgatgtaccaagaaaatgacatgttccactagtacttttcataccaattctacaacctccaaaatcagcatcggaatatccactttagcatatagaagatgaa

SEQ ID NO: 13366 - DNA, 1872 bp, Oryza sativa
ttattgtgtgcgtatggaatgcggggtcgaatttgaaagaagtccaaatttggtacgttgggttatgtaaagtttctttcttgtactagagggtttcctaaggtgtttaggactcctagtatgagtttggttcgtggctttaggctgcctacctcatgtataaatagagggggagcgtgaggcttcccggtatcgctttagagagcaatagagttgagttttgagctagggtttcgagtttagtcgaaatttttgtaaggagtgctgttggtgcactttgtaaacacagagagaagtaataaagtcgtcatccactttaagagttcttcgatttgtgtttcaccgagtttcggcggtccaaccggcgacatactggctgtcagaccggcggcatacgggcggtcagactggcggcatctactcggtcagaccggcagatcaatctcggtcagaccgatctccatcgatttcaagggtaacttttatttccgctaaaagttttttgtttttgggtataccaacctttcaccccccctctggttggcttaattcttgtgattcgatcctacaagtggtatcagagcttcgttttcttctttggatttttattgatctaaagtttttgccatggctactcccgctaggttttcaactaagcctcatattttcgatggaactgattttcctgattggtgtagtatgatgcaatcttacattatggctgaaaattatgatatttggaggaaagtttctcatccttatgtgattcctgaagcaattaatattgatgctttaaaaactgaatttgaaaataattgcaaagctcgtaatattcttttgagtgggatttctcgtgctgattatgatcgtgttgtacatcttgaaactgctcatgagatttggaattctttgaagaattttcatcaaggaacaaataacataaaagagcatcgtcgagatctttttaaaaatgaatacattaaatttgagatgaaacctggaaaagctttggatgactatctttctaggtttaataaaattttgagtgatcttagatctgctgattcttcttatgatgctaattatccacaatctgagatttctcgtcactttttgaatggtctcgacatgtctatttgggagatgaaagttacatctattcaggagtttgttaacatgtctacgttgactttggattcactttatactaaattgaaaacacatgagatgaatattctttctcgcaaagttgattctaaatcgagtgccttggtttcttcttcttcttctttggatgttgatgcttcttcatctaagtcgttttttcttgctgtttttaatgccacatccgatgatcaactcgaacaaatcgaggaggacgatttagctttggttgctaacagaattgctcgagctatgaataatgccaggaacaggaaaagaggtggtccaaatcgttgctttgaatgtggttcaattgatcatcttcgttcgcattgtcctaagcttgggagaggcaaaagagaagataaagatggtgagaagaccaacaacaacaagcccaacaacaacaagtcgaagggttctaacccaggggggaagatggagaatcttaggaaggcttttcaacaagtttgcgccgctttcgagccactaagtaatgtagatggtgaaagtggagatgatgataagggaaagaacgtctccgatgtttgcttcatggcgcgtggtgaatctgacacagagtatgaagataatgaggagagtgcttttgaggaagctattaatattttgagtgctaaaaataaaaagtgtgggaagatgtataaaaaacaggaatttatcattgaatctcttaaatctgaaatttgt

SEQ ID NO: 13367 - DNA, 5650 bp, Oryza sativa
tttaagttctcgtctcgctgcaaatgcatagtaacgcgacagtcaatatgtagtaacacgactactttccacaataacaatgttataaaatagtcatgatggatctagtttcgttaaacatcttgtctcgattatcgtatagtaacagggcaattgtattattgtttaaagattagaattctaaaagtttacttgtactaagattgttactatgtatctttgtatatagaaagagaagtacttttagcacttgtgttcacttgtgaccatgcacatgctcctttttagcacttgtaatttgcacaatattgagatttaaaaatttagctatgcacaagcagtggtactgtaatagtacagttactaagtatgttctcatttactgcaatttcgtcatgatgttactgcaaaagtgcactaacgaccgataaattttacagtaacgacctataaatttcgcagtaacgtatcatgttactgcactcctacgataatgttactaccgaatcgtaataacaaggtatgatttataacaaggtatgatttatacagtaacataatggatttgtgttcacaaaatttgaatagatgtacatagaaaacaaacaatgatctcaaatcacaaagtgtcatagggtaaattggttaagagagtttgttatgaaccatgagatcatgggttctaatcttgaatttatcaatttatttttatttttttctagaaaagagaagaagaataaaaaatggagagagagatcgggatggggaggaggaggagcgatcgggaggggaggcggggccgggcgccggtgctgcacgtgacctcgaggaggcggggccgggcgtgatccagagggataggctttggtagttgggctgagaaggaggcgggtgtagaatagagctgtcatatgtatatatatatatatatagagagagagagtatatacccaattcaaatgagtatgaaattgttttttaaatagttaggtatgaacattaacttctttacaaactagttcaaacaagtttgagctaaatttaaacatgtttaggtatataccatccaaacatataattagttaggtatgtaatactcctatatggattgtgaaataaagttgaatttgagttgtttttgttgttaggtataggtatgaatcaaattcttatacctaggtatatactcacaatttgaacattttgaaaaattcgagttaaactgtgtatttcatattatatgtatgtatgtatgtatgtatgaatgtatgtatttgaatttatatatacatgtatttatacatatatatgcataaatataaaaaagcagcaagcaataaaaatcattaaaaaacatttttagtaccgattagtaacgccaatcagtaggtcacgtggtcctacggtactaaagatgtttttttaagtcccgctttgtataatcaagactataaatattcatatttattcatgcattttgcgtccccattgcacaaacgggactaaaatgggctgtcaaccgggactaaagtgtatttccccagcaaaatactcttctagtaaacaataaatgcatattttttggttatctaagccatgaacttttttgtgatttgtgaataataccacacacaataaacccatatgaatataatagtctcctacatcaaattctacgcttctaacagtatactcgagaaatttatatgttccttcaatgactaagtatgtgttcttctcatccattggagggagctggttcctcacttgttatgagcttctaaactgctaaacggtgcgtctcgtgaaaaagttgtttatatagaagtttcttaaaattttcaaataatttattttcaaattagtaatagttaatttttgattaatcatgagttaatcatcactctcgtttcatgtttcttgtgcacccgttcagctccgctgaacagttcgaaccacatcctaataagggcaaaatgcacctatcttgcagctatttaacgctcaaccaacgatcaattgacataataataagtataaaagggataaaaatcaaaattcagtgctataccatggaataagtaaaactcgaggatatacaaggattggctaaatttgaaaggggcagataaaaaattttctcaagaaaacacgcttccctgtgcccaactgccgagctctatttaggcagcattgtctcggctatgtgcaaattattccataatcgtgagccaagtttgacagagatatgtagtacaattcaaagcaagcttgtgctcagtacactaggttgagtggttgaccaagaaattacatgctaaatatttcccccgtatccattgatataggcatgtatgatatgacgtttaaagtttgtacatatatataaatatttctacagtactacttacacaaaacccaaccactattatttagtgttgataacaattttataaataagtatttctgtcaattcagcccgattagaagttggtccatgctctttaatgtgggacacatcaaagtctttccctttcattctaaatctctaagaaaaaatatttatttatctgaacggagtatgtatataccatatatttgcttttggtcagatgattgcgcatctctctgtaaaatcaaaggtgtttttgattattattctgtgatgaacaattgggcattggagatttcataggtgaatcgcaggtttatcattttatgtggaccggtcagaccgggccggtgcggccggtcagaccggcgtgtattgcgcggtcagaccggcgcagcctgcggtctgaccggccgacactgtgtcggtttcggtttcgggttgtttatttggatatccgagtttatttcatgattatgacttctagatggatactatacgtatgtaatactattgtttgctgctaatgagtcaagttggagatagcttggtctcgtgtcgcgtcccaaaacaaccctaaaatatatcatttaaattatgactagaataattaaaatccttgtgaaagccttcaaaaattaaaatgtgcaaagttaaaagtcaattaaggcttggaggattttttatatttcctaaaagcctaaaatgtgtaaataaattttagtggaatttccagagcacaaataataattattaagaaataaacaaagttaaaatgattttgtaaaaagaaaaaccctaaaacaatccctccctccctctcttgggccggctcggcccatttccctccccctctctcctcttccccgcggcccactcggcccctccccgcgcgcgcgccgctgacgggcgggcccgcccgccaccctcgctgacgggtggggcccatccgtcatccccttactcccgccgctcccgccgtcccgcccgcgcctagcgccgacgccgccgccgaatctgccgcatcccgtcgcccccgcgtgaaatcaataggggggaattactccccgtgagcccctctccattttcccccattttcccctctctctctctcattcaaacgagcggatttgctcccgcaaatctcgccggcgccattaatagcggccggacctcccacgccggtttccttcctccccggccgccctctcccccttccaaccctatttaaaccctccccgcgcttctcccgtccgtttccgcctctcgccgcccttcctcctcgccggattcgagctcgcgccgtcgccctctctctcctccgtcgccgacgacctccggccggccctcctcgctcgccgggactgtctcccgccccggcgtcgcctcctccggcttcgccgcaccgccgccgaccccgtccaccacctcgccgagctcgccgaccgccggaacgccgtcgtccccgtccacccgagccgcgccgccgccttcctccactccagccgcctctttcgtcgtcgccgtcgacccggggtgagccgtggaccgccgcctcttttcccccttcccttcccctctctcggccgccgctccgccgtgcctatggccgccgccggcgaccataggggcgtgggcgccgcctcccgccggccgcgccgggaggctgccgcgtggggcccggcagtcagccgcccacgtcctcgggtgcggctgatgcgtggggcccacggcgccggccggtgtgagcccgggtgcacccggtccaccgtggaccgtgaggctgccgcgggggcccactcccgtggacccggtccgcgcgcccttccccctcggctgacgcaataaaccattttttaaattaaaatttaaatgaagaaattcgtaaatattcatttaaagagcatataaacttcaaatgggcataacttggccatttgaactcggaattggaccgttcaagtctctaatttttccttaagaagtcaagtacccatttttgtgctttgttcttgcttgttatatggggtttattagagtaaaagcccttttcttttccgttggtcgtgtagacgctgcagcttcgggagatccgctcttcgtggaggttgaagccgacgtttgggaaagcgagcaaggcaagtcacatcatctttgaacatattggatcccactttgtgaaattattttgatttaaattaatgcattaccgctttatttaaattcccgcgttatcactgttttatttagccatgcctatttacctttgttatgaccttattattattgctattgttattattaccttgttcaccctagaataaacaaaaccccaactagtgggcactctattcatggttccactagtataaatttaggtagatgcttcgctggttaattaggcaaactttaggtggttttattaattctagactttgggaatattcatattacttggacattatggaatggttggactattgtggaattggacacacacctccccctctattcaaaaccctcaaaatggttttaggctgggctaggggtgcatttgatagtagcacctcggccacataaggaccggtcttcgggcctatgttgcaaagcactaccgtacttccacatgtctagtgggtaaggcttagtttgtggctcagtctggttataaacaaaagtacacggatggagatggacgaagtcgggggtcgatggacatctctaggacaaatgaaggctacacgagctgcggcccggtagtcgagatgtcatggcacagggctggtgtcctgctgctaggggctcagtcctgcctacctgtcccggaggttccggccgtaggtagggttgggtcggtactcttgtctatggctaggatgggttggaaactatgtcatgtcttccgtccatatgccgtggtggtatgtggcacgtggctgcacgtgaggaagacgtgtcaaaagggggagaagtaatgtgaaaatttttggatgctaagctctttcacattaatgaacataattcctatgcttgatgaaatcattgtcaaaagggggagaagtaatgtgaaagtttttggatttttgggagaagcgaggtgaatttttggagagttgttgagaagagcatgtttttggttcaattgggaatttctttcttttaaaaagggggagaagttttcttttgaatttttgagcacgatgtgtacatttgtacgaagtgtgctttttaccacttttgttttttatttttccaaac

SEQ ID NO: 13368 - DNA, 624 bp, Oryza sativa
aatcatacgccaatgtcggaagagactagcagagtaggcctccgagacggtcgcggcacgagaacggcgtagagggagaattgccggagcagcacgcagttgccgaagaagagcgaagtgtagtcgaggaagatacggcgatgctagcgatgaatcatgctggatgaagttgaaggcgaagtagtaggaccaacggtctagacggcgtcatcggtagccatgtaaaggtagttggaccaccggcctagatccgcgacagtggcaacttggagatgcggcggcgatgctcgaagtagataaagaagacccgagtggctgacgatgaccagtggggatgatgagggtgtcgaagcgtgaacgacgatgaagacgatgaaagcggtgaaactgcggtccgagaggacaacacacctgcagctccatgtcaatgaaccggcgagaagtccaccggtgatgaagccatgctaaggaggacgcctcttgttggtatttcttaatgacattacaagaaatataattcccagcaatggcgcagaaatacttctggtatattatggttacagagttcatccgcaagcgcacggatataccattatagcatttcacccgagagtattccaaggg

SEQ ID NO: 13369 - DNA, 10214 bp, Oryza sativa
aggaggggaaaggaaaaaaagaaaaagaaaaggaagaaaagaattccctgggatttaaaatattgcaagctcgattttaaaaggttaaaattatttcgagagctctgaaaattccactaaaaatcctgttagtgaatttcgacatgtagaactcaagaaaaattccacatgccaaatccgattattatttgcattgatttaatagggtttactcttgctttgcaccggtattttcttagggtctcttattaattcaattttagactcaggaggaggacttcatggtgtgacagggcaccacataccataccacatggtttgcacggtctcggctgaagctcctatctcacccttgcccgtgaggggcttgttggcggtatggcatgaggcccttcgaccaaacctgccgaaaccacgcgatcagtggggattcaagcccgtggcgtgaaggttagtcagggcgaagccccctcatggcgaaggctatggaacaaggacggcgagaggtggggaatcgcgcaggtaccttgtcgggctagaggcctcttgggtgaaggatgcagggcgaagagtatatgctgaaggatgcaagttcgcccctgcgaggaccgaagaagccattccggcccttcaagccaaggggctattgcgccgacgatcgcctggcggcccatcaggggctcatgaacctcaattacattatgtacccatgtaaatgtccctttcataagggcaaccatataaattcccctgtataaccaaaaccctagtagtaagaacctgtaatgggggctataaatagtcccatagggccttgtaatagggggatcccaagaaaaattctcaattttatacactttacttcttttccaactactgttgagtgaccacgtctttcgacgtaagctgttgtcgtttcgacaacacaactcaccaggctcatgtgcatatttactggaaagagcatcagcagcaacattggatgctcctttcatgtaacagattttaaattgtaaatccaacaacttggtgaatgctttgtgctgctagggggtgtgtaacctctgctcactaagatgcatcaaactgtgatgatcagtaaggattatgaattcagcgtgttgtaaataagacctccagtgatccacatctagaagaatagctaagtactccttttcataagttgataaacctctagatttcacacctaaagccttgttgacatgaacaataggatgaccttgctgacaaagcacagcaccaatccctgcatcactgccatcagtcgcaatagtgaatgtcttagaataatctagcaatgctagcacaggaactgtcaccagagctaacttgagagcctgaaatgcttgatcagttgcaggagaccatacaaaagaaacatccttcctcaacaaatgggttaaaggtttgctgattaaaccaaaattcttaacaaattttctataatacccagccaatccaagaaatctcctaagtttcttgacagatgtaggcactttccaattgacaacttcctcaatcttagttatcagtagtgaccccttgaccactaaaatatgcccccaaataagccaactgatcttgggcaaaagaacacttactaaacttcactctccattttttttgactggaacttcacccggagatgagacaaatgagattgcatatctaaattgtaaattaaaatgtcaccaaagaagaccaaaccaatttttttagtacaggggctaaggtgttaatcatagcattttgaaatgttgttggtgcacctgttaacccaaaagacatgaccctgtattcatagtgaccagaatgggtttgaaaagcagtcttgtgttcctcaccctccatcaacctgatttgatggtaaccaaccctaagatctagtttagagaaaaacttttgatccaaccaactcatccaatagttcatcaatgacaggcataggaaacttccctttagtagaaatcgcaaactctccaggtgccatccgtcttcttaactaacagagctggagaagagtaagcactggtactaggttgaatcactcctcaagagagcattttagaaacttgtctctctatctcatccttctgtgcaaggttatgcctgtaaggcctcagacacacaggtttagaattgggcaataggagaattttatggtcacaagctcttttgggtggtagtccatgaggtgctgcaaaaacctgctgaaagtcttgtaagagttgtcgaatatcaggagaaactgactgaagctgatcagtagataattcacaaagttggatgacatgcatgatggatcccaaattaagcatgccatgtagctgctcatctgtgatagaggtacaatgtatagcgtgagactagatgctttgaagcttcatcaaatattttctatgttgatattccatccatttagcagcccaatcaatattcattgtacccaaagtaaccaaccaatccatacccaaaatgtcatcataagctcctaagggcaaatgtttgaaatcggttttaaatccttggccttgaacccaccagtcacaatgaggaataaactgagaacatagtagtagtcccccatcagcaatcttaactgattataccttggataaggattgaactcccaaaaaatctatgtgccaaactgctgtcaataaatgaatgagaactcctagaattcaccggcataagaactttagtgccctgaacccaacctctcaacctaaaagaagtagctgattcggtcccactaacagcttgttgagatatagccatcaaatttccctcatctagttcttccaactctgcttccacaaaatcaacatctgggtgtagtatatccaagagttcctggaccacatgcaattgcactgaagtagcaaacttattatctctaccccaacgttcaccacaagtaacacaatccttttgctcttctataagctttcagggcagacaatctgtcatctcttgatttagaaaagtcaagccctcttatcatccaacacaggagaatgaatacctttaaccacaggacttactggagagaagacttatagtagtgttgtctgagaactataggagtatcatatttcctatgattgattggtttagatccttccaagatttcctcccacaagagcaagctgcatctaggtcctgaggtttctgtaatagaactattgacctggtcacaaagtaattaagaggaagggaaccattataagccagcaattggtgcataatactatcaaacttttcaacatattctgacatactagagtcctgcaaaatgtgaatccactgtcgaatcaaagtttcttgtttgtccttagtgaatctcaggcacacctgatcagcaaattcctaccagctaacacccacaaatttggaccccatagactgacgccagaatgctacattcccaaaaaaaatttaacccagcaactctgacccaattcttaggatgaaccccatacacctcaaaatattcttcaaagttgtttttccacaactgaggactgttgccatcaaattgtgaacaagtcatggatggtacactacctcctaaccccaaaatcatagcagaatcgactgcatctacaggtgtattgtcacatcctgattttcgttttaggatttataaattatttaataaattatatttagaatttgtattaaatgttcattaatttacaagtgaagttaaatgtgggaaataaaatttcctaaatataaagcatggatggatttaatttttattaaattctccatggttaattatactctctggaattttctcggatttttcggagctcaattcctaattttaatcatacaaagaacatttcagtaattacccacatattaaattaatcattaaatggtctgattatatactttttaagtactttgagtgtccaagtattttcatgatttttcttgaaattatttgagcattggaagtatttttaacaattcaaaggtcattttagtgattaatttaattggaaaagtaattaaaatcctttccttagctttgggcttaatctggcccacctctctctcccttagcccgatccagcgcctcccctcttctctgcgcaagtctaatttgctatcctccttcaatcgggccgaggaaatgaagcccggcaggaagtctgctacagtgtcgcccctaacctccagccggtcgatctcctccctgccgtgcccgtgtacagcgccgcttcctccaccaaatccgccgcatcccgtgctccgtttgcaaaattagttgaggggaaatattcctcttatcctcctctatcctttcccccaagaatcggactttatcccgaagaaatcaacacggaatagaattcgttttcgagtttatctctccaactaaccctcggattttccggcttcgattcctctcggttggagtccgatctcttcaatccaagcctataaatagcatcccctagtcgtcctctttcgtttgccccatctcccgagctctctcgtgccccgtagtgccgccgccgcgccacccaaaccgccgccgtcgccggccggcgaacagccgcctcgcgccgtcgtattagccgccgccgccgcctcctcacgtcgccgtcgggtgcgcgtggaagaggggaagctcggccgccccttcgccgtcgccaccggtcaccggagagccgccgccgccgcacaagctcgtcgccggtcgtcatccgtcgtcgttcgtcgcattggttagtaccggtgagatcgcgttgttctcctctacgcgtaggtaccctccaaaagtccagtcgagtcttctagcgccggcgaggtcgtcgctgatgtcgagtcgacattgatgatgtcagcgatgacgtcattaatccctttttcttagttttctctattagatgaaaatcgattaaacttcggaaattcataactaaatcatcgtaactcggattcgagtggttcaagttgctaaattcatctaaaatcaaaatctacatgttaaaaatatccacatgtactgtttttgcttgtttttgtactgttttgttgattttgttcttttgttttagttaccgacgttccggaggagagtattttcgttgaggaaggttcggaagtgtttgcggaagctcaaggcaagtcacacagatcccaaacaaccctttgagcatgttgaacccgtttaaagctattgtttgatttcaacttatgcattattttcgaatgtcatcgggtggtgagcctttcccaattaattaatggccgaagatgactttattttcctattagctagaaccttatatattagtttgggttcagctaaatgctatatatatataattgcttagccatgcttagaaacattagcacatgattgggataactaatgttacactatcacttatggttatatttaatggtagctcaggatggtcaatcgtgattggttaattaattattgccaattaaaatttgtcaatggtgggttgtgagcacatggttgtgaaggtcgtgctcattacaattaaggactggttcgcgaactactgttgtgagacattaaccgtgccaaccacaagccagcatgtgcaatggctttaccttttgtatagcatgattcattgcggggcaccagactgagaagcggtgagaagtccgtggaggtcgctggggagtccatgcctctggttatatttatagagggggtgattatgatccagaaatggtgcactgtggtgagttgtgttgtgcagggggtattgtcatagcctctattcgggtactttccagtatcgcgacgcatggtagacatgatgttgaggctgtgtcttgtgggtacagtggtacacctctggccagagtaaaactattcgaatagccatgcccgccgttatgggcgagttgagcaatgtttttcgtgattagtctcacacctctcacaataattattgatgctataaccggtaataatttgtgtagctcctggtttggagttaggtctgtacagccgggtatggttgttcaggatggttgggcctgtgcagcatgggtgtgctgttcagtgttgattaaaatttctgattaattactctactgttttacttcttttaaatctttgctaaatgctgcttttgcaaatgagcctatattatgccatcctttggtatccttgtgcacttgcatatttgctgtgtggcttgttgagtatgtcatatgctcattcttacaataatcatcaaacctcaaaaaggatccagaaggagaagacgtttggcttataccccagttgagctgcctgtaggagtggagctgaagccatcgctagaccgttattccgctgctgttttcttttcttttgtaagtatgtacggttatttttatgatggatttgtatattaaattgtcaatttgtgtaccttggctgattcctggatgaggatttttatgcacaaattagttcggaaattactagtgaatttccgggcgtgacatgtgtgatccaattcaggagaaggtaaggtgggaaatagcacctgtaggagacgtaggagcagaaaatggctcacgggaagcctgctgaaccacaatctgcagcttctcgaccttgtcttgcaattccaccaccgaaccttggagttcatccacgcgtttctccacgactgtaaaatgagattccaccaccaccttgagagccatgaactcaattcggctcttctcctccgactgctccctgcgcttctcgctctcttcccacttgcgatcggaatcctccatcttcttcaagagtagatctagcttgccatcctgatcgatgactttggccgccatcttggtcacgtaccttggcttgtcgtactccaccgtgatgaaacctggcgttcgatctcgcttagccagttgagggagccaaagcttttgcgggatcagatcatcgaagcaatcaattcccacctctcctaggaattacaacaaaatgaggggaaatttttttcagcgagactctgataccaaattgttagcaacccaacacccaatcactcaagaacatgcaagaacagtagatagttcaccgaatccgataggagtaccgccgccgccttcgctaccgttcttttctttcttgttcgattggaaaggaaatagagtagttatagtattacattccagtctctctctctctctctctctctctcgctcacattactccttgtgggtcgggaaggtgctcatttggcccattccagcccatacactttaggattacatttacgaatacgacctatcttttctgtagaagtctgatgctcccactccagcttgtcgctcccctatatatcatcaggcaagggtaggttcctgacaaagaagcttttgaggaggttaaacaacatttgttgaaagctcctgtagtgtccttgccaaacttttcaagacttttgtggctgaaactgatgcacgtgacaagaggattggggttgccttgatgcaatcacgccatcccataactttcatcaacaaagctttagggaagaaagcacaagcattgtcaactaatgagaaagagtgtattgtatggcaatcttacttgctgtggaaaagtggaaatcatacttgcaccataatgaatttttaatccagtctgaccacaaaagtctaacacatccgagtgaacaaatgagcaagtaagactgaattaaaagaggttttgtgaagttgatgggtctaaataggtctatagtatcaaatcaagtagaaaaaagggtgtgataacgtagcagaatatgctctatcaaggagaggatggatgatgaataaatccaagtgttagcaccccgagatggatggagaaggtgatagaggcgtaccacaaggacctagcaactaagcaactactggttgaattgagtctgaatcctgaagggaaggagggtttccaaatcaatgttaaacatcatgttcctagctatagctgactattgcatcatataccatattaatttctaagttttcgcaatccacaaccaacagtggttcaatcaattacttcacccagaaagatgtacgtgttacagtactacggttccttgccttgcatgcaactatacgatgtccacatgttgattcaatccacctgtccacaccttgctgccctcgcatgtgcatcgcttaccccgatgccctccatcctcgctccactaagggtgtgtttggtttgtggtcaagcagggatgggatatggctatccattttttcagggatatggccatccaattttttgtttggttggatgagtgggataagctaaatttttgtttggatggaaggataagatgtggatatggtgatccatttttctatttggtaggaaggatgagctcttacactcacctattggatgaaatggtgagaatacccccttggttcacacttatttgcatttacactatgtaagaaggaacatatgcattgtaagtttctttttttctctggttgtaaatgtattgtatcatatgtttaatttttggataataaagcacatcttaatatattcaatgtcatgatgcagatataaatttaagtttgattcctacactggtagaggacaaatattatccaaatcatgtccatacatagatgagggatatagataaatacaacatatcaaaagacatcaaaattgacactcataaaccagatctgaacaaatacttcaatgagcaaaatcatcagcccccttaatccatcaacccaccatatctaaattaatccattaaccattgcaacgttgagtagtaggaggaaaaaaaaatctcagcaggacgtcgccccattcagccacatacatcgtcgccggacggttgcctgcaccaccaagaccccgccgcccccgcggccaaaccctgtcgcctgcatggccacgccgccggacgtcgccgcccgagccgctgaaccggtttgccgcctgcgccataaccgaacgccgtcgtccgcgcggccgcccgcgccgccgaaccctgccccgcggccccgccttgacatccttggcgccctctgttacaaaatcctcaaatcttcatgtcctcctcgcgaagcccatcaccatcacagccgagtttattatacacttgaaccattgtttttcaattaaatcaacggtttaagtcaacccatattggctatgttttggtgataaagaattacagaaaaattacatatttgacccatatttattttcaatatattaatatatgcatgcatcatttttttcaggcctcccctaaattaaagaaaccctggaaatttttctcgacaaagcaaaatataagtataattttgggagtgactattagtcagttgcctgaaaaaaaaataattatcagtcgatctctatgtatcgtccgatcccatccaatatctgatcccgccaggataaaaaaaaacaggtaaaacatcttgaaccatggaccgcttatcatcgtgaactggttttcggatctacattgttcgatcggttcgaatcttttgtgttttttatgctggttattgatttggctggagtttgtttcgtgctcttttgttccatttgtatgtgccgagcccttagcaatttagaagttatagtgtaatatgcctagcccttagcagattcagaagttataatgtaatacgaggtcttttacggtgacctagacacaggatcaaatgcaaacaagcagtttaatcttatagtgtactacgccttaaacagcccatgggactaatacaaatcatacaagcttgacattatacacgaaacaaccacaagaaaaaaaatagaaatgaaacattccccaaaaatcaacaacttgtactaaacaaaacattagttcttattagagactcactgcaatcccaaagaataattatttaccaacttcatcagacccaggcatagagcaaataaaatataacaatggagatcacagtaaatatttcattagatgcacacttgcttcaagttgggttcgcatcccctgcctttgaggccaaaggcaaagtttgccgttgctgccatccagcacatccagttcctattcgtggattgcatgtttttttcctcaatttaagatgattacaggcgattagttgataatatcaattatgctggtcccatttaaaagataatcccttgatcaatattg

SEQ ID NO: 13370 - DNA, 5510 bp, Oryza sativa
ctgcggtttgtgatttttattctcggcaaaatggacatgtccccggtgatcacagttctttgtgcgttcagaaaaactagaaagaaacacgcgctacgctgcgtgcgatgatgattgtattaacatacaacaatgcataataagtattctcctgcactttaatgtgtaaagagcagtgcatagtcaaaatctttcactgccaatgtacaaaatgcatacatgactcatggccaagcaggcctttatatgttactgcaacctaaaagatgatacatcaatataagaactgggctataaaatgaccaccttatataaaaactaaataaattgataattgcatctttcatgtacatatacttgcatagcttaacaattcagacatactgtagatttctcctgcttcgtggaagaacacggatatatcattgtaatatctggaaatccagatgcccaccaattcctgacaaagcataaaggtaaaaataaatctatttgtttgggttaattaaattcaagatgtgtcaaaattgacttaagagtcaatataacagatcattaacactggtcatatgtaaattgagatattgaggtatatttgaaatgggattttttttcataaaaaagtatttgtagctatggttaggaaatactgtagaatcagactgcaagtggtagagatgaaccatgtgctgattttgaacaccacctacaacaaaaagaagcaatccatgaaaattggtcaactaagataatgtccgcaatagaaggtcaaaatgaccacataagacatcataataaagattggataggatctatgtgttagtataaagcaaaatgagttaactaaaaagttcgcatgtaaaccacaaagaatgagctgaatagaagtgtactaattattgcagtagcaacttaaggagcagcaaaaaaaccacatttagctcatcaaatattaccaaactattgatgatccaatactgaaaatgaaactattcctcagctaatcggtcctgcaatgcaacgcaagaaaaacctaatccaataactcctaataaattagataatatgttttaagttttactaatgatgaattagatatattgctggactttaacatattttcaaaaacatggtaaatttatctcctagagttggatgtaaagattaaagttagactttctatgcaataagatgtactatacagttcatgaactgaacaaatttatagaaagcacgacctaggaggacatgacccatgaggtctagagaacttttgggttattcataatctctagatcaagattcatggtactaaatgtgtaatcctctatgtggaaactgcaaaatagtcctggcatgttatagtatccaagaacaattttcgtaaactcctctcgaaaaagtaaaaaactgaataattgctattacagctgaatacataacttgtatgtttagagaataagttatataggtgacagaatatgtgcgccatacaaagaggagaacatggggagtccatgtgaacggttcaacttagtactgcaagcactcgtgtaaacaggtaaaaccgatctatatagactaccgagcagagaatgaagaagcacatctagactttcccgcatgaccaagaagaaaaaactgaacacaacttgcttcacatttgtaatttgggcatgcaaaaacaaatggtttgctcaacatagagcaaatgttctagcagcgagaacaattgggttgcaaagacaaaaggaagatctaacatggagcaaattttatagtagcaagaacaattggttcgcggagctaattcaggtaagaattgctctcaaaaacggtaggatttagctatctaaggtatgctcaaatctgacaacatggctgcagaggcaaattagtaaagataataattcacattacactcagtaaacaataattgaagaacttgatgggttttaccttgaatcaaaggtttgatgtaggcaagcaacctttaatatatagaagctaaactcttaataatcatgcggagtgaaataagatgtagtgagataataatatagcttgttatcatgagaagtactccgtcgtatacatgggctgctagcaatccctggctgcgccaagctgccattgcatggatggccaagcaaaccagtttagcagagcttgttgtggcactccgtcgcaggctgcatttgcacagccacacatgcctcttggagaacagcacattcgtatgggctgctaagtagcttgttcttctccatatcaaaacatcaaggagagcattccagcgagcaaaatgtagatggatatatgcactcaactacaaactttaaaatttaagggatccatttggggaaaactcaccggggttggcagaagtttcttgagtggattaagacatacgtgctaactccaactatttgattgtaatgaatatacaaatgatgaggacaacaatcatatgaacacggccatgcctgaactaacaaaagcagaaacatatatgcgcatcttacctgcaactggtagaaataaaatccaagcaacctatggagtaccagcagatcttttgccattagataggttgctttgaaccactgctgcaagaaaaaaagggggatcgaaccaaaaaaatgaaatccagcaagatgagagagaaaattagatggggaaaattacctgttgtaaatgcgatgagatcttgccgcagaaaaagaactgatgcgagggggagggagcgcactgccacagagaaaaaaaaaaggtggagggcgccgtggggggattcgcgtgcccgtgccttgcccccatccttaccaagatgtgaccgtcctcactggcagatgaggatggtggccggtggcggctcacgttcctcttctccaggcggatggattttttattgcagatgcggcgacctgattggaaagagcggcagtggcggaagcactctgttcacgattagaggagggcgacattgcggcggcagcacacgtaagggaagaggcgggaaggcggtggcgaggcagagttaaaagaggagaagaggcggcgacggcttgcatcccctccaccgcggaggcagaggtggccaaacgggcggcacggcccggcccggcacgggcacggttccggcacggcccgtttcggcacggcccgctaggcacggctgatgaaacgggccgtgccgtgccggcccacgtgccgagccgccggcccaagcacggcccgtggatggccgggccgtgcccgtgccggcacggcacgcccgcggcccacgggccgttcgggggcacggcggcccgtgtgcacagtttttttttttaaaaaaaaaaagcaaaggaaatgtataaggaaaaaaaattaaaaatggaaataaaatgtttaaaaaaaagtaatgatttactaatgttaaaaaatgaaaaaatggtatttaaaaaatggaaataaaagttttttaaaaaagtaatgatttgctaatgttaaaaaaaaagaaaaaatggtatttttttgttgtgttgaaaaatttaaaaatatagattgtgattcattattatgaaataatttaaaggtaaatccacacttgcgaaaatattgcaaaagaatttgttaaaaatagtaatgacctttattgatgtttatatcattacaggatacaatgatacatgctgcggtgctgcctcgttaaaaactttgtcatgtaaaaactcataggggaaaatgagaaaaccatgacaaagaaaagagtacagctcaaaggtcagaactacttctaacaaaattctactggggttggtctggatccaggtagagttgctcgaagtgggcggccaattcttggttgtccgcagtgtattgggcatgttgtcgagcaagctcccagtctttaacgcttagtagcatttcgacgtggtcgctgcgcagagtcgtcctccggtcttcgatgattcggccgcatagactgaaggccgattcggaggacaccgtcgacacgggcaccgtcaacacatcccgtgctagttttgaaagcacaggatatgttatcttgtggtcattccaccacccgaggacgttgaaatcttgtgcttcgtggtggatggcgtcgctgtccaaataaccggacaactcttcggccacaacatgcgaagaggcgtctccacttgtagccgacgaactgccaccaccttggattgaacttgaagacgatccaccccaaatcctaccccactgtatcttcttcttacctgtagtggggataggagggggtctccgctggcgaacttcctgaaactttacttcatatcttccaaaaacctcatataatttacgtctaacctcagtataaaaagaactataatctacacctatagtatctccaacaagtgataaaatagcagacaatccccttaatttacacctaggatctaaaacaaaagcaagagcatacaacataggtatatttttccaatatttcaaatatttttgtttcatgtgaaagacaggttcagttagaacgtcatcattttcgtattctttaaataaagtagcaatttcaagaaggttgtgcaaaattatattagcagttggataataaacatgtgacaatgttagagtagaatcataaaaagtttctagaaattggtaaaatttttggacaattgcccaaacatgctcgttcagtactgaagacccgtcactgtttcttgggccaccacgtgactgaacaaaatcagaaagtaaactactataaggtaaaacaacttttaacattaaatacgttgcattccaccgatgctctgcatcggtggcaaacttacgagcttccacaccggccgcaatgcaaaacctcttccatgcagcaatccgcgggttagaagcagttaaccacgcgattgcttgacgaacagcatcgatgtggtcacctaccctcttcatgccagtcttaacaatcaaattaattatatgacatgcacaacgctgatggagtagaaaagattgagcatacacacaaaataaaggttgcaatatttcaatagccctagaattagcagatgcattatctagggtgacagcaaatattttatcagcaagattaaattcattaattacttccctaattctttcagctatgttttctcctgtatgtgagacatctattaacctaagccctaaaactctcttttgtaattgccaatcatcatcaacaaaatgaacaactacgctaagataatcctctctagctctactactccatatatctgaagtaacacaaacagagaaagtacatgtactaaacagttccttaagtgcagttgcttccttgtgataaacattctctaaatctctagttgatgtttgcctactcacagctttaaacctaaggttatgagattgctgaatgtaatgttcaaaagcaggggactccccaaagttcaggggtaaatcttgcctggcgattaaccggacaagagattcccgagcaaccatgggatcgtactccc

SEQ ID NO: 13371 - DNA, 5777 bp, Oryza sativa
catggcgcttgaggtgacctgtaccaccagaagaacgagcagataaaatttgcctacatattctacaacgggctttcgatacgggcccttccgtcggggcatgtttcctttatctcgtcgaagctttgccacacaccggaggtctcgatctcttcgagccggtgtgtgtcgaaacacttccgctcgcggttccggaaaatccttccgaagctgtcgcctcctgaaccggtacctcctcaacgacagccgtatgaaccggtacctcctccacagatggtggagttggagccgatccggaggtaccgtcaaaccccgacatgtagttggggtcgaaatcacccaaggtgaacgacggcgactggtatggaaagttcggatccattctgaaaatttaaaccgacataaacaaattttcgaatatttattgaattcacaaacacaatacaaataatacacaaatttgaatattacttacatctttccaaccgcgagctcttcaaacctctgcgatcaaactgttgaactacgaaactaattttgatttttgacaaaatttgagcaaattttgtcaaaatcaaaaaaaaatgcacacttgagaacaaagagagcacttaaaacacttgagagcacaagatgaggagtgtgggatgaggagaaatggctggggttcatgccctatttatagggcgaaatttgagattttttggaattttttcggaatttttatgaattttttagcctcccaacggttattttcaaatttcaacggtcaaatagccgttagtgccacgtgtcgccgtcccattggaccgccgcccgcctgccgcgcctgacgggccgccgccgtgccgtgccgggccgtgccgcgggccgtgccgtgccggcccgctacagtagccgggccgtgccgtgccggcccgcgtgctcggccagcggcccaagcacggcacggctaaacgggccgtgccggcacggcccgttactgtagcaggccgtgccgggccgtgcctgctacaggtccggccgtgccgcgcgcggcccgtttggcccggcccatttggccacctctacgcggaggagaccggggtcgccgtaggtagagggcacatggacggttagatcgagcctatcgtgagatcagacggaggacgttggcgggaactgtcgcgtagttaatagaaagcgtggggttttttctgcaaaagatcggctgacgtggtgtgctaacttttcaccgatcctacggggtttagagaggttaatatacttacacacgtttattcttttcattattcgttccaaattgtactatagaagacaaatgtattccttagaagaaatataagtactccttactatagagggctaatgtactacatagtaaattattatatatatgtttttcgaagaaaatataattttcgggctatcttctttgacatcacatttaaatttactgtcatgcgacttaattcataacatgtttattcttcttatcattctactccctccgtttcacaatgtaagtcattttaccatttctcacattcatattgatgttaatgaatctaaacatatatatttatctagtttcattaacattaatatgaatgtgagaaatgctagaatgacttacattataaaacagaggaagtatataattttggttccttgaaacattgactagaaaagaaattgggtatttcatctatagtctttttttagggatatgtagctttttttttatttcatttttttggcagctatataattcaaatgcggatcatgcggatcgtacattggtcatatattctcaacaagttgtaagtatatttaactagattgttttcactaatattacacattgacaattactcttttaagctcgcagcaacgcgcggggtatcaactagtttatattaggaagcaactaaccaacccaacaccctatttttctagattgagaccatccacttctgcgcctattttcctggatcgaccaagagggaaggtttttccctgtgtgccattaaaaaagatggtgtctgcccttgtgccactaaaaagtttgagcctccctttatgccatcgtcgaattttatcgtgccctccacaccatttcgtcgctattctgtttgggtttaaccatttggtagctctgacatatgggccgggtagaaaaaatgtcgctcctgccctttcactttttcttctccctcgattcccctcttctccctcaggccgccgccgcgcaggcccgaccggcgcccggccgccgcccagccggggcaccgtgccgccgtcgcctcggcccggtcgtcgtcgtcctgatcctcgtcgtcggtgcgctgttcctcatcctcggcccgaccggctcctccagcttcaccatgccgcggatccgcacggagttcaacgaacccgtccacgttgcggtggcggctccgcctccgccgccgacgcagatgcaagccggcgtcaacacgagcggcgaggaggacagtggcctcctgccgacaacctccgcctccgccctgacggcgcgctcgtcgtgctccacgtccagccgccgccgagcatcgccgccgggctcaaccccggacccatccccttcggcggcccgagtaagcaatctcttgcactcgtcttcgcggaaatcaggacggacacttggtcctgtggctgtgagctgtggttcttgcgaattttttcggtcgagctgatggcttcctggatgtgccgcgcggctgatcaggcgaggtcgctggcatcactagtagcaagcatcaatagtcctcgccgccgtcgttgtgctggtcctggcataactagtagcaagcattactagtagcaagcatcaacagtcatgaacaccagtagcaagcatcaatagtcctcgccgccgtagttgtgttggtcgtcgtcgtcgttgtcgcagcgctgccgccgccgctgtcgtcgcagcgccgcccccgtcttcgtcgtcgtcgtcgtcgcagcgttgttgccgccgtcttcgtcgcgcagcgatgccgccaccgtcgtcgtcgcagcaatgccgccgccgccgtcgtcgcagcgctgcccccgttgtcatcgtcgtcgtcgcagcgcccgtcgctgtcgcagtgccgccgtcttctcccctccgctcctttgctgctgctgctgctgctgctgcatctgaggggagagaggagagtgctaggagagagcatattggaccaaagtgcaactaagtcattttacaacggaatggtgtgaaggatgcgataaagtttaactatggcagagagatgcttgaatattttagtgatacagagacaagcaccatctttcttaatggcatttagggaaaaacctcccaagggagagggcacaggcggcggcgacggtggcagcatcctccaatggcgggcaacgaccaacgggtgatattggttggagacggcggcgctcgcgggccgccgctgtccaatgcgccgcgccatggagatccccaccaccggccgacctcatcctcgccatctctctccgctgcctggttgccagacctagccagcctcccctcggctcgtcagccccctgcggccccgcctcgacgcccctcctctgccggtcggcttcaggctcgacgacgccccaagatccagtctccacgagctctgcccgagagtgtcagaccttcagcgtcgcgtctgtacatccgccgggcgccggctgagagcgtccatcccaaatcatttttgctgtcgttattgttcaactggaattgttctcatgattttgttgccagcctaggtgaaatagagcaatgctacacgtactaaatttttcttactaaacttttactaacaatcatctcaaccgtttaatttaaatatatagaagttacaaaaaaaaaatctaaatgcactcataacatgacacatcagtgttagtaagaatttaataaaaaaaaagttagtacgtatagccttttccggtgaaatacatccaccgcagcagtcgacaatcgatgccgtgtctggatccgctcgtctccatcggcaacgtcgcctctcggtcaatctccaccgtttcaggtttgcagtcaacaagcgcataataggagcgtttcaggtttgcagtttcagagtgccaacatcccgcttttacttgcttcatgtttgtaatagtttcatatttgcagtttgattctaaactacccaaatcttttccactgcaatcgatgactgattttcttagacatctgtagatgtctcttcacaccatataatccttgataaaattgcttggatctcattacaaacggttcaaagtgatttaatctcagaattttaggattatgttttttaaatgtgcacgtgctccattatgcacattttgtgctattttctttgtttgatcaattcatgggtgttgaagctctgcttgtttccatgttaaaaactagagttcatctatttattaagaaatcctagttttatcagtattaatttggtcaaatttgagtgcattaaattggaacagatgggagtacatattcagatgctatcagataacatcattatactttgggcaggtataaaaacaaatgaacagtggccagaatttcgaatttgagctccaaaaaaaatattaatggatttggtgcctgcgtcaggtttcaggcttggatttgtccggacgagctctctacgactgatgatcggctggctccggcggcatacgatggaagaatcttggcgactaatgtcctctgcattgtgattttttggacgatgagtgtgtgtttgtaacggtgatggcatgaccaattacacgtgtacagtaaaatatttactgactatatatcaggcctgatgactgctccctccgtcccacaaaaattcgattcctagggtcgatcgtttgtcccacaataaatcgatttctatgccagagattgagaaacactaattgcatctttatcatttgccctgtgttgtcttgtccaccacccaccaggtgaattaaaaagaaatgaaatcaccgtatcatctccagtgaagggaggctttcaggaagtagtttggcacgaatttcacatgaacttttttttaatgaaaagtgctaatcgtggttgtacttaatgagggtgttttggtcctttgttgcttggactaaaactgcatcaggcatcaggcttctagggttcgactttatctgggatggaggaagtatgttgtaatttttctactcatgtaaggctgtgtttagttcctgaaaatagttgaaagtttagggaaagttaggagttcatgtgtgtaggaaagttttagatgtgatgtgatatgatgaaaagttgaaaattgggagtgaactaaatacggcctaagtaaggtccagtaactttgtactcccttaatgattggatgatactaatacatgtcagtaactcttttactccccttcacgactggatgattctaatacatgtgagcattcaagtgattgtagtaaaataattactaaagggactttcttaaggctcacggccactgtgaggctcaattaagtatagtaaaaacatgtcatggtaaatattcttgcgagtaaaaatattactaaaaggtattaaacttatgaaaatacctaggagtaaaaatattacgagttgatcagcctggatttttcacattttggtccttttgaaaaacttatttcgcaaatagacccctgaaaaaacttatcccagaaatggtcctttttggggcgccagattagctggcgcc

SEQ ID NO: 13372 - DNA, 5363 bp, Oryza sativa
  unsure (1)..(5363): unsure at all n locations
gccataaccgtcattaattacttgcctatttaaggagctcactctctccattcctccacacacctcaagcaagaagttcatttcatctctcaagtttagtatagtttctagagtatagtggaatagaaatagaatagaatcttcagccctcagagtctttggaagaatttgggtatggctctagtagcttttccttcttttgtaagacttgtactttatttcgaatactcttctttatactactctggtattgtattactttccgagtatatgaataccagctttactatatattcaaatatatttattatgatgctagcttatctgggagatgcaatggtgtgggtataatgatcgtatttacgatggctctatgtcatgatgatgatattagagtagtatttggtaatttaagcgtggtgtttagattactggatataattatttggggttatatgctgtggaagcgaggtgggccgctgatggtgacagctcagtacgggtattcctccgcgcgtgtatatagtcctaagttaatttcctggggagggtactcctccgtatttagcctcggttgtatggtcaagacggattgtcgtaaggaactcggcaatcaggggtggcttctcgaaacaccaagagggcatcagatagagggtattagctaagtagtaaaataattaggatgtacgtataatatgtatgtatactagaagtataggaatatgatgtttctatgttctttctacttagcttagataatcatgagtaagaggatgaatgcttctgcttagtgtcactctaccttatgaattatattaacccctgcttagactttggttattacaaataatatataaattattactacggttctctctattataatcttcccaagggattaaacaaatacgatacccttggaatactctcgggtgaaatgctaaaatggtatatccgtgcgcttgcagatgaaatctgtaaccataatataccaggagtatttctgcgccattactgggaattatatttgtagtaatatcattaagaaatatcatcaaatagttagggggtgttgcctacataattgtacaatagcaagtgtagactaaaatgactatatactagaagtatagaactgatgcttttcttattcttagtccacttagcttagattattattcatcggagcctattttaacacctggctatgaaatttgtcccgaattcataagtatggtttgggataaatctttctctagtctagaccaggaaaacctctaccatcacctccgagagtttgagcagctgtgttcgtgcctcctgattcaaggcatgacacatgagactgttaaatggaaattgttttcgttctctcttcaagagagcaaaacaatggtacatttacaccgttgggagtgtgagcagtagctggaatgaattgcgagacagattctgccttggagggaatagttaggggtgttggctgcataattgtacaattgtaagtgtagactaaaatggctatatactagaagtctagaactgatgcttttcttattcttactctacttagcttaaattattattttagtgagagtattctagttgttcttctgcgtgccaacctatctttatccttgaattgatcaacccctacattagacttcgatatgcataactgacaaaaattagggacaatcgctcgtttgaccctattttgaagtttaatttccaatctgaccctactttttcagatttgctcatttgaccttgtttttcaaaaccgtacttgccgactgaccctactttcactcccccgtcaaatttcatttaattaaaagaaaaaataaatttactagtccgaaaatgactaaaatgccccctgattctacaacattgtccccaaccttatctaggcggctgccacacacacggagggggcgatgcctgctgcatgcgcgaagggggtggcggcggctgtggcgtgcgtgggagggagcggccacggcggcgcgagcggaaggtgggagcggcggtggtggcgcgcacgaaggacgggagcggcggcgcgctcggagggcgggagtggcgtttgcagcgcgcggagagagagcaacggcggtcatcgcggcagcacgcgctgagggtgggagcagggtggcagcggctcgctcgtctcgtggcgctgagaagggaggtgtggttcgccgctgtgccgcgcagtcgatgcagtgctgagaagtgagaggccagcggctcgccggcgttcttcatgatggggaggagaggcagcggctcgcccacgcacggtgctgagaaagtataggctagctgctcgccggtgctctttgcgattgaggagcacggctcgctggtgtgctgcatggtcatgggggaggctgcatctcacctagtgcggtgcacacggggacctcagcataaggcaggcaaggggcatggctatgagacctccatggctattgcttgcccatcttcatctcctctttgttggattgctgctcaggaacattgttagacactaatatactacatgtgtgtgtttatttcttcagtatatgcaatttgggatggatttgttaaatttttattaaacttaattcatatatttttgtcaaataaaattttttttcaaacatctaccaacttgaagtgaaagttatcaaattatagtaaaataatacaaactgtagtcaactttgtcaaatcaaagtcgaatttgtcaaaaagatgacaaaaactaagtcaaatttatcataaatctatcaaacctacaataagtacataaatttttcgcaatatctttgccacgaaaaaactggaccaagctaacaaaataaccaaaaataggtgacaatgagaaagggcaaaattggcattgtgatttttgtttacatggataagtgctcttgacagaagagggtcaaaccgtagcttcagttttgaaaaagagggtcaaatgaacaaagttattataacagggtcaagttggtagttaacctttaaaataggatcaaatatgcaattgcccctaaaaattattagcatagtactctcttatcatatctttcattgggattaaacaaatacgataccatggaaatacttccaggtgaaatgctacaacggtatatccattcgcttgcggattatatctgtaaccgtaagaatactgagtaatatttcgagcaccattactaggaattatatttctagtagtgtagttaagaaatgtcacgctcagaaattcactagtaatttccgaactaatttgtgcatgaaatcctcgtccaggaatcagccgaggtaacaaactgataatttaatatacagattcattataataataacgttacatacttacaaaagaaaagaaaaacagcagcggaattacggtctatcaaagctccggctccactcccataggcagctcaactaaggtataagccaaacgtcttctccatctggatccttttcttcaactgaggtttgattgattattgcaaggtgagcatatgacatactcagtaagccacacagcaaatatgcaagtgcacaaggataccaaagaatggcataatatagggttcatttgcaaaagcagcatttagcaaacatttgagaattgtaaaacagtagagtaattaatcattaatattaatcaacactgaacagcacacccatgttgcacaggcccaaccatcctgaacaaccatacccggctgtacagatctatctccaaaccaggaatgcaccattccaaaccaggagctaatcaaattattaccagttatagcatcatttattatgatgagaagtgtgagactaatcacgaaagacattgttcgacccacccataaccgcgggcacggctattcgaatagttttactctggctaggggtgtaccactatacccacaagacacagccccaaaacatgtcaccatgcgcctcaataacaccacggtacctcggaaggagctgtgacagtacccctcgcacaacacaatccaccacagtgcaccattcctggatcataatcacccccttacaaacaaggcatggactccccagcgacccccgtgggcttgtctccgccacttctcagtctggtgccccgcaatgaaccatgctatacaaaagataaagccgttgcccatgctggcttgtggttggcacggttaatggttcacaaccgaaactcgtcaaccggtccttaattgtcatgagcacgaccatcaaaactatgtgctcacaacccaccattatcaagttttaattggcaagtaattaattaaccaatcacgattgaccatcgtgagcttccattaaatatccataagtgatagtgaagcatgatttatcccattagtgagctattgtttctaagcatggctaagcatctattataagcatctagctgaaccaaaacaatatataagggtctagctaatcaaattataacccataggaaaataaagtcatcttcggccataattaaatgggaaaggctcaccacccaatgacattcgaaaattaatgcacaggttgaataaatagagaattttaatataggatcagcatggtcaaaggaattgtgtntgggatctgtgtgactgccttgcaataatcaatcaaacctcagtggaagaaaaaggatccagaaggagaagacgtttcgcttataccccagttgagctgcctgtggaggtggagccagagtttcgctagaccgtaattccgttgctgtttttcttttcttttgtaagtatttacgttattagtatgatgaatctgtatattaaattgtcagtttgtgtaccccggatgatttctggagagggatttaatgcacaaattagttcggaaattactagtgaatttctgggcgtgacaagaaatatgatcactcactaaaaggcatgttagcatgcaagttcttgcaaacatgtgaccgaagtgaaaaaagagagttgcgaagtcgaacacttgtctgttggatagtatagggaggagagaaatactgcgtaacatggatcagtacttgtattgagcctcagggggccggtatatataggagtacatggggagaagataaggaaggattacagatatggaaggagtccacacaaatcaatcctatcctaatatgactctaactaccatatactctagcatccccccgcagtccaaccgtgagcaacgcggacacttggactagagaagaaactggcaagagtgctcaacacgggatagccctttgtgccatagtcgatgtagccaaagcgaagggtgcgagagagccgtggtcgatgaagtcgtgcgtagagtagctgtggtcg

SEQ ID NO: 13373 - DNA, 1475 bp, Oryza sativa
aagatttactgccttactggtagtaaggagcatgttttttctaagttgctaaataaacatgttttcatctagaccagcatggttcatgctagcatattataagggatatgtttctcaagtataccatgcaaaattaatttcactcaatcatacaaccctaagggacaatgatttgattaaggtaatgaacgaccaaaattgtgcgtggatcggagaagaggacgatcaattttaattaccttgaggctggaagaatctgagagcgaacttgttgcgctccaagaccagcttcttgtctaccgtgagtgtgtcagtggtatgcaaacgcagtcaaacagagataaagtacataaacttcttttttcataaccaaactcgcattcttgaatgcaagaaggcgctgctggaagagcaggaattgttcatcgtacatgttgtcatgacaaaccatcagaacatgtcgaaacatgaattcggcaataataaaacggggtagcgcacgagacctaaaagtggatggatgtggagacaaaggatttagacaggttcaggccctctcaatgagaggtaataccctactcctgtttggggatttgaatccgccgggtgtattatagatctgacgatctagttgtctcatgccccctagagggcctcctgcccaccttatatagggtggggggcaggattacaagatagaaaccttaaccaatacggtatcggtttcctaaatctactttacaatattatcaaaccaggactttaggctgttccgtaatatataaggaaacgtaatacccgagtcatgatctattacatattccatagatataagttatcccctatgactagtcggataaccatgccgtatgggtatggggtacccataatatccacagtagcccctgagaccttcgcagtcgaaaagataatcttctctcgaaccagattactccaaagccgagtgcttcaatcatctttatcatggtcttccgagtacttttaccaaatctgaagactgtggagggctggaaaataaagtcaggtgcaccgactagatgcacctaataggtgtagcccccgacaatgtggttaattgaacaaaccaagcatatagtcaaggaataaataatccaaccaaccgagtggttttgataatcgtaatcaaccaagtgacttgatatcaatatatagcatatgcggtgtgaatcctccaaataacatgatccgagtgatataccaactgctttgtaaaatatgatgagtgatatagcaaaatagctataaagaagcttgtatattgtgaataaagaaatttccaaagtattgggcatacgccatgcgcacactgctttaacagatgtgcttaagtccctagaagacacatggtttcaccacacctggaaatatatggcatatgtggtgtaaaatccgagtaaataaactcataaaggatttaccaaccgcctagaaaa

SEQ ID NO: 13374 - DNA, 2253 bp, Oryza sativa
ctttacggggaataataattggtccagtctttgagcatagaagatagactcatgactatgaatccatgtggaatgtatccggaacaagtcccaattggagatataatcctcacgcttgagttgatgagcccctgagcatatagcttgtccttctgtcatagtcaaaattgtctattggcaatagctgacgcagtcggcatggagatgaaatgaccaacatgaagacgaaattgctcatcagaagtaacggaagatgtcagtggtagtaaaaaaacagtgacaccaatcaaaggtaatgaagttgcataaccatggaggcgaagaaacagtcggtgatgacaaaagccaaccgacgatgaagacgtagacgcgcatcaacagtgatggcgaaatccaccaatcatgaagatgaagaaaatagttgacgacgacaaacgcaaccgacatgatgaagatgacgatgtcggtgatccagccaatagcagtgtagcaaccaatgataatgacaaagacgctcatcagccatttgcatagtaggtcaaccatgaaggtgaaataataagtcggcgaaaacataatcatccattagcaatagcggagatgtcagggccgatgaagcagaggtgctggtgatgatgtcagtgacaataatccatcaaattaatgttatagctgttgtagatgcttcacttggaggagagttgatgttgttgtccaactcgtccaaaccgaaatatttcaagttgttgaagtagaatgtctgctctatatattatcaaagatgaagataatgactcctggagttgactcgttggttgatgaattgatttcttcagcttgacataaaatttgtcaaattttgagccttgtatttgtgtagcccccgactctttggttagttgggaaacaactgaacatagagtcgagaattatagcttcttgtcgtcgagtagtcattgcttgattgaagatatgtgttgaagatgtccaagtagaaatcctgaatattggagagcctcttgttgtagtaaaataacatggcatcacatgccgagatgtcgaggctcacaaagacgtcgtggttggtgaagtagcaaaacttgcgaagtagcagcaatagagtttgccagtgccgaagataataaagatgaagtcgctctaccatgatgacaaagttgcattgccgtgatgaagtgaacacgagtcgtcggcaacagaagcaaactggtagtgaagacgcgcagttgtgaagataaaagcactagtcggcgacagcataaccagtcggcgacggaagacgatgatgttcatcagtagtggtagctgtctaaaccagacgtagaggtgagagcactagtcagcagcagacgtagacagcttgtgttgaagatgatgacgcatattagcggtgacggcgacgtagccaaccgtgaagaagatagcatcagtcggcgtcataacaggccagctatgcaggcggaaacaccagtcggcggtggacgaggcggccggtcggtgaagacgtagacgcccaacaacggcggcataataggccagccgtgcaggcggaaacaccagtcggcggcagcgaaggcaagccggtcggtgaagacgcagacgcccatcaacggtggcataaaggccagcgtgcaggcggaaacaccagtcggcgacggtggaggcaggccggtggtggagtcgtagacgcccaacaacgacggcataatggccagccgtgcaggcggaaacaccaatcggcggcggtggaggcaagccggtggtggagtcgtagacgcccaacaacgacggcataataggccagccgtgcagacggagacaccagtcggtggcggcgaaggcaagccggtcggtgaagacgtagacgcccaacaacggcagcataataggccagccgtgcaggcggaagcaccagtcggcggcggacgaggcggccggtcggtgaagacgtagacgcccaacaacggcggcataaaggccagccgtgcaggcggaaacaccagtcggcggcggcgaagacaagccggtcggtgaagacgtagacgcccaacaacggcggcattaaaggccagccgtgcaggcggaaacaccagtcggcagcggcgaaggcaagccggtcggtgaagacgtacacgcccaacaacggcggcataataggccagccgtgcatactgagacaccattcggtggcggagaatgcaagccggtcggtgaagacgttgacgcccaacaacg

SEQ ID NO: 13375 - DNA, 3186 bp, Oryza sativa
ggatgggaagggaggagggggaggagaggaggaaggggaggagttggaggagaggggatgaggaagagagttagagaggatagatttgaggagagggggagagatttgatctgggtaagttgtaattgtggaggagaggataagtgatagggattatatactatgtgttcaattttagtctcgggactaaagattatattgatctttagtcccggttggtaataccaatcatgactaaagcggtaatctttagtcccggttattgaccccaatcgggactaaagatccttgcccccctgacatacatctgataggggttagtcaaccgggactaaagatcaaaatttttataaccgggactaaaaacaatctttagtcccggttctttttggaaccgggactatcgtggattttgccagaccgaccaaagatggtttctccaccagtgcttcttcctcgaatatgagctcatcaagatcagagatagcgctagatccctcttgtcagcctccgcaggcaccacacggggtctgtcaagacttatccctgatgttgatgtctggcgacgtgtgttggcttgtgtattgtgtgtcaatctgttgttgtgtcctctttcccccctagggtgtcttgtaagttacacgcgacttatccgatccggttacacggagtggagatcgtgcaggcgtccggatcaagcatcatgatatctatatataagttgagccgccgcctctacgcaacatacgtgaaatcaatctagggtttgccacctcctctatactgcgccgtcgctcgtagtctactccatcccactcgtcgatgtgcaccggcgatcgggtgagcagatctccagaaccttcgtcttcgacgtcctgcaccgggagaaggcggcaataaggattttgggaagcgcttcgcgcgattgccccctatttgaccacaacagctcatcttcctcctcgctcgcgtgctacgtgccatcgtcaacgcccgcaaccgcgagtacttcctgctgagcaaccggtctttcggtaccaacgctacgtattcagcatattgtgcatatttgatctgttcatgctttactgtctagtatacatgtgtagatcttacgatgtgtttacactagtttacatttgcaatatcatgatttatttatggaataaattaaatcattatgtgcttttaaattcaacaattcatagggattgtactaattccaacaaaattatgtataattcctgcattctaatgagatcttaccttagctagctttgtaccttagttcaaaattaattgtgctaatttacctccttctctccttccaagttataactattttttctttttgccttggcctgtctcaattcagctccggagaactagcatatggctgtaggttatcaatagttcagctctggacgtctctcctatgcataaaactaggtgattccccgcactttgctacgggaattactaagcaactttcaatacttgagggtttttcagtacttatcataatacttgaggttttttcaatacttatcataaaacaaacaaatgatacgcgtgatttaatgtagaacatattgataagtatgtgctgcgcccactccctctctctcctgcccacgcccgcgttcgagatggccgggattcaatttttgaatcccgcctctctctccacctccacctccccacgtcggccgccgaaatcgggccactcttggccacgtcgaaaccccttttcccctatttaagcaccaccgccactacctctctctttttccccatttcaccgagctcccctgtgccctctttcgctctagcagcgtgcacccaccgccgccgccacttttccgctctccggccgccgctagccatcgcaagccgccacgccaaacctcgccgtcgacaccaccgcattcgccatcgcgtgaagcaccctggccatcgcccgatcgtcgccgtccgtcgccggaaccccgtccgtcccatgcgccggtgagttcggccatggccacccccttcggccggcgttcctaccctcgatgatctctctctccctctctaacttcccccattttgttccttaggtcctctcgaagcccgtccgactctcgccgtctgcaaccgccgtccgtcgcgccgttcgccgtcggtgaggaactcccctcccatccctttctctctcccatactgccaccgccgttattgccgcaccgcctcgcttcggggccgtgccgccgtgcgccgccgcgctaccgccgttcgccgcatcgccgccgccgtctgccggtcgccactttcaactactgtttataaatgctccctttatgcaaatgtaccgctctagctatcctttggttatatcctgcatcataccccctattacggtatgacttgctgagtacggtggttatacttagtcttgctctacttttccccaaccccagagtttgagtatgcgtcagatggtggctattccgaggagtaggcatcgtccgtgccgtcgaggatgcctgtggagtggtgttcccactgcaatccaagtcaaggcttagctccagttatcttttatttttccactgcatttatgtaagacttttataatgtttttaagacgtggatctgtatgtcaactttgtcttttgtgtaccctagccagtcctggacaggggttttaatgcacattctgcttgaaattctattcgggaatttctgggcgtgacagatctccagaaagaaatttctgggttcgagaaaaataggttttgggaagacatttctggtgctccaatttgcaagaaatctaggatgaatgatgtccataatcctatacttaggctaatgcacaaatggattgctatgactttgtttcctagaggtgatctgagacccattaggggagatgaattaattatcatgtttgccatggttagaaagatcaaaattgctcctgtgaaatgtatgataaggcaatggttagaaagtataaagttctctgctcctgttgagtgcacttctctgattactcggatagcaaaagggctaggggtcgttagcaaccaaattgcttttatctcagccgctcgtccacgtattgatgaggcttatctagtgcaagggcatattctgaaacatggagtagatggatctttgatatacttttttcccggttgt

SEQ ID NO: 13376 - DNA, 515 bp, Oryza sativa
aggtcatgagttggataattcccttcgtgtggacgcaactgccgcgaggcatatgcaaccactctgccctcttgcattaggacacatccaagtccgtgacgggatgcatcgcaatagacttggaagtctttcatctggtcgggcagaatcaaaactggtgcggatactaatttcttcttgagctcctcaaaactcttatcgcactcagctgtccatttaaacttctcatctttcttaagcaactgagtcatgggtcgggcgatcctggagaagttttcgatgaatcggcggtaataacctgcaagtccaagaaaacttcgaatctgcgacacggtcttcggtggggtccatttggtaactgactctacgttcgatggatcaactgccacaccctgagctgtaatgacatggcccagaaatttgacttccgtcaaccagaagtcacacttgctgaacttggcgtatagctggtgctccttcaacttctcgagaaccagacggagctgttgctcatg

SEQ ID NO: 13377 - DNA, 565 bp, Oryza sativa
ccaatatgatcggcatccatgacgtgttccacgtgtcccaattaaagaagtgtttaagggtacctaaagaacagcatgattcggaacgcattgatattcagcaggacctaacttatgtgaagaaaccggttcgcacacttgacaccagcgaaaggagatccaaaaacaaggttacccggttttgtcgagttcagtggagtcatcattcgtaagagcaagcaacctgcgaaagggaagatgagttaaaagccgcccatccgcacctcttcaccagctcgtcagaatatcggggctgagattccgtttaaggggggtaggtttgtcacgccccgaagttttcctccagagccaggattgtaattttccaatgaccccaaagataatgcaggtgaaatcaggagaaaaccataataaagtaatgcaaataataatcggacttgacatgtggaatttttcttaagttttacatgtcaaaattcattaacaggatttttagtggtattttcagagctctagaaaaaattttaaccaattaaaattgggcaagcaatattttaattccagg

SEQ ID NO: 13378 - DNA, 627 bp, Oryza sativa
caaaatcaagagcgcaagctctcaacatatcttccaagatttgattgactcgctcggtctgaccatcagtttgcgggtgataggccgtgctgaaatttaaacgggtccccaattcttcttgtagtttctgccagaactttgaagtgaactgactccctcgatcagatacaatctttttgggtaccccatgtagacacatgattctcgagaggtagagctccgccaaccttttgcccgtatacgtggtatgtactggtatgaagtgagcaaccttagtgagtcgatccacgactacccagattgaatcgtgacccgatgatgtccggggcagtcctgttataaagtccattccaatctcctcccatttccattccgggatttgaagaggttggagtaaacctgctggtctttggtgctctgccttcacccgttggcaaacatcgcagagtgcgacgaattcagctatttctctcctcatgctgacccaccagaatttctctttgaggtcctggtacattttagtactgccgggatgaattgaatactgggtctgatgagcctcggtgagtatcagatcttcagttccttgtcgtcaggtacacacaatctttctcccatccagattgt

SEQ ID NO: 13379 - DNA, 9643 bp, Oryza sativa
  unsure (1)..(9643): unsure at all n locations
atgcctcagccttcgactactccgagtggacccagcaggttggtggtgcggtttcggactgcgccactgtgtacagcgattgttgtgcgcgcgtatcggcggccttcattatgggccttctgcaacagttcggctgtgagcacgtcgccgagttccctaactatacgaagggggactgggaggttagtgcgcagaacgtttcgcccgcgctccgtgcgtggcgaaagtagttctggcagaaggacggccgatccaccgccaaggcgtgtcttctagagcaactggtgaaggctgaggcggcagaccggtgcaaagaagaggacgcggcggccgaagggggtggaggcgatgcccaggatcacccagaggtgtgaggccctccgccctttccttagattttcgtagttttccttcttctttttgtgtttgccggtagaggcgaacgatgtaaattcggtgagctgttcctaaccctccttactgtacccgaaaaaggccccttggatatttggaatatatgactcaatcttagccaccttttatggtcgacgcctgtggcgtatatgattacgccactttcgcattatgtaatatttgccctttttttacccgttcttactatgcaattcgtcttttgccctttctgcactgtctaccagggtgttcaccgaaaattgtgcattcggcccccttctgggagttggcaaagcaaaaactagaaatttgtggcgttgaagggtttgccgaaggtgcgatgcccagttcggcctgtttatcgcgaaatggtgataaacggccgcagctacaaggtttttaaggttgccggctagctgcgggcgcaccccgggcgaaccttagaagactgcgatcttgttcatacaagacgtttggaggatatggctcgcttttggcgaaatcatcagaagactgatcgggaggaggcaatctcccggcgtcgctacagtgtagtttgtgtttcgctcccttcccctcttagggtcgtgtatgatattagtagtgatgacgaacctagtgggggcaaagatgtaatttatctgtaagctgggctgtaaagccattgctcctttcttttatttgtaccatgttgatgggtttgtattcttcgatacatttttctttaaaatcaataaaaatgcgttttatttccttttcgctatttttgcattgtcacttcgcgtgctttcgttgggtcggaacgtgtcggcccctttgcgtatattagcgaaataggttttgacttttcagctttcggcttccgttttcgatccgttttgttctacgttgcaagaagcactcgtgctttccttttgattgagtgtaacggtgttcggttagttgtttcccgaaacaagttgttgcggtttcaacgttcagctagcgatgcttcggnccgnnattcgtttcgcgccccccttggcctttttcgcttgatcaggcgtttgccttggggtttttccacaaattatcaatcacacaaataaataaaaagaaggcctccatggtggataataacactacatccagttttttgtcttttttcattttcctctttttttctcttttttttctttgccgaaaggcttacatagtgccgaagggcttacataacgatatatacattttttcaagttggcgatttgggtgccacccgttctacacatagaaacgcttgagagaggcagcgttccaggaatggtcgaactcttcgccttccagtgtcaccagtcgaaaggatcccgtcctggacttgtgcttgatgaggtacggtccttcccacttcgattcaagcttgccaatggctatcgggttcgccttcttcgttaggacaagatgaccaggcaatagctccgtcggtcgaacttttttattgtaagttgccgaagtgcctgtggcatacttgcgcatgtgttcgagtgcttccactcttaccccctccaagagttcgagcgacaccttgcgcccctcttcgcccccagagaacatcactcttggtgaattagcctctagctctgtcggggtcattgcctcatcgccataaaggagcatgaacgggctgaacttggttggtcttgtgggggtcgtccggagagcccagagaacagatagcatttcctctggccatttgcccttcgccgccccctcaagccttttctttagtgcttctaggatcttaccgtttatgcgttcggctgccccatttgactgcgggtgcgcgtccgacgtgaacctgatttccaggttacgcccttcgcacatttctctgaacttgtcagagtcaaactgcttgccgttgtcagtgatgaactcttttggcactccgaaacggcaaataatgtttttccatacaaatttctgtattgttgccgaagtgattgctccaaggggttcggcctcaacccatcgggagaagtattcgacggccacgattgtgaacttgtacccatttcgcgccaccgggaacggcccaatgatgtccaatccccatctggcgaagggccagatgggtgagatgggccgcaacttatactggggcacggtttgacttcggccatggcgttggtagctttcgcacttcttgacttgctcaacacagactttcaacacggtgggccagtacactccttgtcgaaacactttggaggcaactattcttgtggcctgatgcgcgccacagagcccctggtgtatctccctcgccatttcctcgccttcggcaaaagagatgcagcgaagcaagggttgaagtacctcggagcgatatagctggcccgagaccatcttataccttgcggctctgagttgcaggcgttttgcttctgcttcatcttttggtagccagccagtttcaatgtatttcacgaacggagttcaccaatcgcatggatcttcgcccatattctcctgatcgattgccatgacctccaggctgtccatgggcacacttggtgcgtataggacttcaaaaaagatgccaggcgaatgtgggccaccataagcagcagattttgccaaggcgtctgcttcctcgttctggcctctaggtaaatgttcgactgttatgccggtgaaatacttttccataaaccgaacggcctctaaataccttttcattccatcttcttttgcctcaaaggatttgtcgacatggcctgccaccagcttggagtcggttcagattagcaagcgccgaatccaccagcttggagtcggttcagattagcaagcgccgaatccctaatgctttcgccttttttaggcctagaagaatggctttgtattctgccgcgttattggttgtgtcgaactgcagccttgcggcatatcgaatcggcacaccacttggcgaggtgagtactgccgcaatgcccgcccccttgtgcgaccacgaaccgtcggagtacatcacccagcgctgttcgacgggttcgggctcgggggcgaatgccggtgtccattcggccacgaagtcagctagcacttgagacttaacagcagtgcgggcaacaaaatgcaagtcgaaaggggatagctctgccgcccacttgataagccggccagtaacttccttgcctcgaagtatttcgcccaaagggtactacgttggcactatgactttgtgggcttggaagtcgtgtttaagcttgcgcgaagccatcaccaggggcgtacgcgagcttttccatttcaatgtatcttgtcttcactccttgcaatacttcggagacgaaatagaccggtttctggcctgactctgtttcttgcacgagggcagcactgactgccactagcgaagctgccaggtatagtagcagttcgcttcctggtgctggactgatcagagctggcgggctttgcaaatattgattcactcgtcgaacgctgcttggcatttgggtgtccaattgaatttttccgcgccccggagggccttgaagaagggcaaacctctttcggctgcctttgagaggaatcgactgagtgccgcaattcggcctgcgagcttttgtacttcacgtacgctcgacgggggcttcatttgctgaatgacatctattttctcgggattcgcctcgatgcctctttcagaaaaaaggaaatccaacaacttgcctgcgcgaatgccaaaaacacacttctcaggattcagtttcatacccgctgcgcgcaagttgtcgaaggtctcctgcaggtcggacgcgtggtcgaaagccttgcagctttttacgacgatatcgtcgacataagcttccacatttcaccctaactgcttgtaaaggaccttgtataccagcctggcgaaggttgccccggcattcctcaggccgaaaggcatcctgagatgacaaaaggtgccgaacggtgtgatgaaggctatcttggggatgtcggccgggttcatgtggatctggtgatagccggaatatgcatccaaaaaactcatgagttcgcagccagctgttgaatccacgagttggtcgatccgtggcaaaggaaaatcgtccttcggacatgccttgttcaggtctgtgaaatcgacacacatgcgccatttgccgtttgatttccgcaccagcactggattcgccagccactcaggatggtcgatctcttggatgaccccagccttgagcaatttttggacttcggcttttgctgcttcttggcgatcagcggacatcttgcgcagcttctgtttccttggcttggcatccggcttgactgccaggtgatgcatgatgagatctgtcgaaacacctcccacctcatcagggccctaggcaaagatatcactgtttttcttgagtacctctaggatgttcgcagcctcttcttcgcccatgtcgccccctagcgatacgagctttgtggggttggcgtcatcaatctgcatcttgattatcttgccgtgaggggcaggctttggcgcgtgcttcgcccggtcatgtggttcggcctcaacattatgcactgctctgttgattatggccagatcgcctttcgaagaggccgaagactgaagccccttgactacgatcactcccgccgggccgagcgtcttgagcttcggataattgtggtgggagatagcttcgaacttgttcaaggtcgcatggccgaagatggcgttgtagttgtacgggatgtccacaacgtcgaataatacttgctcttcgcgtctgttttcccctgtgccgaaagctaccagcaactgtgttaggccaagaacttgaactgcttctctgtcgaaaccacggagcgaggctggtgctagggtaagggctagagtggacaaccccatcttggcatatgcttcggcgaagatgacatcggccgaactgcctccgtcgaccaggattcgctggacctccaagccagctatctcggctgagatcaccagagaatcttgatgcgggaacattactccttcggcatctcccggcccaaaagagatttgctggttcagatactgcggggccccttcgcccaccgaagtgatattgtggaccgttcggagccgcatcttcttttatcgcttcgatagttggatcggcgggtcggcccttgtaatcacttggattactctgcgatgcgcatcttggtgctgttcggccgggggtgcttgttcttgagctgcttcacgaggtgcttcgacagctactccatgctgcggctttggatcttgcgcgttgccacgttgccaaatgttttggcattgctccgtggtgtgcgaagagcgtccatgaggcgcagtagaggtcttttcggaacttctttcggacaggctactgatggttgcctgcttgctgggtgtcgaactccttgcgaagggcttttacttcttcgacatccatcacagccttgcccgcgcggtcggttctgaacttcctccaggtcatgggggcttggccttgccttggcggttgtccctggatcgccatctgaggctggcgaacagcgaggggaggtggttcggcaacctgagcttgtgcttaggcttgggcagcggcgaaggaagccttatcacactcagcttgtattgcttgtcgtcgcttggaatcctcttcgccccttgcgtacccgtcaatgatgcgaagtaggtgctcaagggtctgtggctccttgttggcgaattttcttgtgagttcgcccttgagtaccccggccgaagcggcgtttatgacagacgcctcggttatgtcttgcacttggcaccgggcttgcgagaagcgatgcatgtactcccttatcgactcccccggcctctagcgaatgctgagtagatgctgctgcgtcttcggctcctcataggtgcctcagaagttaaggacaaagacatcgtgcaattgctcccatgagtaaatgctattggctggcaaattaaaataccaagaacgggcgatgccgtctagatcgagatgtattacctttgccttggtattttcgtcatcgtgagccgcttcgatcgcggactcgtaaatggagaggaattcctttgggtcaatttcgcctgagtagcgtgggacgggtgggaacttgaactggggtgggattggacgggtcttgattcccccactcagcggtagccccttttcgccccctgccctgttcacggcaccttgctgcgggtacggcgtagtgaagggcgaaatcacggctttcgcataaggttgggccatggcattcggctgcccagctccgattggtgatgcttgctgagccaccatggatgggtcgaacgttggctgggaccatgccatggcgacctggtttggtgcttggtttgctccgaagcctggcgttggtgcttgcggccgaacggttggtgcctgagcagcattgatgaagtcgaactgtggtccttgactccaaggcgaagcccccagacctgtctgattcgacggcaaccaactaggtgcaacttgacttgtattctcctctgggtgggccgaaggggttgtacctaaaatgctgtgaggttggctgacttgctgaaggaaagcttggagctgcgcctgcagagcggaagccccttctgccattgtttgtgacacttggccaggcggttgagggtgtacttgggcagcgatcggctgagctagtagttgcacgtgaggggctggatgcaccgctgcggtcgagggctgcccgacgaagtatactggcgctcgcgtaacttgtggcggaaggggctggattggtgcttgtggatagacttggggtgggacgtagcctaccgaatactggaggattggggccgaagcgaccttggaccgcctcgccgcctcgtacgcctgctgctgttcttgcatctggtgaagcatgtcttagagtcgtgtcatgttctgtcgcatggcttccatgtcgacttcggtttgtatttcggggtcagcgttgacttgtatagcggcgagagcagtcgaggccgctgccggctgcgacggagcggcttgaggcactagcagttggcttgctgcccgggtctggagtacccttgccgccatggctgccttcgccaagtcagccgtgttcggcacctgcgtagaggcggcaggagccgaaggcggtagtgatggcgcaggtgcggaggcagacgacgctcctccatcttcggcgacgcgcgccgaaggctctgctccctcttcggcggccatctccaccccggcttcgctttcctttcaccttgtaaccttctccttcactaccctcttcggtggcattcgctctcagtgttttcgctcggaggtccccacggtcggcgccagtttcgacaacagcttacgtcgaaagacgtggtcactcaacagtagttggaaaataagtaaagtgtattaaattgagaatttttcttgggatccccctattacaaggccctatgggactatttatagcccccattacaggttcttactactagggttttggttatacaggggaatttacatgggtacataatgtaattgaggttcatgggcccttgatgggccgccaggcaatcgtcagcccaatagcccctaggcttgaagggccgaaatggcttcttcggtcctcgcgtgggcgaacttgctatggcgaagtcgtctcccttcggcatatactcttcgccctacatccttcgcccaagaggccctagcccggcaaggtacccgcgcgattccccgcctctcgccgtctttgtttcatagccttcgccatgggggggcttcgccctgactaaccttgatgcctcgggcttgaatccccactggtcgcgtggtttcggcaggtttggtcgaagggcctcatgccataccgccaaaaagttgcaagtggtttctagctaagtccctgtttggctccaggatgtttctgaaggatattatcaggatgagcattctaagaatttgttgacacagctatccttttcccctgaatccagacctccattctctcttcgtagtggcattctcaagtataaggggagaatatggttgggtaataattgtgctttctagctcaagataatatctgctttgcatgacagtcctatgggtggtcactcaggttttcctatcaccgatagaaggatcaaatctttgtttgcttggcccaaaatgaagtctatgattcagtctgtggtgaaagaatatggggtctgtttacaggttaacttgacagaagcaaatacccagggttgcttcagccactgcctatgccagatggggccggcaggttatcacaatggattttattgaggggttacccaagtctcgtcattttgattgtattatgttggtagtggataaattgtccaaatatcctcaattcatgcctttatcccatccatcttctgcccttgatgttgctaataccttcatgagtaatgtgtacaagcttcatggtcttcctcagtcaatcatatccgatagagaaaagattttcaccagccatttctaggagcagctttttgccatatcaggactccctccgtcccagaatatagcaacctaagaccgaatgggacgtatcctagtactacgactctggacatgcctcctgtctagattcatagtactaggatatgtccaatccggtcctaggttgctatattctgggacggagggagtacacaattacatttgtgcaccgcttctcaccctcagattgatggacaaacagagcgtgttaatcgatgtctagaaatttatttgcgttgctttgttcataccatccctactaagtggaattcttggctctatttggctgaattctggtttaatacttcttaccattctaccatcttgtagtccccttttgaggtgttatatggttaccctcccggccactttgaaattagggatgattcttgctctgttcctgatttggatgttaggttgaaggagagagtatctatggttcagctgttgaaactgcacttgaacagagctcagcgacaaatgaagagttatgcagataaaaacgacagtttcagagaatttcgtattgttgatttggtctatttaaagttgcaaccatatgtgcagtctttagtatctaggaggacaaatcacaaactctctttcatatattttggccctttttagatattagataaagttggcaaagtcgtctattgtcttcaact

SEQ ID NO: 13380 - DNA, 2520 bp, Oryza sativa
cgcattcaattcctgtttataaatgccagtatttatgcaaatgaaccactctagctcttctttgttaattccctgcatcatacccctattccggtatgacttgctgagtacagtgggtagtactcagtcttgctctacttttcccaaccccagaggatgagtttttgtcagatgaaggtttccccgaggagtaggcttcgtccgtgccgtcgaggatgcctgtggagtggtgttcccgctgcagtttagtcaaggcttagctccagttatcttttgtttccgctgcatttttgtaagacttttatgatgtttgtaagacgtggatctgaatgtcaacattgtcgtttgtgtaccccggctggtcctggacggggattttaatgcacattctgcttggaattctattcgggaatttctgggcatgacaagttggtatcagagccgaccttgaccgtaggacaagccaaatggaaacctaagagccctctgaatccttttcattgcatatattctttgcaattggatttgttccgggaaaattgggatctgttcttgtggttcgagggaaaaatcttgtcgcttgtttaagtgggattttttcaaaacgagtcagtctagggttttagtaaaattattgggatttattcgtcagtcagttggggtttgatgggtgaaatgcattaggtcctagctctataacatgggttgcaaggtgtttatgcttcgtttgttattattaatatgtatctaattctcattactttgtcgttatatgagtctgtcttatttattcgctctcatgcaaaatgatctatgcataaaatttcgcttctattcgattctcttatttgagtcttttattgctttatttaaatttggatttgagcatgcattgatcctactcctttgtcttctctagatggccggtcacccacccaaccaccgcggagaaggcatgatcgatttcgtggcagagttagcacgtatgacactggtggtgggctaccccaacgcgccggagtacacgacgattccgccgctcagtggcgagcttcctcaccgtgtccacttggaggtccatggctacgtggggacttgcctcgctaacatggcggtcgaggcatctggaggcacagcagatcacgcctgtcaggaggcagcctacttgatgatggccagaatacgggagcgccacgactacatcttccacgacacggcgtaccgctaccacccccgtcgagcccatggtgatggcgtcagctccttccgtccgacagctggcgagaacgacaccacctttggtcacatgtgtgctgtgatgagtggattggacaggatgcactcggacctgcacaaggcgaccaaagccttgaacgatgggaagctcatgaggatcgtcgccctgaaggacgagatagcgcgcctgaagaaggagaacgctcagctaaagggtcttccagcgccaggaggagtccggatccgcaccacgccccgcaagacgacgactgcacctgtgcgtatccagcttgcgcccaggaacccacctccagcagcagctcccgcagcaccttcagttccgcccgcagttcctgcagctccagttccagctcccgcattcactctctccttcgctccagcatcagccgccagaggtccagccagtggtaccggaggttggttgtctgctactcccagtggcagcggcgagactgatctgtcaggctccaggagtcgctcagagggaccgggtgacgagcaggaggacgctttcgactccaccgaccgcaggagccgttccgagcattaggctcgtttttcccactagtttatcgatggtctagcttctggttgttagtttgcgtgtttaggctgcttgtttggggtcagttgacggttgatatcatgtgcctatgatatggctgtcttaataaggatgtttgcttgctcttttaagtgtttttaattcagatcagaacaattgcagttttaattcctttgtaataaagcttagttcttgagcatctgtttttcttcttttccccccgtctgcttttccctccagatggtctacaccaggactggcaaccgcacgacaggcgagggcagcaacggcgaagaacgcgtggatggtgtgcaccccaacagtgattctggcaatggtccgccaccacttcccgagaatccgacgcttgcccaagttatggcacatcagactcagatgatggcagccatgatgcagcagatgcagcagcagcaccagcagatgcaccaaaggatgatgcagcacgccgagcagcagcaccagcagtttggtccccctccccctcagtccaagttgccagagtttctacgcgtcaggccacccaccttctccagcaccaccaaccccatggaggcgaacgactggctccatgccatagagaagaagctgaatctcctgcagtgcaatgatcaggagaaggtcgctttcgccacacaccagcttcagggtcccgcgtcagcttggtgggacaaccacat

SEQ ID NO: 13381 - DNA, 1436 bp, Oryza sativa
ttctttccgggtgcacacgagtgagcacaaagtgtgcagaaaagatatgtgttggtctgtgagggcagtttatgacctatgaaagctatcagatgtaagcgggcccggcctgggggaaggcgggacgttacaaaatggtatcagagccaactctcgcggtttcacgggcgcgtgtgtcgcagttgcgcaggcatggtgcgcatggctggtgtagaccgggagtggttacacagcatggcacatgcgctggcactggacatatggacgtggccaagagaggacgttcctggcctagggttgatcgacggggcgtcgatctctcttaagggggtgagggtgtaacatcccggcctagggcttaataggattaatagaatactcatatcaacaagttgcaacttcttttccggaagccaatctcaaaagaactccagggttaagcgtgcttggcctagagcaatttgggatgggtgaccgaccgggaaattctttccgggtgcacacgagtgaggacaaagtgtgcagaaaagatatgtgttggtctgtgagggcagtctatgacctatgaaagctatcagatgtaagcgggcccggcctggtgggaaggcgggacgttacaactgaaaggagctaaagtgttttctaagatagacctgcgatcaggctaccaccagttgagaattcgggaagaggaaattccaaattctttccgggtgcacacgagtgaggacaaagtgtgcagaaaagatatgtgttggtctgtgagggcagtctatgacctatgaaagctatcagatgtaagcgggcccggcctggttggaaggcgggacgttacaactgaaaggagctaaagtgttttctaagatagacctgcgatcaggctaccaccagttgagaattcgggaagaggatattccgaagacggccttcaccactcggtacgggctatatgagtgcacggttatgtctttcggacttaccaacgcacccgcattcttcatgaatctgatgaacaaagtgttcatggaatttctggacaagtttgttgtggtgttcatcgacgacattcttatctattcaaagtccgaagaagaacatgaacaacatctccgtctggtactcgagaagttgagggagcaccagctatacgccaagttcagcaagtgtgacttctggttgacggaagtcaaatttctgggccatgtcattacagctcagggtgtggcagtcgacccatcgaacgtggagtcagttaccaaatggaccccaccgaagaccgtgtcgcagattcgaagttttcttggacttgcaggttattaccgtcgattcatcgaaaatttctccagaatcgcccgacccatgactcagttgcttaagaaggatgagaagtttaaatggacagccgagtgcgataagagcttcgaggagctcaagaa

SEQ ID NO: 13382 - DNA, 865 bp, Oryza sativa
aaattcagagcatataacttctgggaagtatatttcaaaccaccccaaatataggaccaaatatatggctatctcactctcctgagaaagatcaatagtgctaataaaatctgaaagagcctgaaactcagtataagcttggtgagacaaaggcagctgaaaattgtctgacatttgagctgacagatagccatgcacaaatgatattttgttggcagcaaatgaataaagtctaggcattgagaaactgagagggggattatcagaccaaatatcctcccaaaaagaacatgttaaaccattccccacattgcatctagcaatccctctatagaaatccatcagcttataaatatctctacaccaaaaagaccctttagagatgacaaatgaggggccacttgatcataataagaggaccagataagatcaacccatggcacattccttctattatagaatttgtccaaaaatttcaccaaaagagcttgattccgaatagaaaggttgataacaccaagccccccttttactttaggtttacaaactttgtcccaagctgctaaattttctgcttgaattcacatatgaacatctccaaagacaatgtttccttgcactatcaatattatcaattactgtcttaggcaacattatagtgcacatgtaattggttggcaaggaggagaaaactgaattaactagagtaagcctattaccatataacaagaaatctgagtttgcagacaatctcctttcaattccttcaactagaggagcaaaatcaaccactctaggcttagttgttcccaaaggcagaccaagataagtaaaggggagtgaaccaattttgcaaccagaaacc

SEQ ID NO: 13383 - DNA, 956 bp, Oryza sativa
ccgcgagagttggctctaataccattttgtaacgtcccgccttccccaaggccgggcccgcttacatctgatagctttcataggtcataaactgccctcacagaccaacacatatcttttctgcacactttgtcctcactcgtgtgcacccggaaagaatttcccggtcggtcacccatcccaaattgctctagtgaggccaagcacgcataaccctggagttcttttgagattggcttccggaaaagaagttgcaacttgttgatatgagtattctattaatcctattaagccctaggccgggatgttacatcagttgatcaaacaaatcatcgattcgcggcaaaggatatttgttcttgattgtgacctcgttgagtgcgcggtaatcaacgcacatcctcttcgtcttatcctttttctccacaaaaatgaccggagcaccccaaggtgaagtacttggtcgaatgtaccctttctgcagctgcttatcaacctgcttcttgacctctgctagttcgttggccgccatcctgtacggtctcttatagattggagcagttcccggtgccaagtcaatccggaattcaatctctctcttgggtggcatggtagtgaggtcttcggggaacacttctggatactcgcagactatgggtatatcttccaattttctcgagttcttctctacggtgtccactgggatttccgcttcaatctgattcaaagagacccctttctttggcgagactagagatttgtacaccacggtttctcccttctcgttggtcaaggtgactgtgcgatttgcacaatcgatgacccccttaaacttggtcagccaatccatcccaagaatgacatctaggtctttggattcgagaagaatgaggttggctagaaatggtgatctttgaatttctattgttatagaagggctgaattgaaccgaagtg

SEQ ID NO: 13384 - DNA, 6969 bp, Oryza sativa
cgctggcgatgtgggcgacgtggcccgggagagagcgggaccggcggttgcggggtgcggcggcgccggctggaggttgggagaggacccgacaggtgggccccacctgtcagtgaccccgggtgagggaggaggcacgggcgcttgctgggccgtggccttcggccggcccagcaagggcgcgagagggaaagggaaagggaatgggccggcggcccattaggaaaaaggaggggaaaaagaaaaagaagaagggaaaaagaatttccagggattaaataattgctcgtgctcatttttaattggttaaaattatttctagagctctgaaaattccacaaaaaatcctgttagcatattttgacatgtagaactcaagaaaaatcccacatgtcgattccgattattacttgcattaattcaattagggtttctctcttgcattaacacaggtaatttcttgcgaccacttattaattcaatttaggcctaggagaagaacttcagggtgtgacaaacctaccccccttaaacggaatctcgaccccgagattcagaagagctggcgaagagatgcagatgggtagccttcaactcatcttccctttcccatgttgcttcttcctttgagtggtggctccactaaaccctgcagaacctggtaaccttgtttctggttcttctttcactggtctcaaggatgcaaactggcttctccacataagtcagatcttcttgaatatcgatgtgctctgaatcggcttgttcttctggtaccctcaatcacctctttaactgaggcacatggaacacatcatggatacccgccatgttggatgggagttctagctgatatgcaacttctcctctttgttccaagatcttgtatggtcccatgaagcgtggtgccaacttgcctttcgtctggaaacagtgtactccccggagcggagtgacacgaaggtatacataatcccctgcttcaaaagtgagctctcttcggcggttgtctgcgtagcttttctgtcgagattcctttctctaatagttctgactttctcctctgcctcagttagcacttctgtcccgaacagttgacgttcgcctgtttgatcccagaagatatgtgtgcggcacttccggccatacaatgcttcaaagggtgccatttgtaaactggcctggtagctgttgttgtaagagaattcagcataaggcaggcttttatcccaagctccgccaaaatcaagtgcacaggctcgcagcatatcctccaacatctgattgaccctctcagtctggctatctgtctgcggatggtaggctgtgctgaaattcaaacaggtccccaattcttcttgcagcttctgccaaaattttgaggtaaactgactccctcgatcagatacaatcttcttaggtaccccatgcagacacatgatccttgctaagtacagctctgccaatttttttcccgtatacgtggagttaaccgagatgaagtgagcaaccttggtgagacgatcaaccaccacccatatggaatcatgccctgacgatgtccggggcaaacctgtgatgaagtccattccgatttcttcctatttctactccgggatctagaggggttgaagcaatcccgtgggcctctgatgttctgccttaactcgctgacaaacatcgcagagcgcgacaaactccgctatttcccttctcatgctggcccaccagaatttttctttgagatcctgatacatcttggtactgctgggatgaatagagtactgggtctgatgagcctcagtgagtattaggtctttcaactctttgtcatcaggtacgcacaatctttctcccaaccagattgtgccatgttcatcctcgtggaaatcccaggcttttccgaccctcatattctttttcagctcagctatttcatgatcatttacctgagctactcggacttggtccacgagcataggccgtgcctctagggcagtcacgtactgtaacgccccgattttcgttcgggattaaaaatcaattaataatgcatttctagaaattatattaaaggttaaatcaatttaatcaagtgaaattatagaggaaattaaattttcctttaaaaaaatcattggccgggaatattttgcaatattctttgtgccccaaaaatactctccggatttttccgcaaattttcggagctcaagaaataattttaaataatcttccccttcctcccttttgggcttggcccaagccttcccctccactcccgtgggccgcgcgcctcctccctctctcggccggcccgcgccttgcgaaagtcttctttacgttccccggttttcctcccctcctccttcctaggccggcctcctccctcggcccactcggctctctctctccctcaagtctgctttacctcactcgcccgttttcccctctctctctccccgacaggtgggacccgaggccccacctgtcatcttcatcccttacctcccgtcgccccaaccgccgccatggccgccaaatcctcccacgtcgccgcctctcccgcgcgactccctctcccgcgcgtgcgtggacgcggtcgtgccccacgtcggcgccgttttcccccactctccccacgaaaatcggcgccggttaacccctccaccaccccacgtcggcgccccacttcgccggccgattccgccacgtccggcctcgatcccgccttcccgagcccataaaaagcacccccgtgctcccctcgttcatttccccttatttcccgggcccggcactctctccctcgctctccccacgtcgttcccgcgcgccgccacactccggcgaactccggccgccgtttcccgtcgctagggtcgccgccgcactactccgccgccaccgctggctttgccacctcaagggcacgctcggccgccgtttcttcctccccttccaccacgcgaaccacctctccaccgtgctcccgctctccatcggtccccggcgagctccggccacctctagccgccgccctagccactgccgcgccgcgccgtttgcaccaccggcttctccgtgcctcgccgcaccccggcctccgctccgtttccccatttaatcgccgcaaccacccttccaccgtgcatcccaagccacctccaccctacgccgccgggccgccgttccgccttcgtcccgaggagcgccgacgccgagctcccccgcctttccccgcccctcgtcgtcgcgtccttggtgagctcctcctctccctccttgcctccctcctctatctcccgtgcgtgctgccgcgccggtggccgccgccgttaggtcggccggccggcttgtcgctgccccgctcgcctaggccgcccggatccccttgccgcgccgcgccaccgctttcccgcgtgcgtcggccgtcgccgcaggaggctgcgccgccgtgagccgtcgttcggccgggccggcctgagctgtgcccgtgctcagccgcgccaccccgtggccgcccgatcatgtcacaccctaaaaatccaaaatatataaattgttgtttaaatggaattattagattttattttaaaagcctagaagagaagatttaattttaattaataaattccaacataaaatggggccagataaaatttcattaaatactttgcttaattctataattcctagatttttctgggatttatttgagctaaggaagtatttttaataaatggaattgcatttaaggaataatttaaattgaaaaaggtttttaaaagtcttcttttggctttgagccgaaagtcggcccaaaaccctctctctctccccggcccaagtcggcccagtccgccgcagccgtgcgcgcgccctcgctcgctgacaggtggggcccgcctgtcggagtcgtcatctacctccggccgccgccgcccgaaaccctagcgccgcgccgtttatcttttattttccgctgcttagatctttattgattgagaggaactatctacctctgtaatgacattttattcgcttattaattagagtaataattgtactctattatcaatttgttattgtgtgcctcggctgattcctggacgagggttcacacacatgtaagcgtttggaattttggatagaaattccgggcgtcacaagttggtatcagagccccttgaccctaggttatgccaaatggttacccatagaagccctctaaaaatattggaaaagtagaactgttctcctccccttctcttttaattaaaccaaactaatggcacatgcatttcataatctcttttaatggttctcattcaaaatttattccagtgttattagtactgtacatctattactgtactaatggctcaattaccagcaaaagatttacaatattgttttatttaatcttactgcaacgaaataaatttagcatgttgattttataactttcttttatttcttttggaacctgttgttcaaaagtacaaaatttgtgaccttgtttccaactgtttcaacttatcttgcaagattggtttactttatttacttaccttttactttgattttcgaactttattcaaattaatccaaaaccttgtgctattaattggataaatgtcttaactccctccttacacttgtctttagatgccgcgctacaagcctgagtacttgtttggtgttgagggatttgtccaggagttgcgtacgatgtcctttgtcataggatttgggactgctcctttttatgcccagattcctcatgatcgtcacgaagaaaagtgccgagtcaaagtcaccttgaacagtaatagtgaagatatcccctcagtgatgttcgaagctggaggaagaaactatatccatgcatgtcaggaggtggcaaggatcgccataggagagctccgtgatcgctatagtgatcagttggccgacacggagtatcgctatcatcctcgccaaccacaaggaagtgaccgtggcagttaccttgagactgagggaattgagaatgatgctaccacaaggcatttggttgatatgctgtgggctatggatgaaacccgtgcggagactgtgttagcagctcaagatcgtgaagaccggaatcgtggtaagatttgcaagctagaagataaagtggatcgtttggagaaggaactagccgcgttgaagggagaagcaccaccgcagaaggccagggttcgtcttaccgcaagaaagagagctctatttgtccctcgctaccaattggcgccaaaggtccgtgtggtggaaaaagaagttaccccagccctagcagatcctccggtcgtcaatgtaagtgatgatgaaggagaagaatcaaagcgtacccattccaagattgagtggggagctactcaagatgatgaagatgagccgaacgagcctttaatcaactccgatgctcggaagacctagaaagccttgtcaaaccgttgtcttagatcgttgtgttagcttgtttgtttaagtttggttgtgtgtgtctcgcgtgtgatttacatcagtggtgggatgtaagtacatgcgtttgtttgctttcaagtgttaggtagttggtgagtttagtggtgtgagagtcttcagtttgtaataatgaaactcacttaagatcaataaaagttaaattaattttctgtcctaagtagttttccccggtttctcttcttgtgacctgtccatgccagatggtgctcactcgcagcaacgggaatggccccaacaacaacaataacaataacaacaacaatggagagaatcccacacttgcccaagtcctggctcaacaggcacagcttatgaacatgatgatgcagcaactccagaaccagcagaaccagggaaataaccatgcacctccccagaacaagttagcagaatttcttcgtgtaaggccgcctactttctctagtaccactaatcctgttgaagctggagattggctgcatgccatagagaagaagttggatttgcttcaatgcactgatcaggagaaggtctcatttgcatcacaccagttgcatggccctgcctctgaatggtgggatcacttccgcttgaataggactactgctgaacctatcacttggcttgagttgaccgctgctttccggaagacgcatataccatcgggagtggtgtctctcaagaagaaggaattcaggtcgctcactcaggggtctcgctctgttacggagtatctgcacgagttcaatcgtctggctcgttatgctccggaagatgtgcgcaatgatgaagagcgtcaggagaagttcttggaaggacttaatgatgagctttcttacccactcatgacgggggattatcatgatttctagaagttggtggataaggctattcgtcaggaggacaagtacaatcgcatggagcaaaagaaacgccggattgctcaattcaagacacaacaggggaataatcagaggccgcgtcttactttgggaccccagtccatgccacagggaggttcttcgtctgttgttcgtccgcaacgtcagatcttcaacaacaatgcaggcaacaacatcagcaatcaagctccacgccctgttgcagtttcgacacagcaacaacctgccaagagggagcaaggcagcaagcccgtggtgtgtttcaactgtggagaaccaggacattacgctgacaagtgtccgaagccccgacgcgtgaaggttgtccctacccagagcaactctaccgtaccagtatcaaaggccagtgtcaaccatgttgctgctgcagaagctcaaggtgctccagatgtgattttgggtacgtttcttgttaacttagttcctgcaacagtgcctttcgattctggtgctacacattcattcttatctatgagttttgcgggaaaccatgccatggaggtagaagatcttagacgtcctttgatggtta

SEQ ID NO: 13385 - DNA, 4212 bp, Oryza sativa
ttcttttaagatttttctttttataaacctttttaactttgtttatttcttctcaattattatttgtgctctgaaaattccactaaaatttgagggctcctttttgaccaaggggaatttgacaaaaattctccgggccacatttgaatttttcttgtacgtattttagtgtttgccaatttcttttcgaattttaattaattctattattccttttagagaatgatttttaattcgggatgaatttatcaggacgtgacaaatccaccccccttacaagaatctcgtccccgagattcgaggaggctagcaagaagataggttgggcggtcttttcttcttgtctgacttcttccgtcgcatcttttataacaaacttgcctagcaaaacttctccactctggactgcttggctcaatctcctgttgcagatggaatcttctcttcacctgacttttccctggttgaacctttagctgacttcgactgggttgcggcacttgaagatggggcttcagttccagagctttgcatagttcatatctttggagtcaacctcatacaagttacccacttcatgtcatgcgtcgacatcagctttgtcattactaggatatcatgtttggcaacttgcccctaactgcctcatattagctttcctggtctccgggtgatagctacttctgctatttgatgcaagggtcgataactttacctttgaattatgcttcccaagagagccaacttatcccacttgatatactttaacgtcttcccaaatggttttactgttggacttcttattgtctgatcgttatccggccaaattttgaagcttcgtggttagatgtgattttactctgacctctgtagactatctgcgaacatatcacttggttcataactgggaatagctcccacgaacaagcaactcagattcactttcttcatgttcagtttactttccgctattctcttcatgttgtcatcatttagcattcaacgtattcctgtgcacattcagccttgatgtgttcttccccattggactacaatcaggggtcttccttgagcggtgcagagtatgtttctgtttatcaatcacctttcggcctacttctctcatgctggagaacatctttgccaatctcttttatcgatcatcttttggcttatctcgaacaggtggtattctttaatgtggattgcggacgcttctggggacgacgaggtcctttggctcgctgcctttcggtgaaaccttgatgtggtttgtcaaaaagctgcactgactaccttcagggaaatacattgcttgctatctgtatctatgccactaaggtttagtgctttctcgagatggggagcatccatattgttcttctgccatatcacctttgacccttttctgatacctgatagactaattaccaaccatcgactattatgttctcaaatattgatgtcttctggatcttcttaactgttgcaggtatatccgaacttatcaatgtagaggcatggcgggtacccttatgggtttcatccaccaatccttatcttgatttgtaaaagtgtatccaaacttttatccccaactactgtctcattagctttttaacccaacacagtgtaattggttttcttttccatcaacaggttggttattaactcgaggttagaatatagttcctctgacacgagaccctaggtctcctttgtcagtaaccagttacacacatgatcacatatccgcatcttccaaaagaatcctcttagaacttgtcggtattacacattccccccttattacacgaatacaaggcactgctttaaacaaaaagggaaggtgcttaccatcggtacattgtatcctcaacaggaatcatccataaacatagcaagctcactgttttatagacatgaatatatttttttttattacatgattgctgtagactcccggttacagtgataagtagctaactgaaaatcacaaacatggatactcattctgattctggagagatatagctggcgtggttctagtgactgcattatccttgattggttctgtgatgatgtgataggactgcatattgctatcattcacaggagaagcttccttctgattgctggttgaagcggatgacggtcttctgcttggtatcgccctttgcttggcctggagtaggtcggggagagacacaacttcttccatcgacgacaattctttgctggggctgaaagtgagcattgacaccttgtggtaatgcactcgctggagttggagctgttgcaacgcgagccataggactgctttgggatgcatggatgacaattcgctgaggagcaagcttctgattgcagggagctgcgtggactgacgtgccggcagctatgtttctcggttttgggcacttgtcggcgaaatgacccattccttgacaattgaagcaacagatatcttcccggactcggcattttcttttctcattttgattcctctgtcctggcactggagttaggctgaaactgtaatcttggcgaggattggtgttgccttgatgcttctctccgttggaactggcgggttggttagccatcttcttcgtcagcagaaaactgaattgacaatcttttggtacatgatcagttccttcacaaaagaaacaagtgatcctgctcgttggacacctgtcgggtggatggtcttcctcgcaatgaacgcacatagtggcacacgagctggggacatgaccgatttctccacaacgagagcatgccttacgttccatttcatcttcatcatctgaggagacttgatctgaatcttcactatcagacactctacctccattagctaaaagatgctctgtcaactgtggtgcacctcggaaggtatttcttctctgacgtctggtcattcctggtggaggccactctgtgctagtaatgatcatcttacggacttcatcttcggttcgcattggtgtttttcttttctgctgaggacgctcccttgcatagtgcccttgctcatcacacataaagcaaatgttacttgctccttttgggtcaacatgtggcacgtcaccatgggtccttcgggatgctggcggcatgctgacttgtggtgtgagtgcttggactgcctccaactgcacttgaggttgtgtttgactcaggttcagaattggcgtctgatgctgctgtagtatctctataagcaatcggttctggttaatcaggtgttggaccagtgtcacacaactggtgtctggtgcttcatccactcgggagcttgaggtaccaatgtcctgacttctgaccttattgcctttctcattgtcagccatctgttgcaaaggtttggagagggagagagggaaaacaaaggggagagacagattagaaactaaggataggaccttaacagatctaagtcttttgctgttatgatgtatgttaggcttattctgcaagttgattaagcaaacaacctagcatggttacatcacaacccactgatgcaaaccacgcgctacacacacaagcaaggaaacacacaactaacgacactaccctatagggcggcttaaggttctgcgacgggttctccaagatcttcactcctgcttcacagctggcttcactgcttcctccacttcgctagcggatcctgcagtcttccggagcttcggcaaacaaccgacgatgtcttcttcttcactgacctgaccatctagtactagttgaaatccgaagaaggaagaaggcagtaaaccttttgcaaatagcattaggggaaggagaaaaaggaactttcgcaaatagttttatttataaaatatgtccttaggttttatccatttggcttatcctacagtcgagatggctctgataccatcttgtcgcgaccgggaaaattgccttttcccgaacgctagtgtattaatccccgtcccaggaaaagccggggtacaccatacaaacatgatataaaagacacatctttattatatcgataatatttacattattacaaaggcgcttcaggcctgacaatcaaaaataaacagcagcggactagcgggcctacggctccatcttcacaggcgctcaactggggtataagccaggactccacctaagacatcttctccaaagcttttcttactgaagaggggaaagattgagccagcaatgagt

SEQ ID NO: 13386 - DNA, 611 bp, Oryza sativa
  unsure (1)..(611): unsure at all n locations
aaagctagatttttgacccggctggaaacagttgacaacgtgcgatccattcgcctgattgggcgtgtcgcgtatcaaaataaacaaccactaatacattctcaaatcatcctacttgccctacactntgcagctaacaatgattcatttttaaactgtgctctcaaattgtaatccccccaaattgcaacacaaatcatgtggtcaacaccaacgaattntgctgtaaattaagcntgctgtgtgatttaccttgtcgagaagaatgttggaggccttgaagtcgcggtagatcaccggcgtctcggcctcgtgcaggaaggcgagccccttcgccgcgccgacggcgatcttcagccgcgtcgaccatggcaacgaagcaagaagatctgcacacccaatgaatcacacactcgattagcaaaagctgcaacagctaacacacggtaattaaccccaaatcatgtggtaattagtaactacttactcttgaacaggtggttctcgaggctgcctcttggcatgtactcgtagaccagcatcctgtgatcatcttggttgcagaatcctaccagcttcaccagatgaggatggctcagcatccccagata

SEQ ID NO: 13387 - DNA, 4642 bp, Oryza sativa
atgttttagatccatgttgttcacctattatttatatcggatctttgcacttgagcttgcatacgagtatatgacacttgtgatgttaatgaattctcaacaaacatatccatatcttttatatgcaaccggttggtcatcaagtgaaggatgataatcgatttgttgagactaatgttctccttttagatgtgaaaaggaataggtcccactacgatgaggctaatgaatgacaccatggattaatggtaaccaagccaatgacatcgtcatgttggcaagaatgaagtcaagcttgtgatgagaataaagtcttgacaaaggatggtaaagacctcggcataaacatggttcaatcggatggtcacaagtgttgatcttggctcaagcattgaccccaagttggatggcgcaaggcaaaggtataatagagctaagaatattttcttagtcttttcccggtcttggtgtttggtgtagaccggatttgctagatagacgccgtactatcaagaagagtctatgaagcgagcatgtggatgatcttgcgccatattagttcatatgcatgtaggtgtatttggtgggcttgtctagccaagtgtgttgagttttctcaagtcctaaacaaagagagaagtaggcaaatcctataggtttgggtagcctcatgtggttatgtccggtggagtatcctttggggtgtgagccctttctccctgagaaaagttgtgtttcttggatggatttttcatgggttggatggccctttgaataagctttccatagagtccaagaacgtcaaattctgagatccgagtcaagagatatcgccgttttactaacggttggttgtgctgaaaagtgacctgcagtctgaccgtaggccttaggacggtctgaccggatctattagccggtctgaccggcgtggtaaggccggtctgaccggccccactggtctgttgcactggtatgatttttggtggcgatacagagccgccagagccgcaaccggtcagaccgagccgacggcggtctgaccgagccatggacggtctgaccggctactacactgcggtcagaccggctaggttgagtgggctcaatgattgccctgtaacggctagttttctagtcgttacaaagtagtccggtttgaccggccactctattgcggtctgactggtagagcacatagttggggatttcgactccaacggctagttttgatggttgggggtatatatacccactccccagcagcaagggtaaggttttggcactccattgcattatcttgaacccttgcaagagctctcacactcttgtgcacttagtttatttagtgaggtgttggagagtgagttaagccaatccaagtgcattgcttcattgttagagctagcgtggcacttgatcatcctcggcaagcatcctagacttgttactcttggaggttgccgcctcctaaacggcttgtggaggtgttgcccggtgacctctccgaggagattgtggaggaggcctgacgctgattgtgagtggtttggagttcaccaccttcggagtgaaggaaaaactaccctagtgatcgaggcttgggtagtcctttccgtgggccggctcccaccttgcccaccccttgacgaagggggcgtgcggtggcttcatgattgagcggtggagttgtgctcgcctcaacagggattaggaaaccggcgagtttccgaacctcggtgaaaaatcccttgtctcttgtctcatttatttgttgcatttacatttgagcaagtttacatactagcttatttgtgcacttaacatttgagcaagtctattatcaccctaggcttgcaaaccttaacataggctagcttctttatgcacttacttgagactagttgatttaggttttgaattgtgtaaaaccgttttgatttatgcttccgcatacaaatttcggttttagccaaaagttttaaaaccgcgtattcaccccctctagtcggcctccttgatcctataacaggaagatgcccttcaattataacaggaagatgtccagattcataagtattaagatgtgtcatatccagcgtttacaactccgagatgcccttccgtttcgggctctggcagaataacggttttcgcgaaatccggtagatcccgaacaaattttataaaccaaaatttaaatacaaattctctgagtttaccaataagctcgcgaaaactagtcggctttggagaaattccaagcgaaaacattgaaatttcaaccggtaactaggaaaagaggtaaattgaaagtgttttcttttttttcattcgctattattttctttcctactataaagttcagttagtacacggaatacatcaactttttcaaaatttatatcctaatatgtactatgaatatcatactatttgtaagattttatttgattttcttccttattatcaatttaaatttgaatttagatgaaactaatcaaaatctcagatggtttctactttcgaggctcgtcgaaaccttaaaatttaacggaattcgatcgattttcgttggaattgttaatcctagtcatatccacctaaaaatccattatattttgggatgggaagctggacgaaacgcgaccctagcacgaatctgaacgggaagctgacgacggagatcgcgcatgcgggtgccacacggcccttgccctgggctgcctagtccagataaaaaatacggcacgatacgtacacgtataccgtatatacgaacctacttatacggtacacgcgtcaattaataggagacgaggagagataaacccccccgtattcgcaggctcatcgacttctcgtcttcctctcctctctctcgtttcgattcccccgcgagagattcgatccaaccaaacccacccgctaccagcgtcttctccttcgcgagcaagtaattctctttcctcctcctcctcttcctctctgccgtatttttttttgttttttagtttttttttcttcttcgcttccttcgccgccgtcgcgggttcgtctaaaagtccgcaagattcgtcgtcgtcctatcgccggtgggtagggatttcgtcggcgctgctccggtctgctgctttcgttcgttcgttcgatccgatcgatttatttgttcctggtttgggtctcgttcgattgactctagtaaagtctattctttttttcttggtttcctggtttaggttatatggagagcagtatttaggcgtttaggcttcagagatttgtttgatattaggctgatgtcgtgattcatgaatcatgagtagtttcctgcgtttaggggtagcatcactatgcggtactgctgattggttttcctgcgtttgtaggatgagattggcccccttgcagtctgtaggataattgcatgctaatgatatttccacccctaaaatcttcacttcattccaattcaactaccaagtttttttaattgttctcatgaattgcatgctcatggcttgaagacgtcgagtctttcctccttgtttttctttaattgcgactccacctaatctaaaagattcaatcttcaatgcttgctttacttgatggtttgaaattttactgtgctttgtggcgcaaagcggttgactttttagaggtttgttttacctattgcctattcaatctactgtgaaaaaaaaatctagctttatatccatgttgtgattttcttggggtttgagttgttcaatatagggagaggtgcttaatttggtttttttaaaaaaaagtttattgtgtttcctagacaatttagtgcaaggttacagactggtagcttgtaccctagccttggtaggagttacggtttaatcctctaaataatttctcatcgatgtacttgtggactgtctatgattggatgtatcaaggttttaccttttgtgtattatgcaatatgctggtctggttttcttgagcttgtgagttgtgattgtggcttacaacgagtcccttcacatatgtaagatctgtgatggaatgttttagccgcactagcggatagaagaacgggaataaaaataacaaacaagttgggacattatgcatcttatattatatgtttgagtcttttgtgtggagcattcactcaccatagtaagtattctaaacaattaaattcaacctatattaaagaaagaaaatattttagtaaattagtaaatatttattatttataaagcttttcacatgtatgcattaatcttctaaacaggttttttgagagtttgcaatgggaggaagcgaatacgatgatgactgggagttgcctagcgctgacatcactgtagttctttgcggcaaacttggctgtggcaagagcgcaactggcaatagcatcgttggaagagaagcatttgtatcagagtactcccatgctagtgtgaccagtacttgtcaattggccagcaccgcgctaaaggatggccgtaccctcaatgttattgatacgccaggtaagcatgcatcaatttattctgttctgaccttttgttttctgtgatgactattcattgttgttactacatattcatacttgttaatcttgtggatgttttgaatttgcgttatctat

SEQ ID NO: 13388 - DNA, 723 bp, Oryza sativa
  unsure (1)..(723): unsure at all n locations
gacgcgcnttgaagacaatttgcaagnccccnnnnnnnnnnnnnnnnnnnnnnnnnnnnnnnnnnnnnnnnnnnnntgtcagacccggatgcattgcagacttccatcttgttgcatcgaactaaaacagttcaattcctgtgaaaaattgaaacactgcatcaggttgtaacagacatcatgaataaaccggcaattgatgtccgcgaaccatacatgagtttgcatatatatgatataattgcatagcataggctgccttaccatccatgaaccatccaccatcagaggtgatgtacgccttcgagatggcgagatcgagatcgctcagaacttgcaccacctccaacaggatgccattcttgttcatgctgtcgacctacctccaaacgcaaacagacggtgctcgaagcaatcagtgaaacggttcttgaatattggaagcagtgttcagtaagattatccagtcaagttttgagagagagtagtaagtagttcttaccttcactaaggtgcagtcgctgcaggtgctgttgtcaatgcataccctgcagaaaattatcagcttgttagctacagaaagtagcggagctttcgacaatagcctggaatgaaacaggataatgatatgaggagctctggaatttagatgtttaaattagagatccacctaaggagggttgatgcgctgactgaagttctaatactcgggtcaaaagaagg

SEQ ID NO: 13389 - DNA, 727 bp, Oryza sativa
  unsure (1)..(727): unsure at all n locations
agtgtgccttttgagtgactaactcctnnnnnnnnnnnnnnnnnnnnnnnnnnnnnnnnnnnnnnnnnnnnnnnnnnnnnnnnnnnnnnnnnccagtaaattgattctccactctctgaaggtactcagtgggtggtacaagctgggattgctcagtactatttttcatgaggtgtttggaatggatagtggagatatggagccaacaattcctttgaaaactttccatgaaatcaagaatttttttgtgactatagatttacactgaagtgtaaattaaagttgaagtgaaaaactgaaaactgaagtggcagtatcaatttggttaaaattgcaggcgttaggcccagacagcaacctgctgggtggcgcgaagggcgggtcgtcgccggtgaggtcggtggggatgcactccatcggcgaccacaccgccatcgagctcaaggggcccgaccggacgggcctcctctccgaggtcttcgccgtgctcgccgagctcggctgcaacgtgctcgccgccgaggtgtggacgcaccgcgcccgcgtcgcctgcgtcgtgtacgtgaacgacgtcgcgtcggggcaggccgtcggcgacccgtgccgcctgtcccggatcgagcaccgncttcgcctcgtnctcccgggccacgccggcggcgacgacggcgacggcgacgacggcccggcgcacgccaacttcttcttcttcggcggcgccgggtcg

SEQ ID NO: 13390 - DNA, 648 bp, Oryza sativa
cccccatggattttagacaaaccggaaacgggaagaaaattcccgaaaacgggaataatccttcccgaaatcaggaataaccttcccgaaaacggtagacacccaatacaagaacaagaacagtattaaaagatcttcgtccgagaattctgacgaatcctctgacgcacgtctgaagaaatttttatcaactcatcctgaagctgcggtctacacaccatccggtgcgaagtggggctctgctgaagacctcgagacagctaagtggatttcctccagggtgaagctgattaacccaacctgcaaagccccggacatgacctcctggtctaacactgttcgcctgatgcgccagatagacaaccggtcgcaccaggacatctgcgcgctgtatgactgggctagcaaacaccacttctggcagaccaacatcctgagtcccgaaagcctgcgtaagcagtgggacaagctgacaatgcagcgtaacgccggaggtgagcagcgcgctgtcaagccagatctggacttcaacaacactgactgggcctatggggggatccgatgaaatctcttgcagagcagatgcgtaaccacgaccgcgagcagatgagccgcatggtccataacctgccagagcagtaccaggag

SEQ ID NO: 13391 - DNA, 731 bp, Oryza sativa
  unsure (1)..(731): unsure at all n locations
gcgcgttgtattatcctnnnnnnnnnnnnnnnnnnnnnnnnnnnnnnnnnnnnnnnnnnnnnnnnnnnnnnnnnnntgatttattataagcagcgacggatggacatgccgatcgtgttctgggaaaaagacttatccatgtgccggtggttgcggttctctaggctattgaaaaacaacctactgatcggggtgattccatccgctgctctcacagtttccaaatttgaagattttcgtttttgcgcgaaacttcttatttttgtggacggtaattaccgagctcccagctgtataattgatgcgtgccctggaaggacttggcacataacaaactgagtggaacggatcctacactggtatatggggacgacgttcttcaatacttgtgagttatccatattcagcgctgccagttccaaaattgtgcacaatgtctagcttatgacgcttttaatgccttgcaggtttgtacctacttgcatgccattgcttttttactgtttttttggaaaatcattcgaatctctttaaaaacatgttttaagcttttttacgctgctcaaatgtatattgactttatgttgactcactaccattgtacgcaggccgcgttatgtcaaatactgacatctcttatctgaattgtggctgaactaacattgtccctacgggattacgcgctcttaacttgatacggcagtgattgccaccgatatatgcccagctga

SEQ ID NO: 13392 - DNA, 691 bp, Oryza sativa
cctgcagccccgtccgccggggaggtcgaagccctccgcttggcaggcgagatagggcccggcatgctttgggacggcgtctcccgcctagattgcgccggtcggcaagtgggcctctggagagggcggaccgtaaagtacgccgccaaccagggaggcctcgcccagcgcctctcgaagatggctggggctctccaacggctccccgaggagctcgagaagacaattaagtcatcctcgagggacctcgcccaaggagcggtggagctcgtcctggcgagttaccaggctagggaccccaatttctctccatggatggcgctggatgagttccctcctgggaccgaggaccgcgcgcgcgcgcaggtccgggatgccgccgaccatatcgtcgacagcttcgagggctcggcccctcggcttgcgttcgcccccaactccgacgaggagggcaatgccggtggtgcagacgacagtgacgtcgaggccggcgatccgggcgcatcggattgagcccccagacccccgccattcttcagttttttcttcttttctttcttctaaggccttcgggcctcttttttgtatagatcaacttaatctgtaatcaaaaatgaagaaatttttgtgttaatttcatcttgctgtgagtatgagatgaggatgatctgtgccgtggtccttttgtgtc

SEQ ID NO: 13393 - DNA, 662 bp, Oryza sativa
tgatgcagttcgacggctccctgtctcttcagggggccggtgcgggggtcacgttgacctctccgagcggagacgtcctcagatacttggtccgcctcgactttcgagcgaccaataatatggcagaatacgagggactccttgccggactaagagtggcagctggactggggatccgccgcctcctggtgttaggcgactcccagctggtcgttaaccaagtctgtaggagtaccagtgctctgacccgcagatggacgcctacgtgcgccaagtacggcgtatggagcgccattttgacgggattgagcttcggcatgtgcccagacgggataacatgattgccgacgaactctcacggctcgcgtcctcgcgagcccagaccccaccgggcgcctttgaagaaaggcttgcccagccgtcggcgcgacccgaccccttaggggagacggatgcgcctgaccggcccctgaggcctgtcggagtccaggcctcgggacccgaggggagtgctcccaactcccttagattgattgcttggatcgccgagatccaagcatacctcacagataagactctacccgaggaccgcgaagggagtgaacgcgtccatcgcatctccaaacgctacgtgctggtagaagggaccctctatcgacgcg

SEQ ID NO: 13394 - DNA, 5907 bp, Oryza sativa
tcaggaggaatttgattaggaaggatttggattcggaaatgagctcgacgatagatcggggttttgagatctgagatggcacggacactagacaacaagcaaagaaacaaatttcgcaatttaggtttttaagagataattttcccgctaggcgccacgacggaacgggcgctacatttagtgagcctagaataccttaatcttagtcaaaacagtcttgttgattccattccaaccaagatcattaacttaaaggagctcaagtccttggatctttcagataataacctctctggacatattccggagcaaattggtaatttagtgaggttgaggtccttaaaacttaattctaatcaactttccgggcacattccaaacaacttagggaatttggctaaactctgtttcttgtatcttcaaagcaacaaactttcttggcacattcctcaagaactaggttccctgttgaacttaaaggacctacaactttacgataacaagctcataggttccatcccaaacagcttagggaatttgaccgaacttagtgtcttgagcctttctggaaacaccttgacgggttctatcccaaataacatttgtaatttgactaaattctccatcttatctctttggagaaaccaactatctgggtacatttctcaagaactaggtaaaatgttgaatttagagagcttatatctgagtgaaaacatgctcacaggttccatcccgaatagcttagggaatttgactaaactctctttcttggatctttctagaaatcaactttccgggcacattcctcaagaactaggttacttggtggacttaaagaatttatcactttatgacaacgtgctcacaggtttcatcccaaacaacatagggaatttcactaaactcagtatcttgagcctttctggaaacatgctcacaggttccatcccaaacagcttagggaatttgcctagactctccaccttatctgtttggagaaaccaactttctgggtgtatttctcaagaactaggtaacttggtaaatttagagaacttataccttagtgaaaacatgttcacaggttccatcccgaacagcttagggaatttgactaaactcactgccttacatattcgttctaaccaactttctggatccattcctaaagaaattagcagcttaatgaatctaaatattttgcatatcgatcaaaacaacctttctggtgaattaccattgggtctgtgcgctggaggccagctacagaatttcactgctcaggataacaacctggttgggccattgccaacaagcttgctaaactgcaaaaccctggttagagttcgtcttgagcgaaatcaacttgaaggagatatctccgagatgggccttcatccaaaccttgtctatattgacatgagctcaaataaactatatggacaattatctcatcgctggggtgagtgcgccaaacttaccactctacgtgcatcaaataatcgtattactggagtcataccatcgagcatggggaaattgtctcagttagggagacttgatgtttcatcgaatgaaattgaaggacacattccaccagaaattggtaacgtagtgtctctattcaatttgagccttgcaaacaacatgctccagggaaccataccaaaggaagtaggttctctacaaaatttggagtatttagacttgtcatcaaacaacctaagtggacagatacatggatcgattgagaactgtttgaaacttagattactaaggctaggccataatcgcctcgatggaagcattcctgttaaactagggatgttggtaagcctccaagaattgttggatctaagtgacaattcattttctgggatcataccaagtcagctgggtgctttgagcatgctcgaagctctgaatctttcacacaacacactgaacggcagcataccatcatcatttcagggtatgatcagtctctcatccctggatgtatcatataataatttggaagggccagtgccacatattaacttcttggaagaagctccgattgagtggttcatgcacaataaaaagttgtgtggtacagtcaaagctttacccccttgcgaccttaatcagaaaggtggccagggaaagaaattcaaatccattttacttggtatagttggtgctgctggcatgtctattgtgtttatcatgtcactagtggcatggcaatgcaaaaggaagaaatatggggaacaaagcgaaaatggagttggagacgcaaaagtgttttcagtctggaactttgagggaggagaagcatgcaggcagatttttgaaacaacaaaatatttcaacgaaactcactgcattggaactgggggaaatggatctgtctacagagctcagttaccaacaggtgagatatttgcagtaaagaaaattcatatgatggaatatgacgagctaatatttaagcgagaaatagatgctttgacgagaattcggcatcgaaatattgtgaagctctttgggtactgttctgcagtccacggcaaatttcttgtctacgaatacatggatagaggaagcttgtcaagatatttggagaaccataacattgcgattgaattggattggatgcgaaggataagtattgtcaaagatgttgctaatgctttgtcttacatacatcatgattgctttgcacccatagtccatcgagatataacaagcaacaacattttgctcgatcaggaattcagagcttgcatatctgattttggtatagccaaagttctagatgtggaggcatcgaactgcacgaagcttgctgggaccaaaggttaccttgccccaggtaaatttgtactaaatcagttgctctgtccttttgtatattagtttgtaactctgacaaatattcgagctaactgttaaagtattcgtcttactagtatatctttgattcatagtagtatattagatacaattaggcaaatttgcatctcattttgtaaaaatagcatcgaatgccttctatactatttacatatgcaaatttgttgaaacaaagtcttaaatttttacatggcagagcttgcatacacaacaagggtgacagagaaatgcgatgtttatagcttcggagtgcttgtctttgagctgttcatggggcatcatcctggtgatttccttttgtccttctccatggccaaggaaagtacaacattgaaggatttgttggacgcccggatcccacttcctaaagctgagacagcaagtgaaatatttagagtgatcatggctgctgtccagtgcttggaccccaacccatcacgtcgtccaacaatgcaacatgtaactcggatgttttctacagctgaaggacctagcaatcctgaccatctacatgttgacataatcatccctgcgtactaccagtgaatgttgtcagaaaattgctgtttctcatgttgctcagggttttttccccacaagaatgtggcaattcacaccataggtaggtcagtctattgcacctgttaatgtcaacttgtcaagtattataaagcatcacttgtatgatgatttgtgttctctctacttcgttggtgttaattgcgtggttgtcaaacatacctgcattttgtacacgaccctaatacgtgttgctggtgatgttcttgtgcttactatgctaccttgtttgatcaatctgctttgttgtaaattgtaatacgaatctctaagatttatgatggatggtatacatggctaccattttctctgactacatggcaatgaggcttcttgttctcctattctagcaaatactgtataattgtatgtttagtatcaaagttttcagatgcatcttttgtctctgctctccttgtgttggtatgtttcagtgatgataagtagtagctgcttaaaacggtttggttttatcatttttgaaattgttcatgagataagctgagaattgcttactgtttgcctgacattcaaaacggagcctgataaattgcagaattttcaggtcatcttaattctcagagcttcagtagacttgagaggatgtgtaatatcgctttttccgcctccgtgcctcatgcggcatgtcactcttctcccatgatcacctcccattccaaccgttgtcgtcaccaccgctgtgtttggccatcactcccaccctctccacttatagtgttagaataggtgtcgaatatccttgtcttatgaagccataggactgggatatccaacatacagaagaatttctttctacaaagcaaaattaatggacaatctgaccgaacaactcatcaatgttgaaactgatgcaactcatatcatccatctcaatgaagttgatgttgcaaactgcaaaggtcatccatgctctctagaactccaaaaatccgtgagcactggcacctccatgacgcccaatgaaggagtgcttcttctggttattaggcgacgatgtcacatcttctactggagagtcgtccatcacaccggatggatgaatcggtgaactgagagatgatcaaaccacaccaattacacctctcatcaccataaactccagacaaatatcataccatgagctatacaaattctttaggaccagtaactgatttggcaagacgggtcatctgagggttcgctgcggttcatttcttataaatgtatcgattagttgtgttgataaggatcatgatgaaattgcaagtacaaatggattgagacctgatcagttctgatcctttggcatgggaaattcttccttttactctctcttttgaatgagtcgtagtgcgctcatcaagaaggggaaagatggatgggaaatgcttgtcaagctcggttctttaaagaatagcatcctcatcttcctagtaaaaagcacattgggattctctacttgtggtggtggtgagccgtgtgatgggaaaccatcccgcacagttcggagagtaccgaaggtgaatgagaggttcaccaccacccatatactggatcaaataaaaacactgggcttccatcaagccactactacatcaattgcattaggaatcgaggatcttttaacaataccctctaagggatgacaatgcaacggttatcattggtcaaaaaagaaatccaaaaggaactcgcgtttttggcacgatcgccgaggaagcagctctgatcggtgccattagagcaagtttaatagtatagacagctgtaagctgtaatctataaatagtttatacatgtcatctatagataagtttagaggggcttcaacccctccgtcatgagcgccgtcgtcccagtgtgccacacccgccgctgtgcatcgtgcagccacggagccattccaaccgtcatgcaccgactcaattaccgcgtgccgccccaaccgagagagggagggagttgcttctgccgccgtcgttgtgagagaagggtgaggaagggagctgcaaccgtgcgccgccactaccgacgtgcgcagacgctaccgccgtgcgacgatttctcttccaccgtcgcgagagaagggccaggaaggggttgggaatgcgtcgctcgcccaatgcgggagggaatcgaagggggtagagtggtggcattttcctataacttcagtaaaaaggaatgggtagtgctgtaattattttcggagtggagccgtggagctacattttcgccgctccacctcaatacaatattttggagcgatccaccccgttccgatccagtttttggcgaatctgaaccgtttggttgagcttcagctccaggtaaaatgaatctaggagctggagttgtaccaaacagacccgtaatttctataatactccctccgtgccataatataagggattttgatattttgct

SEQ ID NO: 13395 - DNA, 19861 bp, Oryza sativa
gagcttggtttggttgtagggacagtgaaaacaatgaatacttgagtccttcaatattaagtaaataaataagtttgtccatgtaacatagataaggagagtagaggataccttggctgattattaaaagaaaagaaaagaaaataaaagaaaataaaagaaaagaaagatacctcagctagcctgttcccctggtgcttgagggactcagcattatcagatggctttgttccaggacagtccgtggtaaccactcttgtttcctccttttctgtctcatcattgtcactgtccaccccaaaaggtaggcctggcttagatggtgccactgagggctgcctattcgtcttagcattcttaccccaagttattttcatcttggaactgttacatgagatgggctgacaggagtcagtttctttaactagaaaagcaacattcctttcacgtactcaaccattgaaggaaaaaaaacacccatatttctacaaaaacatagcaaattaagtagggaaacataaaaacaccagaaaaaacagtcctacagattccatgtagtgctcatactaaagtgacacactaccatactgatctataaataatatacacatcaatactttcaacatctccgaccagtgggcatctgttgaagcattggacttaggttcttgatattagtagaaaacaagtttgaatagaacacctgtcttatctgtaggctgcagcacaaccaaaaaaggactgctaaagacctgagacaagctcaagcagtcaagctgattataaaattcgtcccatttgcgtatggatatcgcataggcctccattcatgaagacaacttcaaactactaacttctaaagtcagaagatgaaccagtgttagcctcttagagcatctccaacaggtacccaaaccaaattccctatagtcaattttttgggaattcatttagattggcaagtgatcaattctttcagattgctatatatttgttctcatacgtcgtgaaaaagaaatatatgcatgtgatctttgtggaaaaacattggcagcaatggttaatctttgtagaaaaacacatgaagcacagaaggaaaatgtgatttttgccgttagctgataggtgtgaaaaagaatatgcctgcaatctgttagctctgggatacagtcatacgtaatttgattttcgcacgagctgttagcttttgtttagagaatgtaatttttccttttaaaaaggggataagtttaagaacctgcaattttctgtgaaatgtgttcaagaggagtgattggaagttgctatgttgtgtgccattgtgaaggcttgtggaaccagtgatttttggtactatgttataaggtatctatatacatgtatgcagagaacaagtcattttaaacttgccaatagaagaagaatgaaccaatggaaacgagcaacaacaaatgcgaataaaacaaatgtcctgaacacaaacctgcgtacagaaccaccacggcgccgtggtgcattgtcaatgtcatattgatgttgtgctatgagtgctgctgccagaatgagttcatcatcatcatctgatgatgacgaatccaagagttgatgcataagaaagcctctcattgtgatgtgctagaggaagaaaaccatcatgaagagcaaatatgtagagataagaaaaatagccactcggaataaataatttgaagagtagattgcagagaaccccattttttgtggttaaagttccggaaaaccgcacatacttgcacacaaccacggatttttttaatggtacaaaggtttcatgaaaaacccaaatttattcaaatcacaattactactccattagcatatctgaaacaattatattgaaaggagtgaagaattaaaccaaacacacataggccccgttcgaaccaagatgaacttaagggcacacaaaacaagaaaaccattagtgtataattaattaagttttaattattacaaacttgagaaatatatatatttaatattttagagcaacttgaaactgcatcttaattagaaaaagaacgggttatagaggcaagcacgaccaatgaggacatagggaatggttctctttttgggaatctgttgattggagatgctcttgtgcatgcaagcatatcatcaaacaagttgtgcgcggtgcggccaccgactcactcaagcctacagaggcgagcagcactgcactgaccaaagatcgctaggcaaaacagcgggacaagccgcgcgcgcgcctggaacaacaagaatccgctcgccggccgagagacagaccgccctcgcggcggctgcaacatcatatcacaacatggggttgagggagggtgccgcgggtggctggcggaggactcaccgatcaagcctggaagcgctgctcgctgctgctgcaggaggagaagggctggagcttccggcgaggagaaggaggaggcaagcggcgagcagagagacgacgacggcggcggggttgtttccgctgctccgggagaagtggaggagattccggcggagtggctgggctgacgtctccaatgggccttttggaagaagtattcgggcccagatattgggccatccgggcatcactgcggcccatccaagataagcataagagggtttaccttttttcgattttttttgctatgcatatccattgacaaatttctcaaaaaatactctctactacttaatccgtaggtgaggaatgcgcgatcccatcgcgctcctcctccggatcgcgacccgcagttagcgagaaaataacggcgccccccaatccccggttgttgcgtccccttcctccgcatccaacctcgcgccgcccccacatcgccgcgccccatcctcctcgccgcaccatgcctccactgccggcgcccccttcctccgcattcaacctcgcgcgctccccatctcgtgcgcactcccagagattaaaggagtgtaggaggatctgataaaaagtggagctattttcattgcgacgaagttggtcagctccaattatttatctttctatatctctctattttttttacaaagttaggaaggagaaggatgcactgcagtatcagttatcgtatgatgtaactctctgtttgtactgctatgcttatttagtacttcctccgtttcacgatgcaaggctttctagcattgcttatattcatttagatgataatgaatctaaacatataaatgtgttatattaacatctgggcaatgttagaaagtcttatattatgaaacggagggagtagtaacatttatcagatatcgtctctatttagttctgccttctcaatctaaaataataagatacgctattaatatctaggctgaatttgatcatcgtgtgttacgaatggaatgtggtagacctgtttgcgaagttacagtgtcaacagccagtttacttgcatattagattgtcctaaatacatacatttctttactaaatgtagttcttgtcacaactaaaatatgtgatgtttgcaatcatatgtaagttgtctgatgaatttcaagaagatgcaggtaaaaggaagcctggcaagatcaaatcaaatgggaaaggacgaagggcgaaggctgtcgcaatttcccccaagctcgcaaacttgagctggtcagaaaccagtactgagaattcagcttttcatttatcactatttacatatgctagtaaggtgcccatgcgttgaaatgggaaatgctatatatcaatttcaaattatgttaagtgaatagatatcaaatattcattgagtgaaaatttgttgaacacatatgcagattaatttcaaaacagaaatatgttttcattacataagcataatgaaagctttctgcggcatgaaacaatctcatggtgtttattaaattataaaaagacaacatagatagaagactgctatgaaaatttaagagagaatcccttatatgccactgaaaatttgtctgatcccttggatgccactgaaaataagctcttcacttatatgccattggttcaaattttcgctccctctcatgccactgccatccgttgactggtagttgactgttaactgtagagtgaaatgacgtatttgcccttcttgagttgataggcatgcagtaggtgttagtatgtcagttatatactacattttagctaggcatcacatatatttggaataaatgaatatatgaatgtatagcattaatctatatattgaatatatgaatatttttcagtcacataattttgaggcacatatttctctgtttttcatagtagaacaaagcaatctgttatggcattaatgtatttttcacatacattaaccatgtacttctcgaacaaaagcttcaacaatatttactagggagcacaacatttctctgtttttcacagtatcgacaaaacattcaagtaatataatagattgcttctgacagacatttaagataatgtgtaattgcacattgtttgtaatgcacggctaaacagctaaaataacaaacagattgtttgctagaggaaggagatatacacagtagcacagaatatgcaacaaatattatagggagctgtttaaatgaccagagagtaccaaaatgcatactgacacagtaccaaaatacatgttcaggcttactgacatggtgcatcagagggatgttgggcttggcccacttggacaattgggccatattctcatgtttgggccaaagggtatttttgtcatttcagtaaaaaaactgacaagtgattacatcctatcaacagtcaactaccagtcaacggacggcaatggcatgagagggagcgaaaatttgaaccaatggcatataagggaagagccaattttcagtggcattcaagggatcagacaaattttcagtggcatataagggattttcccaaaatttaatgatgtcatacaaattaaagcacaaacaaaaaatctagaacaacaagtatttccagatattgtatttttcattgataacaattatgatttgtagtttctttggattgccagaattgttttccctgtgttcaacaaattttcactcaatgaatatttgatatctattcacttagtataatttgaaattgatatatagcatttcccattgcaacacacgggcaccttactagtcaaatgtaaaatactatataattatagtgtaacctaaatttaactactatatccgttcccaaatacaaaccatagttattagaataggaccatcacgtgaagttggagaaaaaatacggaaaaagctgcagaacttggatacgaacccaaaacctccatgcttccacggaaagcctcaaccactaagctatacggcttattgtgaaaccaatataacaaacatctaattgaacctgtttaaaccggcggtttgactccgaccaataaaccaatgacccgagtgccttaccggtttgatcaccggtccggtcttaataactatggctgcagcttccacagcttctgagaatctgtagttacatatcctgaaaaatgaactaagaagccagaagctggagaagctgggtttcagagcttttccagattctcagaagctggctaccaaacaactgcttctcagaatctaaagctccccaaataggcccataatataacttgtatgtaaattttacataattttagaccatcaatttactctaagatttgtgcaaatggggaaggagaaaattacaacatgcacataggtaagggattcgatcccataacctctcgtgaatagtttttaaaagttgcatacaaccgtatattatagccacgtgcaaattacaatgtaattatactacaattatatcctatttatatttggaaaaaatctgggagaaaagttatcgacaaatatgttgcaatgtagatgttttctactttttacctacagtcttattcaatttggagatgattaaaggtgattagagggattgagaatgaataattccataccgcagtggttgtgaaataaattatctctaatccctctctcatgaggattaaccgaatatggcctaatagaagaaatcattccaaatcactatttatacagatgaccggactaaaacttctatataggcaggaatatctttgctccttttgtctgttgtgatggttttctcatcttggttttactatcctagagacattgttagcaaagtggtggacatggcatagtatagcacggtggcgatcatttagacatcacatttcttttctatgcatagggaaaaggacatagatgtaactaactgactataattcatatcaaatttggtaaagtgcattgctagttacatagaacagacaactctcgcattgccctcctctaggggcggcttgggaggcgacgacccggttgccccctctcccccaccttcctcctccgcctcgctgccacctgagtggccgtcggcaaagctgcgcggccacaaggacggcggtggcggggcttctcgcttctcgcgctcgggcggccaagggagccgcctagggtagtggcggtggtgaccgccagatccgcgtcgctatggctggatttggtggggtggtggctggcggcggggacagcgatgatggtgggtatggcgaaggcgacaggaggggcgagctgcgctaggcatcggtggctaacggcggccgggatggcaatgacggggcggatccggtcgcgctggaggtggatctagcgccctcagaggaggatctggccccccggcgatcagatcgggcgagggcgagcacgcagcgggagagcccgtcggggcggtgactacgcgaccttttagtgcggctcggccaagcctcgcagtggcgcggtcgggcacgacatcgacggtgatggggcggcacggtgcacgtgcggaggggcggctgatggcggaggagactggtgaggcgctaggaggcgcaaccggtatggaggctggcgaggcgtgtctggctcgtggccgcgacgctaggaggcgcagggaggctcgggtgccagtggcggaggccggcatgtcgcatggagatgtggccggcacagcaggaggcgaggctggcagaggtggaggccggcgaggtgcatgctagtgcgacacgatgaggcacggccggtggcggcatcgggaggctggccggcgggggcgccggtgtagtggtgcccacacgccaacggaggtttagatggtggtggagcaatggtgtgtcagctgtggatatgcaggcgacggacaacgtgtgaaaacccagcccggccttggtcgggttggcgtttcgagcatcactcccctcttgagggcgttgttgtgccgtctcaacccctctagcggcacggccaggtgaaagcctagtctcagttctctttgagaccttgacggatgtcggcggcggcggagcttccgtcgcttctctccttggagacattgtctttggcatccccttgccgaaaccttcgaaatagccggcgcaagctcgctctagattaacgtcttcttatgtcggcgctttagcttctgcaagttgtccacatcggagggtctagggggagagcggttccattctctctctcaccctatctccctcaaccccaaagatgtggatagagcgggattttgtgtcggttataagggctgggttttgggcaatctcggttgtagttcctttgttggtctagcggcggccggtacagtgctagccttctctagggtttatgtgttggagttgtcggtgggtgggtggtggtatttttttttgtttttctggttatgacctcccagtgttgtaatcttgtattttttttgttctatcaatatgaacttcattaaaaaataataaaatgtaagtttattcgatgtcgatctacaggagttgcaaagaaaaaaaatagcaattcctacgagaaaagccgtatgaacccaaatttctaacatgagttgttgtgttacttttgcctttaattaattcatagcttttatgtgcatggctaatcttgtgtaacagttacatacacttattttcgacattgtattctataattatagcattcatttaatgataaaatagtagcattctatgtgaaaacttaatttatgtcgtactttcttgggtttctatttttaaattttagaacttaattttaattttgagaatcaatttagaagtttttatttcttagcttttgatctactataaatccctctattccaaaatataacacctaattagatgagccatatctctaaccaaattcgtcgtactagtctcatctaattctaagttgctatattttaggacatagtccattatcgtaaaatcattttttttcatcaccacgtgtcttccgcgtattaagatgtaaccccacgaaatatatatccaagcacgacatttttgaaacaaggacactttggacactagaaccattctaccgctacaaccatgaaaaatacgagggagagaaaacccaaaatacagtaaattgtttctatccaaacttgaatcgagccgatattcaagcgacatctcgaaggtagagaaaaagaaagacaatcatctcgaactcaccctcccacgcgtccacccactattggcccccgcagattagactccgctcccgccgcgccacacacgcctctccccaccaacggcaacccatcgcgtcgcatcgcatcgcacccctcgccgccgactcggccgtgccaaatcaaattccaaaaaagtaggccaaaaaaaaaaaaaggaaagaagaaaaaactcactcgactcgagcgcgcgcgccatgggggagcgcatcgccgcctcccttcttccgggtgcctcggcctcgcctgctccgtcccctccccccccgcgcccccgcgtttccgccggggccgccgcctcctttccatgctgctccacaagcgccggggggctccgcctccgctcccgcccgtttcgcttcccgcaggttcgcaatagttttagctcggctcgtgtttttttttttttgggggtggggggggggttgaatcgaggtgttctgagttgactgatgcgtggcacctgcagaaggctgcgacgacgaggagcgggcgcgccggcgcgggggcgcgggcggtggtccggtgcatggcgcgcggcggcggtggcggcgtccgacgcggcgcagctcaagagcgcccgggaggacatcagggagatcctcaagaccacctactgccaccccatcatggtacggaacgcccgcgccatctcagctctcgcatccatatgaacagagaagagtcagagatgatgaaatcctgcgatcctgctaccatgtacaggtccgtcttgggtggcacgattctggcacgtacgacaagaacatcgaggagtggccgcagaggggcggagccgacgggagcttgagatttgacgccgaattgagccacggagccaatgctggtacttaatttctcgtgtctcggcagtgcaatttcgaattcaggaaattcgtggagtaatcgtgctgatttccttcataatcgtatggttttggttggaattttgataggtctgattaatgctttgaagcttatccaaccaatcaaggacaaatacccgggtataacttatgctgatttgttccagttggcaagtgctacagcaattgaggtctcagacttcttctctctgctctagtgactttgctagatattttttggatgatcggtagtctatgtgcttgaatcttttgagaaaaatttcttgcaggaagctggtgggccgaaaattccaatgaaatatggacgagttgatgtcacagcagctgagcagtgcccaccagaggggaggcttcctggtcagtgtttccattaagttcttcattctgtttctgatcaacgtttgcatttatgaattgtgagaggaacttatcaaagagtgaccttctggtgttgataaatgccccccagatgccggtccacgtgtgcccgctgatcatcttagggaggtattctacaggatgggccttgatgacaaggtgtggatgatgcaaaaaagaaattagttgcctatctgctatttgttcttcatgtatgttgtataaccatttcttttggactatttatgcaggaaattgttgcattatctggagcacacacacttggaagatcaagacctgacaggagtggctggggaaagccagaaacaaaatatactgtatgttttcttgtccactttggaaactcaacaggaaaaataagttattttcagcagtaggaagttctaggcatggccagaccttcaatgttctacactctgggtatagaatattacatttttggggcatttgcaaatttgccaccggttttttcaatattgcaaggatgctactcgaatgacagttctagtgatatttttgcaattttctagtggcagttttgcaataacgattcaaagtagtggtaaatttgcaattgcccctacattttttgagacattcaggcagaggtgaaaacaatgcatgtacttttttgtgttatcttgtaagtaagcaccatattatgcttttaaaatccgtgaatactttgtccttatgctgtaaataaataatgttttaattcaggattttacaaaatgggttatccttacgtttcttttgtatgcatataatggtaaaatagaattaggatgctaagaacttcatagctaacaactttgtcattctctaagccctgatacttctctgtggggaaatgaagattaacttttcgatgcaatcttaccttaatcacaccagcacaatagcaaatcagattagtttcagttttcagactgacatttaaaggtggcttctattattgtggtctacagaaggatgggcctggtgaacctggagggcaatcatggacagttgaatggttgaagtttgataacagttacttcaaggtgtgttagcattttgtcatggtttacaaaattatttttttcatttgaatatgtgatgattcagctgatgataatgtttcaggacataaaagagcaaagggaccaggatcttctagtgctacccacagatgctgcattatttgaggatccgtccttcaaggttatttggttgtgctcaatttgtggcttgaatagctcataggtcactgtctgaaatatctgcaacatatgcaggtatatgccgaaaaatatgcagaggatcaggaggcattctttaaagactacgctgaagctcatgctaaactgagcgaccttggtgcaaagttcgatccacctgaggtgaggactaccatctttttttttcattttgatctcctggcaaccaattgtgcctaaacaatcataaacaatacgaaagacacttaagctcttaagttcttttattagaacatgccagattttcttgctcttgtttgcaagttcaaaacatgactccctgattcctcgcccacatcgagtagatatcttttggaatgtattttttttctagagaattcagtaatgtacttatgtgacaataagatggagtactggaccttcaggacagaaatatagttcaaatagtttttctttttaccgaatgtaatccaaacactgggagtttgaggtagtccatcatatcaatctttcttctgcaatgcaacgaaatggggtttactatggcagcttttcttagctgttcttcatgtaaaaaccagtgcaattgtaggttggatatttacagagtccaactttaccagccttcgatcaggaagtgatggatgtgattttcctgcagggattttcactggacgatgaaccagccgtcgaagagaaggatcctgaaccagcaccagcgccagcagcagcaccaccacctccaccagtcgaggagaagaaggaagctgaaccaactccagtaccagtaacggtaggagcagcagtggcatcatcgccagcggatgacaacaacggtgcagcaccgcaaccagagcccttcgtcgctgcgaaatactcctacggaaaggtatgcactctccacgaagcctagcttctagccctagatttgatggacaatgcatggtatcttgcaatggcttttgcagaaggagctgtcggactcgatgaagcagaagatcagggcggagtacgagggattcggaggcagcccggacaagcctctgcagtccaactacttcctcaacatcatgctcttgatcggagggctggccttcttgacgtctctgctcgggagctgagagcgatggtctgatgacctcctctgacgagtgttttgagttgttctgcctgtgctaagatttgcgtgtttctctttccatgttttgagtcgttattccgtaaataaattgaggtaaaaggatgggcatgtgaatggattccagtactttctgaacttcttgagtaattcctctagagaaatatttgtcggagagaaatgtcacattatctagttgtcatggctcatgactacattctctatactgagggaaattatgacattctctaaactaaggagggaaataatgaggacaccccatatatcactctttcttatggcatgttcagtataaaaggaaagtgcattttcctctccaagaacattgtatatatatttacttcttaaaaatagggagatggatttttatccctggaggggatattctcttgtattttttatgccatctaaatagttagaaaaaaatgattttttaagacatagatcatcatgagatatatcactctataagttcaaattcgaattctacagttctccgactgtggtggcagtcctctcctctcctctttcctagaggatttggtggcagctgatcggggtggcaacaagcagatgggtcagcgccagtcagcgatagcatgcaacgcaagatcaaggccgggacaagctcctccctctttggccgccaccgccatctctcccttcttaggctgacgccatcaaggctcgtggcgaggaggtacgtctaagaaggtagcatattgctaggcggcgcaaatctagttgatgaggccacatgaggttcatggtggcacaaatcgaggttggaccaacgagctctacggtgatgggatcaaatctgtagcgacggtaaaaggcccttcttctcctcccagcatctatgtcattccccaatcccgttcacggcattgtcgtctttcctcaagtctagtagatctgggttccactgctttgagctccgtgcgaggagtggctcaggaaataggggaccacacgcatcatgtgggtacggcttgcccaacggggcttgtaggccatgcccccacaggcgccctcaccttgataaggccccgtgccctctgtacgacctgagtggctttgcgaagaacacatcttaagccaatgtggagctacgacatcgacgtggagggctagaactaatcactaggcccctacgctacgtacccttataggccaaaattactcctacttgtgtattgaaatcataggtggcacatcctttttaggcatggctcgtcaagtggctcgtgccgtggtggctctcgtgctgaggatagagcacaagcacaacttagtaagaagacgggtaggctgggccaacacgagcccatatggcacatgttcctcggcctcgctgttccgccaacgaagcttgctggcgatgcctccgtgcctctctgctcagctcggccctgtctcggctgtcacaagttgtacagtgcaccaccgctcccaaacaccttggcccaagccactgccaccgtcagctcgccctcaacgtgtaggtgctagtgaggccttttttttttccttctatgagacttacatgtgggttctatgttggataaagactagtaaacttgccacatcagccaaaaccactttccaaaccaccaaggggtatattttgtatcggttttaatagttaagggagtcaatatatacgattttacggttgaagggtacgaattggattcggtcaatagttgagggactcaaactatacttttccctagttgaaattgtgccaaatgaaggccggcctaaatgacgactaattagggcccaaaatgtttatgggccgagttcatgcgcatttatgggccgaatccatggtcaacgactatatgggcctaattcattactcattatagagtccgagtcacaccgtcactcctcggctgcgcggccgtcaatgaacgctcgccgcgccgcccccgaccactccatccaacctccccgccaacgaccttgaaaatcgactccagatccggcgtagctgctgccgcgatgctgagcgcgcgaggaacggggttaaagttcagttttctctctatttttttttaagaagggtattttttaccggcctctatatataaccggatatatgcggtcatttaaattaggaacttagctccgcaaacaatctaatctaaaattcgttactatggagatttaaactcataatcttggttactaattatctctctactaggacccatatggaactttaattatgctctccattgcagcgaggtggagcctggaggagattgattctagctattcaggacgacgtcgagctgctgctgctgtcgctgctgcttgttcttgttggtggaatccccggtcctcatttggtgcgaaaacgaggaacatgtcagagaatgcaggtaataatttctctgccgtcactttctaatactccctccattttaaaatgtttgacaccgttaactttttatacgtgtttgaccattcgttttatttaaaaaatttaaataattatttattcttttcatatcatttaatttattgttaaatatacttttatgtatacatatagttttacatattttacaatttttttgaatataagacaaacggttaaacatgtgctaaaaagtcaacggtgtcaaacattttgaaatggagggagtactgtttccttggggatagcattgagctacaggggatgaatttgccaccacattgatgtgaaatcaccttggttggactgagggtctatgaggttatctgatctggtaatcctaagtagagtagttagggttgcttaattgatcctgtagccaatgggatataaattatgaatagctcgaaaatatcatttattttcctgtaacaagtactcactactttattttttagcagtaagcaacatcatttcagtaataacatgccggggaggaaagctgcttgacttggcaatctgaactctcaagttttaagtcttccccatttgcatgtcttctagaatacgttgattcagcaaggcaatgtgatacgacattgaagttggttgctatcgttcgttcaatgcattgttctttttccaattaatttctctatcgctgatctttcgctgggctgatttattcagaaataacaactgcgcaactataccttgtagtgccttacagtagcagtcaatactgtccagggaaagaacattacaaaacaaccttgagccatatcccctctactctagccaagccatggaacacttatctccccagaaattgatcctgccattaggtatactactatcctcacttgttctccttcatgccattgccgtgccatccatcgatgagcaagctgcagcgcttattgcctggaagaccaccctgcaaacccagcaacccctgcagtcgtgggatagcaaggcatggccatgcaacaactggcgtggcatcaggtgtggcacactacaagggcaaagggtgatcaccaagatcactctgcacggagtgaggcttagaggctcactggaggccctcaacttctcggccctgacgaccctgacaagcatcaacctttcacacaacaggcttacagggatgatccctcagagtatcatgtctctcaaagagctcagagccttgatcctgcacaaaaatcagataaggggctccttattccaactaggtttaacatctttaacaaagctgaggttcttagtgctaagcaataattttctttcgagttcaataccaaaggaaatatgtagtctaaaaaggcttgtgagcctaaacttgtcaagcaatcaactgggtggtcatataccttctgaaattgggttcctcagtaagttgattagattggatttgtccaacaacaacattattggtcgtctagacagcttgttcatgacaaacaagccaggtaaatataacaataaatcatctttgtcaaatctaaaggttttagcactatccagtaaccaattaactggtccaattccccatgagttgggagatttagtgttacgccccgaactaatcccgaccggaactagcccgtgacgctccaaattaacctgttaatcgataccagtcccaggaaacagtgctggtatcacagggagacagaatatcacagcaacagaggtctctttattatagagtagaggtacagtcatgttgggctgcggacagatcccgagctcacaactgcattacaaaagggaaacggaagccaggacttggaccaaacaacacaggcgcgacttgggaactagaccgaaaccctaaaactcatcgtagccggcttgctcctggaagaactcctcatcagcaggttccgcttcatcttcttcagcaactggggggggggttatttatatagagcaagggtgagtacgggagtactcaacaagccatgggaaataagtgtttaatgcaggcttcaaggaaaggctgttgtttttgcaattgattttatttgaactcttttctaaaaacaactaagtgagtgcttctcaaacgacacggatgagacagtgcgtctcgtccggtcggagtatgtgcaatgtatcagtctttagaattgaaacaaggttggcacccggccgatagcttttcaaacggccacccgggccaacaactttcaaacggccacccgggcctagctgatcccatcagctgcagatttttcaaacatcgaacccctttccacaacagcaatttcacaagcagtagtcaaacaaaactacgctaggaatcacctcacatccgcccatgaccgtgggcacggctgttcgaacagtttgttaacctctgcagagggggtacactttacccacacgacattactaacccggatcacccagcccgtgggggatcagccacgtcgggagacctccaagctttcatgacaaggcatttccaaagccgacacaggtttaccatatgccgacgagaggggtcccagaccaacaacaggttaggtcccagaccatactgtgccaggaagcccaggggtcctccccgacaccaccccggcgaatccacatgtctctcggcatcaaggctccctgataagctagttactcagccaggggtgtcccattccacccatgtggtcgtacttgtcttatgtttggatgaaattccaaggaaacggtccttaggtgcaagagcgggaaaccgtacacccggtacgttccccggtccgcggttttggaaattcatttagttcgcaagcaccgacccagtgtcgggttttccaagtcttttgtaaaacccaagttttacccaagaaattactcagattttaagtttgaaggcgaccgtcgatactcgcacagggtgcacgaatatcgaggcgcaactagatggttacaaggggacatgatataacaattaacaaaggaagggtcaaatgcaacgaattaggtaggtctgccaatctgccttgcagacgggacaacagattaagtgcgatcctatcaatgcataatatttttcaagcaacataattaaattcaaatataggctcaagatgttcaaaggtggcttgccttgctcgagatctggagcttgatcctcgaaatcctcgcactgcgggtcttcgggctccgaaactacacgcgaaatgggacaactcaacaaacggcgaaaataaagccctattaataacctctaagcgtgccattagatagatctcgagatttgaggaattttggaagttgaacggagtcaatcggatttacggttgggaagatattgaatttctaagattattggatttttggtctaaaggaaaaggatttaattaaatcctttttgaaaaagaaaagaaaagaaaagaaaagagggagggaaattagactttcctcgggcggctagggcgcggcccgagagaaatggggcggctcggccgagctaaatgggccggccggcccaaggcggcccaaggcggcccaaggcacgcgggaggggaggagagagagagccggtggatcgggctcaccacgcgtggtcccgggtgggacccgcttgtcggtgacacggttcaccgtgcggagcgagcacgcggcgcacgcgcgcgggcgggggagggacgcggtgcacgcgcgcggttcgtggtggacgcggatgcggcgggcccacgcgcagcctcacggctcgcggtggaacgcgcgcacggggaggggctgaccggggtcggctcgacccggtcttggccgagctggcgccgacgtggcgcctacgtggctgccacgcgggccggcgggaggtagacgacgacgccggccggaacggacggcggtcgacagcggcgagcggcggagcgaaccacggcgatacaggcgaaagcgagcacaccgggtggttgctcaggtcgaggggagacgagccaacggctcggattcgtcggagggagcttgacggcgacgaattgcggcggcggcaagcggcggcgggagaagggggaagcggcgacgaggtcacgaggggccaattcccggcggtgagagcatctacgcggctacgggaatccgttgctagcgtcggattgggcggagctacgccgagcgaggccggcgacgagcgagtgctacggagcacgggcggcgacggcggcgagcacatggcgagcggcggcaacggtcggggcggcgccggctagctacggggaggctacacatgctactaccgaaaactaagggggagagatggagcgaggaggaagaacggagggaggcactaccgtgcgggcgggcgcagtgacgagaggccgacggcgcgggagtaatctctccggcctcgggccggggaagaggaaggagagggcgcgcccggagtccccttccgcgtccacgaacgcaccggctctcccggtgcttggcgatgaacggcggaggcgagacagagcacggaaggcggcggcaatggcgcggtggcggcgagcgaaacgggagggggaatcgatgggagggcgccttggtttataggacgacgatgtgggtttgggaaccgaccttgggcggcaaggctcgagctggcgcccacgctcttgtccaaaacggtgacagaggcggatgacgccggcggcgaggggaaaaggaaaagagggagagaaaagggggcttgcccccttgcctcttcgggaaaaggaggagggaggggaagcgacgcggctaagggaggaggagctctgcctccgtcccttggaggctagcgcgggagtggcggggccgaggcgatgacggcggggcggtttggagcggtgcgacgacacgggcggcaggcgcggcagaggctgacggcggcggcgaccaggcggtcggccaccacggcacgcgcgcgcggaaaacaacgggcggcgcggctcgggcacgcgcgctggctgcggtgccgagcggctgcatgcgcggcagggccgcggggccgggcggcgcaaacggtgcaggcgcgacgcgggcgacgaccacgcgggcgcgcgcgcgaacgacgcgcggggagcggcaaccagggagcggaaaggagggctcggctcggcgcgggcggtcacgcgcacgcgc

SEQ ID NO: 13396 - DNA, 6914 bp, Oryza sativa
tcccaccgccccgtcgcgccagccgcctctttccccctatgtcgctcgagagaagagaggagaggagaaaaagaaaagaaaggagatatgtggggcacacatcattttctctcacttacatgtgggccccacatatttattttaactagttttgctgactaggatgccacatcagtgaaatcaggcctctatactgccttgggacctcttttgaacggttttgtatagtttaagggtacacatttctgattttgtggttaagggaccttaaaaaatctcgctgttaagttgagggacctccggtgaacttattccttatattttaggctctatctgattcgcatgatagaataaaacatataaaaaaaatacttgaaacgataatatgagctcttctgatggtgttataggaaaaataaaggtaagtttacaggtcatatcttttggtaattttcctatatattattttgtataaatcaaaggaaaatttaggggaaaaagtctataggatttaaatcctattaatcaaaggggctcttactcattatgtttttctattttccagaggttttcgaggttagacagtgagaaaacacgttacctaggttttgtttagaagaatttttagcagtggtaacttctcatagaatcagaaactcccccaaataaactagctttttttttatctaggttataagttgtagttacagaatccaaaaatgaattcgaagtcaaaagttgagtgattaccatccagctgcttattagataagctatatcttagttatttttctataggtgtttacaggaaggatggtcccaatctagtacttggatgtgatataatcctgtccagatttattgtactatattatatctcatttaagcaatccatttgtttcacaatgtaagactttctagcattgtccacatatatatagatattaatgaatttaaacacacacacacacatatatatatatatatatatatatatatatatatatattaatgaatttaaacacatatatatatctagattcattaatatctactagaaagtcttacattgtaaaacgaatgacaacgaatgaagtattagatatgtctagatttattatactaaattatgtcccatctaaatactgagttttttttttggcagaaagagtagggtgtatggagcgtgctccgtgcaacgagggtggggaagcgagtggacaaatgcctatgctattataaataaagatgcattaatagattcccctctccttctcccgtagctcaacacgtccctatactttgggtaaataacagtcaaatccaatattttatcctcggttactcttgtaggccatctctaataatatagatatatgttccgtaataatgtacgagtatattaatagtataacaaataatttagtcatttgtatcctcttcacaaatggaaaggaagccactggaaaaaaaaggttggttagggctttgagcgtgtccacacactaggctaggctatgcagtctgaatatcaccttacgcattaccttcttcaaggcccgttcgaacctgacgcattccactaaaaatagtgaaattcccaccgacatggcaaaatttcacaagcaaatacaaagcggcattagagatttaaagtaaaacataagtacacgcagaaaccaaccaaccattaacagatggacctccttacccaacgtacaaaatgaggagagcacattaggcacatagctgcttctttggcacaataccagacaaggccacattttccgcgcatgaccaaactaaaacattacttgatattactagacagggtaatgaagattaccataccaaaagtgcaatattcctcggagtcataaaagacagacgtaggcttagtctacttgcatcacaagagaatgggctccgatcacgcattctccttgatggcctcatctatagctttgatattgtccctcagtatcttccactgcacatgttaaaaagaaggtgagtgtttattgggaggaactgataacttgctagtacagtaaccaagatcacaatggttaccacagtagttatgaactagattgcgatgtaaaaagttatggctagcaataagaattgttacaggtataagttatttgtgtttcagtgcagctagaggccagaatttaacagtatgcatatcatatctggcatataatatacttgagatcattctcgtaaattagataggtagttctcaccaatcttgcatagcactatctcctgatgagttcaggatatctaagcatgtgaagcttgttaggaaatttttcataagcggtacttgctatccacaatgcagcattcaaacagataatgatataggagtatcttttaagggaatcaagtttcgtgagcgtgtataggacaaataaaaacactgacctgatccatcgggagctgtatacctgaaaagaagggaaaaggcacaatattagtaatcagggaaactattgcttatcttgagcacattaccgctggtgctggagatatggaattaaattacacaaccactgttttttactatgcatccacacttttatgttataccatgccatctgtgttatctaccatatggaatcaattttagaattggaacccatgttctgggcttagaaaaagcatatgaaagccccggaatatttgtttgcaaacttatcattacactctttggaatctaataccagactaaaactcattcatagctatcaacttgggtgactgtgaataggagtattatcgataaccccccaaagtagatggtctcaaattacaggtgatgagatgagagaaacccatattgttgagggcatatgcaattgaacagggtaaattctccctcaacaattttctacctaaaattgtgaatcagtgatgggttcttcagactttcacgttcatttatacttgcaaatgaccaccagctcaagcttcgaacttcgaacacaatacattaaggaatcattatgtcgacaaacacaaaaatggaaagcaaccatttcgccgataatcatacacggtcctaaaggccagcgggcatggggtatctaagctaacgaagccgctcgtctcaccagcgtcccgcatttagttcaagaaacgaacctcaccctttttttcttgcagcctagattatctcccatgtaaatcattcgttcaaacaggacaccaacaattcaacatcatcattcacaagacatgaacacatggtgtggtactatctagtatctactcaaaaagctagaggtggcatgcctctagcaacatttaacgaatcttggccaatccaatcccgtgctattcacatccataggggaccaaccaacgggaagacagagaagaggaagatttcactgtgatattacctttgcggccggggagggtcttgccgtccttctcgtagaactcgcggatgtcgacgacgaccttgccgttccaggtccgcaccgccaccctcctgttcttcgatatctatggccaaaccaaccccccccccccccccaaaaaaaaaaatgaaaatgaagatccccgccgcgctagggttttagtgaggtttgagtgcggggattagggaagcacctgggcgacgacgatatcgtcgtcggcgctctcggagggcccgtcgtccccggcggcacggcgcttggccgccggctcgccgccgccgccgaaccgcttgttccccttccgccacattcttctcacactttctccctctggacttgtggagtcttggaggaggaatgttcgaatggaatcgacctaaattggaggttttaattcccaaatcagaatagtagtagtagtagtactgaattagtgatggttcagttgggccttccaggccattttagtgtgtggaaaagatgtccaaggccattttaggcccagtatcagtaatcctcctcagcataacgggaaggaattaagggtgaaaacggtacggaaattttccggtcattaccgatactgttttcataaaattaatataatagtaatttgcagataactgcaaatgtagtcactaaattatttatttgctacaacattagcgacctaacagtttgatgtaatgataacggagaaaattatcacaaaaccataactttgaaggcatcccaatgttactgacatttggggcccacatgtcatagaggtggtacccagcataggcgagggacggagggacatgtcagcatgatacgtcggcttgtgcattgcagcgacaccgctgtgtcggcagactgctaagtccgccactttgatttggacgccttgtaatgatctaatccgattgaaatgccactcgtacttaatcagtgcaccaagtcaaaacccgtcaagcttcaaaagagtagagtgtaagacaaaagtaccattgccgtaacctagaatgggttttgacccgattacgtcgacctagcggattcctctgccgacatggcatgatgctacaacgtactgctccgtcccataaaaaactaactcctaactacaaatctggacacatgtatgtctagattcatagctaagattaaactctttttggaacggagggggtatgtgctaatgtgctatgctaacaagtcgtctgggctctatgtgtcactagcttatggtgctcttggacttggagcaaactataaaatatattagtaatgttgtagcaagctgatattttagtcattaaatttacggttatctaaaatttattcttaatataataataataatatctctaccgcctgttaccgtttctaaaatttagtttttctattttttatcatcgttgcattaaagttgacaataaatacctaagttcaaaattttactaccatttctgtaataataaaagataataataataaaatgaccgaacatttccatccctaccagtaatagaaagcggcaaacagacccccactccctagtaaaatcagtaattctagccgtccatctttactttaccctctcccctgttattttctacttatggatgaatgcgcacaatttccaaacttctaaaccattcgatttgtgcagaactttgaatttcttaaaaactgcttttaatccatttttcaactttataatggttagttcattcatttgtactctcaaataattatcacaaattagtactacctccgtctcaaaatataataacttttagctataaatctgattaagcaccttttcatattcataactagaaatgataaattttgagacaggagtaacatatagctatttagtcattagcacaataaaacgcaaacatcgagtctccatccatatctcaatgcatatgacatttttatcccaaaacccaaagaactggattaaactggaggatcagcacattttcattgtttctgtccgtctacatatatatacatctagacctgtcttaatgtaggaatttaaagttttcctacgaaatttctacttcagacaatgcctcgatctaacaaattaggccgagagccccgatctgacttaaatcacttctctacattctccagttgtgaatcatctctctccttttcttcatcctctttacacttctctacatcctccatctgtgaatcgtctttctccttttcgctatcctctccaactgtgaatcgtcttttgttggcactcagacctgatgaatgtagctgccctcgtttcttaacaagacgtgctgcagtttcacgatcagactttgcttcattgttgtcaggctgtggaaacaaataggaaaagtaagatacttatataattttttttgaggggaataagatacttatatatgatagcttgttgttttagaaatatatatcgcagctaacggatgcatggatggtaatcagaacaggcagttggttgcaaagcaaaatggatacctcgattgctaacgccttgtcaaaagataatatagctgaatctggctccccaaaatttaactgtgctctgccaagtgtaacccaaccctgcaagtcaatatatatgaacatatctcattcatgccgctgataaatataagggctgagaactgataggattcacgcattaagtaatactccaggagtagtgtttctgccctggggatgcctactaacctcaggccataatggatccaattctgttgcccctgcatacccgacatagagtaattaatataccagaagtggagaaatggaaatgacacaaatatgctgctgggatcatatactaatatagacttcacatgtgaccaaaataggcaactgcgcagtaattcattcacaaattaaaattattcttcatttttatgtatggaatgcagtaattcttctttgttcttgattgaggccctactatttatagatgttttatgcattttgcaatgacctgttaaaagtaccaccaaaacacacttttgacgggaaaaaagaacatggattgagtaaatcctagataccgcaaatcggtgctaaaatgataatccaattaggaaggatggtactgttcccaactcatggcatcctagtaggtcgttatcattagaatccttaaaagggcaagtaaactgaacaagagcatacatactggttgctgctgtcagtgcacgccatgcatctcccagctcaagtagaatctgagctttctgttcatgaagtattgcattattgggcatcaaggtaagtgcagcctcccacttaccaagtgcttcatggtacttcccttcctaaaacaataacaataagataaccattatctgccttttaaattatcgtttagcgtgtgctgaatgttaggtaaccctgcaggtgcaggccccaactgcaaataaaatctagtacatactgtcaaaaggaatttgatgtaaaaaatga

SEQ ID NO: 13397 - DNA, 1117 bp, Oryza sativa
ccgaggcgaagattgcagatctagagttcagggtatcgagctacgagcgcagcatgcaagaggaggtggcaaggaaggctgatgaacgcatagccgcacatcggtcccatgatccccagccgaccattcctcctgcaatggtgagcccgtcaggaaaccgtagcagctgcgtctcaacggggcaggtaggatcacagagcatggacgccatgcaaacccaggacgaatccacctgccccgttgatgacatcactcagcggacaccatgtgagctgcatattcctttcaagaacttatcaataaaggtaagctcgtagttcatatattttagatttgcccattccgctagttgctgcttatatatgttgattactaataaataacctctcatcacatgaaggtggcgtcgagcatggccatcccaacggacccttcaggtacttaccactgcaggccgattccagcaggatactctgtcacgccctgatgttcccctttttagctttaaaatttgttaaataaatcgcctaaagaaattgttgaattaacctagagttgaatccttaattaataaatgcaaataataatcggaacggacatgtggaatttttcttgggttctacatgtcaaaatatgctaacaggatttttagtggaattttcagagtcttggaaataattttaaccaattaaaataagcaaagtgcaatattaaatccctgggaaaatcctttttcccttttctcttttctttttcctcccttttccttttcttgggccgtcggcccatccttcccgcgccggcccgcttctcctcccctccccaaagtcctccctccctccctctctccttcgggcgccgacaggtggggcccacctatcggtcgtcttcctcctctagccgttggagccggagctccaaccgccccaagccaccgccttccccgctccacgtcgcgcctccactacgcgcccgcacctcgcacccacatcgccggcctctcccccgccttttccggtctcgcgcgcgcgctcgccaagggcggattcaattttgaatcccctcccactctttttttctctcgacctcccacgtcccggcgaaatcgggagcaccc

SEQ ID NO: 13398 - DNA, 1820 bp, Oryza sativa
gaaacgccgccaccgggcgtagcgccacgacggcaccgcgccgcacgccgccgcggcgccacgccgctgcgccacgcgccggcctgatgccgcgcgcggcgccacgctgccgccgcgccgccccaccaccgctccgctgccgccacaccgccgtccagctgccgccacaccgagaacgtgaacgagcgaacgaacgtgaacgagaacaaggtgaatgaacgtgaacgagaacgagcgaacgaacgtgaacgagccaacgaacgtgaatgagaacgagcgaacgaacgtgaacgagaacaaggtgaatgaacgtgaacgagaacgagcgaacgaacgtgaacgagccaacgaacgtgaacgtggaatgcaattataggctggttaatgaacgtgaacgaacaaatataggtgaatgaaacgtgaccttaacgagaacgcgaacgtgaacgatatcgtgaacgaaacgtgaacgtcaaatgcaatatatgttacttcgcgtttatcctaatacatctttttgtatcttgcagaaaagacgttgtcggagttgtccctcaagccggagtggtagagctagccctcgaaggaattcgcccaggtaagtgacgtaattatatatatatgattgttatatttgtaatgtaattaagattattagatttgtaattagacttaattagcatataagattgtgtagtgttctaatatacgacagttacacttagaatacatgactatttgagttttagtataagattattggagttttaatataagattattatatttgtaattagacttagtatataattattgactagctagggtcctataatatacgtcacctagacttagcatatatcactatttgagttttagtataagattattagatttgtaattagacttagcatgtaagattgtgtagggttctaatatacgacagttacacttagcatacatggctattttagtcttagcatataagattatttgagttttaatataagattattatatttgtaattagacttagtatataattattgactagctagggtcctataatatacgtcacctagacttagcatatatcatcactatttgagttttagtataagattattagatttgtaattagacttagcttctaagattgtgtagggttctaatatacgacagttacacttagcatatatgactgttcgtttagtcttagcatataagattattttagttttaatataagattgttaaaacataaatgtctcatgatttagcagatgtttcctgtatgaacagatggctgatcggatgagcgacagatattgtacgatacaatcgcggagggaagcagccagtactggaacgaagaagaggggaacgaggatccaaaccagtatttgaacgaggaagggaacgtggagagggatgcggaggagaaccaggaggggcacgtggaaagggatgtggaggggaaccaggaggaggaggctagtggaagtcaaccctccgttggacagaagagggcacgcgggcaacgaggtgccgcgaagaagctcgagggtcgacacatcataacggaagtggaagaagatggacctagtgccccggcagaagccgccaagaactatgtatgtcacagcggttggtttgtgcgggataacgtgtctgtcattacagtgtactggcgaagaacaagggcacgcggagatcataagagctttgtcccagactcggagaaagagatgttgtggaccacaatgctcgagacattcacccttcccgcgggtacagaggacaaagtgaaaaggtggact

SEQ ID NO: 13399 - DNA, 2320 bp, Oryza sativa
aaaggagaaaggaatccattacgtgagtccaccagctacactcttagcaaggcagagaaggaaagtatgtttgaatgcttggagagcataaatgtaccgtctggatactccacgaatatcaagcgaataatagcacgaaggagaagaagttcacaaacctaaagtctcatgactgtcacgtgttgatgacacaactgctaccagttgtaataaggggtatccttccagacaatgtccgggcaacaataacaaagctatgtgcattcatgaacgcaatttcgcagatggtcatcgatccggatagattagaagcccttcagaatgatgtggtgcaatgtctcgtcagttttgagttgatatttccaccttcatttttcaatataatgacgcatctgctttgtcaccttgtgaaagagatcagtatctcgggcctgtgtacctacacaacatgtttcctttcgagagtacatgggtgttctgaagaagtatgttcgtaaccgtgctcgtctagaggcaagcatcgccaagggttatggaacagaggaggtcatcgaattttgcgtggaatttatcgaagatcttcacccaatcggggtacctgaatcacgccatgaagggagactacggggaaagggaactctcggaaggaaagcaataatgacggtagacaacaatttattccgtaaagcccatttcatggttctgcaacaatcttcattggtagctccttacatcgaggagcacttggctctagttcgcgccaggaacattggtaagtccgatgcatggattacacggcatcacattgatactttccccgcgtggatacgacaacatctcatgggtaacgagtcgatcaaccaacaacttgccttcctggcgaggggaccgtctgggtcgatcgcgacattccagggatatgagatcaatggatacacattctacacgagagcccaagacatgaagagcacaaaccaaaacatcgctgttcgtgttgatgccatgggacacgatggaacaactggcacgtattacggtgccattgaggacatatgggaacttgactatggtcctctcaaggtccctctgttccggtgccaatgggttaggttgactggtggaggcgtaatgattcatgacagtgggatgacaacggttgaccttaacaaggttggatactcggacgaaccttttgttcttgccaatgatgtaacgcaagtctttttcgtgaaggacatgtctagcaaaggaaagaagggcagagggcctgacgagcctaagcgtcacgtggttctcccaggcaaaagaaaaatcatcggagttgaggacaagactgacgaggattacgatcagttggatgggcaaccccctttcacggtgacgattgaccctagcatcctcctatcaaatgaagacactccttactcacgtagcgatcacaaggagggaacaatagtgaggagaaagtacgtgcggtcaaccgtcaccgccgatgtattgccgtaattattgtgcacacgatgtaaactattttggatgtattgattatccatataaatcaattgatgtatggcataggttaattacgcatgattattagaggttttaacaagtttaaatcatgtatatgctagttatatgcgatacttacaatttttaaaagttttaaatcacgcaggtggcaatttcatatgtgaattagagtttttaacatttaatttactatcattcatatgctaattataattgactagagaatttttaaaagtttcaaatcatgcatgtggcatttacatatgttaattagagtttttcacaatttaatttactatcattcatatgctaattatatatgactattcgaatttttaaaatttttaaatcatgcatgtggcatttacatatgttaattagagtttttaacaattaatttaatataattcctatgctaagtatatatgatgattacaatttttattaattttaaatcatgccgtatgtatatacatatgttaattagagtttttaccaatttaataatatcattcatatgttaagtatatatgattattatattttttttttattaattctaaatcatatatttgcttattacgtcgtatccacttaatttattacagacaacaataatttttcaaagtaattgtcattaatctttgtactttaaataattgcaatgcattatcttctattttaaaaacacatatgtaatggagaataatattcattgcgcttatcagtagtcctggttcttaaccctaaccaggtttttaaagaatttggaaatagcgggaaaaga

SEQ ID NO: 13400 - DNA, 5856 bp, Oryza sativa
ccgcctctggatcagcgcggggggtggccgcgcgccgcgcgccgcggatccgccgtggggtggccgccgctggatctgccgcagccatcacgcgccacctcgtcgtcgacgccgctgtcgtgccccaccacattttcgtcgccactgtcgccgtagaggaaggccggggagagcgccagccagatcggcccggggcctcctcgtcatcggcccgccgctcccgctcgtggtgaaagaaagagagggggagaggaagagagaaatgacagagagaggggagaaatcaaggagggggatgagaaagggaggagtgggcgcggctggattaaatggtagacgcgtattttcgtgtgcgaaccacttaacacgctattttcgcgtgcggacgtgttaagtggcccgcatagaaaaaattaatttttctgtgtgggtaactgcctgacaccggtcctatgattattctgtgcggttttccatatgatccgcggggaaacaaaagtgttccgcgtccaggaaaatgagttgcgtagtagtgttgtacctgctattagcagcgggcggaggagctcgtttaggatatctacttgacctaaatatggtactgggtatatcatgtcttgtacctcataggaactagctgatatctacgtggtatcatacgtggtatcacataaatatcgaacctggtatttgataattatatcgttccggaatcggattccgtgcattagctccctcttaataaaatcaatggtcaaggtcttttaaagtcctattaaaactaaaaggcaacttgaaaaggtgaataattaaattttcgaacattaaaaaagataaaatatatggagacaaacacgtgccgaatttgagttaactatattaggggatttcagttaaatctcacaaccacctaatttgttcgaagattcgtgtcttagcccaccttcaactctagcgaacatgtctctcctctaatccaacatatcaaggtctggagttgaaatccaacaactttactactacctccgtcatagaaaaggagtcattctacatctccaacaatatctcacaaaacgtgtcgttacagtggcgaacttgattagaaaagtgggctatctgtccatttctgtcaagtcatttgttaacgagtgttcaaagaattcattaattaattatatgtagggattcttagtaacatgttgagtgtatgataaattattgaaatgacaactcaattaaataaataggggtaatttagttattttaatacaaagataatttggttgacaaatcttagaacgtcaagaatttcttgacggaagaagtactttacttacatatcaaggtctgtagttgaaagccaacttatcaatgagtaatgattcttagctttgattataggaagccagggaggcagtgatatgacggcttgacaaaagggggtggcgcgggtttggtaccaccggagccacatgaggaggctgctaatacagagtgacagagctagaaaatcttcacgcatagagagaagctaatgggaccttaaatatttttagtaaatcatatatccaacatttttaagataataataaagattatggagctagtctagggctgaagccttagttgctcatgcgtattttcgcctatgctaatatagtgagagtgacaacaagccacggctgtttaggaggcaaaaggctattacactactatagaaatgtcaaaataggactatactatatgtgccagttcataaaaaaacagcacttatgatcttttctcacccctcagacgcgtctaaaataaaaaccgacacctttgatcccttgcaagtgccggtttattaaaaaaactaacagggttataggtactaattgtttttttagaaaaaaacgacacttacgaggagctgagccgacccggcctttcacgggcgttggtttttcacatacgccgagggacacatcctctcccttgtcctcttgtctctccacctctctcgaaccctctccacctctctccaactcctttctctcctgtgcaacaacgcaatgacctccctttactcgatgtgcattatttgatttgtttttggaataaacttgttgataaatggttggtttctatgacgaaaacttatcgatatctatgaacttgtttaatatttgatatgaacatttctctcttttttttagattttattatttatttttggtggctttgtggcatccgatataattgagctgagtcagaccgtgttttttttttcaaaccatatatatacctctcaaatgtgtcggttcttgattcatcctcatcaataccgcctgaggggtgttggttgggaaatatgttacctatgggagttcccaactgacaccaatgatatttttctatagtagtatcataatactccctttgtcccaaaaatataacaaactataaccgaattagatatattttagtactacaaatcttaacagagtgcatatctagattagtagttatgatatgttcaatccaattctacattactatgttttaaaatattttaaaaaagatgaagtagtaaacttggactcactaagaacatgcatgacgacccaaggcccggtgatcctaagtaggcgtagtctcaccgatgggttaacattttttagactacatgttagagacccggcttttaatcgaaagccatccgataggttaacataactatgtactaacatagtacactatcttatgattttcaccactacttacgcatactaggtagctcccatgtctagagtatagaaatatgtagccacacgacagccgacagaggatcagcctaggacggattaagaagatgacgtgaccgatcacacgttgaaagttaggtggccgcagtacgcggcggacggagggagatgaagcggtgtggaaaatcaacgtcgggggtttacctgaagcgcgctagctcgctcgtaccatgtgtgagatcgatcggtgacatgtgtgtgcgtggcgcgcggcgtctcataacgtcaaactggttctcggggtggttacgatcaagcatactctgttctcaaaaaaaaaaaaaagcatactacatcagttataaaataaactaatctcatatggtacatcctaatacaataaatctgtacataagtatatttattgtattaaaatgtatcacattcggtatgatgttgatttattttgtgacagagaaaataacatatattacttgcactggtggaaaaaccatctttcgtcggtcggccgaattccacgatagtcccggatgcaataaaaaccggggctaaagatgatctttagtcttggttaaaaagggtaacgggcatatttgatctttagtcccggttggtaacaccaaccaggactaaagatgatctttagtcccggttcaaatgctgtcagggcctgtcaggccccccggatctttaattccggttggtaaagatcgtaacttcagtcccggttggtaataccaaccgggactatagatctcggggatctttagccccggttggtaacaccaaccgagactaaagtcccacccctatatatatgtcttcttcctcctccagctgcccaagcaagcttcaaaatttcttcaaaaaagaggggaggtcatgccaaaatttctagtgaatttattttgatgattacgtacaaatcggaggtgcctaaaaggtttccaacttcatcctctaatgtttttttgtcatattacatttgcagctatgttttgcacacttttttgtctctaaaatttagttgtaagttgatgaaggagaaaatttgtatggggaagaaagaatatatagaaatttagttgatttgctaaagaagtttttataaaatagttgagaaggaaaactatagtgaaagttaatcttgaatactagaaaacaaactaaaatgaaaattaaaagaagtaaaacacattaaaattagtttaaaactttagaaatagtaaataagaattatttggtgtaatattttatgatttttgtatgaataaagatatgtcattattgtatgactgttgaaacagtttgtaattatcttataattattgtatgattgtcattattgtaagaataattatttttgtacgattttttttcgactcatgtagatggatcggcaatggatgtacgctgaccggcagtccaaagagtttattgacggcgtgcactattttttgagagtggccgaagctaacaggcaaaggggttttatttgttgtccatgcaataagtgtaagaatcagaaggagtattctgcatccagaactattcatttccacttgtttgagtcggggttcatgccaagctataactgttggacatcccacggagagtaaggtgttgaaatggaagaaaatgaagtggaagacgacaatattccggactttgctcagtacgttggatttgaaggaaatcaaacaggcgaggaggaaagggatgctgatggtaacgacgttgcggatgattttggtcagatgttgcaggacgccaaggaggactacgaaagtgaaaagggggaccataaattggacaagatgttagaggaccacagaacttcgttgtacccaggttgcgagcaggggcacaaaaagttggataccactctggagttcttgcaatggaagacaaaaatggggttagtgacaaggcatttggcgatttattaaaactcgtcaagaacattcttccggagggaaacaaattgcccgagacaacgtacgaggctaagaagatagtctgcccgctaggactggaagttcagaagattcacgcatgtccgaatgattgtatcctatatcgcggtgaggagtatgagaacctagaagcatgccctgtttgcaaagcactacgatacaagattagacgagacgatccaggagaagttgacgggcagctaacaaagaagataattcctgctaaggtgatgtggtatttccctataataccacagctaagtcgtttgttcaggaacaaggggaatgctagaatgatgcgatggcacgctgaagagtgtcaacaggattggatgctgagacaccccgccgatggttcgcagtggcgaaacatcgacataaaatttaaagaatttggaaaggacgcacgaaacatacggtttggtttgagtacggatggcatgaatccttttggagagatgagcagcggccatagcacttggcccgttacgatgtgtatctacaacctcccccctggctatgtatgaagaggaagtacataatgatgccgattattattcaaggccccaagcaacctggtaacgacatcgatgtgtacctaagaccactggtcgaagatcttaagctgttgtggaagaaggaaggtgtccccgtgtgggacgaggacaaacaggaggagtttaacatacgagcgctgctgttcgtaaccatcaacgattggcctgcacttagcaacctatccggacagtccaacaagggtacaaggcttgcactcactatatggatgaaacagaaagtacgtatcttaagcactgtaggaaggttgtatacatgggtcattgtcgattccttgcagcaaaccacccggtacggaagaaaggcaagcactttgaacataaggctgaccaccgtacgaagcctaaacatcgcaacgggaaaacagtgtttgctatggttaaagatcttaaagtagtgttcggaaaggggcctggaagccaacctatagagagcgaagatggtcacgcggcgatgtggaaaaagaactctatattttgggagttaccctattgggaattcttggacgtacgccacgcaatcgacgtgatgcacct

SEQ ID NO: 13401 - DNA, 1779 bp, Oryza sativa
gcgggcgcaccgcgggagggtgaaaaagctcagcaagctcgcgctgcggcgggcgcgggactggcgcgcgcgcgtcgcgggcctcgcggaccgcgtcctggcgctggcccccggcgcgcccgtcggggacgtgctcgacggcgcgcgccccgcgccggacgagctcgcgttcgtcgtgcgcgcggtgggggtggcgtcctggcggcgcgcgctcgacgccttcgagtggctcgtcgcgagcggcggcgggcgtgccccgggcccccgcgtcgtcgccgtcgtcctcggcgtcctcgggcgcgcccgccaggacgcgctcgcggaggatgtcttcctccggttcgcccgcgagggtgccaccgtgcaggtgttcaatgccatgatgggcgtctacgctcgttctggccgcttcgacgacgcgcgccagctgcttgacgcaatgcgtgaccaggacatcgagcctgacctcgttagcttcaatacccttatcaatgccagggccaagtctgggtgtttggccgctggtgtcgctcttgagctcctacatgaagtccggcaagctgggctgagaccggatgctatcacttacaacaccctcatcagtgcttgctcacaaggttctaatttggatgatgcagtggcggtgtttgaggagataatagcttcagagtgtcggccagatttgtggacgtacaatgccatggtctccgtgcatggccggtgcgggaaggcacaggaggctgagctgatgtttaaggagctggttgagaagggttttcagccggatgcagtcacatacaactcgctcctttatgctttcgcgaaggaaggcgatgtggagagggtggagcgtgtgtgtgaggaattggttaaggctggtttcaggaaggatgggattacttataataccatgattcatatgtatggaaagatgggcaggcttgacttggcgcttgggttgtatgatgagatgagggctataggctgcactccagatgctgtgacctatactgttttggttgattctttagggaagatggataggatttctgaggcagggaaggtgctggaggagatggctgatgcaggattaaagccaactttggtaactttcagtgctttgatatgtgcatacgccaaaagtgggaggcaggatgatgcggagcgtacatttgatcgtatggttgagtcaggtgtcaaacctgatcgtttagcctatttggttatgttagatgtttttgcaaggtctgatgagactagaaagctgatggttctgtaccgggctatgatcaaggatggatataagccagatgatggtttatatcaggtcttgcttgctgcactcgcaaagggaaatgaacacgatgagattgaaggagttatccaagacatggaggccgtttttgaaatgaatccactagtaatatccagtatactcatcaaggctgaatgcatttctcagggtgctagtctgttaaagagggcatgcctccaaggatatgagcctgacggtaagagcctactgtccattttagacgcatatgaaaaaatgggtaagcatgaaaaaggtctctctttgcttgaatggatccggcagcatgttcccaactcccacaacttaatatctgaatgctcgatcatgcttttgtgcaaaaatgggaagattgttgatgccattcaggagtacagtagaaaacaaatgttaaaacgtgatcctttggtcaagactgcgacttgtatgagtacttgattacttaccttgaggaggctgagttattt

SEQ ID NO: 13402 - DNA, 1798 bp, Oryza sativa
tgtgcctattatcatgtccaccacatcactgacgttcatttagctgacctcatttgctgtatcttttgcttatgagtgaattgaaattataatacaatatgtaacttgtttacatcttttagctgaagtatttacataaagatctacttgacaggctagacaggcttacctgattggcaacaaagctctagccaaggaattgagtatgaagggacagacatataacacacaaatgaaagcatctcatgagaaagcaagagaagctatttatcgacagaggtcgcctaactggttccctgttctttctgcgctggatggaaaatccttttcatgccaatttatactttgtccacccgattgacaagctgcgccttgtactgttcctaatatttacaagtacacttaacatatcatatgtttttgttgcaatgttcctcaggaacccatcttcgcaacgagggagcgaccgtctgatcgatctacatggtctccatgtgaacgaagcaatccatatacttaaggtcgagctcggtactcttaagagcaccgcgagggctacaggtgagaggatgcaagtcatgatatgtgtcgggacaggtcatcacaccaagggttctcgcaccgccaggctgcccatcgccgtcgagcagtttcttctggaggaaggcctccactacacgcaggcacaacctggtttgctccgtgttgtggtgttctaacatctcttaggtcagcagcacgaagaaaaaagaagcaaaacaaaaaaaggagaaagagatgtagggaaaagaaaaacctaaaaaaaatggccgctgttgcagcactgtaattttcttgtagttgtatattaaaagaggcagcaggagaatagcctgacaacagaatacagtgtaaaattatacatagcttcattcaattcacattccattcccatccggttgttcttgcatgttcttgacgttttcttttgaggtactcgaaggttgtttgggatgcatatgcgatttagtatttgccatttcttgctgatgattgatgatgaacatttctaatagaacgagttagaccatgttttgaatttctgaaaattctcctggttactgtggttgttgctggaacggaaactgatcaagggcctgttcactttgatgttaaaaaaaaccttaccaaattttggcattgctaaaattgctaaaattttggtatagttaccaaacttttgacaggattttttatatactttatccgtttcacaatgtaagttattctaatattttttacattcgtattaatgttaatgaatctaaatagatatatatgtctagattcattaacatcaattttaatgtgggaaatgctagaataacttacattgtaaaacggagggagtagttatcaaaatttagtagcaaactaaatgtaaccacttttttttgacatcaaagtaaacaggcccgaagtttagctatccaaatatgccccaaacgttcaaatccaaacgaaatatgttgaaaaattgaaattatgtcggcctgtcagaggctctttcatcgcttctgaaacactgaaactgcagctacgaaatttgagacagatttttcaggagcagggagacgcgcgaggaaaaatatcttgcgctcgattagtgattacccgctcaaactcccgcaacgttatcatctccactcttccacctccatgcccatgcgcgactgatccgccgcccaacgcgatgcctctcatggccgtcgcctcccaacccttcctctccaccttcacctccacctcctcgcgccat

SEQ ID NO: 13403 - DNA, 666 bp, Oryza sativa
cgtccgccggggaggtcgaggccctccgcttggcaggcgaggtagggcccggcatgcttcgggacgccgtctcccgtctagtccgcgccgggcggcaggcgggtctctggggcgggcggactgtgaagtacgccgccaaccaggggggcctcgcccagcgcttctcggagatggccgggactctccagcggctccccgaggagctcgaggggacgattaagtcatcctcgagggacctcgcccgaggagcggtggagctcgtactggcgagttaccaggccagggaccccgacttctccccatggacggcgctggacgagttccctcccgggaccgaggacggcgcgcgcgcgcaggtccgggatgccgccgaccatatcgtccacagcttcgagggttcggcccctcggctcgcgttcgccctcaactccgacgaggagggcgatgacggcggtgtgggcgacagtggcgacgaggctggcgacccgggtgcatcggagtgagcccccaggcccccgccaatctttaaatagtttcttcttttcttcttccgaggccttcgggcccccttcttgtatagactaatttaatctgcaatcaaataaagaggaaattttttgtgtcaattctatttgttgtgtgtatgacacgaggatgtctgtgccg

SEQ ID NO: 13404 - DNA, 1148 bp, Oryza sativa
aacgtgccatctccaggagctaacacgccggttccggctagggacgagtgcttggaggctctcgtcctgacgggatggggcaaggcgtgcgtcagaccgcctgtcgccacctaacccacgatctgaccggtctgtgaccggtcacagaccgaataaacgagcgcgctgcactgcgttacatgcggcgtgacgcgctcgtccaaaccgtaataaatgtggttaggtgagccccgctatgctcacctaccccatatacgcggcgcaaaacccacaaggggtcggggcgcctcggccctcggggccgaggcggtagcggtccgacccctcggggagacaaagagaagggcggccgtatcaccctcgggcccgacccccccgagggggttaggccacgtgggcgatcgtgtctgcctcaagtctctaagtcatgatactcctggtcccatgtcaccgacagtagcccccggcgttatgccagggcgatcgccctcctcgagggaagcggtcgggcgtgacgccacttcctaaggcctggtgacaggtggggccggtctaaaaatcgggacaagccggttcgtttttcctggagatatgatgatggcgcttcggtcggcgagcgtaattaacgcgcgcacgagatgttccatctagactgccacagccgcatatccacctcatgcaccgcaaacgggcgaatgggattagtggaagcgtgggcgcgagaaacgagggggcaagatagtgggcgcgagaaacgaggagccgggcacagcgttggcaagggtataaagtcgccgaggaagagatttgcttccttcctctcactattattccccttgtcttcgccgcttgcgccctaactccttgtttcctgtgccctaccttcgccacacgcgctcgctctcaaacatctcttcttccggcgtcatggcacggggctccgctccgcttgatggtagcgtgctgccgccttcccgcatcgtgagcgagagacaggccgagctgccgcgccgcttcatgccggaatctgccaccggccgggagatagtctcgctgggcgagggatgcccggcgccacgctacccggggcggtccgtcttcttcctcccttttgctatggcagggctggttccgccattttcttcttt

SEQ ID NO: 13405 - DNA, 914 bp, Oryza sativa
ggcaaaatttatagggtcaaaatggaagtagatattttatcaagaaacaatacaaggctactggtgcaggtaagttgtataagcatgtggcacatttcactcgtacacccatggatgcaaatgcatacgagatgcaactgagaccacaatggatgatgcttacctgctcaaaacatgcatttcggatgcgggcaaaatcacgggcttctccccttgattctgagtacatgtttgctattgatttgcatataaacataaagagatcagtctatagttgtggaacagaataaatcatcaaacatacaggagggaaacacgctatccacacaaatgacttggtatatcaagatgggcattacctactgcatctccagtttcgagccatggagcagctcttgcactgctaacactttgaaacttgtttccagaagatgttttggtcgtagaactgtactgcttgggtacagaaacagttgaaacaccattaccgtattcaggacctttcttatacttccaatggccagaattttgcgatgcaagtttgcgaacagctgaaacaaaatcaccagtaccagtagatacagagggtgagctgcgtccattgaagatgcttagaatatctgcattgcctttggaaaaaccattttggtcttcaactgttggcagtgcggggaagtcccctgtgctaaagtttggtgtcctgggggtcagagttggattggaggtagcatcaacttgcatctgaaaaacaaaaatgatatcactagacagacaatgtaaaaactgttaaacatgctagtgcccgcagaagatcaagatggtcagcatgacaatgggatgcaagtgcaactgcaaccagttattgctgcgttcctaacgagctctaccaaaaaagagtaaatttcagaaaactg

SEQ ID NO: 13406 - DNA, 766 bp, Oryza sativa
  unsure (1)..(766): unsure at all n locations
tcgggnnnntttgattgcatgtctnaacnnnnnnnnnnnnnnnnnnnnnnnnnnnnnnnnnnnnnnnnnnnnnnnnnnnnnnnnnnnnncaatagaatttggcatgagattggattgcttttagtcagcctcttatagcctaaagtctttgagtgactagatgacatatcatgtaagttgctgataggtttccagttttccgctcctaggtctgcatattgtacttttcctcttactcgacttaaccagtaccaacccagcttctcaacggatttataccatggcactttaaagccagcatcactgacaatgagcggtgtggtgttactcggtagaatgctcgcaaggtcggctagaaattggtcatgagctttctttgaacattgctctgaaagcgggaacgctttctcataaagagtaacagaacgaccgtgtagtgcgactgaagctcgcaataccataagccgtttttgctcacggatatcagaccagtcaacaagtacaatgggcatcgtattgcccgaacagataaagctagcatgccaacggtatacagcgagtcgctctttgtggaggtgacgattacctaacaatcggtcgattcgtttgatgttatgtttggtctcgctttggttggcaggttacggccaagttcggtaagagtgagagttttacagtcaagtaaggcgtggcaagcaacgttaagctgttgagtcgttttaagtgtaattccgggcacnaattggtaaagagagtcctgttaaaa

SEQ ID NO: 13407 - DNA, 7545 bp, Oryza sativa
ttttttttaatgagcggtacatatatattacgcatagttcaaattactccctcaactattgtgttcattcgatttaccatcatccttcactagctaggatatgtggtatctaaattgatttcacaagttgcgaagaggttaaaggttcaacattgcattttctcgagcgtgagttttcttcggtctatatatgatatatgtacatttatttattgttaattagttaacaagtactacataatacatcctctggtttgacactacgtggcaaaaaactaaaaacattgaccttttgcttttcgatcttaatcaatttaattagttggtctagtcttttctcggttgcttttcgatctcccgaggacgagcacgcaagaaactttaatttcattgatattatttttttcgcaaattatttttctccgtactatttgctccttgtaacaacagtgaatggatgtacgggttttttttttctttttttatttcagcaggcgcgtaagccaaggcaacgtcaggtaccggcccctagctagagcactgtgttcgctttggcacatactgatccatctgcgtatttaccgacagggtatagtattactgagttagctagctgctactccctccgtttcataatgtaagtcattttaccatttcccacattcatattgatgctaatgaatctagatagtgtaagtcattctagcatttcccacattcacattgtgaaacggaggaagtagctagtaccagtacgaacaaaactgatatgtttaaaaaaacctgaacttttttttaaaaaaaaactatgctcaagcttaatatcgatctgtattttttttaaccgccagcggtcgacttacaaaaactgattgatattttagctgatttttttacaaagttgatgaaaaatcatcagtttatactagtttgttttggtcggttttcgacgaggagtggttttcaaatctaaaattaaaaagtaaacatatcctggatacacgtttatactagtgcatgtctgattgttcatatgtgcgcgtgtgttagataagtctgtaaaaatacagaggatgcattcctagtatgagaataaatatagttggttatatacacgtcattgtaattcgaaaatcactataacaggtcgtggatactctcctatgacttaaaaaactttgtttcatgaaaccggcgattaatgattatcaatattaacctagcttattccttttgtggtgcgcatcggcaaaaaaatgagtggaatctgtgagaattcaaaaaattcaaagaaatttttttatcttaaactatttttaaaacataatcgtcatcattcttcctcccataaatccccccccccctcccttaaaaaaaattagctccgaaaagccacaaaacaacccattatgaaaaaccggtgtagaaaggaactgaatcatatttctatcttctgatcccgttgcaatgcacgggcatgtaacaaagtagtacactccgattgtaaacatgtacacaatctgcatttcttggttatgtgcgttgttttctacccaaataagtggccatgaaataacgaagcattccatgtagatgtgaaattgcatttatagcttctgcctttctatgaacagtaacacaaatgccttcttcaattcaaatctttgcatgcttgtgtacgtccaattaatactctctacgtataaactgcctttaagcacgttacagtgcttcatttagtctcccacagttgttgacaataacaaaccaagcgaaaggaataaaacaatgtcacgatactgttctctcatatgcgcgcgcatatgatatatagctcgggacaaaaccagatgaaccatttctgtcagcataagaacaaaacgcacagctaaactttcagaagaaacaaagaagcaatagcagtacttatgcaagtgtacaaacaattggtaccttggcgtttaattcaaatccaatgttcgacaaatcacacggccggttcccataccgattcacaaatgcaaagcttacaatacttgagcaaatctttaatttgctctctggtgtgttcagaaacgaggtactaccactgctgatgaatatgaactcataaatggtactcgatctactataattcctggagcgaagtgcatatgcatgtatagctattactcctatatcatggatgatgaagatcatatatatgcaacctgtacctgctcacagtgctcagcgttcaatggattgtatagctagctagctacagacaccttccgccatagcctgcgctcctgaacaatgtctgcttgatctcgtcggtgctgacaacttgcctcttcccgtcctcctatcatgcattgtcgacgaacccattcaatattgaaacaagagattaatcaaaacatatatatgcctatatatagctataggttaatttgttcgagcaagaaatcaaggtatagctatatatcgaccgatatagatgttcagaaatccgcactagctaagttgctatagctatcaagaattcaagatagatatatagaacttacttgtaagcaggaggcctgcatgccaaagtcactgaagcagctcacgacgcactgctcgatctctagccccagcacctccagcgcgctcaccgtcgacagcagcacgccggggttcgccgggcagcatatctcgatcctcgtgttcccgctgccccggttctcgacatcgaactggaggaaaatcaaaccgcagtttaattagttagtttcgccccatgcatcacaaagttcgatcgcaacaaccagattaatttagctgcgcggacgcacaagaaatatacaagcacatacatacatgccaaactaaaactccatcgatgcgatgcttgcctgcgtagctaagctaggtacgtaccttggtggaattcctcacgagcatctcgttgttgttgccgctggaggaatccttcatcgtgttcaacaggtcgagctcctccggcgtgacgccgatctcctcctcgagggttttgatcctctccgtcagctccttcacgtagtcgatggtgtcaccaaggatcgaggtcctgtccatctgcagcgcgagcgagcgattgattgattgtttaattacagatatatgagcacacgggacacggagacaagaagctagctacagctagctaggtcaattaattaggtcacaagacaacaatacaaatcaatgtgtgtgtcaccttgctaatcttgggcacgatggaccggagcatggacagccggtcgttgagccgcttgcgacgccgcctctcggccatgaggttcttcgacggcgtgccgtggagcttgctccgcgggtggacgccgccgccgacgcctctgatgccggccatcatctccgagctctctccggcgccacctccaaacatgaacgtcggcgacgacgagccgccgccgccatggagcagcgccttgtcgccgctcgtctcctcctccgccaccattgcgtcgcggagaggagtgagctgcgtctgcgtctggctagccgcctccgaggggacgagctgggcgccgcagctgcggtacgggttgcagacctcgctcaagcagtcgaagttgaactcctcgtgcggatgctgaggcggcggcgccgccatggacgccagctcctggaacggcgacgcgtccatcccgcccctcgcctccgcgctgccgccgtcgccgccgtagaagaggaggtcactcatcatcatgccgccaccgccgccgccgccgccgccacccgggtacggcggcgcctgccacggcgccgatccatcacgccgcagcgacatgagctcatccaagaaggactcctcgtcaagctccatgcctcagctagctagcacctgcagcaagctaagctatagtagtatatatgctccctttcctcgctagcagtcacctctcctgcctagattgcccaaaccctcacgcttatactatcatccgagaccgggacggcgagtagctaagccacatgtccaagttgcaggggggagcagtggcagtggcagtgcagggatggaatgaaaacggccgtgaccagagagaggggaatatgaaatgaaatggagctaggctagctgggggcacggaagcaacctgggaaatgaaacgcggtgggccgcgcgaggttggggttgccaacccaacccaagcaagcaatcgagcgacaattattcctcgcagctagttttggtttggtgcgtgcgcccatgcagctaggcgccgctaactagggtatatcggtcggtaagggctcgcgcgcgcgcgccaactggctggaccgccgggtcgcgcggtcggtcggtcactagctcgcgcgcagtctgagaatggaatggaatctctccacttgtttaatcgcctggcctggctacattcggtttcaattatcgaccatgtcgttttcgcctgaaatctgcaatctcgcggaagaggccttttaaaattcatcctgtatgtacgtcgctggctggcggcgatcgaggttaatttgacggccggccccgcccagtgcaaaaagaatttggtcgcgcataatttatatcttaccccctccatagctagctaattaatcggcgtacgtcgtcgtcgtgtacatacatagggatagggccggggtgcagtagttgtcacggccacctacagctagagggagcgggagagcgcgcgagtcaccgcggagtcaaaaagaacgggctagtgtagctaaacaaaaacgaacgcgcgtaatacgtaaccctcagctctgtgttgtttagcgcccagattcccctgccaatttggcgagcgatcggtggtcgggtcgggtcggggtcggccccgcgcgctagctgcacggtgagatgccatgggagtacgcgcgcgccagttgataatttgctggtgctgtggagacgtcgcgtgcgcggccggttcatgcctcatgcctagcgctactagcttgatcgcctcgttctcgagctgatcatcgagaggtagccgtcggggaggggagcaggggcgcagccgcgtcgctgtcgccgatcgagtcagatcagatcgcccatccgcgtacgcgtacgcgtgtacttggtggtgtgctggctatcaacgacgtacgtgccgagcaatcgatcgtctcctgggctattggctatacgatccaatatacgaatgcggcgcgcgagactagctagatcgatcgatccggccgatcacatcattgccgtttagttgcgtgttcgctgggagctcagcttattagctatagcgaacgagcagttagtagtacgtgcgtgtgatgatcgatcgatatatatgaaccgatcgatcgatccgagatggaatatgctggagtggtgggtctcattatctgggagatttgagggggattaatcttgattcggatgagctatcagatctgatggggggcatggataagattaaaacaatgcgcatggaacaaaaaccccagtcgattgtttatccgtcaagattactaattagacttgctgtactacataactttgtccttggtcgcgggctaccaatttaaatactcattttgtttccttgcaatgatcgtacgtataactagttgtagtatatatacttcttctattaaaagaaaaactagtcgtagtatgcatgagtacgtatttcttgtttagaataatgccagcactatcaactggatagaaacgatgctaactttttttgtatgcacgcaatatatttccagtaccaggccacgccaactcatcacccccaatgaccctcccaaaaataagtccgacaaaactgttagcatcttcgtcgacccatgctctataatccttcttatatatgtgcaccaaaattggtcttcactaactaaactaaataatggcacgcttttttaagcccatcacttctctgttattttcatccatcggtgatgaacctacagggctacactaatatcaaatgagagtaacccaacgaatctaagcccactacatcatacaatatccaatcctttacctaatatgcatttatcagctatcttggcatattaattaatgttccatgataatatatatatatatatatatatatatatatatataaagacattgcacttacatctattagatacatatacaatataaacatttgagaatactaattcatatgtttgtgttttgctacggataaaataatatgttctaatatatgttttttaaggttggtggagcaataatactggtagaataatttatgttgctaattgttttcattttaaaatatatagattgcatacaagaaatgagtgcgcaaaatctaaccccaaaagcaaatcagaaacaacatagaattcactcctatactggccacgtccctactccagctagcactatcttgaaatatcttactaggttgagaacggcggccaggagtgaagcgccaacctaggttcaattcctattggacccaggttatctcataattttcttctctatcaattatagatgctaaattcctccttggtactataaacaaaattcgctcttcaagaaaaaaaatgttactacgttgatgtatgtcacgtcactgaaaaacttagggggtgtttagatccaggggtgtaaagttttggcgtgtcacatcggatattatatagggtgtcgcataaagtgttcgggcactaataaaaaactaattacataatccatcaataaaccacgagacaaatttattaagcctaattaatctatcattagcaaatgtttactgtaacaccacattgtcaaatcatggagcaattagtcttaaaagatccgtctcgcaaattagtcgcaatatgtacaattagttatttttttagcatatatttaatactttatgcaaatattcaaacgttcgatgtgaaatggtgtaaaattttagggtgagatctaaacaaggccttagttttcagaccactagcctgtcttaactgtagaggagaggataaatgttgtggtgatggatctctagtagtttgccatggactgcggttgatagagatggaaaatggtatgtgtagttgcatacgagatgtcggcttacgattttaatacgagcaaacaccacgctgtcggtatggaagtggaaccaatttttctatgggaccaaaacttagtactgtcaataacgttagaagagaaacatttgatcggacaagtatagcaaacagaagatggtacgtataacggagctcgatagagaccgtggcagcgtggtcctgggggcaaagtagctattgcctgtacgaagcagttcatcacatgcatggattacccctctgaagaggtactgcagctgcagctgtcctacaaaagcttttgcttacgcaagcgaacaggatccagaatcatgttccccaagagcaacgatccaaaccaaaaggcgcacatgcatatgttcgtacacggtacacaccgctactagcctactacaccccatgcgttgcatggcattcaccaccatgtacagaccggcccgcgccccc

SEQ ID NO: 13408 - DNA, 4816 bp, Oryza sativa
tatgtgtgtatgacaggttgatatgatggaaaaatactgaagtttagatccatactttggatctaaacacagcccaagttaaaattgctgtgctcgtaacaaggccaggtgtagatccaagagctctgctgccagttgcttttccagtctggttacctttcatggaactgatttaggccctgtttacatcccacccaaaaattttcaccatgtcacatcgaacgtttaaacacatgcataaagtattaaatataggctaaaaaaatgactaattgcacagattacgactaatttgcgagacgaatcttttaagcctaattgctccatgacttgacaatgttgtgctacagtaaacatttgctaatagaagattaattaggcttaataaattcatctcgcggtttactgacggattctataattagtttttttattagtgcccgaacacctcatgcgacaccctatataataccttatgtgacacgccaaaactttacacctttgaatctaaacacccccttaactgcgaggctagctctctggctgtgcgcttgtgccgaaatcacttcaagttcgtccatgctgctaacaacgttgaagagctctggttgacttgacatagaacatggacacaactacacatggcctctccaagctggccccaaggtacttgacaccgcttcctcccataggattaaaaagagcaatttgatgtagcttatgggttttcagcaagccagcaatatatttttgcctcgttctaaacggcaaatcgccactggtaacgttcagagcagcataaggcaaccaacagcaagacatcaataggagcaggttttgcagctcaaccagtgtagtaaatccatgggtctccatactcccatggcactgtccccctcagcgtccccaaggatgacgctggcatgcccagactctagagttgtttagtcataattagattctcatcgtacagtgtttgttgcatagagaagtttcttgatagttttaagatcctacaattgttaaatatttatatatatcccaaagaaaaatgttgcaaccaccatgtctgatttctgtgtatattattgtttattaaatccaaaattgaagcgttggctgtgtcacatgtgaaaatatgcagagaaagtgcattaacgactgccttggagtgatacagactttgagggacctagggatgcagccataccttcattaagctgcattattttgaggcagacctgggtattgaagtccccaattaaattgtacacttgtactaaggccctgtttagatggggaaaagaaaatttttgggtgtcacatcagatgtttgaccggatgtcggaaggggttttcggacacgaatgagaaaactaatttcataactcgcctagaaaccgtgagacgaatcttttgagcctgattaagccgtcattagcacatatgggttactgtagcacttatggctaatcatggactaattaggctcaaaagattcgtctcgcgatatccatgcaaactgtgcaattagtttttgtttttatctatatttaatgctccatgcatgtatccaaagatttgatgtgacgtttttgggggaaaaaaattttgagaactaaaccaagcctgaatagattcatacggttttgttgaaaaagttcgtgtaattggaatgggaaaatagcagttcagtccaaattgcttccttgaaactaaatttatgaattatctatatttatttagtagttttaactacatggattccacacaagcagtgcaggtagtagtactaaactagtaacatgttttgatctgttaaactgctataaagactagctctaattctgtaccacgagatgtttgatatatatttgaggtcattcagggagaagcaaattgcgattgggagggaacaaggatgtaggatcttggacatggatctcttgaaagattgagataggcaccactggggatcaaagaatgagccatgcacaaactataaaagtaacaagcacgaactgtgcttgtgtgatctgaaacctctgattacaagagactagagagcatcaggctcataaaatctcacttttgatttttaaactggggttgcatcatgcattcatttctgaaggtatttgagggcaagtgacaattaatgagttgcaacagtacaaacccttaattccatcctttcttagcaaggataggtggtttaagatgagaaaataactaactttgctaagctaacttgtgggtcatggcatgtacaagggaacacagtagcacactagtgccaatggtgatgctcaattggttagagtccggaaattttgacacaaatcggcatgtgacgtcctgtgcattttcaacaaattttatatcaaaatatactgatacatacactttttaccacttcacatgtggtgagaaaaattatatctgttctgccgatgcagtgagaatttacactaacaatcgggacgtgaaggagaaacaaaataattcttgattaatatttgtatccaagatgctaggaatatctaagattaatggggtagaaagagaaaataatactactggaaatgtaaaagtatgcaggtcacgctaaacttatatttggcattaataatttgggtatcttgagttttttatggctaacctcttaagattatacagcattgatatcatggaactttggccttccaattatcatgggcataccacaacctgttgattcccttcaaggagcaacctctatctgaaaccaaatgcttccattcagttcaagaaaccagcagagatgtataaaagcatagaggctaactgtacctaccttgaaccagaagtgattagatcatgcactggagaaaacagagttgcctcccaacagctcagtatctttcaataaactttaataaatttgacagtgtcatataccatccaagtgctgaactgggtcatgttgctttggtagacgaaagctcttgagtaatttgataagttcatacgtccttgcatgatgacccaaccggaggcataactccaaaggggtaaatccatcctgaagtaagcatataaaccaaatcatactctcatttgacagaagcctttatttaagagaaatgcaggaataagtagtgctcatgcatgtctcttaaataccatctgaaattatggcactggaaatgcatcacaaacagtgataaaactgatgtgagaatatgataatagtatcacaagagaattggcgattaacacaaaacaacttatagacaactggtggcacataaataagttcctcctgggtcatttgagaactaccagcacataatttgctttacttacttgagttttcaaagttctatcagcaccctttattaagagtagcttaacgatatcagttctctgtgtttgcacagctagatgcaaaggtgtccatccatactgcaaaatgaatgagttagacaactaatccatcagaactgaaaataaagcaagatactcccaaaaatgaacatacatcatctggccgattaatgtcaacattgtacagcaagagagtctttatggtctgactgcatgctgtttggactgcataatgcattagggttgcaccatcctgtatcaccaaaattgcactgttgtcattgaccaaaactatacaaaatactgcatagaacaggaaagggatcaagaagtacgagtctgcaacccaccataacaatgcctaccagaggtagaatatcttagcataactaaaagatacccaagccatccaaacatagagcatactcactttatcgtggatgaatggatttgctgaattccttaggagatagttgataatggcatgcttcttggaaagaattgctttatgaatagctggtaaaccatcctgagaataccaccggaaaaggcccaacaaattataatgatatcacaaagatgtaaagcttctaaccataaccttttttaagatgagtcaactttcagaatagagcttaccttatcaagggcattcacattaatattatgttttagaagattgtccaacagatagaaatctcctgatgctgcaattgtgtgaagtggaagccacttgctctacaagacaaatagattaaggtatgtcaaccatcagtcagtagataatattgcacagtaaactaaaagagagagtagcaaacaccacctacatagcctagagatgaaacccaactggagctacacaaatcaaaatagataaactggaaataacaaacatgatcaagcatacgcctggagataacacaagctttatgatgtgacatatcaagatgttagtaatgcaagtcagaaaaaatatatggtgcacaatgcactcttccatgagacaaaaaaaaatgttagtgtgacgaattacagacaataatagttaagtcactctgggcagagagtgcttacagaagtagcagcttcaagatcaggtactctcttgttcagaagaaccttctcctcatctgtgaacagcttccgtcggcctaaaatataatacaaattattcaaatccacgagaacagcaatgaaagaaaaatgtcacatagtgaagttgcaccattacttggtcatggataattggatataccaaacaaatgtttcatccgataaactaaactagaaatggtataatcactcagaaagttgtgtttcgttgaccatgttaatggcaaaaactacatatatttgtcacgtgaggagtaaagagcatcaaatatactgtggtaatgtacaactactgcattaatcttttttttttttttggaatcacctacta

SEQ ID NO: 13409 - DNA, 11798 bp, Oryza sativa
atcggcccccaaccacaaaaccagatatataacatcccttgacttataaaaccgttcactttaggtccctcggtggttttgaccccgattttgtcccacatgatggctgaatcagcgtgggccccacatgttaggatgtcatgtcatcccctcctatcccttctctcctcccgggcaagctagccgatgggtggggaggaggtcgtcgacaacgagagcgaggacgagggggtcgatggcggtggtagtgacgttgcagaattaggcaagtaaatgaatgaatgagaagagtcctacccctatctctgtgtctccaattcttgcagaattatgcaatccctcttggactacctcggtagtaggagggttgtataatactcatatctcaatcctcttcgtgctcacctgaattcacatgtaacaacacagcggatgagaccagcaaggaggccaccttggatgcgctgcgcgcgcacagagttgcggatgagttcttgcgaacagctaagataggggccatttttgtaaatattttagatggtataatattttggatgcgcataccttgccgccctctacttgggcggtagggggcattttttaaatattttggatggaataatatttttgtaaatactaaaaaataaaaatgaaaaaaattcgcatcccaggtggcaaaagaaggaaagagcaaagcggggcaaccagctgcctgcgccggcccacccgtccggcgacgaattttttttattttaatttttttttattaaaagttttacaaaaataatttttcattttgaaaattgacagaagtggtcgcctaccgccctctgggatggcgatttttaaaaatcgccctcccagagggcggcgaaagtgacgtggcagacggccgttcgctctcgggcgacggccgtcaacgaaatttgcaggcggcccccttgccgccctccgctagggcgattttgtactgtgcggggggccgcctgcaaatgggcggcggggggcctggaattttgcaggcggcccccttgccgccctgggggagggcgattttatactgtgctttatattttttataaatatcaatagttatcaaatttttttatattgaaaactatacaagattaaaatctccaagactggtaaaatacaattttattattttttagggcctatttggaatgttaccgtacaaatattttgttagtgccaaaatataagcaagttttggcactaccaaatatttggtaaggtaaaattgcatttgatcatatttggtttgctgccaaaatgtaaaattgtagtgaagaatgttctacataatctcaaatctagattacgtattaccaatgaataggcttcaatcgaaatcaaacacaagtactattcaaattaccaaaatattggtagggcatgtttttggtagcaatccaaataggcccttagtcttacgcatacaaaaaatcaccaccataattaaacattgtaatgataagatagataagaagtgctatcgatacacggtacaaatttgtcgatcccgacgaatcaagcatgcggtaacctatcggccccttctaggtcggtcagaatgcattgcattctcgtggtccttcaatcgttgatactctacttgtgtttctgactctgttatcttctggccatgatatgatggagtgacattgtcgatccatcgagtaaatccacccatccttggattgccctgtaaaaatagtaatgttattcagtttgggtagtaattttgtgcaaatcatagcggattttgtaaatggttagacatacaacgaaatcgttgtctacattggggcagacaaaatatctccttcgaaatgtttgttcagcaaaggatgtagccacctgccagcgatctctgcacccacactttggacgctcggaccatttatgtaaccctaatggattgttcctccagtctaagcttgcaatttccacccgacgttcgtactccatccaagcatgaatgaactgtatggtcggttcaggttgcgttatcggcccgccacttgaagtaactctgactgtgtcaatccattgtacgaaagtgtgttgtcgtgagcataagttgttctagcaccatatgaatgaaaagaactatgtagaggagacaaacacaagtagtactgcagtagtaatagcaaaagtagtactgctttacaagtttgtaagccaaaagaaacggtcacataaggactgaagaggtagaacactactgacgaggcctcttacccatgtccctcctaccctgcgccctaatgtgcccctgggagtacgtgagtcggtccgggggtacggcacggccaacccgtcctgcctgtacaggtgtgacctctggctgctcctgagtgtgcgtctctggagctcctccaagctgagaggagcctagtacgtcatggtggtgtgcaccgtgcaagtcgtcgtcgtagaactggctagtaggaccagtcctaccggcgtgagacgaagaggccccagtaccgaagatcccggctgcaaatcctgctggacaaggaccatcagtttcatacatgtatttaatagtattaataaaaagtaaagtaccgtgtgggcgagggatcgacgctccgtgagaggaagagctggcgaacgcgcccgaagaggtggcgaacgcccctgcggagctcgcggaagcgccggtcgtgcctgcgaacgcgctcgaaggcagacgaggtcctgcgatgaggaaacgtgcagttaaaacatggtgacatattcgtgcaaaagctgaaaaaaaaatgaactaatctctgggctgaactgtaccgtgcgaaaccggtgctgtaggtcgcactgctccgaagctaggggcgctcgaaggcaaacgaggtcctgcgaggatggaacatcaagttacgacggggtgatgttttcgtacaaaaacataaacaaaacttaagaaacctctgggctgagcagtaccgtgcgaaacaggtgccgtaggtcgaggtcctgctccgacggtaggcgcgcgaggccgtggttgtaccggaccagctggaggtacgacgtccacggcgctacgacaggagaagacgcgcatgaccgcacgcatcttctcctgcatccggtcgaaggtcaccctctgctcaacgtcagtcaagtgcaaacctctgttcaacctcacttggactgcggtgatatcggcactgatatcccgtgcggcatcagcctatgcaagatggaaataaaaaattcagtagttgtcctatattatgcaagataaatgaaataattgtaagaactaatacaaattcgacgtacccccacgaagtagtctcggtcacggtgcgtgggatacgcgtccgtgacagcggcaacgtgcggctctggggcgtctggagtgaaggtcacacgcgcacgagtgcgaggaaggtaccagcgaaggtagtcacggtagttctcctccgtgtgtgggaagagctcgttgtggtctgcgagattgctcatctgtttgcttcgttgtcaactcatccaacttgtcccacaactcattaaatttcttctcttggttctgtgcacagagcctcttaaagagctccataagatgcttgttcttgaattgcttgtagaaatttgcacccatgtgacgcatgcaccaccgactccgaacatcaggccacttagctggaagtcccttctcatcccaaccgttctgcaagtagtcaatagcccgcaacatacccgcatgacgatcatgtataaggcaaacgttgggcctcatatgcaccactgcaatgtgcactctctctaggaaccagtaccagctttcagtgttctcactctctacaaatgcaaaaccataggtagaacctggttgttcccatcacacccaattgctgtcaatatctgacctcggtatttacctgtcataaaagttccatctatgcatagaacaggtcgacaatgcacaaaagcattgatgcaagcacccaatgagaaaaaggctctttgcagcacactctttgttcgatcatcaaccgatgtaaatgtatgtaggtcatagtaagtattattattcctctgggcaatggtggctaacaaacgaggcaaattatcataagaagcttcaaatgtgccatacctcatctcaataatcttttgtttggctctccaggcctttgcatagcttatggtgtacttgaatttgttctcgatgtgcctaataattgattttggttcaaagccaatgttaccaacaacactgctgtacatctcacttcccacaaaagctgaagtgatgtttcggtgatacttctccaccccttgtaagtagcacttgtgctcggtcacaatgctaactttccaataatcattccatttacccttatatgcatggacacgccacggacaatcttccttcatgcacctcacttcatacacataatttgttgacttgaccaccctaaactctctctgcaaggaaactgcccaatgcttcaccgcctccttcatctcatccttatgagcataccttgcaccctcaattacctcgttctccttatactcccagggtacatgatcaccctctgatataacaagtccagagaagtcctcatttgcccaatcagtggccattacatcaccttcctcatcggatgatgcgtcgtcgtccgcttcctcattatccgaatcttccctctccatttcatcaacaattataccgactctctccccctcatccgccatgcccatggcctgctcctcccttggttgattttcctcattttgcatcgatggtccaacaacatcccttgcattgataggaccctctacatcttcggtttgcattgaaacatttatatctttctcttgtaccgacacaaatataacgaggggccatgaccgttcaaaagccatttccacataccgtctccaagcagcagtgctgtccatcggcattagttcccaaaaataaccttctgttgcacgactcactacaactgatactgacattttgtagacttcttggtctattctaaatcctctcaacaaccaactataaattgactgaaatgttttctccgcaggcctatcgatacccttagatgtcattacaaaatctgacagatcaacaccatctggaccaaatctaatatttccttcaccgtgaactatctgaaatgtgaccttatttgacattgtgcctgatgaaaacaataactgcgttaacctcgcatttctgtactacgccctaagttacattctctacaatattgttctccaaaattctaaaagtaggttacattctccagatcaaactaaactacatcttacaattaacactactgtctatgtctcaattcatactattatattctatgctctgtatctacacatatgtgctgtgtgctacagatatgctaaaatatatggaactaaaactaaaacgcaacatatatactcaaacataacatattagtacaaatgcaaaagatgtatgggagcaaacctgtgatgaagtgagcgaaccagcagggcttcgccgctccccttctgctgccctctcctctctctctttcgttttttttggatttttagtgaatataatgaaatttcagagaggggggactgggctttatagggggaaggcaaaaatcgccctcccccagggcggcaagggggccgcctgcaaaattccatgccccctcgccgcccatttgcaggcggccccccgcacagtacaaaatcgccctagcggagggcggcaaggaggccgcctgcaaatttcgttgacggccgtcgcccgagagcgaacggccgtctgccacgtcattttcgccgccctctgggatggcgatttttaaaaatcgccctcccagagggcggtaggcgactacttccgtcaattttcaaaatggaaaattatttttgtaaaacttttaataaaaaaaaataaaaataaaaaaaattctccggcgacgaggcatttacgtgcacgggcccgatgccccgatggaggcggtggcagggcgagattccccggcgtctcgctcgcatttacctcccctgcctgcaaccgcaaccgcacgggcatctctcatcaatgcacgggcatggcatgcacgaaccatattccagtcccggcctgggcctgccccaaccaacaccccgccttgtctcttttgtctcgccgtttgggcctcattcaacgccaacaccacgccaccaacacacaacactctcctctcgcccattcaatgcaactcggactcgccctctcctctcgtcctgtatgtactcctcattcatatacgtgctagtactactactagtactacactacagtcatgccgtatacaggcacctgcagtctctccacatacaatgcagtaaatcgatcccagagatctctgtagaaattatggtagaagaatcaaaatagaccggtgagtttaatggcctggtgatacacgcgcatgcagcacatattctgtcagtattatttgctgcaggaacatgtgctgtcagtatttatttttgcggtgctcatttctgccatgcaacctctctctcagtatacgtacctactgcaacgacagtactactacgaccagtaaaacttggcatggtacaagtacaactacaaacaagggagtagtagtcgtagtagtgatcgtcaagtcgtcaaggagttaggcatgcatgcgtgattcttcatcgtctcctgagtcccgatcagccagatctgcagctagcgtcatggagtacagtagtagtacattcaaattgccatggtcccggaggttaaccccgttccagtacctgtcccaggttggccacctaatcgagtgctcttgtagaggtgtggctgtgcatgacagttttgatcgatcatctccctgggcaggggcaggggcagggcatgctcagcctgactgcatctcaatcgctgctcgtctcaatagtcaatcgtaatcgcaatattgccaagatgtttctgaaaccgagcctgtttatcctgacctgtgtgatgcagcatggggcggctagctgatggcacatgtaagtttgtgtctccgtgaatgaatgctgtaagctatagctagctgtaatcgtccggatctcgccaagcagatcaatcaaggcccgaaatcatcctcacccgtccctctccggccggtcttccagctcaaaaacccacggaattaaacgcgaggaatcctcacaccagcacgtctaggacgctagcgcgtttatagggtgtgtttcacgttaaattggaagtttggttgaaattggaatgatgtgatggaaaagttgaaagtttgtgtgtaggaaaatttttgttgagttgtgatccaaattcatttgcacttaataaatgccagcttcttccgtagtggagcggaggcccgtcgccggtaggcttgggccggagcgtagcggatcgtcatccctattagggttccaccatatatatacctcttgcaagccgccgtgcagcgttgtaacctcacctcagatatagtgaagatattttgctagctggcacccgtggttttttctctcctgttttgggaggattttccacgttaaatcccgtgtcttctgtgattgatctattgttctttatcgtttgtttgtctatcgcttcctaacagttttgatgtgatagaaaagtagaaagtttaaagaaaaagtttagaactaaactcggcccgctacttgcattgcgcttttgatcgattaggctacggtgaagaatatgaacgaagcaaacagaaaaatacgtgctgttatcagtctaaaagcttgttgttatcagtctaaaagctaaggcagaaaaatatcctacaataaaaaacctaaatcaactttaaaattaagttttgaaatttaaattttagttgtggctcgtgagacaataaatggacgacgataactacgaaactttcatttatcagtgttccaccatgacgctatcctcctagctggccgctgcttgttcaatgcctctagggagggatgagaccatgggcgagagagacataacgacgataactacgataattcatgcatgttgctggcccccgttgcacacaaaaaagcatgcaacgatcgatcgctggctcaagcagagatggggggaaggaatctctacacatttatgccattgcacctacatatgcatcatttttttgaggtagagagagggccgggtttccattaatgctgcagcctgtcttacacatttggtagccgggggacttgaatgctcacccacacaaagaggtccataagttggaggcctctgctttgctacccctctccatccctaagtccattccttcaccacacctctgctcgcctccttctccatctctctctaagctgcatgccttccattggagacaagggagagaaccattgcatgtccatcgtccatgcatctgcatatgcatggtgttgttcttctcgtctacctcctgcttctacatgtgacggagaagaagggaatgaaatggtagctatgatgttggctcggctcactcagacggcattggcgtgatgcaaagcatgcatgcgtgcttgctagctcacttgtgtttctgattgagccgtgccaatatcttagtgctctttcatgtgtacgtacgcgcacgcacggttgcaccatgcatcgacgacgaccactgccatggccgccggtatgcgtgtcttcacctgcatcaattcttcttgcaggtatatatgggctatggagttcttgcattacaatgagctgcttagctgattaaccattatcgcctagttttgtagttttcgagttttcagtaatatcgcacgaactaatgatgttcttgttatttagaccccgttatatatagttgtataacttgtacacgtagtatttctagcgtgggtccaattaatggtccatatgttaggtctcgactttgattttcaagcaccaatgcccacggagtgcacagtatatatcaattatatgcatgcagaaacttacaggattgcatggacggggtgcagcattcagcattctcatgcctgctaattgctgttccagcaatccttttttagggcagtgccattgctgctccagtaatcggacatcaccattcatacatgtttgtaacacgtcgtgcagaaagtacgaaattacctgcataattataatgtacaagctgatgatgaagcccaataaaatcgtgtaataaataacttcgatggaaattaaaggttggataatgcacgtaggaatgtgtatccaccaatctgttaattatggaggaatggtttatgacaggtagatcctagatactagcagtagcagcttactacactgtattgactgaaagtatctgctaatgtttttgtgcactcgaatgctatgcttagttgtttacctgcagtttgattatttttaactcgccaatccgggattatatgatctcatcagaagaaaagcttactcacgcgagtttctgtcagaagaaaatcctggaatatatgatctcttcagaagaaaagttcgaacttctaattctgccgtgtccactgaaatgatacaaactgtacttactgcgtgccgtcagcacgtcctgaagtctgaatatagtacaactaagctgccaatagtatttactagtttttttttactgaaatatctctttttatatttattctctcatgcaattctattcttcaaaggacctcccatcctgcctcctgccctcctgcttctccagttgtttacaaaattaaattatcttatgtacccaaaaatagttctaattcaacttttgtctacatttaaatatttcgaaaatatcagaatgagcgctgtcattacaaaaagaagaatgcggggtatccaggccaacaccccgacttgtgcttacacaaatgtaaatgcagatggtcgggtaatctctctgtttattaattgctgcaacactgtgttgcagcttccaacttccacaaaatgtaaatgctccagctcctctcgctctgcctcttactcaatgatgtgtctgtgtgctgtattcttgaatacttgtatttcattcaattcgaaatcaattaaattgaaggggggaagggggcagagtaatacagcggatcaccatgatgccagcttgtattggttgccaaattgcttgcatatgaaaatatcaagatgcagttgatgacagagacggcatttacccgtcactaataaagatccaaaattcagagcaattgtaacagagatgaatgaaatcagcaatgatggctacccagaaaattttgtgctatcacccccgtggtgttgcgacagagcaattgtaacagatataatgaaatcaataatgatggcaccatttgccattttgccacacttgctactgagagcaacagtggaccttatggcgccactttaggtatatgtacttcgaatatcagaatggattaatatgaagattacaacaacaaagtgctaggagtagagatcaggcatgtggttctaatggaaaccataactatatacttagttttcaaccaacttgtagccaactttatgtcttggccccttttcagaatgcaagaatgataaaaacacaaaagagagggttgcagaacatataaaaaaaatatatgaaagaatggatgtttggttagaccacatggatttagggagagacagactccaagaaacattcccatgaggttggacatcattttaaatttccttcgaaattacatcattgagggcctattcgttttggaggaattttaacatatagaaataggaaaagtgaaagaataggaatgaatatggaagaattttaacatatagaaataggaaaagcaaaagaataggaatgaatgcacacttcaatccataggaattttcaagaggtttgagtgatgaaatttttcctatgttttctctttacaacttgtaggaaagaaaatttttcattgatttttttatacctacattcatatgaatgtaccgaatgaaactcataaacgaatagtccatgaatattccaaagaaattaggtaggattctaaaagctttaacattttgttccaaagaaccaaataggaaagaaattaccatatatatgattcaaattctacaaaacttctctacaattgttccaaagaaggccttacatcataacgtattgcacattaggactagagtgcactaacaacttcgggtaatagaatggttttctgaaggatagttagcaggacattttgacattgtgaatgataccaggaattggaacttgggttggaatatgataacatcagagtagtaaaggaggaattgcaattactgtagctggtactccagcacagtagtcaggagcaccatacatcaaatcaaagggatgaggttcccatgggtagttgggacttgccaaggagtaactatggaagtaatgatatgagcgtaaatgagatggcagggaaagcatcaaaagagacagcaggtagagaatatggggcatggttactttggtcagggtcagggcatttacacgcatagcatagatagatcagatgcatggtgcccggaccggacctgacctagcctggcctctatatcgtcagacaaagattccctcattcactccaacccccgcccagccctatacccatgttgcctagcatcgcagcatcaccactccttgctaactgtcatctcggcaccaccactgtgatagcatcaccatcgcttgcctattgtgttcttctacagttcacagctattcaaactg

SEQ ID NO: 13410 - DNA, 5365 bp, Oryza sativa
gggggcgcgcatccctacgcacgaccgcgcccggccacaccgtgctactactgccctggtacgctcgctcgctcgctcgatcagatcagcggctaaacgcctaaacgcgcgcgtacgtcctcgactcctctccgccacacggccggtgccgccccgcaaacagcggcggtgttcgcggctggacgcacgcaactacccgctgccgctacgatgcgtgatggcaaaatagagcacaatagcgcccgatctgcttgttggaggagagacctggatcggcgtgccccatggccgtttgtgcgcgtctcttctctccggcctttccgtcaatcgtttctatagtacactacacttgtataggctttttagtagaaacgatagtatcatagtagtagtatttacctacgtgggtgacaggtgagaggggcactgcggccgtgttgcctacggagtacgaaccgaccggcgtgaatggtgaatcgtgatggtgattcacgccaagtcaagtggatagatcatagatagcgctctgtgctgcgccctttcgcttgcggtgggcggtggaagggggcgtggttgtgctagataggccgtggtgttctgtggttaggcgggccatttggggtcatgggctgtctcctgcctgggtcccttcccccttccctcagcacggcttgggtttcaagcgtccgatcgatacaacacgtacgttgttcagggcgtctcgcgaaattgaccgctgcggaggtggccgcgagcctgcgacaacgacgcaggacaaattcgaaactttgcacgtgggaactgactaatgcagcgtcttattaagggcgagagtaccacggcttatctggtgttacgttgggaactccacacatctggacatctggtacgcagcaatgacgcggataaattccaaggatttcaaagggaaacagttcggacacaattcgacaggattctctcgttttccaagtatagggctcatgatcgtgtgtggatctatcaacgcagattatttcatctgacatttgtttaccggagctttcgaaaccctccactaaaacatggccaaaaactcgagatggaacacatagtttcagtacttcacgttgcacaggagatgccatgttgccaatatatccatcagcggctgctccgtgacccacgtcactttttcaccaatctcctacagtatggatggatggattccacgaccacgagtcgatagtcacacaaggtgctgaaagctgctctgctatgctccgaggtagctacgacgcctacctggatatcgacatcagaaccactccaaaaggccgaagctcttcagtctgaaagaaaagatgtggattctctgaagtgagaagtctgaacccttctgcaagcgactcattgcctgcagaaaaattcaacctcagcctgtcctgcaagaatctcctcgagcatgcaggttattccctttttgcattcatttctcagggtctcaacgctgcaaaaggaatctgatttcttacgaacacagcagtgttcccagcagcaacaattggatcctcgacagcctacaggttcagaacaaaatgtaaacacattattgagtgctcgaattgccacccccaatttttttttaagaaaactatcagaaccagcctatgcatgtcactggctaaggtaccccaattttttttaagaaaactatcagaacacagctaatgtctggctaagaaacagacgtgtggaccatataagaaacacataaatggttttccaaaaagatgggttacattagcccattatggccgttttggattgataccaaaactttccctaccaatgttttaggaggttgaatagtaaatatgatggtttggtttgaagccaattagttagcaatgcccatactcattttggcacaaataagtttctctaccataatatgaaatttggtatcatattgatagcaaaccaaacacgagttaatatatctctgccctaccaacaaatcggtagggtagagaacctctgtagcaatagaataatttatagagaaaagcacagtgctggtccaagaagcaaaacatattaagctatcatcagggcattcatatgcattatagaagacatgtagaagtagaaatgaagagttaagggtatagtctaaactggttgccacaatgggatgaaacaaagttcaacgctgtaatcaactatgcatcatgcttcatgcagatatgctgctaaaatcaactaaaacaagatgcttacaaccagacaagcaaagtaaccatcatgtaaccgtgtatattatagaattattataacatacactgtaggatcctttcctatagttgttccccctgaaaaacacaaatagatattgaattcaaacacatgaaaacaagaacatacattgataggatatacgctagtttccaggaagtgccataaggttccatcaaacaactctgcatttatcatcacatatgacggcggtaagcatcaaagactgtccttaaagcacagagcttattaacgttgagtacttacttctaacactgaagtttcaacctaactagcagggattggctcgtggccactcacacacccaggttctattcctaagacttacttgggcgcctccctccttaagtgaataccagaggtcctggcctttttttttttttaccaaagtgatcatatccttttttttagaacaagatttattgatttttagaacaatagtagtcatatcctagagatctagaacacctgaagactgctaatgcagagaaaacatggcaacaatccaatttcttcaatgagtaagagtgaaagcacagtacaataggttatttgggtgaaaaaggttagcattacagcaagaaacccatcgcatatacaacagtatgattgaaatctacagagagtagagataccttggacgagtagggataccttgaacggtccatttcgccctatcaacccacaaagagaatattcctgacacttggtccagagtgccttcaagatcggtggaagtctctaccatagtcctcagtcctcgcgaccataaacatcgatgatacctgacaccacagtcagacggactcctaaagaagtataatgtatgaagcatgctcagattgagaaaaaattaaaaaaaaaactaaatgatgatgcaaggtcactaccatccagactgtttttggaaagcaatatagttcctatgtgttgagtgtccatggagtcttcctctttgacagtatcggtaaagaacacaattattttctgtaacaacatatgcccacaactcaagttaaaatcatttttaaaactgcacgatcataatgggaatagtgcaaaagaggaaatacaccagctgatactagttagaagaatacatcactaaataattctaaagcaaaaaaatactacgaaagctgcaaaaaaaaaaaaaaaacagcagcgatactactggaaagtacagtttcaatattgccacacactggtcgctgcttaattgttgcagaggggctggctagggtacactaagttgatatcgtgcaagaaaatactgttgaccattcatcaaggtcatcggagacgttttgattcatgatatccacgtatttgattgctgcagtagacctgatgaaactccttcactatgccagaaaacccttttaagttagaaaagaaggacaacacatgaaaacatctttggtaaactaagaatcacaaactagagtgactgagattggatttttgacaaggggctgcacctagaactgtatccattgtgtcaaagcaaaaccacaagaaccatgagaatgtggttcaactaccaaaaaataaccgacgacctagaaagaaagagttggatgagttaaaactcctctatatggtacctcaaaatgtgatggcatggtaaaagtaaacctttccctccttgggaatgaaccttcaggtccctttctgtaactctaccagacaaacaagttatgtcaagtatttcaatgctttgacgcatacgattggtggtcccttatttatttgttgtcatataaaatcatgctgaaattgtagattgagaatgccaattagaacaggagagtaaacactgataccttacagggcttgtatgattgatgaggagttggtcttgtgattggtgaagagtaccctgattgagcatgacactgagatctaattctggaaggtgactgtaatcttgatctgaattgtttaccacctgcattaaacacagaaagttatatgacaagaattagtatattgcagttgtttgatatgacctgaactctgtaagtacagggcacccaggaaaccaacttactagcccacatgatcaaattctttccaaatgaattagattgactactttgaaaaattcacatcaccttccacattactaccaaccaaagccaattccagtaagttggttcgcatatgcaagttttaacaagctccataaattgtgaaaattaacattgaatgtcattgactcaactccataacctagaatagtaagataagattacaatatgccactgagcctacgattagaataggagaatctttagatatgtcatcccagagaaaaaaatagccagcatctatgagacgtcaagatgataataatgatggggcacaaattcacgtaatgcgacaaattgcaattcatgatgaaagaaagaagaaaagggatgagcacaggaataggcaatagcaatgcttctgggagcagagtccatgtgatgaaaggaagaaggtaagagaagggcatagcaagttggcaattgcatgaggtcttactccttgcaagtgagtcactctcctcgtgaaaatagttgcctcaaaagttaaaataaattgccagaagatctcaaaccaaaagggaaaacatacaacaaccaaactactttggcaagtccaaactccaacctgcatgcacaaagaatgcttggccatgaatgcatcgaaccttttgttggagcttgattatgtgagtgagtcttgacaaaatcagctaatcgagccagttgataaaataaggtaaaaatgtcgcaagtcatgtatatcgtgctatgaaattttggttggggatacaacaggactgtgccaaatagacctgaagatatgtaatcctgaataaaaacatacatgttttctaattactcaaaatgaagaaaacaacccattggcttattcaacttcttctacttcatatttttatagctagtagctgaagtggttaattctcatggcacaaacagcaataaaattttttaaaacatcgacaaaagctttgccgtatatgtattaatagagaaaagttattttcagagtt

SEQ ID NO: 13411 - DNA, 591 bp, Oryza sativa
ggttttgtaaaggacaatggtacaattgttgaaaacccagttgcttctgaaaatgtgaaagtgccatctctctggaatgatatggatgagagccctgttgcatcttcgaacggtcacatcaaggctgagagacattacagagctggtgatcatgcagctgagagtgacttagggtatgattttggtgaggaatctgtaaggagccccagcagtgctggaagaagtgcatctgaaagtccatttgtgtcttcaaattttgcgatgcatgactcatctcccagcaaaaaggaaacctacaggtacaagttttcccattttggatagtgcacaattcttattctataatgtttgacttgctacctacatgatcactagaactgagatatgccaggcatagtttaattgaacagaatgggctgtatttacaaatttgaaacaagtcagcatgtttctctgcagtatagtgcggagccatctggtgccacaacatgggtccactttcagtatcctattctagtccacttgtaaatagttcatgtattgctctggctataagccttccatcttgcgaggctgtgacagttttctcca

SEQ ID NO: 13412 - DNA, 18968 bp, Oryza sativa
ttactctttcataaacaactaccaacagaaagttcatacataactctgtatcatatgtggtatttgcctcttgatttagctactatggttaaactagcatctttcccatgtgtcgcagcagatcataatggttcagagtgcataaatgcaaataaataaataaataaataagtaactatcctggaatctaaaaattgtatatgtgactacatgataccgatcaaccatctgcgtgtactcgtgtggaaataagcatttttctttgtaaaaatcttttgagacagtatgcatatgcctacatgtttgcaatcacaaaatatctaagtggggattgagtgtcgaacacaccataacccccaatcaccactttcataagagtaaagattgcttgcttctttcttcaacaattggacgattcctcgtgtgaacaaaccctaccatccgctacaacaaagctattgctaaattatgtatgcaagtattatttggatatatcatagagttgcggttgcttgaatgaataataagatgtctttaaccattatatatgtgcatcagctgctgtttaccattgaagaattagcctgctcaaagtggatcaggactgatatttagatcaccagttcagtacagacagttcaggatttaaggaagtggtcaaataccttcttaggggcatcctcctgcacagctgagttcgctccacttccgtcatctttatttgcttgaggtgctgcatggttatccataccaggcatgtgaggtcttggttgccctggtctgttagcaccatccatctgtgcctgcaaatgtggtggcaaaggttgccgcacaccagtagcaggcatcccagctgctccaggacccttgtgtggcagtcctggcccaacataaaataccttatgagcgaagagagcacaacgagaggtagacacaagatatcatgttgtgacaaagttatgaaataataattgaaatctggtagccagtattatcacttaccttgattttgttgccatgacgggccgttgtatgctgttgaaggcaagcctgttgcacgcagcagtacctcatcatatttaagagagtcaggaagtgctggaggcaaaggagttccagctcggtgcctctccatcaaataaagagcaatgcaaaactctctcaaagaaagcatgccatcattatcttggtcagacaggtcccacacttgcttcagaatctctgaaaattatagaagaacatcacttgcattagacgtttgcaacagaactccatcccaaggggatatgtttggcatcttaagaaaactatcatagaaatagaattagtcgaaattataacctacaccacaagtattatggcagtaaacataacaaatcagcgtaaaacaataagctaaaacagaaaatgtgtacaagaacttcacaaaagaaaggaattagagtatcttacagacagaaacaagcatttgcatacttaggagttagaagaattaaatgctagtcatgagatcccacctcttggaagtctccaactgaggaacagggtgcgagcttccgcgccagttattttgccatctctgtccctatcaacatccgcaaagactttagtgtacttctggatgtcagactgagtaacttttggccattgagaagctgaattagaaactccagcagaaacaccagatacagttggtgctggaacactcggctttgtgatgggatgagtctgttgaggttgactgccaccagaactcactgtcggaataccttgttgagaaccaaactgagctagattcgacaggttctgggagccagatggtgtggacataaaactggatgaattaggagccatgctcgtcggaaatgaaagtgtggatacattcgacttaggctgagtaagagcagagaagatgtcattgcttgctcctaagccactggcagagccatttccagacagcaccaaagctttcgaatcttgagctgatacagcactgttgctttgtggtggcattgacgaaggaggcgttccttgtgcctgttgtccgggagccatgcccattgtactagacaatgtaagaccaaatccacccggtgttgcttgttgtggagcagttgctcctggagtagcttgcgggagacctccaacggaaccaacattgcctcctcgccaaccagcaggtgctcccatgctgcctcctcctagtggtacttgattaatcccgggttcttggccttgaagtgatgctgctggagctcctggctgagttggcctcatgaaaccagtactcgaaggaggaggctgttgattaaaccccatgctaggcggctgtgattgcattcccctctgcgttgcaaactgagttggctgcagagcaccaccctgacttgcagccggcatcatagaattgaccccttggggtcttggcacggctccggcgttcacctgctgcgaaccgccaatttgagcagagcccggcatcataccacttccctgaggccttggagcaccagcaacattcatctgcggctgcggagctccagcctgccctggagcaggtgacaccgcggcatttacctgcggcctgggagcgcccgccgcagccatctgcgggggagcttgcccgccgccggctatcttgggagctggaattctagcagcggcagggccatacagcgccgactgcactatgtcgggcgtgagctgacgcccgctctgcgccacggtgacgaggcgcagcgcgttgaagaactccggccggccgaggaagccggtcttgttcttgtcggcgtgcatccatacctgcaacacacgaagttccgacaccaacaaccatcaactcattcgaattcgcgggagcgagagagatctactactgctactaccatccaccaccgagatcacgcctaaaatcgggcgcactctctccccaatcggagagtggccattagcagcggcggcggcgagggaggaggggggtgtcgtcgggacgaacctgggcgaggacttgctgcggcaggttggcgccctggaagaaggcgacggcctcctggccgctgatgcggccgtcctggttcaaatccgcgcggcggaagtaggcctcgaaggcctccatcccagccatcgccgggatctgggccggagtccacgccgcgcggatctgcggcggcgagcggcggagatctcgggaggggggagcgtgtcgcgggcggctgcagcggcaggcaggaggcgctcttctcctctctgtctgcgagggcagtggttggggtcctcctcctccgggtgtcgagatggtgagcgtgccaacttgcaaattgccccctcaaatttttcatatttgttcgaatagggcaactttagataaaaaaggaaaagcaaaatttgttcggaattattttttttcctcgaatttggttgaattcgtttcagctttagctggaaaatcgcgtgaaactaaactaactttctaaattcgtgagatctcgcatcggatttatgatagagttgatactctttgccggacaatagatcgataaccttgccatcacttaagtgaaatgaattcatagctaaatgatacaatgatttaccacgcttttatctaaacctggttatgttttaattagataacacaaatatttcttttggccttcacatgcacacaactatattatatatgtggataggaagatttgaagcctagttttgtttttaagaaagtaagcatctatgacttcatttggttgaaaataacaggaatgctaggtaactagatcatatccatagcatccgcatgtattattgatggtcttctcggctggactatcctttggcttcaccaaaactagcacattgctgctctgattggtcgtttgggaacatcatgctctttctatatggccttgtcaagcgctcaagcttgtagacacctcgccactcctccacacacttgtttagtgtcgcgttacaccttcatgtgcgacattcatcatcagctccctttccaaccgccaacaagacttgatgctaaggggcaaggagcttattgggtcggaggtatatgttccctgccgtggaacatgttgtgctccttcatggtgtcactaatggctttctcgttcaacatgtccttcggctccactaaatgcatgtgttgctacttggattggtttttggtgcctcctcgaatcttgcatatgaaatgtgccaacaagcatctctttccatgtccccgagcaggacctcgctgatgctctagtggtgctcctcatccttggattcctagagttatggctctcgtggaaccaccagatagccgccctcatcactcgtggtttccgcacattggcaactgacctctgcagctatggtgactcttattgatcccgtgacctacaccatcctctaaatcgtacgagacgtcattgtccccttcaaccgtcttagtctacccaaggtgttgccttttttatgccttactgttcgattcctaagttcttgggcgccactatgagtctaaagggtcctttgattcatatgattggtagagaattttcataggatccaaatccctatgaaagtttttctatgcgtcttttttgattcatagaaaactttccatataattgtattcgtacacgcttcacctttctacgaaaactagcaagatataccgctttagaaactttacattgtttttcctatggcactttcaaaggtttcatatcctcttttttcttatgttttgattcccgtcggattggacaagcatatagtattggagaaacacaccacttcaattactgtgctttttgttttgtttttttcctatcccacacgcatgctagggttggaaggtggtggtggtgatgggtacaactagagtgcacaggtggcgtggcatcactgtatattcagaccatacatagcgcgcattatcgtcacccttagaatttcctccaaatggttggaacataatcaacaaaaatgtgccaacaagacgccggtaaaactagtattgtagtactgataggtattagccctgtgtcacatcctgattttcgtttcaggatttataaattatttaataaattattattagaatttatattaaatgttcattaatttacaagtgaagttaaatgtgggaaataaaatttcctaaatataaataatggatggatttaatttttattaaattctccatggttaattatactccctgaaatattctcggatttttcggagctcaattcctaattttaaccatacaaagaacatttcagtaattatccacatattgaattaatcattaaatggtctgattataatttttttaagtactttgagtgtccaagtattttcaggatttttcttgaaactatttgagcattggaagtatttttaacaattcaaagaccatttcagtgattattttaattggaaaaagttgttaaatcctctcctaagccgttgggctgatttcagcccaacatctctctccctcgcgcgcgtgctgtgcagtccaagtcggcctagccgagctccctcttctctttctttctttcctttgtttttcagccagcccaagacgaaaagtctaatttgcctccccgtgtactgttcatcttcaagcttggacagaagcccgagctgccgtcctgtgctctagccgacgccgcttcctccaccaaatccgccgcatcccgtgctccgtttgcaaaattagttgaggggaaatattcctcttatcctcctctatcttttcccccaagaatcggactttatcccgaagaaatcaacgcggaatcgaattcgttttcgagtttatctctccaactaaccctcggtttttccggctcaaatcctctcggttggagtccgatctcttcaatccaagcctataaatagcatcccctagtcgtccccttccgtttgccccaagtcccgagctcccccgtcgtccgtagagccgccgccgttgccggcgatcctccggccgcgttgcgctgccgcggtagccgtcgccgctgccgtccgtcgccgccgtcgggtgcgcacggaggagaggaaccccgtccgccccttcgcagccgccgaagaccaccgaagcgccatcgccgccgtcaagccgaaccgtgccgccatagaagctcgtcgccggtcgtcatccgtcgtcgttcgtcgcagtggttagtaccggtgagatcgcgttgttctcctctacgcgtaggtaccctccaaaagtccggccgagtcttctagcgccggcgaggtcgtcgctgatgtcgagtcgacattgatgatgtcagcgatgacgtcattaatccctttttcttagttttctctattagatgaaaatcgattaaacttcggaaattcataactaaatcatcataactcggattcgagtggttcaagttgctaaattcatctaaaatcgagatctacatgttaaaaatatccacatgtactgtttatgcttgttttttactgtttattaggtttttattagtctttttcttcgttttgcgtgttagcttgtcgtttccgtcgttgcgaaggttcgtgagtgcgtcggaagtgttcaggaagattaattgaagaccgattattgcaaggcaggtcacacagattctaaacacaatcctttgagcatgttgatcctatatttaaattctctatttattttaactgtgcatttattttcgaatgtcaccgggtggtgtgaacctattcctttgttatgaccaatttgcattgaataccctattctttgataccttgggtaataaattgattagcttgaaccttatatattggtttggttcagctaaatgctatatatatatatatatatatatatatatataattgcttagccatgcttagaaacattatcacataattgggataactaatgttacactatcacttatggttatatttaatggtagctcacgatggttaatcgtgttatgataattaattgataactaaaacttgacaatggtgggttgtgagcacatggttttgaaggtcgtgctcatgacaattaaggaccggttcgcgagctactgttgtgaaacattaaccgtgccaaccacaagccagcgtgggcaacggctttaccttttgtatagcatgattcattacggggtgccagactgagaagtggcgagaagtccgtgggggtcgctgggagtccatgcctctggttatatttatagagggggtgattatgatccaggaatggtgcgctgtggtgagttgtgttgtgcaggggatattgtcatagcctctattcgggtactttccagtatcgcgacgcatggtagacatgatgttgaggctgtgtcttgtgggtacagtggtgcacctctggccagagtaaaactattcgaatagccatgcccgcggttatgggcgggttgagtaatgtttttcgtgattagtctcacacctctcataataattatggatgttataactggtaataatttgcttagctcctggtttggagttagatctgtacagccgggtatggttgttcagaatggttgggcctgagcagcatgggcgtgttgttcagtattgattaaaattaatgattaaagtactctactgttttattactcttaaatgtttgctaaatgctgcttttgcaaatgaaccctatattatgccatcctttggtatcattgtgcacttgcatatttgctgtgtggcttgttgagtatgtcatatgctcatccttgcaataatcatcaaacctcttttaaagaaaaaggatccagaaggagaagacgtttggcttataccctagttgagctgcctgtgggagtggagctgaagccattgctagaccgttaattccgctgctgttttcttttcttttgtaagtatgtaacgttattattatgatggatttgtatattaaattgtcagtttgtgtacctcggctgatttctggacgaggattttatgcacaaattagtttggaaattactagtgaattttcggacgtgacaccctgttacatatgtagcaggttcatcattcacacatgtatcaggtttcgtacccacttgtgcctttatatcaacctggtatatccaagtttagtaccgtcatatcataccatgtaccagacacgtactccactaaaataaaccaacctcgtgctagcatgtcacacattatagtataatgaattagtatatagagtatatccagactttgtcacatcctagtatgaagctatgttcagattcgttgtactatgatgtatcacattttagtacagatgttagtttatcttaggataaaatgtatcacattctagtacgagattggtttatattggaacggaggaaataagtataatactattttggccaatattctttttgaaagaggggacaagtgaataaaactccattgatttgtaaaatcagaaccaatgcaaattaatcgactgtcatctcctcgctataacagcatgtcacacaactcacaacaactgcgaaagggcatgtaactcggtaattacagtgaactgaatagtaacttaaggttatgagtggttggatataaaggctggtaaaaaaaaactctctctagaaaaacaattcacaactagccagatgtatgcacagtttcacacaggcccagaagttagcgccgttgcggtggcggccagcatggccttcttcctcttcttctccctgagcttcaccaccttcctgtggcggttggagtacccgtcgctcccgaagccggggctcgtcgacggccggtactccggcagcaggtggtcaatcctgtaccggatgccgcacgcgttgcacagcgtgctcggcccgtccggccccacccgccactgcggcgtctccgtcgtctggcagtggccgcacctcttctcctcgccgcatttgcgccgccgcttggcggggcgcgagcagtgttctcctccttctcctccgccgccgccgccgctggaaacttcgtcgcggctgttgtcgacggcggcggcggcggcggtggccagctggggggataccagtgaccagaccctcttgcgtacggcggcgggtgcgcggcgcggcttcctcgccacagccgaagcttggagccacggaacgtcgtcgacggtgctcggcgtgcccgccttctcatcgccgccgcctactgctctctgcaagtccagcccgccgccaacgtcggcgtgcatgtgctcctcgctcctggagtccacgtcggcgtcggccgcgggcgtcggcggcgagcaatcaagcttgaacgccgccaagaaagggtcgtccaccgccgagaggcatctcatgacctcctcaaacgggtcgtcggggcagcacagcccctcgccgtcgacgaggtcgtcgaaggggacgtcgccgtcgacgaaatcgaaggcgacgacgtcatggagggagacgtacggcgtcggtttccgcatcgatcaggtgcaaaaactaattcgcggtttccgcatcgattaggttaaaaaaaattaggggtaatttgcgaggtttagggcttgcattagtggaggcgtcgacgaagagggagagaggagagagacacggttagtttcgtctcgggagaaaaactagcgatttgtattccgaaacaaactctgataacagaaggcttccggagagaaacacactcaaaatcggctacgactgctatcttgtattgacacacgatttctattctaaacagatacaaatttcgttaaaaaacgcctgagcggaacgggccgggagagatatctcggtgggcttaaacggaaagccagacttctcattgtaaatgggccggccggcctccagaattcggcccatgtccaattatccatggcagtatcttttgccctcgagaacagaaggggaaacagatgagttgtgggcaagatgaagagtagtattgggaaagtatttttatccttagagagtattcccttgtttcttgtacatcacctaaataaatattattttcttctaaaaaataataaggtatattaatataaaatatatcacacttccaagagttggaagctgtcaaacatcaccaggcagtcaagttgtagagatggtgaaatgtatggagaagctgcagtcaagttgctacattaggagtaaaaggtgatttttcatctgaagaccaatccagaaatattgggacaatctgactgaataactgctaattataaccaacgttttgctctaagtgttattggatgttttcattagtggtataggttgcttatgtaagtatgtgagttttctctaggtgatttctttgtatttctttcaaacttgatactgtatttgtcactgtgaacaatgtgaatattttcctttactgtttaatattgattgccactaatcatgatgtgaaaaaataactgaggcaaagaatcatgcctttctgctatgcaaaatgtaagctttattctgcgcaagggctcaagcatttcatacataatgtcaggagccgaagagctagaaaatataatatgcagctagctgatttgttgttgtcagttgtatttgagtagtacttaattttgttttctattgcatgcattgctggatcaatgggtgcttggtcaagtcagcctcctgcaactatgtcgctggtaatatgctttcctatagctgatcttttccctcttcggtcatgttttattctgttctgttctgcttaccacacctctcctcctccccaaaaaataaagtatggaacatcattatgtagaaactaaaattcaagttgactcaaattaagtagaaaacatgctagaaaaaagaagtatccctccctcactgcttcaaaagaattgagagtacaggtagtggaagaaggaagcatatggagcaataaatttgtctgcctctactactattagaggtaaagctgaaaatgatttataatctcatttggatacagttagcataaatatgtaagtcataaacttacagtggagctgtataaatattttttgtatgaattttgaatagcaacctgatatgacatccatgcacattacatttacagagagcatatgacatgcttgcaatgattagacttccgaagaaatgtgcggtgttgtcgttatgagctgtgaggcccagcaagtagagcagattagtgtgattactgattctatatgttaaaatcgatatactacatcatgtttctatgttttgtagtgcagactgcagactttttcttgatataatttatgtatctattcaataatatttttttctacagctaataaacaacaatgatgggatgatttttataagcaggacataaacgctagaaagctaaattgacaccctggtgcctcccgtttatagatgtcaccaacaagtaagagaattcctcctgtgtttatattggaatcttgttgttgcttctatctgtaaaacctgaaaaatcttaaaccattcctatgctgaataatagaagatataaaatgatatgtgttgccattgcatccttatatttatttcttcaatccacaattaactatctaaaccacttttttttgttttaattcacataaattattttcgttgctggttttagtatgaatattttgatatatctccgtgcaaaaaaggattttgatatagctatatgcatgtgcattgccaatcgattcctttccaatatgtaacagtagtcattgcaaatatactttcatattgtttctctctgttggggcaaaaactctgaaaaatgatatttggactggttgataggctcaccgggtaaaaaggtagaaaccatgttagaaacacaagtatcggggatttgatgtatatattgtttagatcatgaacatttaagttttgaacaggtttatttacaatagctgacatatagtcccttaatgtattatgaaacccacaaggaatttaattttgaaataaacatcatacatttatatcatatttttactaccactgttaatatggtttgtgcataataaaaatgttctcttgcaatatgatgagtttgatttatattagttggagaggatatatccggtttaattgatattggcttatacatgccttgcacgtgcacgatcactagtcgttaaataacgcctgagcggaacgggccgggagagatatctcggtgggcttaaacggaaagccagacttctcattgtaaatgggccggccggcctccagaattcggcccatgtccaattatccatggcagtatcttttgccctcgagaacagaaggggaaacagatgagttgtgggcaagatgaagagtagtattgggaaagtatttttatccttagagagtattcccttgtttctcgtacatcacctaaataaatattattttcttctaaaaaataataaggtatattaatataaaacatatcacactacaaattcaaatttaacattttataaagttgtaaaaaaaataagaaatataactgcgaaggtacgttaactattttcaatttgatttgttatttttcttgtatatatgtagatatcaaatttaatcttacatatttgtatagtgatatatttcatatattttgatattttttaataatcattgtttttgtaaactagtacgaaccttctctgccggatgcaaatgaagctgcatatgcaactacagtcgatttattttttcttcactcctttttaagcttccttatgcatttgtgatgacaaattcagtatccttcaacacacaaagcttacggacattttgcactcaccaacaccaccttgccacaaacccagcaagcactctgaaaagcagagttaaacaaaacgaaaaaaaaaaacacgccccaaaatgtacaggtatactcaaggagttgatccacgagaccgatcagtcagtcaatcagtcgccgacgttgagcagcacgtcccagagcgtctcgtcgacgagctcgtccagtatctccgcctccatctctgcgccggccgcgccgacgtcctcgcggaacgggccgttccacggcgacatgctcatgtcgcggccgatcagctcgtccacggagttgggcgagtccgtcggcggcggtggcgccagccacgcctgcacggtgttccacagcccgtccagtagcctcttgccgccgggggatctcctcggcgccgcgccgtaccacctgctgaacgcgcacagcgtcgtcgacgactggacgacccgcggcagcgactcgttgatcaggtcgaagaggaggcggtggtcgacgccggtggccgcagcgtcgcagtcggtggtggccggggctgaggaggacgacgacgactcgacttcctcgaacacccacgcggggatcggtttcacctcgcggtctgagaagagttggtcagagcttcgtctctgtccgtacagaccggcgatgacaagaattgctctgatgtaagctttgatggggttatctatctcgtctgtgtcgtcgtcgtcgtcgtcctggattggacttgtttctgcgagttcttgatcggtttgagcttgctccgacgatggatgctctggttctgagaaaatttatttggtcagaaacatcagatcaacattgcaagtgccatgcctgatggctgcaagcaaattcagagagcaaagctgcagttgctacttaccagaagcactcgaactcatgtccctagccgccatcttcaagggagatcggtgctcgctgaacgaagcctccaatggcgagacagggctcgggtaacctcccctgctcatctcatcaggagggctactgcaccacgacgccgggctcggcggcacctcggtggagttctcctgccacaaaacaaacagcattctcatgtcagattgagctgacgcacaaaacagaatcttgaagcagaatgtgctcaaagaattcagatttgcctcacctggaggacgccggggtggatgaggacggaaggggcggtgaccagcgttccgatcggagggagatcatcggggaatggcgactcgtcggcggagtggagcttcttgccgaacagcttcgctctcagccccagattctgcctcaggttggacaccctgcccttgatgttgaacgtgtccttcctccccttcctctcctcctccgacgatggcggtggcggcctgctcccgtagccttcctgcttgcgctgcagccgtgctccggtcagcacccgcggctcctccgagagaagcttcacgaaagtggtccccgacaccggcgccgagaacgacctgatgaggttcctcggcgataccgggtcggagtcgatcgccggagttggtgacgccttgtggtggccacgtctgaaagacctgacgtcgaactcgatcgcgtgcttcttctcctccttgctccttatcttgcccttccttgccacctcatgcctcggcttcggcctcggctcttcgttgaacgacgccgaggcggttcttctccggtgagacagtgccggcggctcggtctccggctctcgtcggagcacattcttcagcctgtcggagaggtgcttcctggcatctctgcagatgtagtccatctggctctggccattgagcgggatgtcgctgcggtacgaccgcgtcgactccgaccggagcaacgccgagtgcaggtccttggtgacggtctccctgatctggttggcgatgctccgagcaatctgcttcgggtcagccggaatgtcgccgccggcggcccacctgtccgccgccctgtcgtcggaagccatcctcccttcgagctcgaccttgagccgcttcttcacctcctcgaggaaggcctccatgttgttctccttcttcaccatctccggcgaccccaacgacgactcctcgatgtcgtcggtgctcatctcgggacagggcttcaggatcactatcttcttcggcgacagcagcctctcctcctcgtagtagaatctcgacagcggcagccgcgtcgagctggcgtccgcgctcgtcagggagaacgtccggctgccggagatcgacgtgccggtgccggtgccgctctccttgctcctcctccagtgtgcgtcgccattggagtgcgtgtgcttcttgccggcattatccttccctctgtgctggaacctgtaaggcacgatgtcagtgcacctgacgtcatcgtcgtcgagatggctctccaattccagagctctcgactgctcccacatcctgctcgcctgccacgcctcgaaatccttcttgaacttctgcagctcctcctcctgcgggtgctctcgcggctgcggtttagcccattcactgctgctgatcgccttgctcagctgaccaaagagctccatgctgtcgtcgtaggcacagacctcagcttgcttcggcgaatgcttcatggagcccttgtgttgcacgaaggagacatgcttggttgagaccatttcagaaggatctcttcttggcattggccttgtggaggttatcatgtcttgccttttctcctccgtgtggccggcggcaagctcaccggcggttgtactcattggaggtgagtccatgcccatcaacctggcaatgacacttggtctcttctgaacttcatttgttctgaaggatacgtcctcatggatgatcctcttgattggggatgagctgtggttgagaccagcttttgggtattgttgcctcatgttgcaggagtactgcacaagttacaggaagcttaatcaggccactgcaaaagttcttgccagttaattagctcttgcacaggatgtaaagttaaacattggtttatacagctccttatttattgatgaaagatacaactttgttttcacgatgaaataattcatccacatggggttagatgccaaatagtaacttatgtacccaacagtagctgggggtctactgttaggcaccattattaatggatgtttcatgatgtcttctcatacagcaacattcgggtacagatacacctagcagcaatgttactatgatgtacagaaatcataagtaggcatctcatctgtcaagagaaatctaactactttggctccttcgtgcagaaaatgaactgttagtcactgaaaagacaggttcttttctggaaacagaagaattcactagatgcttatgaggggacaaaacatgaaaggaattactctcttactacagaacagtgaggaaatgtacaagactcaccgggacatcctcttggaagacgccatagctttgtggagcctccagggtgaactccatgctattccttggggcttcaaatcctacaaattcagagatggcaccttgatcagttataaatttgcttcaaattcaattaccgaatagctggaaaaacaacatagaaagtctcaatgaactcttttatttcaagtgtacgttaactcgttaagcatcaaccatcattaaggatggggcttgtcctggtgactcggtgattcagaacttaaggcaaagaccatgtgtaagttggacagagagaaatgaatcaccgtgtatcaccgtaccttcgccctgcttcttgtgtgaccacttccttgaggtgctagcatgagagaagtccaggtactgcagcatggtggcacttgttgccagagagatccagcagtacgctgcgatggcaatattaggatatctgaaggacgaacgagacagaccttactatcctgtaaaattatgtgaggtatcatgtcagattctacagaaaatcagccacaccaaaatattgtagtgaacacaatttatgatcaccattacgacttttttcctgcaaataaaaggaatagcgcacaagacagaattcatgaagacatttgctcatttcaacaggtcaatgcatattcagcaagcttgaattccttcgaagaataccccgatcaagaacccaaaatttccaatgtgtgaggtggaatttcgtatcagtaatcaacatgaccgaaaccacagaaacatagagggaaaaaacatcagacgaactggaggagaatcttctgagaaatggtttctggaattcaattcatttcgaagcaaccatccagtcatcaagacggttgagcacatgaacagaagcaaatgatgatccaaaaacgtcaaacataatgagcagttgaaccccaccacgtgcaaacagatcagaagcaaccgcattcctcccagaaccaaacgcatgaactaaacggacggaacagagggagctgatcaatcaagcaagaagaactgaggagaggaagctacgtacaaggatcctctcgtgcctcctctctgcagttagcatgcagctccccggcaaccaccggccggccgccgccgatcagcggcgaaactgttgcttctcccaccgtggaaatggggtctcgctggggtaagaagagaagagacgccgcactgcgatgctctgcaatgagctgcaagcttcttgccaatgagcctgtgctcatgtgcaggtagtagtggtataagagttacagcccatgaagagggaggaaagcagcagccgggaaagcgaaagcttctccctttgcctctctttccccacaaccaccctccttttggtctccctccttgcctttaatattccctcttgatcgccatcttctccttgccacttctcttgtccctgatctcctcctcttttttagcctttacctcttgcaaatttttaacagatgccgggagaagatgccttaatctcttcttggcttggcattctagctagaatgcatgcatacccagctggccttgcctacatgctggtgaagaagagaaagccatgaaatgcttagcgataataattcctcctatcagagaaaagattatgttttttgtgggggctgcagatcaaaatgacagcttttcttgtatgtagccatggaagattctcttactacagaagccagcttcagtaacggaagaggagagcttttgctgagttattttagctgggatgacagctcaagtacgcgaggattctagttggtgcaccacacgctttgatcttttccgttttccctaaccacacgaggccgttccatttggcgccattctgttaactgccaccggccgttctgaagaaggcgtgggatgcagtcagcgccaatgcaatctgtatctttcttatctccccctgcgctggtcagcatcatgtgggaattggatgagatgtttctccctttaaatattcagttaatcacataatccataggagaatcacttgacagttgacacccagagttgtaccacaattttacaataaccagtgtctgaatagactgaaagaatccctacaagaaaaactgaagatgaattgaactacataatttatatattagacgttaaaagcaaacacaatatctatttaatttctccatgaccccaatatatacgcctacactacacaaggctatcatcggcgagacattttttcactagagaaatgcccaaactcatgaacacgatactgcccaaggagcagacacacatagcccctgtttaggggagcttaagtcattatcgaaaaaaaagaggagcttaagctactctcagattttccagcttttaaaacaattcagcttcttgctcaaattctaaatccagaaattaaacaaggagacagaagacgggagatccattttcttctgattctcacaagttagatactcactagctgcttcttaaaattttccaaagtccaaacagcaccatagtgctctcaaggaggagtggatagttctaaatccagaaattaaacaaggaggcagaagaagggagatccattttcttctgattctcacaagttgatactcactagctgcttcttaaaatttccaaagtccaaacagcatcatagtgctctcaaggaggagtggatagggtaggcgccgtgcaccagcgggataatcgaccccatgcgtgagggcgacatctgatggcgaggatctc

SEQ ID NO: 13413 - DNA, 1706 bp, Oryza sativa
acatttaaatcattcaagaattacttactggtttggattgaataaacaaagttttcaacttcaatataataggaaatcaattcatttcaagtattcttaagcaataacagtatcaagcaggatggcatgaaagcgttattttaccttcatcctcaaatttgtcccagtcttcatcccactcaattgccccctcttgcttcccaggttcccaacctaacaaacaaggacaaactcgcagattatgtatctgaagaatgcaggaagtgaaattgcactagggcagtattttgttctactgataacatgccaggagttggatagtgtagtaccaaaaggaagctcaactgatgcagatggcttgaactgcagtccaaagtgcttgcaccgttcactaaaagctttctccatctcctctaattggtattggattcgatcagctcgaacctaggaacagtggaacagtgcacagtgttattcaagagagataggtgacaacacctaagtacctaacaaagttagaacatacctgaagcaaaccatcaacacttccaccctgtaccattttaactaatgcatcatgcagttcaaattttcctctcctgaacaaaaaccaaccaactttgattcaacacagagagacaagagataagaagattgcagcaaaaaattcaagtggtaattttatgcggtgcagcgcagagcaacctgaacatcacggaaggcatgttcttcaactgccagtttggaagctaactctgccacttgcttgtatttctcttcatacttcttagctaatgattccacctgaattaaaataaaaatcgcccatcagtgtgttacaaattaatgattcctaacacctgcatgcttccaaatatttaaaagcaagatcaaacggccccaaaaggggataaagtaataagcatgttctgtacctcacgtttatcagaggatgccctttctgtgatttcattcagcctgttgtcacaccgacttttgtacagaaccttcgacaagacaaaacaaataaaggaatgataactaaatcacattaataaatcaattttcagcaacctagttatgttcatttaaaaaatcagcacatgtacaagccagaattactttaattaaccaaatcattttgcacatgaaaactagtaagagattacaagtgtgcttacaagatcttgcatctttgtacggtagtattctagtttctctctggaatctaggacttgcttctccacctcaaccttcacaatgcaaaagagacaaaagacaatttgtttcaaagttcgtaaaagagcaaaatataacatatattaagcaatacttacggctctaactgtcatttataggaagttgggatggaaggtacaaaaagataataatatcacttaatcaagagaaaaaagctatcctgaacttgcaatcgatgagtgccaagaaacagagtatcagcatatatcagtcaacttaataatgcatggaatggaaacttgtatggcacaaagtcagaatttcataaagacattagtgggggatgaaataatttcataaggagtgaagtgcacaggcggtccttaaacttgtacggatgtatcatctaggtccctaaactatcaaaatgaattttttgggtccccaaacttgtcatgagtgtcatataggtccaaacgggcttcaacccgctccatgagatgatg

SEQ ID NO: 13414 - DNA, 600 bp, Oryza sativa
atgtaatccaacgttatactccgggagtttgttaattttccggccagacttcaatggtcttttcacatgtctagacgatttcatataatctttaaagctattcactttgcaattaccgtttgattgtcacagttcataaggatagccggcaccggtttttcaacaacaggcagatccattaatagatcacgcaaccattctgcctcaacagtagcagtatccagtgccgttagctctgcttccatggttgacctcgtcaaaattgtctgtttgcaagacctccatgaaacagcaccaccacccagtgtgaaaacatatccactagtggctttgatctcatccacatcagagatccagttagaatcactataaccctccagtaccacaggatacccagtatagtgaagccccaattccacagtacctttcagatagcgcattactcgctcaagcgcacgccagtgatcatctcccggattagaggtaaatcggctcaacttgctcacagcaaaggagatatcaggcctagttgcactagccaggtacatcaacgagccaatgatttgggagtattccagttgattcctagcaattgtcttg

SEQ ID NO: 13415 - DNA, 1906 bp, Oryza sativa
  unsure (1)..(1906): unsure at all n locations
cattaacggcctgaatacttattgtattccgtggaaatntactaattatatttgaaagtgaagcacactgcaatctcttatgtacatgttttancataanctcccccccccccnncccatgggnntttgattgattgattnacgcattgnaagnannccancanagggacttaaaaatcaagaacaagaacaatgataacaaaactgaagagccagtacatgacacttgatacacattgactccctggaaacaaaaccgtgaaacagaatatcacatacgctggtcatcctcaagagtaatgatatgccttcactgcaccattgatgctggcatggcatgaacccttctctagcataaaaaccgcgttatagccactccctggacatggcaattgctcagggttgtgtttcgccttggtggtggatttcgcgaggaagcctgtctttgcaagttatgcgcagctcctccaccaaatccacttctgctcgcctttctgctgcctttcgcctcggcgttgatcttcgcaatccaactcctttccttgtccttgaacttatcatgggctcaagttccttttttcgatcatgccactttagccatgaagacagaataagtacttcaagttaatgtcaattcaggtagcagcatattaaagcatgtggaagattgcaagaaacaaagtcaaaacagtgaatgggaaccacatctgggactttatttgggaacgatattgctttgaattattatgacactagtgcccaaattgttgccttagctatgcgaagaagagtagcacaaatattagcaataggatgcaaatttctgcatatgtgggcttgttcatgcagtgcaatcaattttagggcatggccgttaccttggttaatctctccttgagttttggtcttgtagatactaccactcgtgtcggctgagcatctgattttcgcagaaccaacttctgatgttgcagcttttttatccctctagtttgtagtttacttctctctgctgcctgaagcttcttggctacaattttcgcctctgccttttcaagcttcttcattattctttccctctctttattccataggaacattgatatcatctcaaactttatcctgtcatagctatcccaatccagcttatcttggcagtagtcaccatattttgctgcttctgcaatgctatttgaccatatgcgaagaacctcctgtcttgctttgacagccaccattcgccttttcccagatctttctcaatgcagcacctattttgtctttgcttgcttgtctgaaacaggatcagccatcgattgcttcagagtatgcatagacatgttttatatgcatccatctaggtagcagaaacacgcatttacctatgcaattgtcgatgtcctagcattttcttcctaacctgggaatattaaagaaaacaaaataacttgaattgaatttatgtagacaattcacagtccatagccaagtaggcctttggcagatacaagtgtcatgtgaaggtttcttacatgacatcaccttgggatctctaagagcctcggtagtccttcgcttgatgagttccttgtgctctacaggtgaatgagagactctcattgtattgtaataagagactgcgtatccactcattctaatgttaaatgtactgaggcaaaaaggacagaaagagcttggtcatacctttgcttagtttcctcccctgaggccagggaaaataaaaaccctcacctttgggcgtgaaccaaggttccggcttcctttaatttccttcattcgccaaccacttgtataagcattatcctgtcaaagttgaggcctgacaaggtgaaatgtttttgcactagcttcttaacatcctcttttttggcgatgggtgcgaacg

SEQ ID NO: 13416 - DNA, 7600 bp, Oryza sativa
caaggtagtataaatgttacaggcttagagtaagtgttcataggccaaatgcgttattgattagggccaatttctcgaaaacgctcacctgagctatgccacattaccacattggacaaaaataggcgaaaaaaagagatgacattagaaagccatgggcattacctagcacaatggacggccgccgccatggttttgcggccttgcaccgcagcactctgttgctgtttcgaatcacctgggatgggaagatgcttcaaaaagaacaaaagaacaaatcaagtgagggcgggagagatgcgggatgaagcgagcagggaggagaggaggagagcagccacatcgtcgaccaagaaagaaggtgcgcgagtgcgaatggggatgagaggacgatgaccttatcccttctcctcgttcgtgtgctcgtctaagcccacgagatgatggtcctactagctacattgtcggcccacaagaggatgggcctccttgctacattgtcggcccacaagaggatgggcctactacaaaggcggcccactggatcggatttgctgaaacaggagctcaccggcgtcactgctcgtgttttgtggtgttgagttcgttcagcacacaaaaattcacaagacaaaaaacgaggagtttcagcaacaattaatcctatatatacatgcatgatgcatcaatggcgcatcgacaatggagaagaagagatgatctcaggatcgaagcgaggtccaggaggcaaagaggagaaggttccacgtgtcaggcagcccgggcaggcaccagtggctgcagtcggcgtacgatcccggctgccgcctttgctccggcgtcagcagcttccctcccctgaccgtgaacactgacgggtgcgcgtctcgccggagctccgacagccgggtgatgtccaggtaccccaccgccgtcctcgccctcctcacgttcctctccacgatcgacaccatccctctcgggaacgcctccacgtactcctccgccctcgccatcggagccgtctcgttgtagcaccagttcttgctgtgccaatgccaatcatgtcattgttttccaatgttaagatcaagtaattaagctgataatcagttgaaattcgatcgagtttacgaacttcttgtgctcgggggagatgctgcggaagaacaccatggtcttgtgagagtccacgtttcgatcgagccaccgcgtccatgtccggagcgcgcggttgaaggcttcctccgctcccatctccaccttctttccgttcctctccaggtgatcccacctgcaatgcagtagtcgtcaagtctgtgtcaagccatggacgcggatgattttgatgaggtctggagctgagaagccttacgccctgaacttgccggtgtgcgtccaccagtggcccgtgttgaacaccagcacgtcggcggcggcgagccggcgatacgtcgtcgccgggaggcggtccagcttcagcaccctggtctggtcgtcgaggtccaccaggaacgggctccagtagaactccaccgtgcagttgtaatcctgtccgtgatcgcaaaaaaagttcaactgaatttcggtttgatttgctgatgagtagtagtaaaatgcaaaagttttttttttttggtttgtctttagttaccaatgcttggaagatcttgtggtcggcgctggcgtcgtcgacggtggcgcgtgagcggtcgggcgccgcggcgtagaggatgcaggcgagcgactcccacatgttgcggttgagcgagtcgccgacgagcaccactcgcttgtcccggcactgctccagcatctccccaccacgcagcctgataaaaaagtgaagcattattcagtgcgacgtgtgcgatttgcagaggattactcatggagaatcaacacgattattccggtcggaatgatgcaccggaggaatcaggaacagtgaccggggttggttgtcatgtgtgcaactagtgtcaactatgtgtttcaaagtgaaaaataattaattactgccataacactagtagtactatgcacagggcactgtcagagctgtgttcccaactcaaaagcaacgcacatcgtcacaagttgacaactttacccacttttcatttaccttttgtatccaagaacgggccctgagacagtgcgacttgcacgggcttgttcattttagccatcgattacgactgtgtcacaggggatacacacacacaacggagagcattcatgaacgattcatgcgcatttcaaaaacaaatcagattcagaatctactaaagagaccagctttagtttgtctgtccaggatttaaaacaaaatgaagagaaatttcaaaaaggcagaagagatgcaaggtaggtagcagtggccacgcacctgagagcggcggcgcaccgcctgggctgccaccgccagtgctcgtagccggagtccggccggccgttcctccggcaggtgacctggtcgctcaagaaggggcactccccggcgtcgtagagcggatagccggccgggtcgtacacccagctgccgtcgaacaggtcgcaccggacttcatcctgggccggcgccggcgagccatcggaagcagcagcagtagctgggctcggcgcaggtgcagcagcaataatggcaatgcggtcgggcggcaatgagattgaggacgcctcgtccggtcgcttgacgggctccgggtcgtcttgggagaagaggagggcgcgggagaggagaaagagcgagaggcagccgagggcggcgccggcgaggcgcttgcgggtggccatggagggtggtttcagcttcaggggatccattgctagcttagctccaactgctacttcaccggttgctctgcctctgccactgcacttttcactgggatggatgtacacatctgcaactcggtagtagcagtgtatatactggagtggtactactaaaccataaaaagaaaaggaaaactcaaaactgaaaaacaaaatttggaatgtgttggttgagttgttgctacatggaggatgaagccaagcccccaagcagtgcattgtttggttggttttgcatctatttttatgtagttatgaactagtatgtggagtggacgagtggttgcgtttgggggcttgctgctgtctgtttgttccctcttcctttgccactgacactgtgtgtgtggatcttatctgagcttagctctgggacttgccatgtgccagcaaactgaaatcaaatgtattactccagcagctagtatccaattcaacagattgtttcaaactcaacttttttaaaaaaaactaaaccggcaggagaactgctaattatatttttaataagtaggagcaaagaccctagacgggttacaagagaagagtttcaaactcaactttgtagtacatatcttcctcttattcttaaaaaaaaagtgaactttgtacagattggaatcgtgcaaatcaggaatgggccgaaagtcattgtgggccaagcccctggtccaaagttcaccctccggccctggctggctaaggaataacgggcagcccaaactaaaatttaattcgctcgaaaaatagaagaaaaaaaaagaggaaaaagagagaggaaaggaaacccgagaccctcctcctcgacggcgtcggcagggagagggaggggcagagcggcggggaagagggagcgggatggcggcgtggtttaagctcggtggctccgctgtgcgcgccatgggcgctctccggggatcgccgccggcgatggtgcggtaacgccccccatttcccctttcttctcttctctagccggattgcacatcacaagcgcctctccacgatcgtgttcttccgttccgtgattctgcggcctcaacgttgctcccttaggacagcctactcatgcccatgagcccactcctctcctcaaggaagcaccccccagtcaccggcgcgcaaaaattgctccttttttgtttgaggaaattggggatatatttcgacgaaacccagtttcgaggatggcatatgtccaattttctcccttttggatagatggatggatggatagaaatctgtacatggctcaggaagccagaaacaacagcatctcaaaggcccaagaacatgtgggaaaaaaaatcacatcttctcttcaaaaaaaaattaaaaaatcacatctcgcaaatttctttcagttttgacggcccagcatctgagcatctctctagcaaattctctgcggttcccacaattcatcttaatcgtcagcttgttgttatgatcccagctcatcctcctgaattaaggaggatataacagtgggaaatagttaaaagccccccttaattcagcacgtttacacccaacagcatataacagttcacaacaatcaactcaagtacttggatacaaagtgtagcagagtggaattggggaattggggataagcaatataggatgggaattagataaaatagacagggaattggagaaacagatgtgggggttcaggtaagagcaaagaaggggatagagcccgcggccattcagttctttcaaaatgatcgatgatatccatcctagtggcgcctgtttccctttttgtagtggctgctcgatgccagcccattgggcctaacaagccatagcctatcttgtacactggcccagcccatatccatgacattcctccctctttaaggttcagcttgtccccaagctgatgcaattgagctacccaagccttgcctccagggtcccaagaaatcactatcattgtggttaagtcatcctgaatagcagccgactctttgaccacgaggtgcattggcaacactgacagacacaaggcaatgctgaaaagttggtaggatagttgcatcaccacaacaccatctatgtgaggaatagccaacccagaatcacaggtagtgtcaacctgcacctccatctttccagaattgtagtgattcaattggatctctgtaacaaactctcaaatattccaaggttctttccttaggaagtctaaacgagctggaaaatgttgaatcggagtaatgttggttctggattgaattccttcttgatgccataatggtctccagcaatgttgatgatgcctccatcacaccaacagaatagggaatggaaaatgattgtaattgtgattgctgtcgcatatttccccccagcagtagagggatctaaatgatgctgaatattcatagaagtctcccaggatttgcagcgcatccctctacatcttctctccagggagaatgcttacacgtacaacttacttgctgtaacttggagttggagttatactctacacttgactgcacttacacctacaatctttttgcagcatgaattgtaatattttccctttgtttcgtttgtatcaggcatcagtgttcaccggtggatggctcctggggtcttccatctccagctggcagacgctgaaggttgcggagcagcagatcgacgccctggcgagggagcaagaggagtacctcaacaagtttgaggccaagtgggtcgaggaacttaacaggctgaagctcgagatgatgaatgagctcgaggagtcggaggaacggcttaacagggagattgacgtcctcaagatgatggcgaggatagcgatggaggagaaggagatgaggatggcgatggaggaggaggctgcttctccaggtcctctccagggtgagtccggggacctcggtgacgtgtgactgatggcgaggatcatcggaggaggcttgcctgcgccagatgtggatgtgggtgatcgatatgtatctactagtatctaatctatcattgagcaatataacttgactactagccagatgtagaaagttgaggattacaacaacagtaaaagtaagctgtcttgcctgagacccagaaactaggaaccagcacagtcaactgctactagctctactcattactacatgatgagaaattgccagcttccatattatggtggtctcctccttgatgtttttttccaactaattgcatgctgaggaggcttcgacctctgctcaaatcccctctcttttcaagttagctaatagaccatcatgtacaatagtccatctactgcttaattcaggactagcaaaaatgcctgtgcgttacaacaggtgaaaattttttaatgataatatacgctttccatgcataatcatgtcaatgataataattgtatcgatcgttgtagctaagacatattataaagaaaattgaaacatcttcaatatactgatcttcaatataatgacccaatctcgacgatggcaaccttaccaatgcatgttttacccaaacgaattggattatttacgtagctggacacatgtaatctaaaatactctttcaatctcatttttgctattaataataggatcaatcaaatcctacattgtctcatattgtcaactatagacaaataaagcctcaatgcactcttctcttaataacaattaaaaatatgttatttattatctatacttaccagtagtctgataattacatacatagatatgtagggtctccaatacaggagaatataatcgtggaacacgagccatgtaggagatggaaaaatcgaggatcctatccaacccaaagcctcgatcaatttgatctcgttccaagaaaaccaagcctaagcaagacttcttttagatccgcacgtctgaacattcgatgacgctttggaaaacccaaaactaccaagacgatggacgatacaaatgatatgaatctttttcatgaaatcagatttttttttttgaaatcagacaatttttcgcattgcacagtactgaaccggaaatttttataaacgcaggtttttttctcacgttgggtcggtttattcggagcagtctattttatatatggcggttttttcttgtgtggagtcagacaatttttttagatcttttttctcgtgtggattcagatggtttttttggatcccctttttataacaatttttatttgacagtttatttcagagtggttttttatttcacgttgagtcggatattctttcgaacctttttttttaaatgatgcctttttctttggttgagtcgggtggtttgtttgaatcggtttcttttataaagaggattttttataaactacagtttttttcctccattttgagtcatacatttttttcttttttttttggacaagacgactttttttccttttttacggaagtcagacctatttcttttttacggatgagtcgtttttttcctttatttatgggaatcggacatgaaaagtttttttttcctttttagggagtcggacttttttttcgttttctttactggcgatattttttttccttttcttcagcagtcggaatttttttaccgatgggtttttttcctttttttacgggagtaccggagtaggacgtgagagttttttttttcttttttacaggactcggattattttttgtacggacaagttttttccccttttttacgggaattacggtagtcggtgatgaaatactgtaaatcatttgtcaaacccg

SEQ ID NO: 13417 - DNA, 7097 bp, Oryza sativa
  unsure (1)..(7097): unsure at all n locations
cgctgcnngggttgacgatcgatggancanncancagnatggtagttaaaaacgaccncccacaccgnaagaaagaagaaaacaggnggccagagcggaggcccaccatcccttttatccaatataacagcttattttcatagtagatggaatgggcagtcaaagcgctattgaatcttaattacacaatgttcctcataagtgattctgtagaaactaaaaaacacaaactctggaatgcacatacagtcttcactggaacataccataattagagggttagagggctccatttacctcaggatctgttgattcaatgatgtcaaatatgggatggcctagtggaataatgtcggggaaaaacatccaagggcgtttttgagttatagtcagcatcagctccaatggaatctccataatcacctgataaagtgaaatgaatttttatatatatgccaagaagattatgcataagtgtgtgattaaacttaactagttcttaaaaagtagtgaacacacgagcaagctgcctcatgatttctgaaatagaacagttctatgtggtatattaaagtgaagcactagcaagctttagttgcatccagaaactgaatgtgagcagtccttacaccatatttgattatttgcatagcattataaaaggcagcagaagatatgtaagcgtaaagtacctaacaaattcaaagattgacttcatttcgtactattcagtagaattcatatttgttctgatagtaggacatacatacgctaaccaactagcagtaaatggtaaagtaacaaccacagaatgtagaccatatatatgtactggagtggagtgagtactggctgtggctggctctacattgtacttgtacatgctatttgtaatgcccctttgtaagtatagtacttatgtccaattgcagtgaattggaaagataatgatgggatagttaaagaaaggctcactctagctctgcggagtgggtcgacgtcccgggaggcatagacggccatcccatcggggccttccaagaactcaaccccgtacgcccgcatcatccgcgcgtaccctatccggtagaagtcggggtcggccggctccatctgcacacgacgacattgttcatcatgcatgcatgcgcgcgagcagaagagatgtgagcaacggaagcaactaggcgggaagagattgagcacctcgggcgggaaggggtcgtcctcctggggcggttcgaggagcctgagcgggggggcatcgtcgtcctcttcctcctcgccgacctcctccgccgccggtgggggtgccgcgggaggcgggtcccggaggcgagggcgtccggcgcggggaggccgcaagacgaggcggcgggcgcagggaacggcgcggcgaggcgggaaggtggaggccgggagggggagggggagcggcatcaggagaggggaagcggcgggagtctccatgggtggcgatggggataggaagcgcacctcctgcgatggaagaatacgttatctactgctgcgatggacgagacgagattttagcccattcaaatgaatggcccatgggccttaaaatctataacctcgcgaggaataagtgtatattagctcccttatcgttcgctcctaattgaatcacctccctcaaccacacaacctggtatagcgcatctcccatcttcaaaaactgatacaaattaactcctttatggtttggaaaacggttttctctaacgtggtaggttgaccgtacttgactcgttgagttagcaggtagaactcacatgtcagcaacttcctcctcatcttgttttcttcctcaccttccctctatctctctttcctctcttgtgggcctcgttgggtggcgacaacagagtgagtgacagcggtggagagtcgaacccgaggagagcggcagtggtgacgactgaccagccgaagccctactctcctctagtgaccacagcaaaggccagccaagggcctcatatattatctgtcttgactgtaaggaatacatcgatgagattctcggagatagttttttcttctatattttaatataaaggttctaatatatccagcagagctcctgccgttcaatgtttttaaaaattaatatcagggttgacccattcattcgtaaaaagattcagagtttacaagatcctttatacaaccagggatacattgttagtaaaccaagtgaacagcaagctagcttgttctagctaacatatgaaccacctcatcagctctgcggcttatggcttacgcttacatgaacaaaagaaacttaagtaaaacatcttgccaatgatttcatctcagcagcaataaagcccgttaaggacctatctctggcaacaacattcaactttgaggcaggggagggaatcaattaatcttgtttcataccaatattatctatctatctatttttatctttttagaaatctatctatctatctatgtgcgcgcgcgttttgtgctcagaaggtgatggcagatctgttctaatcgagaaaaccatgtggaacatatattaagatcatgtggagaagaaaaaagaaagagagaacaataaaggattctattatctagtcatatactcatatatgaagaaattaagatttttaatattattataacattattccaaaaaaaatattcttatatcagtgtccatacgatggtaaatatagatattatatggcacctaaaaacaatagatgcactacatatatataatttgttgtttttgtgtatttagaccgggaatacgtttactgaaagagagagatacatgaaaacatatgcacattgtattgttgtctgaaaaaattgtcactgctacactatccgttataagacaattagaaatatttcactcttttttaatatatttgctccagctatatacattatattttcttgattatatctcctattccatgatttttaaaacatacgtcttctatgatgatatgattaatttgtatgggattcatagtgaatattcatgtggaaagaatcattcctgatcgggcctaactgtggtggaaatgattatacgactttcatgatgtgcgctagccatcatgagcacgcccatgttctattttcattgagctactattcattttccattcagtgtacatgtgcatagaaatgtcgttaaatttcagacaatttcctccaaaaaccatgtagaaactcatcaatcatgatttgttttcttaaaagaaaaactcagcgttgctgaaaacggtttaacttaggagtgttatacttatacctataaaaacacaaagaataatacatacctgaaaaaaatgaaacattacttgggcagcgttcgtttggaggacattgagggagaaagcatctcattttccacacgcacgtttcccaaactactaaacggtgtgtgttttttgtaaaaaatttctatagaaaagttgctttaaaaaatcatattaatctatttttaaaatttaaaataattaatactcaattaatcatgagctaatggctcacctcgttttgcgtatcttctcaatctactcaatccacttcttctcaaacacacccttgagcaagttttgtgggagagtttgatatgcttttttaaaaaaaagaaagatcagagactgataatcgatcccacagtccactgacgcgtggcccccaccccgaaagcgccggcccacagctcagccccgggcccagcacggtgcgcctcgtcgaactccccaccgtgctctgctgacgccctgggactcctctcacctactactacctgacctatatgtacccaccccactcacagttggccccactcaacctgcacccaccacgtcagtgactcactacccgtcgcgcgaggcccaggtggtctcgcctcccgaaccacgtacgcacacattcaaaaaaaggcaaaagaaaaaaataaataaaaaacgaagagaaaaaaacacatctcccaccgcaccgcgacgcaggcgcagacgcctgcttctcttctctcctctcctttcacgcacacagcacagcacactcatattctcttcctcccgatcgctaccacctcctatgcagctcacacccaacccccacgcaaatctagaaccttgtggattgcgcccttgctcgatacgatcgccctacccgtcagccgtccgatcggatccccaaagtgaagctcctccctcctacccattgcgttcagatagctccatgtttggcatccgtttggacccatgcgcgtgctccattgaatctgagctcttcgcctgatgctgtttagggtttccggtttgccgcccccgcgatttagatggtttacgatggcgccgtgaaggaccaggagagctcggctaacccggcgtcggcatcggctgctctgtcggaggcatcggcggcggcgtcggaggtaacagcggctgccgcggcgggggcgggggctggggcggcggaagaaggggctgctgttagtgggcgaccgccgaggcctccccacgacaagcggctcggcgtgcggcatcccttgaagcaccgcaggttccgcgccggggggaaggtgatggtggagcccggggatccgccgtccgcccaggaggtggcggatgaggaggccagcgaggtggagcaggaggcggcgccggtggagagggaaccaccacaggaggagggtggtgatgtagaggtgtcgtctgcaccggcagagatggaggtggtggagggggatgcaatggaggtgtcacctgagccagcagtggctgtgggggagtcggagttggaaggccgaccaggcgaggaggaggaggtgtcctcgcctgtggtttctcaaggggagaggaagcaggagactgctgctgctgctcctgtgccagcagtggaggagaagaaacacaaggatcaagagaataagcacaaagagagggaaagggagaaggagagagagagggtggatgaagtgggctacatgagtggtggatggaagaggtaatacttgcttctcttttccctattggagcttgcagataatcggttctgtaggcaggaattctcgtttatgcatttaattcaaatacaccatacagcttctgttctgatatcgttcatatcaagtggcgtaatagacgtacgttgagagcatgcttctgttctggtatcgttcatatcaagtggcgtaatagacgtacgttgatcatgcttctgttctggtgtcgttcatatcaagtggtgtaatagacgtacattgatcataaaatagacattgcatgcccaacatagctttgcgacagtaagcggatgtggctttttagtagatttgcaatgctccattataaccagaaatgtaatagtgattgacctatttagaattgtgcatttcagtggaccagaacctcaagctctatgatctcttagactagcatgtgtgttctaaacaaagtgtcttgtctgaaattgcatgcaagagtagcatgtgttatgattgtgctgaagaagcattttgatgtatttatgtagttccactatttggcagcatctttctggattttttatgaattactattcatggaatattgtaatgtcatcaggaacaaaagaaagaacatggttttaatgcgtacaaaagtaaatatgatagcacattaaaaaaaaattgcttacgtggcagtaatgtaaacattctaccatgctactttagctaaaatgttcataccgagttctggcaagctataataacaggcgcaataacatatgataccggaacaaatttcttcacagaagggtgctttcaatgctaaaatgtttgttgttatcataacttagatcttcatgtgatatctggtcataatatcaacacatcagatcattaagtaggccacttcattattacattcattaatcaaactaagctaacttctcctagaattttttttatgtgtgcctctctttgttatgctccatcacatttgccaaataatgaatattttgcacttcgtatctatttttgtatttattagtatctttggtgatagaaaattagacatcaatccattctgctttgctaatgggtaactttgagtttggtgcttgaaatgtagtctggtggtttaatggctggtccattattggagatgaagcaactcaggaatagaatattttcactttcttgtttgatacagatagattatatagtttagatggagtgaaataaactttaaatggttttatggtagtagcgttatctagccaggttttgcaggcagaaaatcctttcttggtacttgctgattgacgtgataaaaattgaatgggatttctcacgctcaagtaactgttcggaccctcagcccccatattattgaaatccaactgattcaaatacctgtaactaatttctattgacatatggcttctttttcttcatgccagtagattgttatttgtagaagaataactgaataggcactgtccttttatcagaatgtaaagttaattttaccattatattacatgaatatcataagcattttcatctatttctttcttaacattaggccttgttatttgactgatttgcagtgaggatggatttctgagttgtggatattcgagttttagaggaaaaagagcaagcatggaagacttctatgatataaaatcatctaaaattgatgataaacaaataagcctctttggaatatttgatggttggaaaattttccttcagacctctttgtgtctatcagntggtctattttaaacgtttcttttcttgtgcaagtcatggtggttcacgtgctgctgagtatttgaaggagcactttgtttgagacctcattgaacatccagagntcatgacaaataccaaattagcaataagtatgatatttgttcctagctgtaccactaacctcttcaaaaatcctgtggatattcttgtgatggagtaaactgatcaatggtattccacacgccgaacatataaaaaacctgttcaaagtttttgtatctgaagcccactcatgagatgatgatccaccgcttgacaagccgtttggttgaaa

SEQ ID NO: 13418 - DNA, 35976 bp, Oryza sativa
ctgggcaatttgataactgatttacaccagttcatcacaataagtatgatattgttcctagctgtaccactagcttcttcaagatcctgttgatatttcttgtgatggagtaaactgatcaatggtaatccacaggcgaaacatataaaaaaactgattcagagtttttggattctgaaagccacactcatagagatgatggatcaaccgcatcgacagcggttttggttggaaatcatctctatgtggcaaatgttggcgactctcgtgctgtaatatcaaaggctggcaaaggtgcttctgtttacaaaagatgttgttcatttatttaatactggatgcagttgttgcattctttgtggcggtgtacctgctgaattgttgttaaacatttcgtttccctcctatttatagctattgcactctctgaggatcacaagccaaatagaagcgatgagaggaagcgaattgagagtgctggtggggttgttatgtgggctggtaagtcctgcttccatcaacacctagagtacacacaatactacaatatctgtgttctaatctgagatggcatagatcgtgccctgttattttggagaagcactgacatacataggtggaggagacttgcaaattgcgactatcatcttgctgatgatggtaaatggacttttgcagaaacttgaagggtagtgggtgtacttgcaatgtctcgggcatttggcaaccgcttgttgaagcaatttgttgttgcagatcctgagattcaggtaacatgagcagcacatatatataaatatggcaacacattgatcctctgtggcttatactttactatgaagtgtgaactcttcaactattttatcaggaacaagaaatagatgatgaattggagtttctgattttagctagtgatgggctgtgggatgtggttccgaatgaggttagtttgctaatctatagcttccctagaggtgcagaaattcatttgtttgcattatatacatgaaatatactttattgggcttcaaagattggatttgtggcatgtgcaacatgtggcggcagtgaacagcattagggcgatgctctgatatactgtgattttgctgtccaactactgtgtgctactgctgtcccataaaattatggtcataacaatataaacaatgatgcatttgactaggtttatacttaattaagacattaaggtcctaattcaggagcacaacctactccttcacatctgagttgcttggtgcataaatttgttgtaacaccactatcatgttcgtgtcactatgaagcttgcattcatggaacttgcagcatctttactctgttatggaggtgcagtgtaacacatgattgtatcaacatacttttacagggcttggtatttatttttcataacacccttactgattgtactctcttggtcataaatagttgatgtttaggacaagattccgtcaaacttctaaagttccgacgggagtgaataacattattctcgtattgatttcttgctcatgtggcttctattttgtcttgaacatacacatcacatattgcatttatggaatgcggtttaacacatgacactgataataaccatttacacttatatagggcactcttactgactatagcgttatttctctgattggtgtcttgctcacatggctgcaatttttcttgaatatacacacatcatgtcataatggataatctaattatgctcccctcttgttcatagtgcattttaaaacatagttaattcggctcatcgtgtttctactatgttgatgcaggatgctgtttcactcgtgaagattgaggaggaacctgaggcagcagctcggaagctgacagagactgcattttcccgagggagtggtgacaatatcacatgcattgtcgtgaaatttcaacatgacaagatggacggtgattcctcaccaacaagcgataaaagctgattccatttgttgtttgttatacatgttgtcggtcgtttaacttcagctggattttcccggcttcatatggtccctacaatggcgtagctggtactaaagactcgcttcatgttcgcctgtctatatatccctaattttggtgcctctggtggtttacaagttggtattgctatctatacttctctttagtctgcaattttgtagatgttatagaatgaaatctttcctgggccgaatacatccaagccaatatgtgtgaagtccatggatgagcttgttgatcaagactgatcccaggccagtggagttgcattacatgagctcccaatgctgggctaccatctttctggcactggaggtttaaatgggctcatagtctgatccgtggcaatggcatggctcaaacttgaaatacatttatgtcatgtgcgcagaagcacagacaggattgccaaggctggcaagatctggagcagaagcagcactatagaacgtgaactacacatggttgctctattcccatgggccatggatcgaccatccagagaggaagatgattgatggtcctgctcctgctcctggccctatagttctacagagatgctgctttagccttgggggcaagtttacaagcttgagcaatgacatttccatttaattgtttgtgtggtacatccggcagagtaatagtttgagtgagaatggattcgattgcgttggtagctacggcgtgtccgtaccgtaaacaccgtaaggctgtgtgtactgtggatttggttccagtagtgccgttgggagatggagcccattggaccacctctacctgttccatccctactgtttgtacagtagaactacagaccagacaaggcattcgagtactcctttaagttgccagttctacactatttaagtactcctatgctctaaccagaaatactgcctattgaatgctgtattgtgctccaacaaatgcacaccgagaaggctatcacttgatactacacaggcaccaacctggattcagcttggtgctaggttgttctgaaaagaaaaaaaagcttggtggtaactggtaagcagccaggtattcttgtccagaattccatgcaaaatgagaacactaataactagcctatgttaaaagaagacacttgtggcttgttcactttgctttcattttcaaccatacaagttttgggcattgccaaattttagaaaggttgccaaattttagtaagatttcatatgtactcactaaaatttgacaacaaattaaatgtagtcatttatttttgggtaactttgccagaaaaaggtaatgttaaaaatggtagcaaagtgaaaagccgttagatgagaatgtgactccacctacttagtcctgaggccacgtggaatgtgagaacaaccacaattcttaccgaaattgagctgcctcatttgagactcctatggcatgccttgatggagcaatcgaaaagttgcacacgtgaagatttgctactccattaataaatcaggatatgctacttttgaagaattgaacatgttgcaaaaaaaaaagaaaaaaagataaatcctcaaataataaatactcgaggaaaatattgaccccaagtaacttgtcctcttgcactgcatatttgcatgccaccccagaaaggacgagagaggcagtgagccacagtgcaagaaaccaaaccataatactagctcgatccatgacaactacacataattgcggaccacattaactccactccacgcgtacatccagccacaacacgagggacaccaccttttcagtgtgaccgtgtccacttcacttcacttcgccgtgctcgccatcatcgccgctgttgctgctgctgctgcttcttgccaagaagcgatcgatggtggcgtcgctgcgcctctccctcaccgcggcggcggcggcggcgctggcggtggcggtggcgctgctgttgccaccgctggccgcggcgcagggggagacgacgtgcccggcggacgtgccgccgcgcggcgcgtggatgtccgtggcgagcttcggcggcgtcggcgacgggcgggcgctcaacacggcggcgttcgcgcgcgccgtggcgcgcatcgagcggcggcgcgcgcggggcggcgcgctgctgtacgtgccggccggggtgtggctgacggggcccttcaacctcacctcccacatgacgctcttcctcgcccgcggcgccgtcatccgcgccacacaggtacaggcacagcacagacgacagctcagctgctaggccatcgccatggccatgtccttcttttacctccaagacctctcatcttcatcttgtcgagcatttgtactggatcaggacacatcgagctggccgttgatagacccgttgccatcgtacgggagaggacgcgagctgccaggaggaagatacatgagcttgatccatggtgatggcctccaggatgtgttcattacaggttctaattctctctacatgatgacacctcacttcttgtcagttgtcaccttgtcctcaagttactgtttcactgcaatacgtgtactacacatggcccagttaacttgcagtcggcaaaataaatcagacctgcaattttaaaaagttcacattttctttgtttgtttagacttctgaagcaagatgatgagaatgccatcgaacttttgtgtcgttgggatgttcaagattccgtctttctgtgacctgtgcaggtgagaatggaacaattgatgggcaaggcagcgtgtggtgggatatgtggaggaagcgaacactgcccttcacaagaccacatctattggagctaatatcctccactgatgtgatcatctccaatgtcgtcttccaggattcgccattttggaacatccatccggtgtattgcaggtgaacacaaacagatcactttgttatacttcagagcctacactccaggcattattgtgaactccattgctcacatatggcttttggacactccgttcaattagcatattgtgcttctgcagcaatgtagatccactttgatggatgtagaggctgggttttaatccattatctaaaaaattagcatattgtgcttctgcagcaatgtagtaattacgaacgtaaccgtgttggctccacatgactccccaaataccgatggaattgatccaggtacaagagttgtttcactttgtaaatctgtgcgcaaaattccctatgcctattctgaatcaagatcttggactcaaacactgcagattcaagcagcaatgtctgcattgaggattcctacatttcgacaggagatgacttgatctccatcaagagtggctgggatgagtatggcatagcctttgggcgacccagctccggcatcacgatcagacgtataacaggatcaggaccatttgcaggctttgcagtgggaagtgaaacctccggtggtgtggagaatgtccatgtagagcacctgaatttcttcggcatgggtgtcggaatccatgtcaagaccaactccggaaggggaggattcatccgaaacatcacggtctcagaagtgaccctcaatggagctcgatacggtttgcgaatcgccggagatgttggagggcatcctgatgcatcatatgatccgagcaagcttcctgtcgtcgacggcgtgacgataaaaaatgtctggggtcagaacatccggcaagccgggctggtaaggggtatcagggactcggttttcagtcggatttgcctctcaaatgttaagctctatggtggtgattctgttggtccatggaaatgccgagctgtcagcggtggcgctcttgatgtgcagccatcgccgtgcgcagagctgacaagtacatctgagatgagcttttgtacaaattagatcagatacaaaagtgaatgatagtcatataatccatcctgaaataaaattcgtcatgttccttttttttggcaaaaggttgagttgttgtgccgattgattaaaaatgtaactgaaacaatgaattgtacttatccaatataataattcagtaccatatgtggcataaaagatcaattcctgcgttcatatgtatctgtaaaactacgtcaaatctacttccccaatagggaaatgcatacaaattacaattgtatgtatggattaaaaaaaaaagcaagagacgatgcatatgaaattcaattcattttttagttctgtatacaaatcgtaatcataccgacatttacagaaatagaagttaagtatctggctctgcaggagatcccctggttaattgatgttttaaaaaacattatagaatggggaatgcggcggcggcgaggtcgcaggcgcaacaggggtaacctgcatcacgattcctggagaggccgaaccagagcttgtgttcggcgaggccggtgaaggaattctctgtgacttgcccccaggcgcgccgcgcgagacatcgatcggacgcgacgcgtcctcagctcgtccgagaacaagatactgtcagcgccgccgacggcgacggcgacggcgtgggatcctcgtcctccacgcgggaattggtgacagacagctccaatcctcgtacgaaaatctggcgtcctgcaattcgtccctgtccacaagatcgggcacgaccgcctgggattggcaactagcgacactagtccttcttgtttgctgcccaagtgccgacgacgtagaggtggtggccactggactacggagaggtggtggaaccctacttagctagtactagtagctcaatgcccagacagcctgaattgcccaatataattcactattcacagatccatccaacctatactgaaagtaaaagaactgagaggtcattttaccttcctctcctccttctccatcttctccttctcaccctcttctcgaactggcacactcactcttccgcgtcatataacctggatgaagaaagccgataagagccagtaatggtgggtgaattgatcagctagttcagtgttcaccagtaatcattgcaagaacatttcccatccacaaaatggtgaaacctaacagcatcacgaagaataatttgtcgatcacatagagaagagatatgctttgccacctcatggcagtcgttgcacatcctggtgttcttcatcaccctgacaggcgctctacttgcatctgagcggatcagcccataagtgatagcaagcttctcagtatggccaaggagaagcttctctttctcttcttcctgaacattatacgctatgcagctggtgtctggcacatatcctgccttttttatttgaaacaccagacgaataagctcttcatatatctctgcagtttcaggatgcggcttcccatcgacctcaaagacatggataccttgctcaatctgtatccaactccacccaggtctactatccactcctcttgctttcattgcatatttcaggctctcagcttcatcatacatccgttcatactcatacaaattcatcatcaacaaatagttggctgaattgtaaggctccagtatgaacaaattcctcgcagccacctctgcaagagcaagattcccatgtattgagcatcctgtgagaagtgccccccagtggcttgctcctggatcaatcggtgacctctcaatgaaatccattgcctcatcaagataaccacaccttgccaagaggtcaaccatgcaggcataattctctgtcgttggctttacaccatacttagtctccatactgtcgaagtactcccacccttctgtaaccaagcccatcgatctacaggcagttagaagtgcagtgaaggttatggagtccggcttcaatcctgagttccacatatcatggaacagttctattgcttcgcgaccttgcccatggactgccagaccagttagcattgcattgcagagcaccaaattcttctgctgaatgctttcaaatatcacttttgcactaaccaagcttccacccttcgagtacatgtcaattaacgctgtgctcacaaccatgtcacagtcatatgctcttcgcagcgcgaagcaatgcagctccttgcccttcttttgcagagctaatccagcgcaagcccggagcaacactgacatggtaaccaagctgggctggacaccatccttctgcatctcatgacaaaagtagaatgaatcttcatactccccattgtggcagctacccgagatcaatgacgtccatgagaccacattgggcgtcacaccagctgccttgatctgccggagcagcagcaccgcctgcgagctctggccgttcatggagtaaccagtgatcagaccattccaagtggttatatccggatcaagcctgttcttcttcatcaattccacgagctccagcgctatgtcgaaccgcccggcgttggcgtaccctgcgaccagcgagttccaggtggtcaggttcctgtgctccagcgcgtcgagcaccttctgggcgcaatcgaggcggccgcacttggcatacatgtcgacgagagccgtccccgtgtagacgtccggctcgagctggttcctcaggaagaagcagtggatttccatgccatggcgaagcagccccgtgttggccactgatttgaggaggctcgacacggtggtggcgtccggtcgcagcccttgcttcagcatgctggcgacaacgccgagcgcttcccggtcgcggccgtgccgggagcagccggacagcacggtgttccacgtcgcgacgttgggctccggccccgacctggacatgcgcgccgcgagctccagggcgtcgtccacgagtccgagccgcgcgcagcacgcgacgaccgcgttccacggcacgacgctgcccgcccccatcgcgtcgagcaccctagtggccgccgcaacgtcggcgttctcggcgtacatgccggcgaggaatccgggcacgagcgggtgcgcgtccagggcgagcttgagggcgtacgcgtggacggccctcccctcgcggagcgcccccgcgcggccgcacgcgtggagcacccgcgcgcaggtgtacccgtcggcgggcaccccgcgcgcctgcatctccctgaagacggcgatcgcctcgtcccactcctccgcctcggccagcatggcgacgtgcttgttccacagcacggcgtccttggcgccgtcctccgccgcctcgtggagcaggcgcgcgcaggagggaccccggccgaggcgcgcgagaaggtcgacgagcgcgcacgtcacccgggggtcccgcgagaggccggtcctgaccgccagcgagtgcagctgcggggccaggcggcgcgcgacccggtggtcggtgtcatccccgtggaggtcggcgcagtcccggagcagggagacgaggacgccggcggagtagggcggcacgccggtgcgcagcgccgccgcattaaggaacggcggcgcgtggcgggggcgggcgaagggtggcgcggtaggtgggaaggagagggagacgagctgcgcctgcgccttcgccatggaaaggaaggaaggataaggtcaacttttttttttaagagagagaaataaggtcaacatatgtggaaagatgggcctatttagatttcatgggcctgtccagatgggcctggtccgtctaataagggaggcccgaactgcaatatctactcgaaaagaaaagaaaagaagagagaaaaaggaatataaaaccatcaccagaaggggagagcggcggcggaagggagagaacagaggtgtgtgccggtagagaagggggaaaggggggaaactgatttaatagctcgggtggacgtacgtctacccgtttatatatgtcatctacttcctcacattaatcgaagaaaaagaaaaggcagagtccatatagaaaatacaatttagaaatagctgaaattcaaaattaaaaaaataagaaatattagaagaggagaccagagtccatatagaaatacaatttaaaaatagttaaaattcggaattaaaaaataaagaatattagaagatgagaccagagtccatatagaaatacaattaggaaatacctgaaatttggaataaaaaaaaaaaataaggaatattagagtagagtaccaagtccatatagaaatacaattaggaaataactgaaattcggaattaaaaataaggaatattagaagtagagtatagagtccatatagaaatacaattaagaaaaaaaatagaaattcagaattaaaaaataaggaatattagaaatagagtatagagtccatataggaatttaaaactaactaaaattcagaataaacataataaaattaaaagtagagttttgagtccgtataaaaatacaatttacaaataactaaaattcgaaattaagaaaaacatgaaaagaagagtttaaagtcaatataggaatacaatttagaagtaactgaaattcgaaattaaagattaaagaatattgaaagatgagtttagagtccacatagaaatacaattagaaacaataaaaattcagaaataaaaataaataatattggaagaagagcttatagtctatatagaaatacaatttacagaaaattcgaaattaaaaaaaggaaatattaaaagacgagtctagagtccatatagtaatatatataatttacaaataactaaaatttgatattaaaaataattaataactaacacgtatataaaatacaatagaatattacacatttgtagtttcgtaaacttattgcaaaatttaaaatatgatgtcatttttatatatttgaataatataatgagaaaatatatatgctattatatgaaagaaaatataatgatgctagccgcgcaatttgttctggccaccatgctagttcatattaatgtggatgaatctagacatatatatctatctagattcattaacatcaatatgaatgtggaaaatgctagaatgacttatattgtgaaacggatgaagttgataattatgaaaaaaattaaaaaatatatgaacaagatagattaatatgtaatatagcaatccacaaacatgaagttaaaattcaacatctacaaatcataacaaaaataacaaacaaaactcaaattactatatgcatatttacaattaaatttgttatttttgttacaacttatagaagttgaatttgaacttacatgtttattgaatgatataatacatattgatctatcttgtcattttttttgaaaatttttcgtaaccatctagttgacatgcaataaacgagtggacgtccactcgaactattagaattcatctccggaaaggggagccgctgcaaggaagacatatagaatacgcctccatatgtggaaagcctaatgtgccaatgctcgtgacatggacatctcgcgaatgctttttaacaatgtaacgataaatggctggttagggtttcgaggtgggatggaaggggggaggtggacgttgtgaaggaggaagtgggggatcgagcttagatggatggcttgggaagctgtggaacggtggtgtgtggcggacaaaggcaggcgacggtaccaccgtaatgcggggtcgacaccgtagtcattggtgacgcaactgccactcttacttcttaactcctctcatttccctgtcctcgcctttgatgccaacccaccgctatcctccatccctatagttctatccttcatccccataactctgacattgtcatccaccgtctcgtcacccaccagtgtccaccatccaataccaattcttcgtctcttacaaccatctctctggaccccaaaaactcccatctttcctcttccccaccaaccctcctatgttgaccctaaactcaaacccgaatgctaaccgattgagatagctgaaaagctcactcgagcacgaatcacgaagctatatccaatgatccaaaacctacaagatttgatcttcgattttatatggctggttagttctcaaaaacttttcccaaaaaaatcacatcgaatctttagacatatgtatagagtattaaatatacataaaaaataaaaactaattgcacaatttgtatgtatatcgcgagatgaattgtaacgctccgcttttcgcgtgacgttaaaaactaattcgacaaaatcctatatgcaaaaatttcgttctttgagtgagagtctaagtcgtgccatggatctcaattcaatctccatcattgttccctctcatcgccatcaaaatcctccacctcaagtttccaatcccgattcaggtttccgaaatcaaatcctgaaattcaatcgcctcctttgaatcctcgccaaatacttgtcccgattccacaaatatccgagtccaccttgaatccattccttgactcctccctatttccctgagtccaagtaatcaaattcgaaattcaattccaaatccaaatctcttccaaatcatctctctgcaaaagtctattttgcctcccccttggtcggtgggccgattcttccttccttggcccatctcctccctcagactcacacgtgcgttgcacgcgccgagccgagccgagagagagctctctcgctctctcgttctttctctctctcgatgctttctctctttcacgcgccgacgtcgatttcccgccggcatcgctcaaacctccaccgccttcgctcgttcccgcgtgcgctccctccgtggtggctgaccgcccttggtcgccatccgccctggcccgcctgcgctgcgcagccgcccgcgcccactctgccgccgcccccacctctgcgccgcagcgcgcgtgtgtccaagatgcggaggcagcgcctctctctcccacgcgctttctcctccctcagatcgcccaaaatcggcaaggagccgagctcctttctccctccccctttttgctttttccccgaccggcgccaccgtcacctcctttgccacccgtgaccgcctctgtcacagcttgaccgtgagtctgccaccgcctctccttgatcgtccgtgctcggttccttcccctcgaagctcgacatcccgcgcctataaaaccacagctgagcccctcccctccatctctctcgttttcgccccccaccgcgccattacagccgaacaaccattgccgccctgttgccgctcgacccgatctcgtcgtcgccgtccgccgctgagcaccggaggaaccggtgcgtgcgtgggcgcgtgacgaggagctccgggcgccacttctcctctctttctccccggccgcgcccactcggtgccgcaccgtcccaccgtcgcgaccacctcgccatgactccctccgatccgcgacgccgtttcctctcgtcggtgagctccctgccgaaccctttcctcctaccgcttgctatgccgcgcccgccgccgcacgatgcgccgcgcgcctcgccgttgctctgtttccgctgccgcgcgcagtcgcgcgccgtcgtcgggccccagctcgtcgaccaccctcgccaacactgtccttgagctccctaggacctcctcaaaccattccctagcaccgccgtcgcctggcatggcctcaccgccattaccgtccgctcccggaggccgctgctcgtcgccggccctcctcagtgcttctccgccccatccgacaccggaaacggattccttgaaccctggagatgctcccacccctttgaatcgaatcctcgtcgtctcgttgtgttttcacctttttgctcgccggtgattgccgccgccgcaatccaccaccgtcggcacctctcgcgccgattcctctcgccgccacactcccggggatccccttgagctccccctgactgtccctaggccgccggccttctcctttgcctccgcgccgtgtcgccccttccgccgccgcataacgccaccgcacgtgcatcgccggtgaccatcgggtcccgcgtcaccgcgtgcgcgtcgcaaccccataccggttcggctaagtccgagcccgcgcacccttcgctcttctcgcgcgcggccacgtcggcgcgccagcgagattggccgccgccgccagccgtcgtcgcgcgtcgtcttcccgatccgagcgatggaatgagttccccttctcctcctcctgccgccagtgctagccgcccctccggcttgccgctgttcgccggatcccgccgcgcgccatgagccgcccgacctcctctcccttccccatccgacgtgacgtccacgttggcgccacctcagccgtcggccccgcttgaccaagtcagccgacgcccagtcagcagccgcctcctctctcttgctcttgggcttggcccagtagccaccctcctcctcggcctgataagtaagacaaacaaagtccacatagactccctttgtccaagcccagtgtccatcacccaagagctaaaagtccacaattactccctccaattgctcctctctctctcaccttcttgttggccccacgtgtcaatgagtcaaagatattcttgggaatatctttttcaatactccacacatatttctcttttctagaaattcaataaatcatttcctatattccaaattccataaacccatcctcttaatccggagattccaataattcgtcccctcgagcccgtatgtcagtggatgtcaataatattcttgagaatattatttctataaattccataaaccatttctcgtattccagaaaattccgacaaatcatctccttgtccagaaaaattcatttaaacttccaaaattcatatccctcgatccgttcatccgattgcctccattccacttccagtaattccattgaattgtgatctatctaatggcactattaattagcctaaatcggacattttatttggtctttgcttaggtttttgattgtttgcgcctagttgcggttatcggatatttttcttcaagcggatttctcgaagatttgtgaagcttcgtgaagaccctgagcaaggcaagccacctttgaacatattgagcctatatttgaacttatttatgttacttgcaaaatattatgcattgataggattgcacttaatctgtttgccccgtctgcaaggcagaccggtgggcctacctaatttgttgcatctgatccttctattgttaattgttatatcatgtttccttgtaaccatctagttgcgcctcgataattcgtgcactctgtgcgagtatcgatggtcgccttcaaacttaaaatttgagtaacttcttgggtaacacttggtttacaaaagttttggaaaacccgacgcctgggtcggtgccttgtgaaagaaaatgagttttaaaaatgaaactcgcgacacaaggccattcctgggtggaatacttgtgcagtcgcatttaaggaccgattccttcggaattacatccgagcatacaacagtgcggccacatgggtgtaatgggacgcccctggctgagtaattagctaatcaggagaaccatgatgccaagagacatgtggattcaacggggtggtgtcggggagaaccctcgggcttcctggcacagtatggtctgggacctaacctgttgttggtctgggacccctctcgttggcatatggcaaccctgtgtcggctttggaaatgccttgtcgtgaaagcctcaaagtcgccagacgtggctgttctgcacgggctgggtgacctaggttagtaacgtcgtgtgggtaaagtgtaccccctctgcagaggttattaaactgttcgaatagccgtgcccacggtcatgggcggatgtgaggtgattccttaacgtagtttttgttttaccctgttttatgaaaatgtgttaaggtttgggaaacctaatgcttgggaagcatttagttttccgggggacagcgggaccgggtgtccctagaagtgattggtcgtttggggaccactattatcgagaagtttggaaaattggtttggtttgggaaaaccagatttgaagccaactctgggagttgtgcaaatcttgataaataaatttgttacttctcacctcccgaccgagctgagacttgtctcgctctggttgtggaaagcacacacttagattgttgaaaacttgaaaacaaaactgtttgcaaaataacagccttccctttaagcttgcattaaccacctaagttcccctggcttgctgagtacgtaagtactcacccttgctctctatataaatatagttctgccagctccgaagatgaagttgaagtgaagtgaagattagggtttcatcctagttccctgccgttgcctgtggcgttgggtgttagtccgttggttggttccgctgctgctgctgttgttagtgtttgcctcgtctgtgtcgccggttgcattctcgggctgtctgagctgcaacctaagttaaggtaaataagtcctctattaattataaggatttgcaatgattcatgtttgtcactgtgggtaccagcgctatgtcctgggactggtactgagatcgcggtttcgtaggacgcggttcacgccgttttactacgacaagctcctgccacgtgccgttgtacggcggtgccagattgaggtgtgacacaaatcttttaagactaattagtccatgattagctataagagctacagtaacccatatgtgctaatgacggattaattaggctcaaaagatccgtctcgcggtttccaagtgagttataaaattagtttttttattcgtgttcgaaaaccccctccgacatccggtcaaatgttcgatgtgacacccaaaaatttatatttcaccaactaaacagaccctaaagattagcaattctcgttccctatatttgtcaatcctcaatccgtgtattgtgacccttgaataaacacgtcaaaacaactaaaatctttgattactattagatcccgtagaattatttcgtcactgacgttaggggcaacattgaacttttacagcacacggggctgaggaagaagaagaagaagatggttgccatcagcgcagctcggcgggcagcgcaaccctccggctcctagcggcctcctcccagttgagcggcaagcgtccctcccggtcacggctcagccgctcctgcgcgccgccgcgcagcttctccagccgcggcgcgtcgctctggtgcatcacgaacaccttccccatgttgaacaccgccgccaccagccacagcacgctccccaacacgcacatcgtccacgcccagctccgcccctgcgtgacagtcaaaccacacggttttgtcatggcgtcgtgcatgccaacgccggcggcgaggttgctcgatcgaatggatcgcgcgcttaccactagcaccggcggctcggggcgtcgtcggcggttgacgacggcgccgaccaggaagagcaggctcccgagaagcatcggcacctgcacgctcgactgcagcagctgcgcccgcccgtcggcgcgctcgtacacctggcacgagttgagtatcgaccccagcagccacaccagcgccgcggcgagcagcgtgttcgccgcgtgcgtctccctctcgccctgttccatgtcaaagcagagtgatcgccatgcgcgttgtgcacttttgccaacgatctagctatttgaaacgcacctgggagagcagaaaggccatggcgacgacggcgaggacgcacccagccacgtgcagcgccggcacgaggagctccacgaggccgagctgggcgttgtacctgaccagccccacgcggcagtccacgccggcgaggtgcgccgcgaggtcgtgcgcgttgacggcggcgacgagcgccagcgccacggcggccacggtgagcgccgtcctgctggccccgcccccgcccccgccgtccgcggacagtgccgtgagcgccacggccaagagcagcgccgcgaacacgtacgccccggcgttgatgtactcccaccgccgcacggtcagcgccggaccgtacatgcgcgcctccctggcggtggctagcttcaccatggccgccctgggactcagctcctcaactgaacgcgacgccgatcgaaagcaaacgctcgctgatccgctaagtacgagtaacagttgcggttgcgcgagtgcgtcaatgcggtgggcgggggggagtttgttggatgcgcagtcatggcatgcgactacgtggcgctatgcatggcatccagagcttgtgtgcctcccgacgaaatctctgaaagctagtggggacttggagattggcgtttctgcctccataatccagatggacattttgctcgccgggaactgtaccagtgttacatctggcaatggcatgtctgcaaattcaggtgtcacctgctcttgattcatcgagacgatgaccgataatatatttagatattaagaaatggagggatcgggctcagcatcagttcaatgaatcaaattaaactatagctagttaacgtatattcatagttaaatttgttttttacgagttatagaagttaaatttaaacttacatatttataaagtgatatatcatgtgttaatatatcttctcaatttttttcataatcatttaagtgacatgcgatcaacgaggggatattctctcaagggattaaaatagtttcaactcccgggttcagagttgctactcaattcttcaggttcagacttcagaaagtattatacagactgagcatcagttgatagaaaaaggaaatgtcttttcttttgaatgcacagcgtatgagctaagctaagcagggatcggatcatcccctgcaccgtatctatatgctaagtaagaattacttacatctgaggtgcatatgtaccgcaacctcacttggaaaaaaaactcgtggacacacacacacacacacacacacacacacacaccgttcctgtatctataacacggaatcatctcagtgtattttgtatctgtaatctgcaatgcagaggggatcatgcagaaattatatacagcagaatatgcagagtagaatgaatacctgtggttgttggtatttgctaatgctatgcaggtttggggaattagtaagattgctaggaatacatgcttgtactacatgttttatgcacagcagagagacgagacgattgcatggtggttttcacatgtatctgcgcaggtattccactcgcgtggggtgcttgagcttcatgagcgccttgagctcgtacttgcgcaccatctccctcgagatgttgaggtttccggcgatctcgctcagcgtccgcttccccctcccgtccagcccgaacctctgccggatcaccacgctctccttgggcttcagcgaatccagctgcacatttatacatacattcgattcgaatcacatttcaaaggaaattcaagaacagaattgttctgttcatttacaacttacgaggtcgtcgattgcgaagcggttgagggtgttgtggctgctggtgtcgacgccgatggcgtcgtcgtcggtgacctcgttgatgagctcctcctgggtgaccctgttacgcgcgtggagggagtaggtgggcctcgtcatccgcaccacgtcgcggtacctcgccggagacagccccacctttttcatcacctcctcctccgtcggcgccctccccagctcgaacgccagctcctcccgagccctgtggatctcctgcctctcctgcacccaatcaatcaatcagccaatctgaagattggacaagacgagatcgagctgaagaagaagaaggaggaggagtacgtacggattccatggcgaaggggaagcgggtgaagttggagagggtgatggcgcggacgatggagtggcggatccagaatagggcgtaggtggagatgcggaagccgcgcttgggctcgaaccggtcgatcgccgtgatcaagccgttggcgcccgcctggcagatgtcgtcgaacctctcgtcgttggacatgtccgggtagtacttgttgatcgtgtacagcaccagccggagattatgctgccattattatattattcatgatcagtctctactgattgcgtacgtgacagtagtgacactagtttagtgagtaactgagtaccttgatgagcttgttcctggcagctcggccgacctcgagatggcgcctcatctgaagaacggacatgttcatggcctcggcgagctgtgcgtcgtttggctcgctctgcacttcgttctccaggttctccttcatttccatgatcgcctgaaatatgttgatccatcaaccggatcctaattagtcaatttctccaactaatcaaactagctaaaacagttagaatcatcaaggcaattggcaattaccttcatgggctgcatgatcctgaagaggcggatgctctgggcggaggtgagcacgggagggatcttcatccgcttccagtcgaggctgcccatgtcggtggacacggcgtgctcccggagcagcatctcctcgaacccccgctcctcgtcttccaccttgccggcgccgccgccggcctcttcttcctccctcctcctcatctccaccctcttccccaggtccatcctctgtccccgcctccttctccggctgctcctcaccgtcaccgtcgcgttccggctcctccccttcgatgacacccatacgcatgcacgatcaagatcgatctagctagcaagcgagaatccattctttcgatttgatttagaagaagactagctaggatgctcaccactctgccttttctcttccgcttggtctgtttgctcttctcgtcctcctcgtcggcgtccttctcctcgaccacggcggggctcagcttgtagatgctctccagcgcggcggccacctcgttgtagtccgtccgctcccgctcccgctccgcgtcggccgccgcggtcctcgacgccgtcggctgcggcggagggagcttggccgtgccctgcttcgccggcgacgcgagcgccgagcagctggtggacgacggcgtgcgccgccgcggcccgccgccgagggagagcacgacgggcgctgaccgccgcggcgagcgccggtggcacccggcggataccggccggctcggcgtcgtcacagtggacgccatggcagaccagaaaactctaaccgaaccttctagaaccttccccgctcgttcactcgtgtgtggaatggaatggaatggaagcaacaagcaagcaagcaatggcgtcgacggaatctcaggcgagaagatgctcctctcctccccgccacgccatataaggggccggaggcgaaggcgcaacggccgccacgagctcccctccggcgaatcggacggccaggaacccacgggacgacggatcggacggtgagggaggcggcggcgtggcgcggaggggcgcacgaggttggcgggagatatgcgtggatgaggctcgcgccacgtgggcgatggccataagccgcgtgatattttcgggatctctcgcttcggcttcgggtccctgggcccaccgatcagtgacacgtggaggcggagaaatcgggaaagtctgcatgggttggtgttccgctgtaattcagtgggcctgtaaatatttgggctgaatttgtggccacatgattttttttttggaattatattagcacaaattcttctgcaatttctgaggtccacaagattgtgagtttacgtgggcctaattcggccgttttttctcgctgaatggtcatcttgtacgactcgcctacggaaatctacggtgtccaccaagtttgcactacgcaaaaaagagaaaaaagaagggaagaacataatttgttcgaatctggaattttcaccagtgttcatgaaatttacaacacaacaccttagtgaactttcttcagcacacgcgtctttacgttttttggccttttctttttcttcatgaatcgatgatttttcctctttctcttttacaatgttttttttttgtgaaacctaatgaatacaaatgtcaatagtcaaaaaggcgccaaaaaccaagcactatcgctattcgttaggtccatttcagtccacgacgttgccgctgaagagcttgaactggccggcgtcgagcacgagcttccgtacggaggcgacggcgccgatgaggccgacgccggtgaagacgaccatgatggcgacgttggcgaggtacaccggcgaccgcctcggcggtgcgagcgccatgttgtacatgacgacggggagcacgaagtcgagcgggatgaagccgacggcgccgacgacgccgacgatgtcgccgaagaagggcagcatcgcggccacgaacgcgcacgccgcgacgtacgccgtccggagcgccacccggggcgccacgttccgccgcgagaaccggccgcgcgccgcgtcggccgagctcttctccatgatctcgtacgccacctgggagtagacgagcgcgatggcgagcagctggaggaggacgagcacgacggcgaggccgagcagccacgtcggcgccagggaagggcccttgtccggcatgaggctctgcaggacgttggactgcacctggctgccgaacgcccagtagccggtgatcgccggcaagtagaaggtgaacaacaccaccgtgtagcacagcaccagcgccttcatcatcttcccggccgccggcggcgccagcgtcgcctgaaaacattgccatcacgtcgttaaatcagtcacacagcttgcagctgtcagattctcagaaacaaacaagctgctagtacctggatttcaggcagaatgccattgccgaagacggaggcgaggatggaaatggagaggaacgcattgaaggtcttctccgaattggatgagctcagggagtaatccttctccgggacatcgctcaaagcacctgtcagacaagaacaacatcgctaattgttacaacaaaaattcagtcacaagagatgaggttaacatggtgtcgtgtcatgtcaatcctgtcgtttcttgctgtcacagtgtcacttgtcagtacgagattacactctaatacacactcaactctgaatctgaatgtcaagtaaataaatggcaggcgattacctgctcggatgcaggcagctgagacaaggatggtgtagccgaagctgaggaggagcgagccgaggttgatgtaacgcagggagtggaacgacggcagctgggagagcaaggacagaaccacagcgacgacgatgatgaaatggtacagtttcaggggtccatttggtgcaaggtccgagtacattatctgcacatatatgtgaagtgaaatcatcatgtctcacaggagtttcagaatgtcaaaaaaaatatagtaaacattcctaattgacacataaatcagcacaccgatgaaatgaaattaccaagcattcgtaattcaccacaagtcagagtggctaggacatacagtagtagactcttcagggtgtgttttggttcacgctaaaattgaaagtttgattgaaattgaaacgatgtgatggaaaaattgaaagtttgtgtgtgtaggaaagttttgatgtgatgaaaaaattgaaaatttgaagaaaaaattgggaactaaaccagcctcagtaccacttggacaagttggattgcgtggtcaaactcagggtttctctgtccttgtcgtatataaaaagtacggcttggtcttccattatctacgaaatataaaagtacaacttgtctaagctatttcaacttctgaggtgagatcatggtattgcacaatgcaactctaagtcaactcactgtagccaatattgttgacaaaggcaaacattttgttaggagtatgcagaattaattcagttattctatttctgtatgatcccttcccacaaagaaaagatgataacaacttgaatacaaagtccagattttctacataatcttgacagagaacgatgaagtgcaacataaataaacaaataaataaatgaggacttattattcagtttagtgtgaattcagtttcgtgggaagccatgcatgcgtgcacgatttatacatacttgtaagcagtcagccgcaagaaggatgctcccgatggtaataccggcgttgatggcagtttgcacggtgaccaccaagtagaacacccatccagatcctgccaagagaagagacaaaattgaattaatgacactcttaatgatgaggtaattaatctctacatttagaagaagatgaggtgcatgcggaccgaggacgtcggcggcgagctcgcggaagcggatgtggcggcggccgtgggcctcgcagtggtcgaggaccctggacatgaggtagtaggcgtagaaggtgacggcggcgacggcggtgagcgccaccaggccgagcgcccaccccatcccccgcagcgcgtacgggagcgtcagcaccgtcggccccacgatcgccgtcgtcaggtggaacccggcgtgccaccacttccctggaatcataattcaccaacaattaatccaagatatatactcctccggccatatgtgatgtgatcaggtagtagctaggttaattaggtgacctttggactcgagcacgaaggcggcgccggcgtcggcggcgggcttgatgccaaggcggcgagcgccggacgcggcctcgacgtcgaacaccgcggcggagggcggcgtcggcatggtgttcatcaccggagagggagagcggagcagagggctgcctccggtgccggccatggatctacgtcgaggtcaagaagaagctcgcatctcgctgaacacacttacaccttacagccttacaggggtatggtatgagatgagacgagaattgaattgtgtgtgcgttttgatttgagtttcttgtggattacaactacaactacaaccaggacagcgcgcgtgaggaagagaagtaggcctgaaaccgttgacctttttctttttgacaagaagattattgaaggagtcttgactgtatcccactcccaccccacggcgctggagacacgtaccactcaaaccgtgacgcttcagtttctcatcaagccaactaaccgctcatgcgttgcaggagacccaaggcagatacagatattatctactaacagcaggcagcagcacacatgtagattataccaacaacatggaacctatactgacaataaggatttctaaactaaacaccactagcctgttttgtactccctccgtttcaaaatgtttgacaccgttgactttttagcacatgtttaaccgttcgtcttattaaaaaaaattgtgaaatatgtaaaactatatgtgtacatgaaagtatatttaacaatgaatcaaatgatatgaaaataataaataattacttaaattttttgaataagacaaatggtcaaatacgtaataaaaagttaacggtgtcaaacattttgaaacggagggagtagtacattagataaatgaagttgaatatcactgtatttatctactgtgggtaaagtacaggccaatggggaaactataataaacttttgaggggatgtcccctagttatatttgcatgccacttaaacaattatgaaaaaaattaaaaaaattgagaagatgtattaatatgtgatatatcacttcataaacatgcaactttaaattcaactcctacatatcgtaacaaaaaaaacaaattaaattataactagttaacgtatatttatagtcaaatttattcttttttcgttttgacatgtagaaattaaattttaaattgcatgtttgtagagtgatatatcatatgttaatacattttctgaatgtttttaaattttttaataactatttaagtgttaaataatatggaagtagagattttaaaatccactctccaggcaaacgctacaatgcagcccaacccaagatattcagagagattatctataatcatcttgcttagcgtgcaggttgtactaacagcggcacacatgtagagatgtatagtacgtagtataaacgcaacataacacaacctgtactgacaagaacagtactaaaataacactagctctgggatcaccacttgcttgttttgtacagtacacaaatgcagcgataataaactgttcgttagttcgtacagactagagggatcagtggggcgtgctgaaaaaactgtaggaaatatacaggtcaacgctgcaatgcccaacgagcaacgatacacatgcaagatgcatggtactgtacgaaaaatgcctccagactccagccaactgaagatggaattgttctggcagataagcagctgtgcaatgtgcatatataatgcgaatttccatattactcctcccatcccaaaatataaatatccaagtacttttggctttccatatgacatagtagaagtttgttcttaaaaaaaaaatctactaacagatcctttacaatgtataacatgttgatttcagccccccaaggtgttcatgtgccaaaacactgttgacaaggaaaatacatttatcgattaaaaaaagcatattaataaaaactggaatcacaacagagtagtacgttattaaatatttcgaaccatgcactggtaagctcatgcatgttttccatgattgagtaatataatggcgcatttggtcagccaaactagagttgagtttcagtataaaaaacaaatgtaatacctttgtaaatgaaacctcaagcccaaatcatcaaacattcacatctgccacctagcaaaaggtggttaagattaaatatttacaactttacatacatgtgtaatataatgtaaaaaggcactggtatagcagacatattacaagcccacaacgatacacacccagaatattgtctatactctattgctctgtatcaacaacatatgcaggggacaggaaacaacatacccagacacatgaggaacttagagctgttcgcatgcttaggtcatatatacctaaagaatgcttcaaatgaagtaatggaatttgtacgacaatttgtcaactttgaatgagtaagtggtaaatatatataaaaaacaggtcgtcttaggtactcgtgtattactgttgctgcacactcaagcttcaagaagtacaatctaaaggcttcttccatgccacaatccaatttaactcccttgacagcttttacgtggaaatgagtttttgcaaagcaagggaacatcatcagagccagagagctaacttttctcttcagggacgtgcatgccaaatccacgttttaacttctcaactctgatcattaaaatttgaaattgttagtgcctggttttaagaaatctgatcaaaacgtagttgctgataaaatttatgttactgagtctaagcgttgacacgggagtaatcattatgaatagaagaaactagtaacacaaaactctcgtaatttcatccaaaggaacgatatgatgagcttgcacaatatcatctgatgatttacttctacgtatacaatagactacaaacaatgaaaatactgaaacaaccacagcaagatgaaaatagctaaaagacaaggttatgcatagagcgctctattctttggagggcaaaagatccgatgcccgtaaattgtggacaatgaagcttggataggacataacgaccaatctagttagtacaaacaaaaccggaaatctaattaaagaaataagaccagacaggttggaagagttgtaactactatgcacgcaagctgaaagtattgatcatgtcatgctctagtgttctatagctaaggtggtgtttggatccaaagactaaactttagtccctgtcaaatcggatgtttggacattaatttggagtattaaacatagactatttacaaaactaattacataaatgagaactaattcgtgtgataaattttttaagtctaattaatccataattagcacatgtttactgtagcatcacataggctataatcatggattaattaggttcaatagagtcgtctcgcgaattagtccagggttatggaatggtttttgtcaatagtctacgtttaatacttctaattagtgtcaaatatccaatgtgacagggactaatccaaacaacccctaaatttcctctggcctgttatgtgagatgcattagcttggcctagatgtccagagaggcagagactacagaggacttttcgtattctgtgattagagttgaggtgaaaagggaaaaaaaatcatgtacagtcgttggctgcttgttattgggtttttatatttagggtgtgtttagttcacgccaaaattggaagtttgattgaaattggaacaatgtgacggaaaagttggaagtttatgtgtgtagggaagttttgatgtgatggaaaagttggaagtttgaagaaaaagttgagaactaaaccaggccttactttgaaatgatatactcctattcaacaacaaattaactaattctttggcatagatgatacggtgcattggaggccatgatttcaaaacgtgggacacaagaacaacaggtgcaacatgaaaacaccactgcaattgactgaattgcctggtattcatgtttgttgatgcctgatttttttttttgttaatctggcaacataaagatctggttgtctttagctttgtcagaagatgctgtgaacctgtgactacactagagctatttgactagggttgtttaacttgaaagatattgctgctagatcctgtccagcctagatcttctgtcccctggcacaacatctttatttatttaaaattttgcatttttctcatgcttttttcagttagtaagctcgggcttttcttctcttattggttatgttggacagagttgtttcaccagtttggcatgtgttcaatgccttaccaatttaatacatcttaagccatgatctgaaccttctcctggctcttctattcttgttggatcacacactcaactcccaacttcaataattagtcagactctgttcattaggttgttctttaaaatgactagtgtaaggaggccaaaaggtgaaaatattgtgcaagaaatgaatggacactacgtgaccacaaaattctggaaatgctatttcacatggtgttgttcgaactgagctgaagaagaaacttacgtaggagcaagctttccaagctttcgtaattttttgccagttgtttcatcaatcacatttccattgatctcaacagaatatgattttccagatatccgtgggagacctcttcctgcaagcaattcaaagtctttctgatgaagttctctaccattgacaataactcctgtgttcccaccggcacaatttttcggcattggataattaaattcctttataaatggctgcaaaaacaaagctctgtcatgacgtgctaccacaaagttctagagaaagaactacgagaaaaataatcatcttacagggatgatgccactacactcatgtcccatgacaccccaaaatccagcgcggtagtcatacctgaatcacaattagagaatacggaatgttaccttacacggaaattcccaatgccttgtgaatttaagttggtgaagatccaacaaagttgctttggaaagtacattaggtagatgatattcccagagtaatttttactgtactaactttgcattttcctcgtctttgtatactaatcagattaattttaaaactgtagctggtaaaaggcagaccattgaattatggagcttgcatgtcgcaagcatgcagatgtgtgaaaataaattatagttcacactgtaccattacgattaacaataacagaacaaaactaatgttgcacatagttactgaatgccgagacaaagtaagaccgtgataataaattaacagatgttaatacatgaactaggccatgcaagaaattttttgagctactagcatttaatgggagcaatcaacagccaaaaaaaaaaaaaaaactctgcaggacaagaatcttccaggtatctcatcactgtacaaaatgttctagtaatcaactcagggaagtggttgatttggctgagaaaagttatcaaggaaatcaggtacataggttggttaatatgcaattgagaattacacagtcatttaatcaccgctgtgcagtataagtcatcttaattcctactgttaagatagattcttctgaagaataacaccaatctcttttgcctgtagttgtgcgtctcttgatttcaaaggcaaatgataaaaagatgctaaagaaaacaatgacaagtgccaacacggtagatatcaaacgctaagaacatcagtccataacaatttccaaatttatgaagggagaaggtgacttaccaatatgaaccagggccaactggaccagacttcttctcggccttccgtaggacacgttcggagattgaatggccattgattgaaaccttagcactgtccactgattgattgaacaaagaaatgtccttcaaacctttcttcaaaaaaccagcaaaaaactttgaatccccgttcttagtagctgcagactgaacttcgtctagttcagcctcagaagaaacacgagaactagaatttgtgcgctcattaactgatgactcaagcttcgatggcattatggcatgttcagaatttggggagagcaattcactataacaatcatctaagtcatcttgtttgcatatcgtagctatagtttcaacttgaatgacactgttattatcttctttgctgcatttgctatatcgctcagtaatgaattctgattgaaagttgttgtcatcttgtttgattttttcttcatactttttgctcacgtctccatcttcaaggctgctggtatcatcattatcagccgtcagcttgtctatgttacccatgcttccatcatcacaaaagccacttgtactttctttgagcttttgctcatgtctactgctgacagtttcttctccaaatccttctttatgatctttgctgttctgctcatatgtcacgtccgatctttcatccctaacattagcatcaacagaatctgccatgatatttaggctacattccttgcttgtgcgatctccaccactacaatcttttagacgactggaaaatggatcgacacatttgtcctctataactggggcctgtagattgcctgtattaaatgctgaagtttctacttgactgtatgcatctccttgacatagtatatcctttgggatatttgcaagtctggaccttctaacagatactgatagtaactgactgctcctgtttgatccacactctttgtctattctgtcataactagaagtagaagacacagaaatattgtctgcaagatccttgttctgctgccatctctcttgtgcttgcagcttatggaaactagaatttccttcatcctgatgttggtaccacccaaaacttttgttaacctgacgactggaactccccactgtttttgatgcagggaaagatgtcggcgcaaccaaaggatgaattttcacttccttaagcttgaaactaacgatctccgagcacgaaccacaccgaacttgaatctgcttccgagctgtgcatttcccaggaggcagctgcagcagctggttacaagaactgcatacaacgaaaggagcggcgcctctcacaggacgacagaaactctctgccttcttcctgaaaaactctgtcctcctcttcgacaccgagaaatgagagtacaatgacgaagcgacagacctccggtcaagctccgatgagactgatggggacctatcgaacaggtgagacccctgctggcctgcaaagtacctcgtcatgggaatgtgctcctcctgcatcacagctctctggccatgaaggcactgtgcacactggcaggtgctctgatggtgattccccccaagatacccagaattctcccactgcctctccggccattgccggaaccgcccactcggctgcctctcatacctatctctatgcatagaccgatgcagctggtcattcggactgtgcggaaagccagacccgtaccttcccgtgtagcgtgagcggtagtgctccggcccacggcctagcggcggcggctcggcgtgcgaggggcgcagcgaggccgtgcggcggctcatgcggtggcgctcccgcggctggtcggtgatctcgcaggacctggtgatgtggtcccgcagctcgtcgagcttccggagcagctccacggggttctccttgagcgcgccccaatccagcacgccactccggtcgccgccgcattgcccgtaatcgaagggctctggaaccctagcccttctcctgtacttcatctccttcgcctcgctccccatggcgccttccacgggacgagctttccccccccccccccccccttcgccgaatcgaaaaccctgcggggaaaacttccaatgagtcgctcgaaattcgtagccaccaaacacgaaatgggaagacgccaatgtagatcagagcagcgaagcttctgaatgctacggagaagcggaggaggcggcggtggcggttacctcgaccccaatgttgcggagcacacggcggcggcggagactctacggcgcggggatgcggagaagccaccggcagcggctcgccgatagggctacgcggcgaggaggaggcggtgggacgtggggttcgccattgtggtggatggagtggcggccgcgcgctgcggcggcgagaggaagaagacgagtgggggtgaagtggaaaagagaagcctaaatcggcgggaatccagggactggtttgtaattatcaactttctagggggtttcggcgcgatgtagctttgggtttcagttggggatgacctggctgagacgctgacgaggtgggcccacgtgacagctggtctgatctggctttgactagaaaagagcccccctttcttaacgcgccattgcttgctttatgtcaaacacagtaacagcgtgattagtggctgtgctcaacaacattaatactccaactaaaagtaaccaaaaataataataataatcggcctgtctatctatatatctatctaggtgagtgaggctgcttgtgtatagtttgtttgtaattttaaaatcttttcttttcattagcattcgaaggttcatctcataatttggaacgcataacaaccacatgcttttcgcaaactatgcaggagttagcttgctaaatatcatcctaaggggagttgacagagatcaaataattcgattttaaatctacatgtgttgtacggcgcatttttgcgatataaatttgtgtatcagggggcagccccttgtaagagccgcaataaacagtggttagtgcacgttaacaaatgagctctcgtggacctcatttttttagtgaggtatatatctcatttcttcaacaatactacttgttcttctagctatagtaatatatgagagcatacagtgtgttataatccaagcaatcagtttgtcaacgacaaaccagacgaatatatggacctaaacatgtggcatgttcctgtttctttattagaattttgtcaggttatattccatcagcatttgatcaatatctgacacaagaggctgaacattcattacaggacgttttagccttcaaacacaggcggcattgacaagagcctgaaaaacatgcagtgctacgaaaatgagaaagttcagagagatccaaaactgtactacttgagtatttttttttcttctggcattgatctgtatatctattgagttttggagtacatacataatagttaaacctgaacttacatttttcagatgttgaaacctgaaccaaaattgtataattgggtatatcttcagacagggaactgtaatggctgttgggttctggagtacacaggatagttaagcctgaacttacatttattcagataatgaaacctgaacctgcatgattgtaaatgtttccaaactctaaatgcttgcatgctaattaaatgcaatctagctgtagctgcctaatgcaggatacaattaggcaagctatgtggacaatgaaggttgagattaattagcaaagtaatgaagggagtggggactgaagaaaggctgaaaagtggcgagtcatgtcatgggtgatgagaaaacagcgaagcaatgcacctaactctcgaggtcggaagtggccaaagaagatcgatcaccaaacaaactagttagggggcgccaaccaaccaccgtcaaccacagacactcggacagacagctccaaaagatgcagatgccagtgctgcacatttggccacatgaaagtcgcattcaatttgcttaattaaactagtaatttgcctgtcgaatagcccatgctacaccgacgaccgtcggtcctcttctagttttcagatgagtgtgtcctcttaacaggagaagatttgcagctttttcgtgctgaaaaaacggtacggacagtccggtttgtgcgctgtttgtatccaagaacatgacgaaattagttgaaaaaaaaagtggtatctgaatgaagaataaggatgtgtttgtttctgtccataacattaacattttcttgatctgaaaaaaaaacattagtattttctttcagacatatatgtattgtaagatattcatacgggaccaaatcaagtgtacatgcgattcagatttgtagcatctgtgaaacgactgctctgcaatcatattcgtttcagtgtctccttttctaactgtatccatatatgttcatgcgtgaccaaaattaaaaataaaaaccagacatgcattatatctgtttcactgtttgcctaacagcaaaacagttaggcaaacatcacatgggtagcccactgttagccttccgctgatgggctggaaagtcgaactgaattcacggcccaccccctgaggttggacggggccggaagcccgcgtgtggagatgggccaggccggttacttcctctgttccgagatcaccgcctccaagctcctcacagtcacagccacaagggaattgaagccgccgccgcctcctcgtcctttcggccgtgtgctctcacgcagggcgcggcggcggcgatcttctgtgctagcgtggcggcatcgccgttgctttggaggtatgagctcctgtcctcctgtgcctcactttccccttcatatctcttggcttcttcaattttttcccgtgcaaccattcagaatttgtttttgcctaaacattcccatctgtcatagaactgctcctttttctttctttttctttttttggctcaattgctatgcagcgataggccgggcattttcaggactcaacctgggccgaacacgaaacctacaactgggctctgtctgcaggcctaatattacaaacttggaagaaaaaccacacaatttcggcggtgacacggcggcatacatacatcatcatcgatatgtctttaacgcagtggagaattatcacgggcgagcggcacatcaaccgatcaaattatcgatcttgacccatgccatgcaatggcgagcttcacatgtccaacaagcaaaagcagcgaagaaaaggcatccgacgatgcgaccacggagcagaatgctaacaacaacatagcagtatatgcatacggaaggagaaagaaagaaaagaagaaaagcagaggcgaggagcgcctcgcatgtgaaaaaaataactcaccggccgggagatggaatggatccctagctagcttggcggtcgaattcatcgtcctccatcgccgccgccggcagctggctcctctctccgctcccgtgcatgcatcccccatccctttttaattaaagccatctgtctagctagctcattcagaataatcctctttctttctcccatctttttagtttttagctagctttgcaacagctagagagcacagttcagttcagttcagaaattcatattcactgagattagcaaccatgcacacgtacgatgtgtgagcctcccctgcatgtgcccgtcgtgagttcatca

SEQ ID NO: 13419 - DNA, 24894 bp, Oryza sativa
agggtcggcacatcataacggaagtggaagaagatggacgtcctagtgccccggccgaagccgccaagaactatgtacgtcacagcggttgggttgtgcgggataacgtgcctgtcagtacggtgtactggcgaagaacaagggcacgcggagatcatgagagctttgtcccagattcggagaaagagatgctgtggaccacaatgctcgagacattcacccttcctgcgggtacagaggacaaagtgaaaaggtggactctgaagaaaatggcagaacagtttcagagcttcaagggagatctgtaccagaagtatatactgaaggggcagacaccgaacttcgacacattcccaaagctaagggatcactgggacgagttcgttgcatataagacaggtgaacaagggcaggcgatgatggaaagaaacaaagaaaatgccgccaagaagaagtaccatcaccacttggggtcaggaggctatagcgtcgcgatgccgaagtgggagcagatggaggctagcttgattgagaggggtatcgaaccggcaacagccaattggccggaacgattgaagttctggtactatgctcacggtggaacgctcaacccagctgatggctcactggtcttcggcgatcagatacgagaggctgcgcgacgactaacagatgcagtggaagcctcctctcagggcacgttccgaccagacagagatagggacgagctgacactcgccctgcagactccagagcatccaggacgaacacgagggaaaggggtgattccttggaagattggtttcaaggaggacatccacacgtacaggagtcggatgaggagcaagagagataccgaggcaaagattgcagacctagagttccgggtatcgagctacgaactcaacatgcaagaggaggtggcaaggaaggttgatgaacgcatggccgcacatcggtcccatgatccccagccgaccattcctcctgcaatggtgagcccgtcaggaaaccgtagcagctgcgcctcaacggggcaggtaggatcatagagcatggacgccatgcaaacacaggacgaatcgacctgtcccgttgatgacatcactcagcggacaccatgtgagctgcatattcctttcaagaacttatcaataaaggtaagatttagccattccgctagttgctgcttatatatgttgattactaataaataatctctcacaacatgaaggtggcgtcgggcatggccatcccaacggacccttcaggtacttaccactgcaggccgattccagcaggatactcgaaggtcgaagttgagttggtggaaggcgcgtacgaggacctcgagctggattaccctggaggagacggtgagacgcatctacgagacacatgccatgccattattctatggcgcaggcggtacatcatcctccctgggcgacaagcggcgtctcgtgcaccatctcctccggctccgccatctcctcctcaggatcctgcaccgtctcctcctcatgctccgccagcaccgtctccacctcaggctccagcatcgactcctcctcaggatcctgcaccgactcctcctcgtgctcctacacctactcccccgcaagctcctcttccggcaccttcaaagtcaagggcccccccagctccaccgcctgcccacacaagggcaacgaagaaggcgaaagttgacgccgccaagaacaaggacccggggtacgattgcacgcaagaggagcttgacgcttacgttgcatcagaagtcaagagacaattcaagcctcgaagtccagaaaagaagattcctatagaccccagtgtcaggaacttcttcaggggtatgtctgcatctgtcaaggaggccatcaagctatcggactatgagcgaacgctgaagaaagcatcttctggaaagtccaaaccagtccctcagcttggagagcaaccaaaccaggagatcgagccgttggtgaccggtaaagaaatgacgatagaacaatttattactgacaccggtctaactacggatcaattgctaggagtcgcaccaatcgaaaaggcgaaagtgaaatacatgtacgaactcggtaaaccgcttgtcaagcctgagctgctgcagtccctacccacacaaatgtacaagttccatcagctgtacatggagatgagcgccaccggtagagagatgatcggagcgaggatcagggacacggacttcttgcaaggagatgacattctctggatcaatttcaggggaatctacgaactataccagctggacgccctcgacgtctctattatgagttgctggattttgtaagtatatcgttcagttagatttcttactatacgtctcctttaattaattaggtccttgtatataagtagaccatagaaaataatatactcccttttatcgttgtagaatggagattcaaagggcccgacggcggagggttttcgatactggattcatcgaccctcggaaagtaaacgtcgcaatgctcgaccaatatccacaagaaacagaggacaatctcgtccatctcctgaaggcgcagcattacaagacgttcatactgttgccatacaacacagagttagtttaattttactgtcttcctacataccaaatttcattcccgtacgaacttgctaagtgtttcatatgtaatgcatcccacgcacattgcagattccactgggtgcttttactcatcgacctggaggcctgcaccgtcaacgtatatgactcaatggataaaaaagagtctacgtttgacaaggttttcgaacttatagacaggtaccgtcataagttcctttgttaattaaaaaaatcttgttatgttaattgctactacgaatcatagctttaaactccatgtagggcttggtatcggttccgtcatttggtccgcggcaaatggagagaaagacttaggcggaagttcaaatttcctgtgagtacacatgctctacatttatatttctccgattcaaatacatacaagtgtatattaattagatctctcgttgtttgtcatttatttgtagtgcgcaaagcaaaagcagggaactaacttgtgcggctattacgtgtgcgagtattgccactgccttgcagaccaaatcatgaccacaagagagctcgatgtacgtacaaataaattcaaaatttcattacgtagcgatttcttgtttaattactaatcaatttcatacattcatatagtttattcgcatgagggataacctgaccacacacaaggaatttatcgcggcggttcaagaacaactcatgggattcatcaacgaagaaatccttgatcccaagggtgaattctactacgacggaaacacaattcaccggtccttaacttctgagctagcagcgagtactactacgtcgaaatcgtagctagctaggacatataatggattgtaattaatacatgactacatatgtttctatatgcatgtgtacacattttctataatgtaaatatattttggtcatatatatatctatatacatatgcatttgcataacatatatatgtataaatacatatatattatgcatgtatatacatataatataatataatatatatatacatatatatatgtatgcatatatatgtattgaaacatatatatgcatggtttatatatatatatatatatatatatatatatatatatataaaccatgcaacaacagggccatgcataaaaaaataaggtcagctcgatctttagtcccggatggtgtaaccaaccgggactaaagatcgatctttactcccgattattttacccgggactaaagatagcgatctttagtcccggattggtactcccggtttggaaaccgggactaaaggggggttacgaaccgggactaccgagggtttctccaccagtgcgtatgtgttgcgaccgaagaatcttatgacggtagtgcagattaacaaagacacgggctagctcctctgtttattgttttggccgtcattactggccgtatgatggcaacacgaccgaaattgccgacacttttttaatggcaacttgctgtgagaggacttttaatttgcatattcactctgtccattaaaaaaaacaaatctaatggttttcttttcttaatggaactatgcccattttttgtgattattaggaatttctattacttactttattcttctatgtgattaaattgtacatgttgctatctcaacacatacgacaagtagtcgcttgtatatattgttagggagaaaaccgtttagcatgaaaaaaaaaaagatgatgtggataccttctttgtccggcgccccaaaatattgtagcctctttactactttactagtggtggtccttactagacaacaaactcaaactcatatcatttttatacaattcgaacctctaaaaatatattcatgggtaaagctttggaagttggacatacgacatgcaaaccgaatgttttttgcgatcccaaaataggagcatctatcacgctttaaactgagaaaactcaaacaaaactaagaatcttgcatacttcaattcacgaaaagttaagacatccaaaattaattaacttcattttttttattttgtgaccaggaagactgctgtggttaatttgagataacgcgcacatgatgcactacatggaggttcaggcacactacttaaatgcacgaaaagttaacttttggaggaaactgcaactgcaagttggcaagttattgggacccctgttggctaggaatttctgtcaacttattcttttccgtgatgaaattgggttgtaatctctcaacgcaacacgacaactggtcctgtatgcttagaaaaggatcggtttagcaggcttcactgatgtggacaacgcctttaattagtttgtccttacacattaggttaattggcaccccaaattttgtagccttgagtggtacacgtccttattatatatccaagttttcagctagctagctctactcataatgatctagtataatgcatgaggtcatgacatactccttccgtaaaaaaaaaagttctagtattcacaaaaatcaaaaaatataattctttttagataatttttaaaattgtacttttttaagaacaaagggaatgctagttaatactatcatgcttaattaatctgcttgcttatggatgtagaggatcccagcatgtaatgaactaatgatatgatgctgatatataactccaaatctatcattttaattgggtagcagagtactgtatttgcctaaatgttatactaatatgcggacagtgatgacgtgttcagcccagcaatttaacattttagcccttttacaaacattattctccaaataaatccccatacaattataactaaaaatagagctcaacattagcgtcaggtccatggcgacgaagtctaacatctcagcaccaaggggcaatacaatagtaagcaccagtatattttgtacttttctatataggacagctaatataattagaacgctttctacagagttcgatcagctaatatcaccagaacacttcaattagaaaagagaatgaaaaacagaggcatgggaagtcgatcatgccagggagagattgcataagaaagccactaagctactccctccattttagtaggttataagaagatttaattttggtcaaagtcaaactactctaagtttgactaattttataaaaaaaaaatagtaatatttttaaccaagacaaatatattatgaaaatttactcaattataaatttaataaaactatgctggtgttgtaaatattactatatttttctacagaattagtcaaacttagaataccaaagtcaaaacgtcttataacctgaaacggaggaagtacttaacatcgtatagtaaaaaaatagcacattcatatttatcaagtactataaagctgagcttcacatagctaagtggcaagactgatgacgctgagatgttgggcttccgcgtcataggtgtgactgctgaggtttagctttagtatttatgaggatctatttatagattaaattttatgaagggactaaaatgtaaaaattgttgatgttcagtcagagatgatatgttctacggagtatctacgacctggcaaccaccattggtgatgctagctaggcgacaaagcagcactttcccgggagagactgggaatctaggctatctgtactgtagctcccggccacttgctacctgccttcttgcaccttttctagcccttctgtccttttttttttgcttgtcagaattcagaaagaaagatgcactataatctatgcatatccaagtcaatcattcattgtaaaagtgtgtgtggttctatttgtaactaatcgttgcaatttcttatacaatctttagccctttcaaagaaaataaaatagaagtctgtttagagaagccttaaattctaaaaatcaactagcgagaattcggatatcctgagaaaaccaatttaagtttggcttgtagtttattttctaaattctgtaaccgagcatttttatattttaataaggcagctatcaattggttacttctcaaaacagagggctatattaattgctagccctcaattttgttgacacaaaatcgggctggcatttgctgagttcctataaatacaggcgtacgtggttgcgcagtttactgcaccagcttaagcttattagctcctgagagtgaagcccctatagctgatcgaagctatgaagaagatgtggcgcgccaacgcgagagtggtggaaaggagaggtggtcgcgaggccgaggagagagggggagtaattagcgtggtgcttgcccatggctatggcgcgagccaggcggtgtgggacaagctcgtgccctccctctccaagagccacaacctcctcctcttcgactgggacttcaccggcgcaggcgccgggaaggacgacgacgagtacacttacggcaggttcgccgacgagctcatcgcggtgatggaggagcggggcgtgggcgcgtcgggcgcggtggtggtggcgcactccatgtccgccatggccgcctgcatcgccgcccaacggagacccgacctcttcgcccacatcttcctcgtctgcgcctccccgaggttaattaattatcgatcactagatttcattcatttttgctgttccttaattaattaagcccctcaagatcaaggatgacatatatagcctaattaccgttattattattacagctatttaatttaattagttatttttaagcacaattatattagttagtcgttgtgcaacacgtgtttggttcatccagataccactcccagtagatagcagctatgctagcttttgagttttatcattgtcaactttgtgtgttaattgtcagcgtgtgtacgtccacgtcagcacactaatcgcgaccatgcagcagcagtcacgttcactgttgctcacgactcacccaacatctagaaacatcatcaattgcatagcttcattcacaggaagaaaacaaacgcctccttttcgattctttttccctagatagcgcttgtcaaatctgaccaatgaacagcaattaagatttggccggatcgaaccgggacgtcacaacaaacacttgctgctagctactctagattagatcaaagctagctctagtccggatgagatgaagcaggatcgatcaatcgtggcctcatgttagttagtccataacctgtacgtgtggctaaaaaataggaacacaagaaattatccatgtatcaatcagtcaagatgtttcagatccttgcaactaactaattaatattctattgccaaaacatgcatgatcaagcatctaattgattacttagcatttctacgatcgattgcatgcaagtacctgttgaaaattcaattgggcatgcagctgccagataggagtaagctactctgacagtacaagaaactgatgaacaaaattaaaactgaactagagaacgtatagctgatgaaaacgggtggtggatcgatcgatcaggtacataaacttggaggaggaagggtatgtaggaggctttgaggaggcggcgatccacggcatgctggcagccatggagtcggacttcgacggctgggtcaggagcttcctccccaacgccgccggctacgcgtccgccgtggagcacctcctcaagagcttcctcgccatggacccgaccgtcgcgctcaagctggccaagatgatcttcctcggcgaccagcgggaggtcctcgacggcgtgaagacgccgtgcaccatcgtccaggtgaaggccgacttcgcggcgccgcccagcgtggcggagtacatgcacctcaggatgaagggcgccgccacggccgtcgagatcatcggctccgtcgggcacttcccccagctcgtcgcgccgcagcagctgctggacatactcgccggcgtcctgcgcctccgggaggcggcggcggaggcggagcacgacgacgccggcaccgtggagattgccggtggcatcgatgttgccatataggttgtgcatcatgcatgcatgcttgtaaaaagtctgcacatatatgcgtcagagctagctgcatgtgtgctcccttgtatgtatgtttgtttgttttgttttcagagcatgcattagttgtactattatgttttcctgtgtaaacatatcatagaggttatgttacttgtacacctgcatgcatggtttgggtatgctgatggatgtaagtaccattttcaatgggacatataccttattaaaaatgtgtttaatttcctggggctgtacattaatttcttagccggctggctgaaatttttcctgaaatttaaaggacataattgatcgaagattcgtcagcgagcagcctccagccacagctacaccgccacccctcgtcccctcccccattagccaccacacgcaccgtatgtgtcccctccaccctgcctgcatattaccctcctatcttctctgattttacatcgtctcgaaccttatctacgtactgtgtaattgcaatctcttcctccttacacttttaaggtgtccttgagagaggccaggcccttagccacccgtcactggctttacccttgtaagagacaatattattacataatggtggtatacatacagggaagagcttttttattgtccttgagcctgtgcagtatcgaatcctcgccgtccgtctagcccaatccaatagctgagcctctgtaccgcgtggtactgcagaatggattgatgcggtaccatgtatgggagggtatttttgtcttttcgcatactctttcttctcctctcccctagcggtcacacctgggcggcggcatcggcatcggccgctcaccactagcgtcgtcgtggcgcgtcggctagccaccagcgcgccccgtgcagctgctagcaccacgggagccaccgccacataggccccagctgctggtcgcaaagacaaccaggaactcctcgtcaggcaggcggcgtcatcttcgtcttcgttgaggccacagcaaacatcgaacaacgagcgaggtcgcgatggaaggttttttatggacagcaactggagaggacggacagcaacacacgtgcttccaaaagcaacacatgtgaacagcaaactcgatgcgacggcgggcgcggcggcggcggcctcgatgcgacggcagccacgacagccttgatgcaacgacggtaatttctttagcccgatcatacccatttctaaaccaacggttagattatattgctacctcatggtaccttttcaaagatagtaaagatgctctatagggaaaatgttttgtactgttaatggagtgtgctgtttcttgtagatgatcaaaatagttacgagaaaatctgaaaaaaaaaacatgacaagatagattatactcggtatcatatacatattatgaccagggttggaaattccggaacaaaatttctaaaatttcggtcatttcagacccctccgatacgatattatttcagcctaaatttttaaatttttttgtgaattttggtaatatccgaaatttcagaaatttcggcatttcggtgaggaccaatcaaattagctaaaccgaaaagtttaaccctaattatgacagcacaaacaccgagatcatattctatctacacatggagagaaaataagaaaagcaaaacagatagcgaaatgcgcggtcacgcgacatgtattgatttttgttatttttgtttctttgcagttacatgtaagtttgaccatgcgtaaattaagcgagaattcagagttatattaagtttgatcatgatgtttgtggaaaataggtgatgcatgtagtcaaattttccacataattaaaccacatgaaagaaaaaaaagggtacacgccctcaaggcctttaaatccactgctgattacatgtacactcaattgtcagctgcacaaaaagtttataactcaagtacactagtacaaccttttcctctgtcccttttaattagtttagcttggccctttttattgacgttatttatctatgatatgagtagagggaggcaaccagttaatcttgtatacttacattacttttttttttcttggataattcacccagacggcgatccatggattgagagacagactgcaggaaggcagcttcatcaccaacatcgtcttcaacctcacggatgatctcctcgatgacagactccttggtgagcgtctccctgcacaagatgctccccatgtcgaacgcggcgaggcccgagtcgacgcccttcttgagcagcatggtggtgacgcgcaggacgcgctcgcacttggctggcatctcccacccatggaacctcagaatggcgatgtcctcctccgcgtccagtgaccttatgtactccaccgtctcctcgctgaatggctcccgacactgcggccagtagagccactcgaatgtgcaatcctcaaactgatcgatgtgcatgcatcatcacaaaatggaatcaggatcattagctaaatcattggccggcgtgttttgtcagtgcttacactctcaggaagacagtatccatggtcgatcggaaccagggtgaggccatggccttgttcgtctctgcaggtgaggatgttgccggcgtgcctgtcggcgttggccagcctgatgtccagcacgcagatcttgtgaacttcgtgcaccgggaacgcacgaggtcccatgtcctcgcagctgccgctgttcttcacgaacgcttgcaatgaccccaccttgaacaatggaggaccttgttcggaagctgcaggttgcttgaagctcctgtgcatgcaacggaccagcgcggttggcgcgacaccggcgaagcccacggtggcggagccatgatgtcctgcgaacgaacggcggccaccgggagggtggtcgaggatgtaagcggcgacctctctgatggcgccctcgccgacgcgtgtccccttcttgagcccctcgccggtgggcgagggtgggaggccgcgtgggttgttggccgccatgggctcctcgtccaccggcttgaacacggcgacgtgctcctgccccgacgcgttctgcatgaaatacgcccccccggtgccctccgacgacatgatcggggcgttccccttctccatcccggccagcacggcgcccaccaggttctcgatcactggcggaagcgcggccttggggttgacgatgaccggctcgatggcgaagtccctctgcaggtgcaacgtcggttgagcagcgtcggcggcggcgttgcggttgcgcgcgacgatggagacctcgaagtcccggtcgacgggcctggcggcgagcttggcggagcggtggacgagcaggtggatgacggcgccgtcggtcctgcagacgtcgtggatgaggtgggcgtcgtcgagcacctcgccctggaggacgaggctgtggtggtcgtcgtcgtgggtggagttcttggcgatctgctgcttgacgtagccgacggtgcggccgggctcgacgcggaacctgaacttgttgccgtggacggtctggacggtgatgaggcggaggtcggagatgcggatgacgaggtggaggacgttgccgtgggagacgccgtagtccatgatgcggctgtcgttccgggcgagctcccggccatcgaagacgagcttctgcttgcggacgacgaagcccttggaggtctggacgcggagcttgacggaggcgatggagtcggaggccatcacccgcatgggcatcatggagagccccggcgcggtgaggtagatgaggatagattccgcggcgcaatgcggcggccggatgccgttcacattcaggcgggtggccaggagctcctgctcctccctcgccgcgcacagggtggctccgccggcggccgtcgtcgtcatggccggccaatcaacctccgatcgatcgatgtgtgttggatggcgcgtccgtctggatgagaaacagctaatggctaatgggatgaagtgatcagtgacagactaattaacatgcatgcatggggcctggcctccgatcctgttcttggctcaggcaaccgcgcgagggggagacggcggcgccggagcgcaagaaggatcgctttgtttcctttcgtttcgtttcgttttgggaattgcgaggcacctctcttgttcatctgctctgctggggacgaccagtgccaaaattaggtgcctctggcggtttgtcgcgctcgccatggctgccatttggtaccaatttgagatgctttcgccggaattgccggggaagatggagtcctcgccgatccacccgcgccgcggaacatggactgctgcgattggttgccgtcccccagttttgcgctgcgctggacggacgacattgtgggccttctgtcgtcgggaccacatgcatttgggcccaaaatgatgccatgggccaattagctaacttttcggctggtaggcccaacgggagattgccatcatggtgtgtgtcctgaaacaacggacacgcacgcacacggcacatctcgctctcccgattcccgaatgcccagattccttgtagactgtaaactgctgctggtaattaaccgagtgtgtgtacttgtgcaagatccaggcagcaagtgatgattttcccagtgcatccttggtcgaattgaagtcgctgcagtgaagtgcggatcgatctatcgatccagtagaggacgtggcagccgccgctgttggctttcacttcaattcaattcactttgatcgatcagccaccgcgaagaagaagaagaagaagaagaagaaacaacatttaattccccagctagcaaccgccggccacctctctctcccaattatcctctcctcctctgcttcatctccaccacctccgatcgagatcgagatgctcccctcaacggcaatggcgttccatgtcttcctcatcgctgcgctgctgttgctgcctctccccgccgccttctccaaggccgtgcgcacccaatcccttctcgccaacccgctctccccggatcctatcactcaggagcagcagctcagcctcgccgcgccccgcaccaacgcctccacgctccacttccgcctcgcccaccgcgagcacttcgcgctcaacgccaccgcctccgatctgctcgcgcacctcctcgcccgggacgccgcgcgcgccgccgccctgcttgctgcacccaacaatgccacgcgcccgcgccgccgcggcggcttcgcggcgcccctgctgtccggcctcccgcaggggagcggggagtacttcgcccaggtcggggtcggcacgcccgccaccaccgcgctcatggtgctcgacaccggcagcgacgtcgtctggctccagtgcgcgccctgccgccactgctacgcgcagtccggcagggtcttcgacccgcgccgctcccgctcctacgccgcggtggactgcgtcgcgcccatctgccgccgcctcgattccgccggctgcgacaggcgccgcaactcctgcctctaccaggtagcctacggcgacggctctgtcaccgccggggacttcgcctccgagacgctcaccttcgcgcggggcgcccgcgtgcagcgggtggccatcgggtgcgaccacgacaacgaggggctcttcatcgccgcgtcgggactcctcggcctcggccgtggcaggctgtcgttcccctcccagatcgcccgcagcttcggccggagcttctcctactgcctcgtggaccggacctcgtcggtgaggccctcctccacccgctcctccaccgtaacgttcggcgccggcgcggtggcggcagcggcgggcgcgtccttcacgccgatggggaggaaccccaggatggcgacgttctactacgtgcacctcctgggcttcagcgtgggcggcgcgcgcgtgaagggcgtgtcccagtccgacctccggctgaacccgaccaccgggcgcggcggcgtcatcctggactccggcacgtcggtgacacggcttgccaggcccgtgtacgaggccgtgcgcgacgcgttccgcgcggcggcggtggggctccgtgtgtcgccgggcgggttctcgctgttcgacacgtgctacaacctgagcgggcggagggtggtgaaggtgccgacggtgtcgatgcacctggcgggcggcgcgtcggtggcgctgccgccggagaactacctgatcccggtggacacgagcgggacgttctgcttcgcgatggcgggaacggacggcggcgtctccatcatcggcaacatacagcagcaggggttccgggtggtgttcgacggcgacgcccagcgcgtaggcttcgtgccaaagagctgttaattacagtactccactacggagtattagtattactaagcaagggtgttaaaatcgaactctctttttttttttcctttttgtgaatcgattcactgcttaatttgtactatcgggtatcgttaatttgttaatcaaagcctcctatgcctttggattttggcaggagggagctgcatgtacgtaacgttgttgttgtgaattgtgatcgactgatgatcgtaggcttaatttccatcaattcaggataggactaggaccaaggctttcatctgagactcaggctagctttccctgccgttgggttggattctactgctgcatccacgcgagtgtgttcatcatgatcacggacacatggctgcctcaccggctttaatttccttttgctccagctcctttccccggccggcggacggtggcggcctcgccggcccgcagagacacagggagcgaagcgttacgttacgtcggcaacggtgaaaggcctccgatatgcatgatattgatccccagcgaggcggtgagctgccggccggccgacatgttccccttcgtcaacattaatgccccctcctttaagcaatcaccgtcaccgtcaccggctaacaaagcaagcaagcacgagctagatcaaatgagatgagatccgccattgccggcagcatgggactctgcgcttcactttacttcctactgtgcacagcccttctatatctgagctgtgccacgtactaataagttgtgtgccgatttatggaggagaaaaacatgcaaaactttgggccatgcccggttaaatctaggctgcttatatactcccttcggttttattttaattgacgctttgaacaatgacacgctctacgagatatatctttgaccttatttttctattataatatatacaacaaataaatgcatgtttacttttattataatgttttgaaagacaaatctatatatgtttttctagtttctttaaactaaatatttttaatattattgatggtcaaagttataaaagtttaacctcaaacttatccaaaacgttaattaatttagaaccagagggagtactcccccgtttataaatatttgataccgttgactttttaagcacatgtttgaccgtttatcttattcaaaaacttttgtgaaatatgtaaaactatatgtatacatataagtatatttaacaatgaatcaaatgataggaaaagaattaataattactcatttttttaatatttaaaaaagtcaacggcgtcaaatatttaaaaatggatagagtattatgttgggaataaatccactttgactctccaatataggtccaatttaattcatattcctcaatcgtgcagcatatttgcaaacaaaaataatttgtgaataaaacttttatatacatgttcttagcaatctaaaagcaaatgctgaaaaataaacttcgatgaaagaaccccaaaatcaactccaaatttaagattgaaaattcaaattttggctaataagcataagcgaaaagatgaggcaagtaatactggatatctcaatcaggtggagcttggggagccaccgattgccgggaaggaggtttgttgaccttgttgcccttgatcgactggcaaagaagatgtgcccttcctaggtctcctccttgcggatgctcacggcggcgagcttcagtgccgcctgtttcttcatccccctccttgtcggctgccacgaccctcgccatggacaatgggtggtggcctcgtcgccctagacctactggcgaggaatacccgcccaccctcggtctcctcgtggaggcttgcggcagcgggctccggcacaatctgcttcttgaacgccacaccccatggccctgctcgttgaacgctggatgccacggccctcgccataggtggggaaaggaaagaaagaaattgataagtgagagggagaaagatagaggtcgctaacatgtgggccccacatgctaacttgaccggttagactaggtcaactagccacgtcagcgaaaactaccataaatactgttggggcgattttaatagctaggtggtcaaaatatatggtatcgcaattgatggatacgaattagattgactctatagggactcaaagtgaacttattccttttactggacgcgcatgccaagggccctcttatggatgcaaagaccatatatgcaaaaaaaggtccatatttccgcacccaaagcttgggctggagcctggtgacctgccaaagggctctaactttaaatcatattggacctgggccatatagaaaccgtgcaacctcggtggacgtttcagcttattcctttctttctttcctgagtaaattccttacgattgcaaatactggctaaattaagtatcaacttattataacatcaacaatctattttagattaccgcaaaaattaacgatgaaattaccacaaaactaaaactctattactagtaccaaatactcttgtgttactaacaaatcagacccacttttcatacaggtggttatcggcgtgggtgaaacagtccatgtcatcgtgtgtactgaagtagtcccatgatagtaagagcaagtttaatactatagcccactgctagctccaaattatctatagccaatgtaatagctaattcatacaatatttagttactatactattaatatatggtctcatattcatacacacattacgtcttgtagtccgtgctgcagctggctacagatctatagcccgatgctcttctctctttttctttctctctttaaaatatgtttatagctagcttgcctgctattgtacctgctctaatacttctatgccatatgtgggctacaactcaacgagcatgggcgggaaaccaacgcggtcggctcacgaggcataattaaccaatttctttgttagagcaagtttaatagtatagtccactactagctccaaatcatctatagccaatgtaatagacaattcatacaatagttgcttattatactattaatacatggtcccacctattatacacctatcatacacccaatatgtcttggaaaccgtgctgcagctggctacagatttgtagcccgctgctcttctctctcttcttttatctctttaaaatatgtttatagctggcttatagcctgctattgtaccagctcttagggtgtatagttgctggccgcgaatagatttgggcgtttaggcggctttggctaaagtccatcaggggaaatcaaggccgcttgatcattctggcagtttgctaggtattgatgttgcatctgctttaaagtcagagttgatgtgtcgcttatggtaatcattgaggattataatagagttacagttctatgattattttatctataatcgtcgaaatatcattgcggtaaggcaatttaaaaatatgtcgataatatcgtagcaaagttataatttagtcgttaaatttgaatcgagagtcaaatgatatggccataggcggcatgcacgacacaacccgacccagtaacccacccaccgtgggctgttaccataaccaatatcatccgaggttaattgtgttgaaccgaattgagcgaccactggtggagaaaccatctttggtcggtcggccgaaattcacaatagtcccggttccactaaaaaccaggactaaagatcaaggactaaagatgatctttagtcccggttggtggctacagtggatatatttgatctttagtcccggttctaaacctgtcaggccccccgggatctttactcccggttggtgttaccaaccgggataaaaatcctaactttacttccggttggtgttatcaactggaagtaaagatctagaagatttttagtcccggttgatattaccaaccgggactaaaattcaacgcttaatatataatccttctttcctatccactcctccacaaccgcctcgcatttatcctctcagatcgatctccctctcctcctccccctccgcctcctccccttcctcctcccatctcccggccctctcctccccgtcctcccttcccatccgctcagatcgatctccctctccttctcccctcctccctctcagatcgatctccctcctcctccccctccgcctcctccccttcccctcccatcccatccccggccctctcctccccctcctcccttcccacgcagcaggcggccggctaggccgcgcacgggcccagtggcgagcggcggcaggcggcagccgctgccggcatttttttttttttacaatttgtgattcactaagatgtataattttgtgatttgttgcatgatctgagatgtataatctgtgatgtatttggtttgtgtgtaatttttttaagatttgtgatgtatttgatttgagtgtataagtaataagatttgtgatgtgaatgttttgggatgttactttgatttgaggtttgatttgggatatgtatcccacttgatttggggatatgtatcccacttgatttgggagaaaatacaggattaaactgtagctaaaaaacaatgaaaaaaagactgccgctaccctctctttattcgcagttggtgttaccaaccggaactatatctttagttctgggactaaagatccaaccgggaccggggttaccaaccgggagtataaatggtttctccaccagtggaccgtttattacagtagcttattatggccagcaacttgttatatatattactacctccatattttaatatatgacgtcgttgacttttttgtccaacgtttgacaattcgtcttattaaaaaaatatgtaattattatttattttattatgacttgattcgtcattaaatgttttttaagcatgacataaatattttcatatttgcataaaaattttgaataaaacgaatggtcaaacattggtcaaaaagttaacagtttcatatattaaaatacggagggagtagatcgatagatcgtactactatgctcacgtgtgttagcttgtcgtggcggccgcagacaagcagcgagcgccccatatataagcgtgaccactagctaatcaaaagaatgcatgcatatgcatggatacagagatgagatcatgcatgggatgaaaagaaagaaaggaggccggtacggtgctacagaagagagatccatggctgctgaccccaagatcttgaggattaaatgtccggccggccatgccatcctgccagttgatagctagattcatcagacaaattgatcagtgcagtgcagtgcagtgctagctcaactcctcatctgatcatcttggactatataccgattctttcaagctgttcgcctgccccgctttaatttggccgggcctccatccgatcgcgattcgagcacaaggctgcatcgcgatctcatttcgctatcgctttaatttgatagccactccgatccgatgatgaggacgagcttgcatagaatcaatatgatatctcagcagctgcatgttagtatgttaatttccttcgctgatatatgatcgatagatgctacttgttgcccaccggccggcagcggaagacagatccatgatccatccatcatacgccgatactattagttggtgcaggtgatggatatactccatattgcagccagccatgcaagcacaagcacggtacgacgattcatcgactcgggcatgctagcttgtatctgaattcattctcaaatctcaacagatatctctctccttactttctactaccccttaatttatgggagtagctatatttatggccccatatttttcaccaaaaaatagtcggcatgtatttacattgtaagttactaaattacatatgtaattttagtgtatttacaatgtaagtaccaaaattacatatctaagttctaaattacacatgtgtaattactgtgtaaatagagtaattacattcgttgatgaccaacacgtgtcatgcaaagcaaaaaggagtcgcgaacttaggaacaagttgttcgatcagcttatcagatgtactttgcacgaatcatgaagaagattagatggcagatcgtcaaactgactgtatttagcctagaaatatatcgacataattttagcaaagccgtaatttattagcggtctgcgtatggtttatctccttaattatactaggtgataccccacgcttcgctgcgggattcatcgatgaatatatgttaaatattgtcgaaatgatgaaggttgaaatgttgagaaaataatgtgaggaagatgatttgacacatacttgttgatctctaaaatataatattgtagatgatgtatcatgcttgcatgagatttaaataggctagaatagtaattgctagtgagtgaagatgtggcatacttgcatggaattttaaatgggctaaaatagtagtaattgctagtggatgataatgtggcatgctttgcatgttaagttttagtttctaataattgttagtgggtaccaactatatagaaagtatatagaaagtatagatttgaggtcaaaatagctacatggcccgttaactttgtggtctttaattaattaagcatgcatctaataaagtcatactccaaactatttttttcgagggcaatatatactccaaactaataaactaatactcgatcgatttatttggcaaatcaacgaggcgacaactcgatcgatccagcttcctttttttttcgaacaacgaattgaaaaaataaactatgttccctctgtcccaaaattcaaataagtttattttttatccatcctacacgtaacaatacaagttcttttcctagttgcgtttagccgctgtagtagctagtcttttcctagtttcatttttttattttgctttttataccttcccgacataagtcggtctggctgattgtattgtgtagcaaaattttttttccttctaatatattgtcgtgcaatccttttacacattcgcaaaaaacaaacaatacaaaacaaaaataactaggattgtatttagttcagcgtaaagtttgaattttggttgaaattggagatgatgtgattgaaaagttgtgtgtatgacaggttgatgtgatggaaaatgactgaagtttggatccaaattttagatctaaacataacctagaatacgcccactttatcaaatcccaattcaatcattcctctctttatctattcccaattaatacacttatctcattatttcacaaactccagtgatctcattttatgacgaagagagtatgagatcatatatcgatcagtccataaacatgaaatgttgaatttgatttctacaagttataaaaaagaaacaaattaaacagaaactaattaacatgcattcacaattatataaatttcttgattatttatatgcagcctataaaaattaaatttgaccttacatcattaactctttagaaattagtttttattgggacggagatatcggtgggtgtctcttgttcctgatggactttctaattaagtcgtactcctaccattgtcttgttcccgtgacgacccaacaacacccatcgcttactctacagatcaatgtgaagatgtgttggaattaatagatgggctaaggcccattcaaaaattaattctttagaaaatcacaaaagcccatctcatggggtggcatgcatgtggagtttagtatcaccttgcttattctaggagagggggacttccttaaaagggatgatgccctcttagccacttgaagcatgtatggtggagagaagaggggaaacacgcgcgcgctcgctcgcctcgcctggtagggcaagcgttgcggcgcgcgtgcacgacgtacgcgtcaaatggtccataaaattggctcctcacccttgcgcagatgcagcctccttttgcagttttgttttgctacaggaaaattcggatttgttttgttttggaaacattccgaaaaatccggtgcgtgaaaacggcatggagtccggataagttacgcgcgacttatccggttcggttacgcggactggagatcgtgcgggcgccctgatcaagtgacctatcctatataaactgagccgccgccttcacgcaaaacacacgaaatcaatctagggtttgcctcctcctctgtgctgcgccgtcgctcgtgggctactccatcccgctcgccagcgtgcaccggcgatcgggagggcaggtctccggaacctctgccttcgacgtcctgcaccgggagaaggtagcaataaggtttttgggaagcgcttcgcgcaactgctccctgttcgtccgcgacagctcgccttcctctccgctcgcgtgctgcgcgccttcgtcgacgctcgcaaccgcgagtagttcctgccgagcaaccggtctttccgccacctcggtacgtgttcgacatgttacgcatatttgatctgtccatgttttactgcttagtttacatatgtagatctaatgatgcgttaatgctagtatacatctgtaatgtcatgatttatttatggaatatattaaatcattatatgcctatattatcaacaattcaaaaaccttactataggcgctgtgattttactatggctggttttgccgatgcactgaggccggataaatttaccggtgtgcactttaagagatggcagatctgggtcattctgtggctgacagctatgaaatgcttctgggtgagtactggcaagtctatgggcgttcttaatgctgaccagcagaaaaaattcgatgaggccactactctctttatgggatgcattcttagcgtgcttggcgatcgtcttgtcgaggtgtatatgcatatgaccgacgctaaggaattgtgggatgcactgaatactaaatttggtgctactgatgctagcaatgatctgtatatcatggagcagtttcatgactacaagatggctaacaaccgttctgtagtcgaacaggctcatgagatacaaaccatagctaaggaactcgaactccttaagtgtgtcttacccgacaaatttgtggccgggtgcattattgcgaaactacctccatcttggagaggtttcggtactgcactcaaacacaagagacaggaatactccgttgaggggttgatagcgtttcttgatgttgaggagaaagcattgggaaaaagatgccgcgtctaagggcgatggtgggcagtccactgccaatgttgtgcacaaggcccagaacaagagcaaggggaaatacaaagctcagcagaccaccaacttcaagaagaataagaacaacaacaatcctaatcaggataagaggacttgctttgtgtgtggtcaacctggccatctggccaggaagtgtccacaacgcaaggggatgaaggcacctgcagggcagacctctaattctgctaatgtgaccattggcaacactagagatggaagcgggtatggtaatttacctactgttttttcagttaatcaatctactaattggtgggttgatacaggggccaatgtacatgtttgtgctgacatctcattgttttcttcttatcaggtcgcacggggttccatcgtcctactggggaatgggtcacatgcttctgttcatggtgttggtacggtagatatgaagtttacttcgggaaagatcgtgcagctgaagaacgtgcagcatgtcccttctatcgacaggaatcttgttagtggctcccgtctgactagagacagatttaagttggtttttgagtctaataaagtagtcatgtctaaacatggatattttattggtaaaggttatgagtgcggaggcctgttccgcttttccctttctgatttctgcaataagtctatgaaccatatttgtggcagtgtggatgatgaggctaatgtatggcactcacgtttatgtcatattaattttt

SEQ ID NO: 13420 - DNA, 9980 bp, Oryza sativa
ttatgcgaagcatgtaatgtatacctcgctgactcgactactctttggacttgtgcaagatttctcatttggcagatgagcccttaggtggtgaggcacaaaaattttgaactcttctaggaactcgggatagttacctatgattctctcaacctgcaagtaaatcattgtgaaatcagggcctttgcaattattttgtcaagccattattgaagaatgaacaccttttcgagaacttcttcgctggtcttgatttcgttcttataatatttagcaagaacgttcagcaaagcatggaaatcttcgcggctgatatcaggacatgcctgcaggtataaggtcaagttaacaacaattggtaccaaacgagcacccacaccacacaaggagggagcaagcaaagcgggtttctttgggcaccttcactctctcaacgaaattgtgtgccttgctacgcatctttgctctgcaagggctatatccttggatgaagtgctcgaagacctgtatggcttcaggttggccgtccaatatctcgagaataatttctttgcatttttcaatcgacatgttcctgaattcaggatcaggattctttatcatcagtcatcaaaactcacagccgagtagatgagaggatatagtgattgatacctctgcctccttatcttgatcatagatcggacgaaatggctgtatacgtcgtcaggaagctctgacttgacaagtaccaaaaattccatcgtctcgactctgtagggatccctctccgtcctcgcccttttggacggaacgccatcgccaggatcaccggcggaagaatccattctatttctcctaattatttaggcgaacacctgcacaagagcagacagatgcaacaaatcagcaaagacctgcacgagaacagacgaatctacagtgacggcctcgtctaggcaaccaaaatctaccgccgctccggttatcccctcgcaaaaaaaccgaaaaaggaattcgattcaaccaagtcatcaatccgccgtaagggctgacgaaaccgaggcgattaggaggagtactctcgtgatctcggcgccttgattcgcgcacgcgagtggagggactgacctcaagtatgccggcggcggcggacgcctggaggaaggaggcgagcgacgagggcaccgagactccacaccttccggaaccttctagaacccccgcggcgcggccgcgcggccgagggaaagaagagagagagcgcgagggaagagatgaagagaaggaagacgcagagtatttaagtgggctggattggattggaaaccgagacgtttccttccggtttgaaataagttcattttgggtccctctatttgttgctcagtccgaatttcgtcctttgaccggggtatgacccatcccctaatttacgaaaaccgggcaaacgtggtccctcggcggttttggctgacgtggcacatacgcggtttgtttgactatatctccgtcccacatgacaatgacatggcgcttacgtggcaattatatcttataaaaataataaaaagcgtggccccacatgtcagctgcaaaaaaaattgaaatggtggggcccatgtgggccccacatgccagcctcactcctctcttcttccctctcccttctctctcttcttccctttcccctctctctctccttccgggcagaggacggcgcgggtgggcgtcggagcaagcgagctccggcggcggcggcgggcgtggtcggcgccgccccccgaccggagcgccgtctgtccgcgtgaaggcgagtagcgcggcgacgccctggaagacgccatcgacgccgccatccgtgtcgccgccaccgaccacccggacgccctccacgcgcgccgggacggcatcgccgagagcctctcaccgccgctccacaagccgcctacgccgcgctctcccctcccgacgccgtgctccgcctcctttcctccctcccctgcgcccccaattccttcatgctcaacaccacgctccgcgccctcgcctcctcccccggctcggcctccgccctcggctaggccaccctcggcttcttctccctcctccgccacgacagcggcaacagcagcggcggcggtggctcgtactcgcctcactccctcccgggcacgcgcgtatgggaaaggagaagaggaacgaaggagctagagccatgccgagctccctcctctcctgccggcgagctagaagggcggtggatggctaggcgagctcaaccggcgagcgcgcgtgcgtcgctccctcctctcccgccggcgccgctccctgtgcgtcagccatccgtgtgcggtccgtgcgaggcaccgctccgggcgtgtaggcttccgtgtgcctccttcctcgctcgccgtcgccctcacttcaactggtaagtgattcgctctgctccccgtgcgcgcgtggcttcgagttcgaggtggcgaatttgagttaactccggagctcttgaacttttgaaattggttcggattctgcgtgccttgttcttaatcgagtgtggtttcgatgtgcgcgtgtgtttctggacggaagttcggtgtattggaggaagggaattggtttgaactttgaactaacttggagttcctcggttggatttgagcatctgtgatgaagcagtggagaatcgcctcatgaattgcttgtctgtgtttgcattgcggtgatttgaaccttgctgctgtgatttcagtttggttattaggcgatcgcaacataacccagtgaagcagttctggtgctgctgtttcaatcctgccgccgccgcaccgcccgccgtgctggacgccgcccggcgagaggagggagcagagagatggggattggggagagccggagagaggaggaagaagaggattggattcggtcatttgagaatgacatatggggcccacgtgggccccaccatatttttttaagctgacatgtgggacccaccatttttaaattatttttcctgtggctgacatgtgggcccacgatttttattatttttccgacatataattgccacgtcagcgccacatcaatgccacgtgggatggataagccacgtaggcgccacgtcagccaaaaccgccgagggacctcgtttgcccggttttcaaaagttgggggtcgggtcgtaccgttttgcagttaaggtacgaaaatcggactaggcgacaaatagagggacccaaagtcttattccttccggtttctatcctcttgttgggccttgcgctcaatgccaggcggcccagttaaactacacgcatgacagcccatcacagtttggacatccagatgggccaaattggaatatagcgatccattcggcccatcatattgtaaggcccatcttatgtatactgaacagaagggaaagcccacgacgcaccggtactgagcaccgcagccacggcgccgccggctgctcgccggcgaagggagcagccacggcgccgcccaccaccgcctcgaaggccacctactgcactcgtcgaggtcttgtgtctcctcggccgacgagtggctagcgttctcaaggcggcctctctctcacagacacccattctcgctgcttcgtcgggctgtggtcaggtaatctccttccctcccgggtccgggtagtcggcctcttctagtttcaagagatgcttgttttgattggggatctatggcgctcttgacttgatccctgcgtacttgtgctgtgcggcagtggcaatgtcggatttggccatttggggattttcagggttcggctatcgtgccggcaatggggagggggattaacttgatgttttatcaattgatcttctgaatagtgattgatttgctaatactattacttcactggatagcggagataacactagttaaattctatagaaacgtgtcaggttctgtgcaatcttatgaatgaatccttcatgcctcgtcaatttatctcttgttaattaattgtaatatggtagcttctgagtaatactatcatattcaaatcactgttgacatcatagtagaatcgaaacctaaaaggattaatgatgttgcagaaattaagagttagctgtaactgcagctgttcttatatgtttttaacatggctgtattaattatgtatcatcgaaatgttttcgtaccctttcatgtcatgtccctgctatttatttagcattcgttagcaagtatatgtggccaatcatgctgatgaaatccgctaatgcgctgagaaacctacaaccatcaactagcgcaaaaaagggcatcatgccattgtgcattcttactgctccaccatcatttagtcaaaaaaactgctccaccatcatgtcactcaactagcacaatcacctttttctactatgtactttcattggactcttcttcacaggacaaacctgcatgtttaaattcacatgggatgcatgtgtagaaaggaccaaatgttgtattgtagcggggcttattttctgtatagtacaagttttgttttcaatcttcttatacatattacaagttactcaatttgcattggcattcaagtttagagttacatagttgaagcattgtcatcaggattttggttactgcagaagttcagaggactttatatgtcaatatgttttggttgctgcagaagttcagaggactttacatgcccaatgtacaagttgccgatgtgtctaatttgacagcaggaattacggtctacaagaaagataagatgaactgtatgctggatgcttatgtgtttaacaagtccttcaaggtacagagtacatcaattgaacctttggtttaaccttctaagtatgataaggagtgctaacaattatggatcagaacatttttgaatgataccagcgatttctagaagtaataactgctttgtggagccatttattgtacctgtctgttctgtgttttattaatactacatcagttttcgctgtgttgttgtttatccaacatttcaaagatgcatgcgatctgtagaaacactttggtttcacctttccttttggaaaaatagtagtcctgtcgcttgacttaatccccactaaggtgttataaggttgattgtggacctgtagtcaaacttcaaaggttacctgagaaaaacagaagttgtcttttactgaaaaaaagtacataatataaatgtcacttgacttctcctaatcttaagaaatttaaggtcagcgagtccttttagaaggtgattggtgacaccttctccacatatataacaatcagctgtttcctgtcttcctgagctacgataaacatttctcattgcagtgataggaactataaattgaatatgtaataaataacatatcgttgcgcatattacatctaaaaaaaatgctctctggttgtcatttatggtcaaaactgtaacaattttcgcaatgtttttataggcctcatttacacgaggaagtgcttgatcacgattagtttctataatcctatcttccctgatcaattgggttatgatgaattttacaccattgactgctcatatttatttatcttctgatttccattcttgttttcagccttggtctctccgggttcattcctctttgccttcagaaactcagcaagaacctgaagcgcgacatcgacatcatcattcctcattaggacctctgcaacctccgcaggcgttgtcagcacctcctcaatcagctgctcgatttctgggtacatggcatggttttcgacattgtggtagttgctagccagaactcggaaagcctctcgagtgcaataccccatgtggatgtgcatgtccatcctgccagggcgcagcagtgctgggtcaagccgctctctgtagtttgttgtgaagacgatgatcctctcctcgccgctggttgaccacagaccgtcgacaaagttgagcagtccagatagtgtcacctgttagaacaaaaatacccaaagtggcagcatcattggtaaggattaagttagttatcaaatcaagaagtggctgggattggcattgtctatcatactatatattcatgagacaatgattggttataaccaagtaactaaccttgtcttcgttttcttctcctgaataggtgggcttggcacgcttgatctctccttcgtcccgttgctgcaggtcgatggtgcagtcaatgtcttcaacgacgaggatggaccggttgctcatcccgacgagcagcctccggaggtcagagttggacttgacctcggtgagctcaagatcgtagatgtcaaacttgaggtagttggccatggcggcgatgaggctggacttgccggtgccaggtgggccgtagagcaggtaacccctcttccacgccctgccaatcctcctgtagtagtctttcctcttgacgaacctctcaagatcgtacatgacggagtgcttgaggctgtgatccatggcgagcgtgtcgaaggtggaggggtggcgcaggtcgacagcggtccaggcgtcgtactcgatcatgtgcatcttgaggttcctgtgcttgtcgttcatggccttggccgtgtcgatgacgaaggggaggtacgacctgagcgccttctccttgtgcttcttgtggaagctcacctcgaaggacttgacctcgaagcggctgcggcccctcctgttggcggcgccgccgccgccgatgccgtagggggcggcgtgggcggtggcggcggcggcggtgtcgcgggagacgaggcgccaggtgtactcgacgccgtcgtggacgtcgagcatctcctcgccctggtccatggtgatcatgatgccctgggcgtcgtcgacgcggctggcgcggaggcgctgcatgtcggtgttgatccgcgcggcgaggtaggtgcgggcggcgtcgtagatctggttggtggagagcccctccgtctcgtcgatgaccacggtgtgggtcgacgagacgcgcgcccggatgccccgcgccgccgaccggagcatctcgcgcagctcgtcggggaccagctcgctcaccacgccgcgcaccaccatggccgtcccggccacggccgccgccgtcgccatgtacttctcgtagtcgccggaccacgacatggctgactgccgtggatggacagaccgaccacctagtagctagtgggggaggagctcttcttcttcgtggtcgtgggcgctaggcgacgcagctaggcgggaccgcggctgatcggaggggcgtgaagtttacttgaatctagggcaccgttttgggtttgtgtaccgatctgtcacgtatttcttctacacggagtatttgtttttcttcctggacacgaaaaaaatagtgtatttgggtgcagaaggaagatctggatcccaagggtcaagtttgtagacgtgccgtattgtggtcacgtgtagaaacagaacctgtattcgaacttggagataccaacgacttgtgttgatagaccacggcccattgggcagaagaggcccggcgtgaaaccttttcaggccgaagcccattgctgttgatacttcatttatggcccaacaccgtccaaatgcactgcactgcatagccactgtcctcttcttcccccaatcccacaacctgatgcgggtggaggcgatggtggcgggtaatcccgtaataggaatactggtgagtttcttctctaacaacttttgcttcagtaatgacaacggttagttaatctatacattcggggagcccaatggtgaacgccagttcgaggatctgcgaaagtgattattctgtgtaaattctcatgctagtctatttcatctatttgttccaaatctaacacttaagagttaagagttcttctgtttgttccaaatctagcacttgagagatcagagttgtccacatctagtaacatttttcttttcccgttttcaccagatctgaattccatatgttttaaatgaaggtttcgtgtgtgccttggtggtttttgtctgggtgtgggttaatgtgaaatctaagaaatcaatggggaattgttccttttgaatagtcagatgtatttcaccctgttttctgaattagcttgcctggacaatgtttcgtacacaaacaaaatctgatgttgcatatgtatgacttgtcgagacaatactttaaatttcttaggaagcacacttcattaaataccagtgcacctcctatctccaaatacacattgtaattagtagtcaaaaaacgatcacatgttttgaaatggatcttccgttggacctatctagcatatacacattcttgttgtcattgttgtactccacaatcctaagtgcattcatcagttgaggagtcatttttgttctccatcgctttgctatctttattctcctccgtctgcttatttgcatccttgctttcagccttggtctcgctggcatcttttatctttgactttaggagctccagtagaccaaggagtgcaacatcaatatcatcatttctcatgagagcctcagcgacctccgcaggcgtcaccatcacctccttgatcagctcctcgatctctggatatgtgacatgatagtcgatcgagtggtagttgctggcaagaatccggaaagcctctggggtgcagtaccccatgtggatgtgcatgtccatcctgccaggccgcataagtgcttgatcaagacgctccttgtaattggtcgtgaaaacgatgatcctttcctctccacttgttgaccacagcccatcaacaaaattgagcagcccggataatgttacctgtgtggacggcaatcaaattcttatcagcataggtgagaataatcgtgaaatcaaggagatgaaaggtttgcaaatatgaatgttattatgcattctgattttaaaggtactcactttgtcttctcccttgtcttcttctgtagagttggacttggtacgttcctcccctgcctcccgttgtttcagttcgatgctacagtcaatgtcctcaacaacaagaatggaccggctggtcattccgactagaagccttctgagctccgagttggaatggaccccagtcagctcaagatcatatatgtcaaacttgagatgattcgccatggctgcaatcaagctggacttgccagtccctggtggaccatacagcaggtaacccctcttccatgccttgccaatcctcttgtagtaatcttttctcttgatgaacctatcaaggtcgtcaataattgactgtttcagcttctggtccatggcaagcgtgtcgaatgtggatgggtggtggagatcaattggagaccatgagtctgagtattcattcatgtatatctggagaattctttcctggtcttttatggccttggctgtagcaatgatgaatgggaggtatgatttcagggctttctccttgtgcttcctgtggaagctcagctcataggagcggacctcacgttggccgctgccattgccattgttggggtcagctgaaatgctacgtgagattaagcaccatttgaattctgttccctcatgcatatcaaccagctcttcaccttcctccatggtgacaaccatcttctcggaagattcatccatgctgctgactcgcaggcgctgcatgttgttgttgatgcgtgttgcaaggtaagcccgcaccgcgttgtagacgtggttgtgggaccagccctcagtctcctcgatgatgattgtgtgctgagatgaaatttgtgaacgcaggtagccgaggccggaaaacagcacatcacgcacctcgtatggaaccagctcgttcacgacgctgcggaccagcatcacagacgctgcaacggatgcagcggttgtgatggccttcttgtatgactcgatggccttgtcgtatgacgccatggtgagcaagctctggctcctctcttgttcttcttttgatgaacttctcttcctctttgttgctggtaatggtatgaaaca

SEQ ID NO: 13421 - DNA, 5678 bp, Oryza sativa
  unsure (1)..(5678): unsure at all n locations
ggtgttgatttgaggtagagtttgtggggagggggttttataggtgcagagttgggggcgaatggtggcttcgtctgaaagaaagaaatctgaatactactcctacttccagcttccacagttaggaaaatgacatcaccattacaacgtaatactcctacacatattcacctgggaaagaatgcaaccggtacaaattgtcgatttctgaggcatttgttcttaatctattgcacctttattcctcccagcgtatcttctttactgaagagaactttgaataatgatgttttaactgtcacgaattaagatctcaataaaccaaatactccttgggcagctagaaaaggcaaactttacttccttggcatccaagttttcctctgaaccattctttctgcagggagcagaagagttgtgcaccgcaagtttctgctcgaaatactggagcagaagaatgcccgcatcagtattccagaaaagaatgcccgcatccatctaccacctcgttggctgaatccattccatgtgcgcaaatcgcataccgttccgtgcagacgacggttggtcgacgtccgagtcagagactgtcgatcagcaactttataaaattctgaaaagttccagctgcatgcatataatggtccatttggggaaagtggggggcgttgctttggctttgccttgtctcggtctacgtcgccgacgtgttgagatcgacggaaccgagccccccatggttacaactgctgctgctgctacagctggtgatggattttggaccaaaggggtcaaattgttgatcgcgtagcggcggtggcaccaatcgacgtgttgctctgtggtttgtccggcgactccatggaccattttccttggtgatatcatcagtgagttgagtgggtgcttttattcgtttctgttggtgacagctactcgtattctatccttgtgtaaccgcctctctctgttctcttgtgctcttctgttgtgatggggaaattatctagtacatttaagttcatacagattcctcatgaaactattaaaaacttttgtgagctgtaaatgtattctgggcacacaagtttttcgtgcactcagctcttggggttatggccataagcagctcttgattcgttgatactccaagagggcctattgccaaggcatcgattggatcgtccagcaacgtgcacgttgcacatcacaaacaaattgattgctttcagatcgttgcgctaactgtattttactgatcatcatgcggcgcgcttgaatacaagggtcgacactgtgctgccatgatcaaaacactgtgttgtgttgttttcgggggcacaacgtgtgactgaacctgctaaagcaatcgtggtcgccacgtttaatttgcttttgcaggagagatcgaaacgtgaatgggactgcgtgttgcaatttaaagcagccataaaggaaaactcaattaattatctaaagtgtcaagacaaaataaacaacattttcccttttccctttgggtggtagcggcgccatcgacagaaagagcagaatctagcatgcacgttttttttattttccttttatttttttcctaaaaaacattttttgagcatgtgtggctggcacgttggtttctgatttcttcatcatcaagactgagtcactgacacgtgtgcacctatgcggtccacgtgtggtaatcgcttggatgatccggtacttgtttcaatcgcgtaaaatgaccattcctatttctccctaacaaattgcagtgccatatttaaggatgaaaatattttatgattaaccttacttgcagagtgcatctttggcttgacgcagtgtgattatctaaaagagatttcgcgagggaaaatgacaaaaaaaaagatgtttcgactttgtgaatcttaagatatgttaatacggtcttccaaagacacaggagtagagcgtgagtatgtgttcataaaagtaaatgtgcgtgcgtgattgtattgtattctattttttttaaaaaaaataaaatgatgtcagcaatggcgaagaaaacaagtagaccattttccaaaactgtaaaaaaaagagaaaaggaaaacaagtaggcttgcagatcctgcggtccagcccaagagaacgttagtgtgcgcggcctacctgcgcgtgtcggcctacttcggtctggctgagaaatagtaactgggccaacatgcgtgttgactagctcggcctggttggcgaagacgacggcccaaacgcggagagagatatcgaatattccgtggcccaccaaagccgacaacgaccgcagctcgcttgtcagacatcggggaaagcaatcaagcaagcagcggccgcatcgatcggagcggagaaattccccaactctgctcaccctcaccgttgccgacgacttcgtgcggcggcgaagaggagaggcgatgggagggggagacgccagcggcggcgacgggccggagcaggagctgaagcgggctgctgcggcggcgtacaactacgagggcgacgcgcgctgggcggagtactggtccaacatcctcgtcccccctcacctcgcctcccgccccgacgtcgtcgaccactacaagcgcaagttctaccagcgatacatcgtgagttccaccaccaccactgctttgcttcgcttctcccccctatcaacaactacttagggtaggggatctgacacgctttctgtacggacggttttagttcggggcttcgtccccttcgatttgtgtggtgatggcggtagccgtagctaatacccaagcttgcacttgctaatacatgatggtgtgttgatgacttttaagatggtaccaacgcagatgtgatgcttgctgctaaaccgcttgcttcatgtagctgagctgtgagcacaatctacactttgatgcattgcttgtttcaaccagggttttgttttcagttgatgatgaactcgatgctacaactactgttcagtactagttcatacctctctttaccaaacttcctaaggctaagggaggtttcaaatactttttaatcttgcttcatttcatgacgacgtagcttggcaagcttgcccttggtttcttttgttgaagcaatctatctccatgttaaaacgaaagctacatttgttaagcatcaaaccacagctttcttggcatttatcacagttagaaactcaaaaacaaaaacatgctatttgcattcggtcattttagaatctatgctgttacccatgtacaagtaaagagcaaatcaagatgatggtaaagctgtttgatttccttttgctttcctaataggatcgtgatttggtggttgagccgatgtcatccactggttccacccagccaagcggaccagaagtaaggtcttcgtccttctcatccagtgagaatgtcagggcccgtagttcaggtaagttgctttcagtttaagtatagtacatctctcgttttattctgtcgcgtgtcacatctatttatcatgtgactcattttcatatttaggatcaagttccagatcagctgcaccaccgcccccaccgccacaaacagacagtgctacaaatcccttacggtttgatgcacggaccatacacttctccattaatgcctgggtaagaaacaattcaccttcttcattcgagagaatctattctataccactgagtttgtttgggttcaacaatttgccatcgacattgtctctttctataatataccgacgactttatcaattgttctacgatacgccattgggctagatcttctttccaaaaatacccaaagtacccttagagccatacaaggttaacaattgatttatctcattagaagtttcaaagaaaaatgaaaacttttatgtggcctctttacacaacatggaagtttacgcggcctccttacacaacatggaagtttccagtttttttttttggtatatgagagagagtttactaatacaagagataatagcacaaaaatatcttatgtagtgtatgaaagatgatatataataaaaacaacaataaaaagtatttacaaagcatataacaaataattatattttctttttaaaaaatagacatgtaaaaaacttaaaacttgtatacaaatttccatgttgtgtaaggaggccacataaaagttttcatattttcttgaaacttctaatgagataaatcaattgttaaccttgtatgttcataagggtattttgggtatttttgaaaagaaggcccagcccaatggcgtgttgtagaacaattgataaagtcatcggtatattatagaaagcgacaatgtcgatggtaaatcgttgaactcgaacaaacttagtggtatagaatagattctctcttttcattagcatttgcatgtgtaattatttgtcctgaaaatagttggcacctttagtagtgagcttttaaaaatcaaacattatggtttctgatagatatctcatatattggtcctggtaaccttgatcttatgatcattattagctacagcctacatggccatgacaccctcatatattttcaggtacttgttgttgctggtctggggatgcttccaattttgccaaaacatcttgcagatagagcctgcaaactttcattgctgggaacaatactctcctctgcatactctctatacagcacttatggggtaatttccttgctacttgaagcacgaataactagcactatttttaatcttatttcttttttttttcgttgctgatctgttctttttttctgtgctaagaaaccaagagcatggaacatgcctgcagtccagggttggttgcaagctgtacttggaaccaaggattttatccatttgatgttctctcttatgctcttcacgtctcagttgcacttaaaaagtaatacgtggtttccctttcaagtttgtggttctgacctgtcttttgctcgtttcacatcttcttacatgttatgttatcctttttgtaacagttgctgcactacctgtgttctgctgggcacttgatcatgttgctagattcctaaggcgtaattttgctcgctcatccttctataggtaattgtgcgttccattatcattgaatttcgcctttgcaatctggggcacaaccagtgtgcattgctctgtgattaattccatctttccggtctctcattcaggagttacttggaggaaccctgtctttgggtagagacaaataacactacactcagtctcctcagttcaaatgctgagattgccttgggttttcttctgatcatatcacttttctcgtatgttccttcccctcctccgacaattttggattttcttttgtctggaaagtcatattgtatactcatatgagttacctttgtaccttgcaggtggcaacgtagcataattcannnnnnnnnnnnnnnnnnnnnnnnttatcatttgatcatcattattttgccccattgctttatagctacaacatgatgtaagggcgatttatgctggtttgttacatattatcaaaagattcaagaatgcccattgtcaattttgtttagtcacactttctagttggacatgaccacatgagtactggccagtcgtcagggcatgcatactgtttcagttctagaatcccaatatttttctgccgactccaca

SEQ ID NO: 13422 - DNA, 5234 bp, Oryza sativa
aaaaaaagacacatgcaacagttgtgaatatctgataaattcagtgaaacgcagaggaaatgtatttcttttgcgaggtggaaaaaggggaaatgcatgacaccaatatttcacatttgcacacatgacacatctcatggctaagcatgcatgactaaacacgttctcaacaactagatgaaagtgggcgtgcttagtagcttgctgctggtagtaggtaaagtttttagagtagaagacttacgcctcttgcattttgatgatgcaacagctctttggacgagtttgttcttcttgccggcaaagctgggtctttcaaaatgttaaatgttcttcttgacctctcttgccgctgaaggacagagctgtcttcacggcttggatatatcttgcaaatctgaaagaagaaaagtgaattttaaacaaatgtctggaacgaactaatgaacaaagttaccaagaaaagctaaaccgcacttccaatttaccattgcacaaaggaattcagttacctgcttgataacacgatcgataagcttatccaaagtaaatagtacgtaggagttgggcccaagaaatttcaagcagtgctgctcaaagttccaattgtcagtagacccatcaatcaggctgcagagtttctccttgaaactacaccattcaataaaataaaaagttgttgttaaaacacagatattcaatggtgaaatttgaataattctacttatagataataggtgagaatcttagacgttactgtgcatatgaatcatgggtgcttgctccttctgaaagattcttagctactagtagtctctcgtacataacctgccacataaattaaaaataaaataagatcataatgccaataattaggtatagaggccaatagtttgtccagaagaaatatcatactgctgtctattagattaacaatcatggtgatgcatattgagcaagccgtctctttcatgtataacaaagtaagagcatacataaatatttttttgaaagtaagagcatacatatttgtgttgaactgtgtagcttgctgtcttgctcagtgctcactggcatattaaaagtcgccaatccaaacaaaaatatgtaataggaacatactgaaatacctggagaagccggcagagcacagccagagtgcaacaagatattcctctgtttgcatcacattctttagatgttcttccaaaatattctgaacttccaacctcattgttggagtcatctcttgatgatttatgctcttcagatccactccaatgtccataggtactatgcatagaattattggtaggcaaacatcgaacacgcaactgtatattttctacatctggtatgaactcaccctcctcaacctccgcgtcaaaatgatcaagcgaagaagtagactcattggacttggctcttagactttccacttcctgaatggaaaataaaaatcatgtagctttacttacatttatctttcaagtcacccaagttacttttttttttcgccgggacggcgaagaatgccgaccgatgtatattaaggaaaaggggaaaactgtacaaacacccaagttacttttacttgataaagatgagaaagtaagtgttcatcaattaactttcatgacagaagctatttatgcaaatccaaaacacgaaatcatcataattctaagagtaaagtgttgtaagtacatatacctttgaagaaaaaacaaactcattagtaagcacagcaacaggaatattattgagaaaatctctgctcatcccacaatgttcacaaacgtttctgcgagaaactgtatccttcaagtctggccattgaaacttcacagaaacaaatgcctttactaactttgtccaattcatcattggcttatcttcagtagaacaacttctactatatgcatagttaatgataacgcctacgtcctcatgaatgtgaatatcagtatgagatttgatccgactgatttgtttgtcttctgccagcaaagctgcaagagagatactgaaatgagtaagaacgaactaataaaatggtaaaatttccatgaattataacgcagaacctagcttcagcagtacataatagtaaaagtaccttttgggctcatcctttccatgtctagttgtttgaaggagggactacaatgatcaagtgatctgtagtaattattggcaacagtatctgggcacattttattcaaggataatcgtgcctcggagaaatctcctatcttctgatttagacgagaaagtataacagcaagagcagaactggtgttctcagattctgacaaagcatcaagcatgtcaatgccagaatcatcatatagctgttcaatgcacctcttatgtagagctgcacatgtaaaaacaaggaaaaaatgtaacactcagctaaccactcgaaaagttttggctccgaaaaatttacatagtacagtatacttacgagttaggtgttcttgaattttcacattgctgccaaaccgatattgaagatcctcaataaagtcagcagttgctctaaacctctgcaatagcatgtcactctcaaacctaaaaagtagtacacaacattcattgattatcagtgaccaggcaaatttttgctgatagctgaaagaatgaaaacagtgctgaagcatctgaaaaactaacatctgtgtacttacaagtcatcttcacacttaaacatgttttcttcatattgatttttagttctgaacttgtagcaatcctcacgtccagatgtaacagaaaccaaagaatcatttaaaatagaccttccaagttcagtttggtagcttgactggagagtcacacactgagatcaagaaagagaatgttagaacagatgccaatgatttacatggaaaacttgtgcgtttgtaggaatttacattctttggtagcaggcaatagctaggagtgcaatgcttgcaattactaggatccacttttaggggtaattcgttttctcgtgaggtactccactgaagcaaaggttcagccttgtgttcctcatcatcttctgcatgaggtgatttgtcatcacctatcataaatgattaaacataacttcaacacaaggggttcaattaaatatatacaaaatacaaaaacaagtggctagccacacaaaatgatactgcatttgtctgttgttacattgtatcatgtgcacatcaatagaaagaaactagataatataaaaaccaacacacctaactgttggaaaacagttgtactcagaagtcggaacatcatgctgtacaacatttgaattgaatggttcacaatagcggtcctcatagtttctttttaggataatttaggaagcacgaaagggtttaagaaccaatatattcaacttttaaccttttcatttaaaaaattctaaggtgcattcctcctagagactgtaaattgtaatttattatctagtaacttgcctccacgttcgctctcacggcctagaaattatcatattaatcggagaaaaagaaaaacaaagtccatatagaaatacaatttagagatagctgaaattcggaattaaaaaataaagaatattggaagagaagactacagtccatgccggtatacaatttagaactaataaaaattcggaattaaaaaaaagtaaattaaaattaggttagagtccatatagatatacaatttagaaataactaaaagtcggaattaaaaaagaatattgaaagaagagtatatagtccatatagaaatataatttagaaataaatacaatttagaaataactgaaatgaagaattaaaaaataaagaatattagaataagattatagagtccatataggaatttataattaactaaaattcggaataataataataataaaattaaaagtagagtttaaagtccatatagaaatacaatttacaaaaaactaaaattcataattaaaaaatatgggaagaagagtctagagtccatataggaatacaatttagaagcaactgaaattcaaaattaaaaaataaagaatattaaaagatgagtctagagtccacatagaaatacaattagaaataataaaattcagaattaaaaataaataatattggaagaagagcctagagtctatatatatactccttccgtttcacaatgtaagtcattctagcatttcccacattcatattgatattaacgaatctagatagatatatatgtctagattcattaacatcaatatgaatgagggaaatgctagaatgacttacattgtgaaatggaggaagtacaatttacaaataatgaaaattcggaattaaaaaataaggaataatattggaagacgaatctagagtctatatgggaatacaatttagaaataactaaaatttgatattaaaaataattaataactatcacgtatatacaatacaatatgaatgtactgttacacattggtagtttggttagtacaaaatttaaatttatgttgtcattttaataataaattgagaatatatttatactattatatgagagaaaatacaatgatgctagccgcgtaatctgcgcgggccaccatgctggtttcatatatgaaaataagctctagcaaatgtagcactcaattgctgagaaatttgatagtgacactccacgatgtgggcttcgattatttgacaccctggcacacttctattccctcaaatggtcacacatgtcatctcacaagagtcaattaaagcaaattggcgacgaagaaagtgtcaaattatcaaatttctctcaattgctagggcatacttcgaaataacatctgataccatgaaataggtgaatgcaaagatacgcaaatcatttgtgcattctctagcaaaaaggaaaacagttgggcatgtatgactgttattaagaaagggttcattatttgtgtctaacttcattatttcctgagaaggatgttaaagcaaagcacctagggctcgcctgtatttggagaataaacaaattaagagaaaactttcacacaccttgctttctaggattttcaatcaggccagtggttctcttagtttgtttatgcctcaaactataacctctgccttcatggttttggttttggtcctgagtatacttcaatggagtcgcttggtttcttccattggttgcttttactcggagaccatccaatttattcatagcatctagag

SEQ ID NO: 13423 - DNA, 8581 bp, Oryza sativa
  unsure (1)..(8581): unsure at all n locations
tctctcattcaggagttacttggaggaaccctgtctttgggtagagacaaataacactacactcagtctcctcagttcaaatgctgagattgccttgggttttcttctgatcatatcacttttctcgtatgttccttcccctcctccgacaattttggattttcttttgtctggaaagtcatattgtatactcatatgagttacctttgtaccttgcaggtggcaacgtagcataattcannnnnnnnnnnnnnnnnnnnnnnnttatcatttgatcatcattattttgccccattgctttatagctacaacatgatgtaagggcgatttatgctggtttgttacatattatcaaaagattcaagaatgcccattgtcaattttgtttagtcacgactttctagttggacatgaccacatgagtactggccagtcgtcagggcatgcatactgtttcagttctagaatcccaatatttttctgccgactccacatacgagtatacagctagttaacatttcaattaataaccgcatttgtcttaatattacttttgatcattttgaaaataaaaaacagttgtgtcaaatatactggcgccctttccatttctcaagtaacttatattgatgtcagtacgtattggtgttctttgcatgcttgcctgttgtgcaggtgttgaagcagatgtaccatgctcctgtaaccgctagctaccaccagagcgcgtgggcgaaaattggccggattgtcaacccgtacatccatcgctatgcaccattcctcaatacacccatttctgcagcccaaagatggtggttcaggtagcaaggctgaggacagaatcacgatatttgcagatctgatcatgcggagaacttatctacaatgtgttttgaagagctattacaaacttagcacgccgttgctctcgtcatgatggagctgtgcatcataaaaactcctgcaagtagttcccttttgtattggcttatactttgaggttaacattgatgcaagaacggtgttataaaccctggagggctttttcaccaccgtaatgctcgatcagtgatcacgacgatgttctatataattcctgccaaactcaggctgacctgtatacaatggattgctcttagattgcatcatctattcatgagtggctatgaaatactccatccgtttcacaacgtaagttattttagcatttcccacattcgtattgatgttaatgaatctagacatatatatctatctagattcattaacatcaatataaatgtgggaaatgcttgaatgacttacattgtgaaacggaggaagtaatgagttgtgtttatctgttgtggcatatctttatgctctgttctacttctagccagggaccgagtgacggtcagaatgcacaacacaggcagggcaaccgtttcgcccttctcccctcagcctccaggggcaatgatctctctggagggaacacctgcatttcctacatgaaagagaggtcaaataatatcgaagaaatcacatgggtgcagaactgcattttgccacaaccagacaggcaggtagacaaaaccattacacggtcagagataaattttgggattttgtttgatgccagcaccgtttccattagaagacgatgaaagacaaaacaattacatgttcagagataaaatctggcattctgtttgttgctagcactgtttttgttacatgttcagagacagtttaagggggttgcagcacgttagaagttccgagacaattttgcagcaaaaaggaaaattttgctttaaagaaagttattagcacataagattgtctgcaaaaaggaaaattttgtttttaagaaagttattagcacataagatgtttagacaattttgcagcaaaaaaacaaaacatatgttgctgcccaggatcgaactggagaccttcagtgtgtaagactgacgtgataaccactacaccacagcaaccaagctgtctccataatgaagtttgtagttcaaatagatttagatccaaacatctgcaaatcggaatatctaacttccgaaactccatcgcaaacaggattgctcgtgcggaattcctctgtgacagacagtttttactcactattcttgaggaaaaggaaaggaaaatatctcgcgagaaaagatcccaactcgttttctttcaccctaagatctttctgcctgtccatgtccaaccaaagaagagtctgagactctgagttggatggatagggtccccaacccttcttcaccaatcaccacccccatctgctgccattgctgttgcaggccagctaacggaaggcccgggcgacatgggtttgcagatgatgcgtggtaggccctgcgccccgtgctgttcgtcctcctcctcctcctcctcctcttcctcctcgtcctggatgccctccaagcatcctcacgcgccatgtgagttaccttctgcatcttccttttctttccccccactgctatagtattccccaggcggaaaaaataacttattttttatgtaaaaatgcattggtactttgagcaatttgccagcggaatctaaagttccaaacttctaatgcagtgagtcgaaggaaaatctcatctgagtcacttagagcattggccttgcacctcttgcccaaacgtcggaaataccaaaatggggatatctcaaggatttcagcatcttcgtccggtgtgcttgaaatcaccgagaacaagtccaataacaaggtcctcacttaaatccgtaatccatgtacgactcatttttgtctgttgataatgattgcaacatgaatttcaggctgatgcagaaagaaagatccttgatgatgctcttgacagaaagccgcagattgactgggttgaagaagatatctcttcttggatggataagagttacacaagcagcaatttggagtataacttattaatgcaaaacattcaggtcttagaaagtagtttggctggtaaagacttggtaaggctggaaagagatatccttgtacatatcgaacggctgggagcattgaaatcattcaacgcgtctatctccagggccactctaacacaaacatatgaattagagttttcacttcctggggatattattaagcttgatccagagattcctctcgaggagcaaaatgatgtggtaattgttcgaagtgggaaaagtcaagagaggaaactgaaaagaatgaaagcatcagaaaagggctctcgggtctccgtgaaaacaccctcacgaaaatcaaagaagtccagtagtagtcaatttatagctgagtggaaaaactatccaggccgaagaaggagcattgtacgagaacaatcagcattgctggttactatcaaggtactcttcatcatcagcatatttattccttttagcagtcaatctattatattattaaaggaatagaaaaaggagcctccacgttcgctctcatggcctagaaattctcacattaatcggagaaaaagaaaagacagagttcatatagaaatacaatttagaaatagctaaaattaaaggaatagaaaaaggagcctccacgttcgctctcatggtctagaaattctcacattaatcggagaaaaagaaaaagcagagttcatatagaaatacaatttataaatagctgaaatttggaattaaaaaataaggaatattagaagaggagacatagaaatacaatttagaaatagttgaaattcggaattaaaaaacaaggaatattagaagaggagactagagtccatatagaaatacaattaggaaataactgaaattcggaattaaaaataaggaatattagaactagagtccatatagaaatacaattaggaaataactgaaattcggaattaaaaataaggaattttagaagtagagtatagagtccatgtagaaatacaattaggaaataataaaaatttggaattaaaaacaaggaatattagaagtagagtatagagtccatatagaaatacaattaagaaaaaaatagaaattcggaattaaaaaataaggaatattagaagtagagtatagagtcgatataggaatttaaaactaactaaaatttggaataaacataataaaattaaaagtagagatataaagatacaatttacaaataactaaaattgcaaattaagaaaaacatgggaagaagagtttaaagtcaatataggaatacaatttagaagtaactgaaattcgaaattaaaaattaaagaatattgaaagatgagtttagagttcacatagaaatacaattagaaataataaaaatttaaaaataaaaataaataatattagaagaagagtatagagtctatctagaaatacaatttacagaaaattcggaattaaaaaaaggaaatattaaaagacaagtctagagtccatataagaatatatataatttataaataactaaaatttgatagtaaaaataattaataactaacacttaatattatataagatataatatgaatattacccattagtagttttgtaaagttattgcaaaatttaaaattatgttgtcattttaatatatttgaataatataatgaggaaacatatatgctattatatgagagaaaatataatgatgctagccgcgcaatctgcgcgggccactgtgctagttattgttaaccataacatatccttcatggttttattcttactgttctctaggagtgtgcaaaccttgagaaaataagagaaaacttgttgaaggatgggagtgaagtcagccatgcaagctgggccaaggcagctggaattgatgaagcattgttgaggagtaggctgcaagaaggttactgctgccgagagagattactggtaaccaccgagtggctagtcaagtacattgcaaagacatacgctggaatgggaacagcttttgaggatctactgcaggttgagagataacatatttattgagaaaaaggtagactacattgacaacttccattttacaatttgatttgttggaatgacactgcaggctgggaaaatgggtgtccttaatggagctgagaaattcgacagccaaaaaggatgcaagttctcaacttatgtgaagtactggataaggaaagcaatgttagcacttcttgctgaaaactctggagtaatccagctgcccgtatgcctctgaaactatcttgatatgcttcactttgtttcatgagaaaaatcattgcttaatgatgtgaactggcaatgcaagtgtaggcaaggatggagggtataattcgtaaggtcagggaagcgagaagggcgattcgctacaacacagggaggaacccaccagatgcagaaatcgcagccctcatcggtgtatcagttgccaatgttaggttggcacggaaatgctctcgtcgagttgtgtcgctttacacagagatcggagttggacagaatgcaaaatttgtggtgagcctctcagccctgtgattgaccgatgataaaaaatgacaaatagttcttccatcacccgttgatggtttattttgacgtatacaatctgaatggtgtttaattgcaggaagtgactccggacacatctttagaagctccagatgaggctatgttccggatgcagttgagagagagactgcttcatgtcctggacaggctccccccaagagaagggcacgtactgaagctgcggcacgggctggaagatgggaaatgcaggtccctggagcagattgggagcatttaccatgtctccaaggagtggataaggaaaatagagaagtcggccatgtccaagctgaggaacgacgacgtgcataatgaactcaaggacttctgtggattctagtgctcctgatcgagctttcttgtgcatatagagctctctactttgcatcaagtacacatgattttcacaagggttcctttgcttcaggaggaggaacaaggatgcgttcaacgagaagttgagaactgtactgatgatgttgtgatagcattcgatagaaagttgtatatatcgcataacattacaagcatttgtttacctttttattttgaaaatttacaagcatttgtttcagacgaactgttcagtatagagcagatgtaatacagaatgtggatcatacattgatggatgtatagtgcaaaagaaatattgccatactgttgactgttgctaaaaatgctgacaattatatcaatgttttgaacactgatcttccatgatcttatttttgtttggtatttcacttgcgccagactttttatctcatctctttcgattttttgttcgtaggatcttacatcaagattcatgttgttgtagaccaaattgtaattacacacaattacttatacttagttatagagcatttacactcagtttcaatgcactaaaattagattttacaactgtttttatctttagatttatgggtttttgacatgtttatattttttatttattcagaacggtttatattcattgattgggttaatggcttaatgcttaatgctctaaatattaatagttaggattaaatgtaaatgtcaacagacaaaattggtgtcgtggtgtangttgngtttaaattcccaaaccccggtttttccaaaagcctaacacactgaaggtctccggttcgaacccgggcgacgccatttttttaatttctactttctttttttatgcttcgattacagagcaggccggtccatgacacgaagcacccgcgggccggcccacaggcccatatctacggccccagtgtttcagcgatgatgatgacatggctgtgatgtgagccggcaagtccacgtctgcagtttgacatctttgtccatccctttagccaactgtggaggtaattagacagctaaataattgcatccacaaagctttgagaaatgctgtagctcaggtggcgatgcacagtaggatcctagtgtgttctgtgcgtgttttttccagcatgtggctgaggaaagcttcgcctttttgccacctcaccaaatgtattagaggagctatccttccttgcaagttgcaaccacaccaaaagccatcatcagccatgtaataataatatgattaagcaaaggagacagggtagctcacacatcactgtcactcaaaaggctctttctgctatgtgtccaaacctttagatcttgttgtacatgtgtgtgtagccaagccaagcagctagcagctgcatcatgagcatcgttttttggccaagaaatatactgattctagatatgccttatccggatcataagcttgctcgacgatttgtcatcacatctgaacatctctgaattaatctgatgcatgccgccgtggctcctctatctccactatctcctgtttcagagttgaaaccatttaggcagctgtcctagctggtgtcttttgctcatggattgtgacatgtcataggtcattgttcaagttatcaagtatgggtgatacatctagtccttgtcctgttagcatttaacctttctctgatggcaatatgtcctggttattggcatgttgcttttgcaaacagtgcacaacttgtcccccaaacacaaccagagactaaattcctaccaaagtgctgatctgaagatacctgaatatgtagtacccgggaacaccaggataccagatagactaattggtaaacacacatcagaatatcagatattcagcataggttgaggacagagcattttgagaccttctttgcactgtcaattgcacaaaattaaagcaagcatgtaggtattgtgaaagaaaaggagagggcaccatggaagcaaaaggcttccaagttggtactatgaaggagagtgaattgggacgagatggacatgcacctaacatcgatctcataccagattaaggattgtagggcctgagcgccatacagtgcttcaggcactacagattgcttgccaatcgccattgacactgcaaccacattcttgtcgctagtgctgtttgctcgatcagtggaaggatatgagtcataccgcaaacaaaatgattcagatattaaggacactatatacatcgctgcaacaaaaaattctattgatgcagcagagaatactaagcatggtagcattgcagatatgcacagtgcttgtgaccatacaatgggtggctacatgagacaatgttacaagattccaaacttttgtctacaacactgtccccatggctgtcaattagattcagcagcaagatggttggaacttgaccctgaggataaaatttgttaagcatcttgggaatccagtcgatggatgaccacggcaactgatggtgctaggttccgatggatggcgtggtggacagggacatgcccagctccaggtccagcggagagcaatggtgactagtgccgtatccatgaccttgttgtgcttctgaaactgatggtgtttctgacgaaggccacgcactgtcacctgatttgtggtgcgaaacttggagagacagagaagcagagatgtagatgttgcagcgagtggcaggatc

SEQ ID NO: 13424 - DNA, 780 bp, Oryza sativa
  unsure (1)..(780): unsure at all n locations
ccgtcaggttgatctaactcattcngcactgccgcggccgactctagtggatccccatgattgaagggctcatcatttcacttggcaattagtttatggtcaaacatgttttcttaggagacagatggtccatggccagcctgttgcatgtcaagggaaataagtgtttaatgcacgcttcaaggaaaggccgttgtttttgcaattgattttagttgaactcttttctgaaaacaactaagtgagtgcttctcaaacgacacggttgagacagtgcgtctcgttcggtcggagtatgtgcaatgtatcaggctttagacttgattcaaagttggcacccggccaacagcttttcaaacggccacccgggcctacaactttcaaacggtcacccgggcctagctgatcccatcagctgcagatttttcaaacatcgaaccccttttcacaacagcaattttacaagcagtagtcaaacaaaactacgctaggaatcacctcacatccgcccatgaccgggggcacggctgttcgaacagtttgttaacctttgcagagggggggtacactttacccacacgacattactaacccggatcacccagcccatggggatcagccacgttgggagaactccaagctttcatgacaaancattttcaaaagccgatacaggtttaccatatgccgacgagaggggtcccagaccaacaacaggtttaggtccagaccatactgtgccaggaagcccaagggttctccctgacacccaccccgcga

SEQ ID NO: 13425 - DNA, 585 bp, Oryza sativa
ctatagggcgaattcgagctcggtaccccataggcaactacactttgccaacccgatccgatagcgacacctatagataaattagaaaattagtaatttcattgttaaattttgaattactttgatatacttgtccttcaaatggaataacatacctgagagcactggttgaacactattcaacaaaatagagaaagctagaaggggagcaagatcagcgacttcatctgctactgccttactttcagtaaatatgtatgcaaggcttccacggaagaaaaggaagagcacaaacaacacaaatcctatcaagaaagaagtggtgaccacattgaaaatggcaaacttagctcttcttgcactcccggctccaagttcatttgccacccgcactctaaaaatatacatgcattaagtatatgtcaaatttatggttcatgttgcatcagttagatgaaccacatagtgagtgacagctgagatcgtgaagttaccctattgcagacaaaaatccgatagaaatcatcatctcccaaccattgatattaaggctacaaagtttgcaagtgaaaacaacaatgttca

SEQ ID NO: 13426 - DNA, 1574 bp, Oryza sativa
ttttctacgaacagggggcctgctcaattacaagcggtcttctaactggaatgtacgacataacacatgcataaatatagtgtctatgcataattagaaaatttcggaataagtgatttaggggttaaaatctttcaaaatcaaagttctggtatcatagaaaacaactgaactagcagccactcaacaaagctaatggctacataaactaaataacaacttccaagatttggagggtattcatttcattttcagactataagatacataaggtgtataattcatcggaatccccaataatcctgaacacaagtctatggtgatatccagtgacctatattgtagaagagtgtcggtccttatccatagaatccatgtagccaaaatattatagaagtagaactaaagagaaaaagatggttccaagtaatgcttcgggcaaactatcaccaagaatggtatcaacaagaaatgcatcattttaaaccaactaggtttttttgaacagccagaataacaggaaaacacttgctacaagtctcagaccctcagttatattagcgaaaacatcagcccatgcacaccaacctatgtttacacaaaacattagagtgcaaataccatcaagattaattatatgcatacattaatattctccatgctaatctgttgccccagaagcctagctaagatcaatgcctgcattccaagatgaacttgttagacctcatcatctaattgacaaagaatgaaataatcaaataaaacatctgaacctgaacataaacctcccttatgtcaatgtctatgcaaggttattattgaaattccaaataggataagtgcatgatataggccttcctgaactttagtatttatgatattgatgtgctagtgaatatattttggatcaaatcatggtatgacacaattaaacaaaaaacagatacacagcagcagctcatgatatattagttcatggacttaggagtagaaaaaaattgtggcaatggttaacaaaggcacatataaagtgaattatgaagcgtagcatgtaattcatcagatgaaaaattaaccttttctagctacgtccatcccactgagatcatcacgtggatctaccaaaattgaacaactgagtaagtgcacttatcacaagcatcagtagactttcggtaaatatgaaatctgtaattacagataaggaattgaatactgagtacacattgatgttataatgtccaatgaatgaataaatttttagacctggttctgtatagccaagagacttggcagttttcacaacttcactaaatttctttccatcctccagctcactcatcacataaccaagtgtacctgcagaatcataggaatggaagtgtacattgctctgctatttggaaaacagacaccttttacaaacaaataaaataataactgtgtaccactcagactgccaacaatacgagaaactggatctccagaggcaataatacgagtcacagaagctattacaggcagactggctccaacctaagagtaggaatagtaaatatcagcagagaccc

SEQ ID NO: 13427 - DNA, 643 bp, Oryza sativa
ccgctacaagaagctcgcggcgaggcccgcacgccgccgccggctccgccacgcgtgctgcgccgccttttgcgcgggcctcctcctgctcctcctcgccgccggcttcgtcggcgccgtctacctcgtcttccgcccccgcgcgccgtcttctccgtcgcctccctctccatccggggactcgacgccctcgccgggtcatcgttgactccgcagatcgacgccgccgtgcgcgcggacaacggcgccaacaagaagaccggcatcgactaccgcggcggcggggaggtgaccgtctcgtacgccggcgagcggctcgccgccgggccgtggcccgcgttccaccaggcgccgaggaacgtgacggtgttctcgacggcgttggccggaggaggcgtgagcttcccggaggagcagaggaagcggctcgccgcggagcaggccgccggcgcggtgcccctgacggtggaggcgatcgtgccggtgaggttgaggttcgggaaggttctccggacgtggacggtggacgtgaagacgaggtgcgaggtgacggtgaacaagctggcggcggcggcgccgccggcgaacagggggtgcagggtcaaggtccggccgctctggtggtggtggtgatcgccggcgg

SEQ ID NO: 13428 - DNA, 746 bp, Oryza sativa
  unsure (1)..(746): unsure at all n locations
agaacaactgancggtcagctctgcacccgatacatccgctcttngttgaagtcgaagccgtcgattgggaaaacgagcaaggcaagacacatcatcttgatcatattgaatcccagtttataaaattatgttgatttaaattattgcattatcgctttatttaaattcccgcgttatcactgttttatttagccatgcctatttacctttgctatgaccatattattattggcataggtattattattaccttgttcaccctagacaaacaaaaccccaactagtggacactctctactcatagtaccactagtataattctagggagatgcttcgcaagttaattaggcaacattaggtggttttacaactctagacccgggaaattctgatatcatttggacaccatggaatggttggcttatgttggaattggacacacacctctttttctttttcaaaacccctaaaacctgttttcggtggggtttgggtgcatgccagttgtgggaaatagcaccccggccactataaggactaaagcttgggccttttgtgcaaagcactaccgtacttccacatgtctaatgggtaaagcttaatttggggctcagtctagtcataaacaaaagtacacagattggagatggatgaagtcgggggtcgatggacattctccagtgcaaatgaaggcttcacgagctgcgggcccggtagtcaagatgtcatacggcggaggggttgg

SEQ ID NO: 13429 - DNA, 6434 bp, Oryza sativa
acaaagtcttgacacgaaccttttgtacacatcaattcaaaatattgcatcatcaaaacaatcgaactctaattgaaaccaaccaaatgaaccatcaaacaaatcactaagccaaaactaacattccgatcaacttacagtatccaactgccgacgacgacgataacaagctctattaattatttgccactcttacggatggtgatagatgatttgtcactaaacccacatgtcatagatagtgagtgacaaaataattaattgtcacatcttaaaagtggcccaaagttaaatgtcccctaatatttgctccgtgatttggatcttggtggcgccggtggcggagttgcttgctcgtgctcgttccttctccatgatgatgatgcagaggcggagtggcacttgttgcggagtgagacggcaggatgacacaacgacgagagctcgtggcctcactcgccgctggtggtgatgggcatggagagaaaaagcgatgtaccatggactacgaagtggggggaatggatcgatctcttgggccttggctatcactggggagcagagctacagtcggtaggtggcggctagggttttctgatggggaggggatcgttctcgatcgattgagcgagaggagtgacgggaatgccgttttttttaacaaattgatccttttcaaaaacttattttaaaactagtccctacaaaaaacttcaaccaaaaataggccgtggactcagcgccatagacattggcgctaagttataacgtatcagcgccaacgacgttggcgctaaactctaatccgaggtggcatgaattcgctgagtcatcagatctcagcgtcaaggtatttggcgctgaggtccagacgatttaaatagctgcggcggcatttaaataagagtgagtagtcaagagaacagaaattattttgtaaaatacattaattctaaaagaatgctaggaggaagagaaaaggaaaaaaattgtaaagaataagagtgagtagtcaagagaacaaaaattattttgtaaaaattatttgtaaagaattgctagaaatgccgccgcagctatttaaatcgtctggacctcagcgccaaatacattggcgctgagatctgatgactcagcgaattcatgccacctcggattagagtttagcgccaacgacgttggcgctgatacgttatagcttagcgccaatgtccatggcgctgagtccacgacctatttttggttgaagttttttgcagggactagtttcaaaataagtttttaaaaaagaccaatttgtaaaaaaaaggggacgggaatgactatcggggacagctaactagggtcaggggatcgatcaattgagttgggtctttcccagatgagtttgggccgccaagctgctgcaatgtggcatgctaaggttgcagcttataaagctcgtgactcgctaacaagctatcagttcggctcgttagaaaaacacaacaagtcgagttgagtcaagctggtcaccagccatgagttttttcgtccagccctacctttgaggtgcttgaaaaaagcatggcctagtgggggtatccaagtttatttactgctatctcctttcagaaggaaacaaattattcttaccattctaccgagactcttctgccattgtatcgagggctgttcccaatattttggcggcctaggatcggacgaggtaaaattagaggcccttggttccaacaaaatgtaggataatatttattttattagttgcaaatatcttcaatatataaatgatacatcccatatatataatacgatatcaatctaatccttcattaggttgctctagacaaacaatatccaactagacaaaaatgaaattatcaagtagggaataggaaaaatgaatctaggagcaagaggaaacttttaaaaagctcagtcgtcgtacatcgagtgatccgagaagtggtcaactgaaaaatagatttgaggaactggtgcgaattaaaggtataatttagtaattagtagtagatcctttttaaaattttaatataaaaatatgttaatctagttaatgacatgattttataaaactttaaaataataatacttgaagtcatatataccaccttctaaaattcgtatggttttgtatcatttatatatcgtataatagagaatcataagaaatgtggttttataatataggccttgtttagttccaaactttttattcaaacttccaactttccatcacatcacatcacatccaaaaacttttctacacacataaactttcaactttccctaaacttccaaacttttccaccaactaaacacacccatatttacttaaaataattgcttacacccaaatttagtacctaggatcgaaataggaaaaattgccaaagtttggggctctgccgatttcctccagagagggccggtctgaccgctatatgtgggccggtcagaccgacaccagagggccggtcagaccggcgggagttcgagtcagacgccgtttttgtcgggtctcgggtttccttgctcgggaaggcatgtttcaggattccattggtttctagctcgagttggacgtggaggagggcctgtagagggcaagatcaacccctatttaagagacaaggccggttcaattgtaacccccgaacacataatatacttgaatcgctttttcttttatctttacttttagccatgttttttactttaccctagtttcagtctatctttgtcgatgtacgccgtaaatcatccgccgccgctgtgagagtgcgacacctctttgtaggtttgtcatgaaaaccttctgtttgcccacgagacaagtagttatcctcatatcgatctaaatcggcctagaggctgattttgatctctagatcagctctgttagccggtttagctctttttctataaaacccatcttgatttggccgtttggctagatcgaggtgattggcgactccatatcatcacaaggcgtttaggtactgcgatcgtgcttgtcgacttgttaaaaaagttgccaacacaatttttgacgactctgctggggaatcgatctattcgaccatattatgaccgaatttggtttaatttagttgtcttgagagtttcggccgaacggccgaaatcaatccatatgctgttagtctgaccgtctgtattactccggtctaaccgacgtaatcagtacggtctgacctcttgtacgacgccggtctaacctacttggtcggtccggtctgaccggagtagttgccgatctaaacggcagaaagctgcagcagttgtgcatcgggacagcaacaagcggccggcatcatcttgctgtacacggtctgaaaatcagaaatccaatcctattcagtttgctgtctatacgtgttctaaaaacaaaatcaggctattagagccgatttacctagaatagacaaaaccaaatcggtttctgttattgtgcattaggcaactgtcaccgagaaaaaaaatcatcaaagccattgcagcgcattggctgttattgtggaacatcaatttccaaaatttttgctagaaccacacaaaatttctgctattgttgtacacggaagatccgccgaccaaggctgctgatcttttggttttcggaatttgttacgtgcacacatcaagtatgacaaggaaatcaagaccatatattaatctattcggtcatcgatttcggctatgagttatatggccgaaattaatcaaggagtttcttcgtcaaccataacgagcggaaacgagatcaacaaactcactaaggaggatttgaacgaggagtagcggcagtactttgaagaacaaatggcagtgttgaaggaggaatatcttgcataatacattaggaccgatcaaggtattctcaaaagaaacgtcccgctacctcaagtcatagtttcactaaaggtaacctccgattcgcccaacccatccgttgctattcaaaaagttaatgatcgttgtctagatgcatctgctacttctgttttgcttctatacaatatgcttataatgctatggaaggatcaatgggtgtttatacagccaattgcacaggaatcggctatatgcaaaatcgagctgacggtatgaccggtcgtgacaccggtcagaccgtgcccaccatggccggtcagaccgtgcccaccatggccggtcagaccgtgtattataccggtcagaccgtgccaaccatagccggtcagaccgtgccaaccatagccggtcagaccgtgcctatcctggctagatcgggcctcttttggccggtctgaccgcaccattgaccaccggtcagatcgggccataggccggtcagaccggatgcttggccggtcagaccgggctatttatagccggtcagaccggttccttggaaatttctctaggttttcataccacgactagcagtactgattttaactattattcatcacctgttaatactggtagtcatgctacttcacatatccctaatacttacaatgatcctaatagaggatatcttcatgacaccgggtatggccaatataatcatattgcgccgcaacaaccacctcttaggccactaaacccaccaccaaatccaccaaggcctgagactatggaggagttgattagtgtcattattagggataaatttggaattgaagcaaggaatcgtgctagggtttaccaaaagccgtatcctgattattatgacaatatcccatatcctcgtggttatagagttcccgaatttaccaggtttagtggtgaggatagtaggaccacataggagcatgtaggtcaatttttagcgcaatgtggtgaggctagtagttcggatacatataaattgcgcttattttctttacctttgtccggtactgcttttacatggtttacttctttaccggcaaattctattcatacttgggctcaattagaacaaagattccatgattatttctacactggtgaaactgagcttacagtgtctgaattaacatgggtaggcagaaacatgatgaatctgtcactgattatattgagaggtttagagatgctagaaaccgatgttttagtttgaatataactgacaaggatttggccgacattgcatataatggattgcttgattctattaaagagagattgaatggccagatatttcttgatgttgatcatgtgttgcatgaagctctggctcaagaaagccgagtggatgacaatagcttaaatgctagtttggatgataatgcaataaccaatatagccgaaccaagtgttggatcggattgtgttactagtttaagcaatgatggaatagccgaatcaagtgatggtttggattgtgctagtagtttagacaatgacaccgttgaaaatatagccgaactaagtgacggttcaaattgtattacaagagaaagtgaaatagtattgtcacctaaaaccgagtcacaaatcgatcatgtgaatgttggaaaagatagtgacaatgtcttgcgggatggtaatgaaatagaatccaaaatagctatgtatacatatcaaaggccatatcctgaacacatagattcggtcccatacccgcaaggatttgatgtgcccaacttcacaaaattcacaggtgaggatgctagaacaacaatggagcatatcggccattttgttgatcaatgtggtaaggctggtagtgctgatttgcttaagttaaaattctttcctctttctttgtcaaactttgcatctacatgggttagtttacttgctcctaattcaatttctacatggtcataaatggagcttgagtttcatgattattttaaaaatgcaagcttgatggagcaaagaccgattgatgattcatcggtcacttatgatactattttggttacacctattgctaagaccggaattgttagtaatccccttcctattgctcctattgattttgacaacaagaaagtagtgattcggcctagtcaagccgaatccacaaaagggaaaagtgttattattggggatcctcggtccgagacaattaggattaataatgctaaggccgaagatcataaagttgtaaaggatgagtcatctagttcccagaagactaaaaagccgaagcttacttttgagatgcttatggctaagtacaagaaaggattagccggtcaacgatttgataatcagactagtgattcaaaaagactaagatcatctcgtaggaagagaattggtcaaacgctaaagcaattggagccatcaactataccaacttcatacaaacctccggttgtgatgccatggtatccatatccaatgtcactatatggttatcttttttatgtattacatgccatggatggctcaatcacctatgccatttg

SEQ ID NO: 13430 - DNA, 629 bp, Oryza sativa
tttttacatatattatgttacattacacaccatcgattcaccaaaaatcaaaatatgaaagaaaaaaaggaagagaactttttaatcggttcatacacaatcagattcattcatccaccgaatcctttgaatgccaaatcgccaataccaccttacctactgatgatgctgatctactcgcacgacgaggccgaatcaaatccacggcgatcaccggcggccggtgccggaggaggtgtcggaggagcagtcgcattcggccgcggcggcctccacctctcgcctgtggaagctctggtggcagccgcaggcggcgcaaaggagcgcggcggcggtgccatcggcgcccgacgccatgaactcccggcagccgtcgacggcgtggccgccgatgctggcggcgtggttgcgctggcactccctgtaccgcaccaccttgttgttctccttcctccccgccgccgccgccgccgccgtgctgccgttcgcgtacggcttggccgccgaccggtcttgctgaggccccatcgatgatcggtcacagatcacacctcgccgccggcgagcgtcgacgacgttaggtggcgaggaggagaaagggaaggaaaaaaaaagaatggaaaaacttt

SEQ ID NO: 13431 - DNA, 760 bp, Oryza sativa
  unsure (1)..(760): unsure at all n locations
cccgcttgaatgcaatctacttgtcacccnccgcaagccaacatgatgaatgctttcctccaccacctccaaaatctgccacagcagaatgctcccccaccacctccccaacactccaaactcgccgaattcctccgcatccgtccacccaccttctctagctccaacaaccctgtggatgcgttggattggttgcatgccgtggggaagaagctagacacggtgcagtgcagcgacgaagagaaagtcatcttcgccgcccaccagctgcaggggcccgcatctctatggtgggaccacttccaggctacgcagccagaggggcaaccgattacttgggctcgcttcaccgccgctttccgaagaacccatgtgcccgctggagtcgtggctcttaagaaaagggaattccgggagttgaagcaaggcaaccgctccgtgatggagtatttgcatgagttcaacaatctagcccgttatgccccggaggatgtgcgggaagatgaggagaagcaagagaagttcttggcaggaatggaccctgagctgtctgttcgtctagtctctggggactacccggattttcaacggctggtggacaagagcatccgcttggaagccaagcacaaggaactggagtcgcacaagcgccgcttgggcgaattccgcaatcagcagggtgctaaccagaaggttcgctacaccaatccctacccagggggtatcctcctcgcaacagcagcagcagcaacaaccttct

SEQ ID NO: 13432 - DNA, 747 bp, Oryza sativa
caatcgaggaggccgccgcccacacggggtcgacgaccaccgttctcgttccgggcagctcggcttcgatcatgtgctgctgctgctgcttggcttcctcgccggaggcatcgtcgtctgtgtccctgcctagagggctgtacaccgtgtacgctccggcgacgacgggcgcgacgactccgaggacaaagaagaaattgtcggcgaattcggatcgcgatctgctgcggtaagcccagtagaggttgcaaaccacgtactgagaaatgcaagtgacatggaggagagccaccacgacggacatgtgcgcccgttcgccgggacggcggtcgccattcttgcagtacaccttctgtagctccgcggcgtcctccggccgccatcgcagagaagaacgaggtggtggatcaggctgggatgctggtatatgctcatgagcgtgaagagcgcgttaaggatctggttgtcgatctctatccagtgatgcctcaatggcttggaagggaaggccctgttcagcaatcctagcaggagcaggatcaacatgccaccagctgcagcgacgcagagcagccatgccaggagagcaatgttcagagggtgcttgagccagttcttgcagaagctgaacaccgagctccagttgattcttctgacgaagtgaacctcgacatggaggtaccggcgggggatcctctagagtcgacctgcaggcagacaaggatagtcaaatactaatggcgcgcg

SEQ ID NO: 13433 - DNA, 782 bp, Oryza sativa
  unsure (1)..(782): unsure at all n locations
cgtgtcanataggatactacttcttgtctgcctgcacgncgactctagaggatccccgatatggtgcttgatctggtctgttcgttatcgagtgaagaaaagttcgccactatattggacagcgatgaccaacaaaaacaacttatggtgggtagcaatgctcgcaggttggctgtgcacggtaggagtgttgaaaagcacaaccaccctcagctggttaatgtgggtttggagaaagtgaggtccttcaatgccactcagtgcggcgatattaatgtggtaacatcatactttcgagttctacgcgttttaactttggaggattgtagtgttactggggaagcttgtggaaaacatagattagagcatgtagggaatttacgccacctgagatatctggggatttggaatacacgtattgatgagttccccaaggaagtaggagatctcaagtttctacaaacgctgaatttgtcaggtactggaatacaacagctcccggaggctgtgggccttttgaaacaactgttgtgcctacgtatcaatgacagtatagcagttccagctggtttgatcgggaatcttacttcattgcaagagctgaagatatggccggttgatgatgtctcaacaaggcagtttgtgaaggagctgggcaagctgaaggagctaaggattctccggtgtaccattcatattagcgatgagggcatggagagagatttgntagaatcgctagcaaatctgcacaagatccgcactttgtgtattttgggctcaga

SEQ ID NO: 13434 - DNA, 768 bp, Oryza sativa
  unsure (1)..(768): unsure at all n locations
gccgtaggtagatcanactcagtctgcctgcacgncgactctagaggatccccattacaacaacattcaattgaaattacacgatacaagtatttagtccgaacactcatcacatcacaacaacattttatttcctaaatcgatagcattgttacaccatggaatcgcctgctgcgcgacgacgccttggccttgcgcgcctgcttgttgttccttcaccaggtggtcgcctaccatcacttgcctgtccagatggactagcatctgcgccgcttggaacttctgcattcttcgggcattttttgttagtatggccgcgcagatcacacttgctgcagcgtaaagtcctcccacctgcttctgactcatccatatcatttctgatgcgtctagtttggcgtcgaccctttttcacccttaacttagatggatctggaatgtaaaaaacttgggcactcagcgttgtgtaagatcctgagatcccgaacccatatatctcctcactccatgtatgaaagattgcttctttcctgaaataatttgagacgtacacattgggagatatgccacaatcaccggcagcagcaagaacgtgtgagcaaggaaggtgatgaagcttcggcttcatacaactgcaggtacatccaccatccgccttcaagacacattcctgcacggcttgcttgcgatagataccacgcctgcttctatcaacacacattatttataccgatgcacttgtgtgccttgagcaacaactctatgtct

SEQ ID NO: 13435 - DNA, 3238 bp, Oryza sativa
  unsure (1)..(3238): unsure at all n locations
tttttaattagtgatggaacttttcacttatgggaaacaaatacatgtacgtcagaaccatggtcttcatctaatggatatgtatctgtaagtagtattcattcttaaataagtactgttcaacatttaacattgttatttaccatgtcacaaggaatggattcttaataagtcatgaaatgaaagggcaaatgctttgcatgttatgggcgattgggttgtgttttaacataagaaattgttatctcagatctattggaaaatgatgttgtgtatatacatgtatttatcttgaaaactagtatatttagcatgattatgaagattgataaagcatattaccttatttaacaagtgatttcaagcaatatatgttgaaagcatgcctgtatcaagcttctgaacttgggttttattttgtatttataactacctttcagtacctttttattttttaatgtattgtcatttcaacatctgatcattatgattcttttggcatctagaataaaaaatatacctacaattttgtttgccaacaagggtaattgcttgttcaacagttgatttttgcttcagtttactttataaattgtaaatattacataaagctcattttcatttgaacctccccaagaatatacataagatcagttttacagaaaatgtatctcattcacttgtaatatgtatgttaccccccttaaaccagtattttgaattaaatatgggtgttgtgactagttctggagttatgatgttttatgcttttatcttgcttgcatactagggagcaaattgggatccagaaggccgtattgtgttattgtccttttctaactcaacaacactgggctcaattcacttctcatcaaaaccaccatctttaggtatgcacagctaccctcatctcactacaacatttttatgtgaagttatgccgttatgtttattgtctgtatcctgaacattatgttgtgttcattgacttcagatgcccatctcctaccagtcgaacatcctgaaatttcctctctgattgtcaggtaacaacagttggcctaccattctatacccctgacctcatgtgcacctgatggaacatattttgcttctgtcttaaatgctaactttaactgatgatattttgactaaccacatttgcaactggttcggaagtcattcatggtatgtttttaaagaaatcactcatagtatgtaacttatgattattagcaaactaagtaaaggcaagttctccctaatcaatgttagcgcctcaaccattttttttcttcaaaataatatatttagatctggcttgtaaaaagtctggctcttgccatcatttagtatatactcagatgctttcatttaggataaaccttacataaacaaaggttcatcacttcatccatgacagtctagaaaagtaacttcttgtccactccatatacttatttatgctttctctggttcatctagccgaggcatagataaattagcatgggattcttcaggagagcgcttggcattatcgttcaaagatggcaatgaaatgtatcatggccttgttgctgtctatgatgtgaggagatctccacttgtctcagttttactagtgtaagtacagccctctaacttaccatattatcttggtcatgaacattgtatctcgatagttttggaccattgtctgatgaagttccaatgtgcatatctagtggattcattagaggacctggagaaggagcaaagccacttgcatttgccttccatagcaaatttaagcaaggaccattgctttctgtggtatgagatcatcaaaagttttgagcctattagttagtaaatgataattgtggttgctcacattgttgtccaactgttcatgcagtgctggagcagtggctggtgttgtacgtatcccctcatacttcgcccgcattgactccctaaaaggaggtaaatctcttcggctaaaagtcttgaactttagtggcatgaaatcagctatgtttattaatctgaagttcattttccttttatgtccagtaagtaaggtcaatagatgattggcatgctattgaattatcttttcagagagatgcattctataggagcctaaaaaatgctgctaagattgttatcctcctgtatgtaaaattcttctctctggaaacggtgctattcaatgaaggcaaaaatagaaaaaaaaattctgaaatgtatttggtagcataacaaatgtctgtattatacttatttggagggggaaatgtattgtctgcgcttgtgtttatgcagttccccaaagcaaggacaccattgtcttaccatgtgtccttttagtgcatgattactgttcattaattggctgcactattgcatggtaagaaaccttgaatgaaaggtttaatcagtttcaattggacttgtgtttgagatatcacaggtatgttctgctgcatcaaatgaaatgtcacccttatcacttggtatgactgaaacgcaaggtaaacatgcagaataagtatgaatgaaatatagtccaagacattcttcatccaccnttcattttccncctccctgttggctgattcagattagctaggaatcattcaagctgagtagcngnagcttagtgtgatcaaaggaatagcttattgacaatgatattaattagcgttaccgctaggttcgataatgtgacaaccttaaactactcttacagcgtcataaacaacagggtcacacgaagtgtgattagcaaatgccagaatgcagtatatacactctgttagctttctgaaattcaggtaccacacctcacgtaatcatcctgtgttctattctctggtataagtgtgcatcattgcttcacatctctgccacgagcttgctgtactgatctagagcgaggtcaaatgaagtgaatgaataaggagagagcgctgcttccatctcttctgaagcatctggcagctcgcttttaaccggtacgacctgcatccatcgttcacaagatacttgtacgttagatgaactcgccaacacctgagaatatcgtgtgccacactgagattgaccctgtctgcgaaaaaattatcgagaaagactagagaataattccagacagctaaataaacaatttcttaaaagcttacaaataaagctgaaagacagagtttgcttacgacatacggcttgcatatgtgtgcattctataaagttgtaa

SEQ ID NO: 13436 - DNA, 3301 bp, Oryza sativa
tcctgctactaagtttgagctttgctcaagcttggttggcgttacagtatagtcctagagactatttggcgcgcggtgattttacctacatgaggtatttttttggtgattgatgttttcatgctacaagaggaaattcgtctcaaggtggagattgttaaatatgtgatccgaattttgggcccacaatatattcggattagttttctagtaggacttcatgtctatcctattaggtgtctttctatttcccctatatataatcttgtaagccgtacgggaagaggtgacgttcccattgtgattcccctacgtttgtaatcatctcctctatagtgatcattgccggtcggcgcccgtggttttttcccgcaagggttttccacgtaaaaattcatgtctccgttgtgcatctattttcataacagttcactcctcatatgttccaccctttgtatataagctaatgtgattgggcaccaaactttgttagttggaagatcgtaagaaactgcaggttttcatagacatcctgataaacaccctagacccctcattaataccggtttggaagggctataactctcggtttcgacggttttaaaactggcactaatggccctcaagcaccgcaccagacaattccatgtgggtatcgtcggtgccggttagggcagcgaaccgccactaatactcatttttgtgcaaaaacaaatacaatcaattacttacttaatccatggtcacattgatccagaacacagctttcttgcatacacacatttatatacaacaatccagaatcactggatacaaagttttttttatttcttgcattcattcctcatctattgcaaacagtggagaaagcaggaagatgccaagtgcatctgtaatacagttatgtaatacagcaaaaattaggtgaacaaaagtttgttttattctgcaccgatctcattaaaatcgccgatcaacttcagttcagtaatcctgttttttttttcctggcaccgtccttcctttttgagtaagcatgttgtttccactctttttcttcctttttaataattgtggttctctcatcttaattggattgaaaaatcagacgccattttcttcctttcttgagactcattgttgttgatgcaactcattccctcttttctcagatgaatatagagtactactgctttatttcaggttctccagtaaatcgtgcatgaaaatctgataggttattggtcttagtctaaaatttacattcagtttgcgtgacatctgagtattctgcagttcatgacttctttaaagttgtcctgatgacaagtacttgcagttgtactttgctacgagaatgaacttgtcaagaaaacctctcaaccttaaagttagtaggaaaggttattgttggaaaaagaccattatatttcctctgtttattcacaccattgcttgtgttactgaaggttcaacgtgtcggatttttcttcagcacattgcaattctgagaagcatgggctgtatacagcagtctgaagacaggcattccgaccttacctgcaccctgatcgagctcgactaaaagtccttatggaaagtgatttatctaggacagatcaatgaaaataacaagaccagctaaaaacccagcaatcatggtggggacatatacagctagcagatgatggttcatggtggctactctgcacttgcacaatcaaatgaagtatatgaactgacctttagtttgctgcgcagccttgaggatgttgatgtttaaatgagtgtttaaaaaattaaaattattagcaacaaaacagagcatacaagtatagaacaacaaaatagatcaggtatggagacatacttgagggagcatacaccttactgtttacatgatgaagaatagttataagtgtttgcccaaattgccatcatttatacttttttttgtggaagcaatgggaatcctccaatttatatgctagtgtgttgattatatagcctatgggcatgatagctgctgtcaacagaagctttttatacaaactgctatcttactgaccaggatatatctttttggtacctggatgttgcgatcaatgttccatacaacatgaaataatatctgagtgacttgagcattgacaatgaacatttcttttagtaatagagaactggccacattattatttgctgaaagaaaaaaatgccatgggattttcagagtaagcatttgagaactacttagattatctgcctggtacatgtgagtaccttttgcattacatgtttggtaattatcacagtatttagaactttcctccacacaaatttgtatatgtgatgaaaatagaaaatgttatgggatatgcatatcaaggaaaatagactaacatgatccaactaaatttagtgagcagaaatttgatcaaaggtcaattcagaaaactgcaaccccaaaatgtgcattactttgccaatataaaaaaaactagaaaaatataccaccaccattccattagaccattactaaataacatggaaaaattacgagatataagtaaaacacacaattatatagaacattatacacattacagtaatcctaggaaatgaagacttctagaattagtatggtcctcgcaataacataccaccaagggactccaatattataaatattctcccttcggtacattattattttattaacttctagctaaatcaactgaaaggaggctctccactattgattccattgttggccttttcttcctatcttcctccaagcaggacacagccaactttaccaaagtttttgcttgcaagtagttgaattcatcacccactctgaaatctacgaactctgctaaccacaatgatttctcattgtccaatctataacaaatcatcttaataaacttcttgagcatctcatgcaccttcgtcttatcctctccaacgattaaatcaaagactcgtcttcctgacactagctcaagaagaacgactccataactatatacatcaacctttgctgttattggtaaaccagatatccattctggagcaatgtaacctatggtccctcgtgctcgtgaaacattttgattagagccagatctactaagcagctttgccaacccaaagtcagtgatcttaggttctaaattctcatccagcaaaatgttctctggctttaggttgcagtgaatgacccactctaggcactcatggtgaagataagccagtccctttgcaacgcctaaagcaatattaaacctttgcttccaat

SEQ ID NO: 13437 - DNA, 12737 bp, Oryza sativa
  unsure (1)..(12737): unsure at all n locations
gcgtcttgatataacctatgtctgctgcctgcaggtcgactctagaggatcccctgatccattctcaacatactctaagaccagcaatctatggaatctttctgagcaaaaaccatatattcttactaggttcatatggttgattcttgaaataacatgcaactcatcctgaaactcctccctattttgcgtgacattttccaacttttttatgaccactgctcgatcgtcatccaatattcccttatagacaactcctgaacctccccatccaagctcatgtttaaacctttcagttgccttaaccagctctctatgactatacattcggaaatgactagtcatcaccctgtagccttcctcagctatccatacttgagatgaccgcatctccttcctcaagacaaagaaccatgcaaatgcgaagaagaaaacctcaacaatgaaaaacacaccgataaacccatagaagtagaaccattttggttcctccccaccaatcttattcatgttacgaactgcctctgtggttattgtgtttaaatgatcacagtcaagtccacttagtgtataatcatgtatactagactgtggaatgggtttttttgaaacatccaaacttgaaggaagtttgatatacatcgttcgcacaaaaggtgttgggaaagtccttccattaaagagaaaagattttggatagcatgtaccatttccttcttggtattgaaatcccttgcatgtgcagtcacttatgcaagtgttccaacacacctcccaaggtaccttttcaatacagtgttgatcagaaccccaaaaatcagtgtttcgaagttgcaaaaatgttacattctgtttaccatcgcatgcaatttcgacaataggcttgcaaccttgtgtccagttacccggattcctcatcttataaccaggtgggcatgaacatcttggtgtaggtgaatagtggcagattccatatggaccacacaaaccatgagtcatgcatgtttgaggttgagcaatccatgaaattgtccatgttccatctgagttattcaagctatagagtctaagattaccatcataatccaaggtaagccttcttttaatccccaagcttctatcagaggcaacacgggcttgatgcttagcaagatcactcgaaaaaaattctccataatcatcaagactacctatccttgtactgttataaaggttcctattattctcatagtactggtaatcaggatctggccagtatacgccggaaacattagtgtcatcatatataagtgacaatatcgactgatcgctgaaacggaaggtatagtgactaggaacctgtaacccagtggtagagactaactttgttgtagcgagaatgcgttgagtaggaagcaaagtatctgtcggtgaatcgaaactttgccaaacaatgtttccactggagttcttcaagacaaggttaccagtgttcaataattgaacatatcgaacattagggaatttaccgtcagtttgccacacgactgtgccgtcatagtcagtgaggactatgtttccatccttgcgcagagtgatctctgatctccttgagtgcacgggacggccacggtttgcgctccatacgatggccttgtcagctgaattggagtaccaaattgagaaggtgaaggcgctagtgatgttgtaggcgttagtgatgttgtagaagccacatgagaatgtgccatcagatgactgcaggatgttggtttcatactcttcaacaaaaagagaggatttcagtggtagaatatcatgagttgcagcactcaatggtagagcaagcaaaaagagggtggcaagcccagcaagggaagtagaaagaaatggagcatccatggttgcagtcttggagagatggtctgagcttcagagattggatgagcatagcttgactactactttgttgcatgtggtgcaatgtatcttgaatgacagttctgatttagtcagaaattcacagtgcggttggtgtggcgttttggaatacttctctgcagtttttgacttttttgaagttatcctgcagagaacttctggttgggttttttttctattagaaaatgacatttaccttgaatatatagccaaaacaaacatccctaagatgcaccttgaataaattatctgcaaagagaacatttggatatgcttgaaacaagtgatcaaaatcggtattcagtaggtccctcccatgcatgaatatacagccgaatgatgatgcttcaggatgactcttatctcttcgttgaacttgctagaatggtcaaaaaaatatatggatcagttccggtcagtcactatatttgaacagggtcagtaacttgagagttctaaacttctaatgcaacatcactgtctagataattgttacgattatcctatccatgtatcattctctggattggattcttcaggtccaggttcgtgcatatgggagcaaacaatactacaattacattagcttggaaggaacaatctaacttagtgagtgtgatgcaagttttgggaagtccaaattcataatccacttctgaataaacatgattcattgcatcatattccaaaaaatatgaatgctagaaaggtattaaacatgattcataatccacttctgaataatcattgcatcatattccaaacaactgcattgttactattactggcatatcattcactgaccaacaaaacgaaaacaatcatgcgaatttgacatcaagataccattattgacatataattccctgaccaacaaaatgaaaacaaccatgcaaatttgacatcaagatgtaactgtagataacacgagctgagtagagatttgtgtatggaagaaattgccagttcttatcaacagcacctttcattcaacaagtttgctttggggaagatgatagctgtggtctcagacagggtgaagtgcgatatcttctgacctctctgttggcatctgttgtctcttccagattatgtcccatctcttacgaacttccttgctgtattctacagcagcttgctcgtaattcaaagaaagaactgctcgaagacgatgatgcagagctccttctctttgaaaaacctttccatagaaaacgattattgtccttacaatagatcagtccaaagcataaatgactgcccctagatcttcattggagctatctctgcaataaaataaatcagtgtagtactgtcaaaactaataatctatggaggactccggggttcagcaactgaccctactcgagtgccactgcattgttatagctgccaagcactatgatgcattccttcttctctaggtgcagtgccgttgctcatgacagctgattttcttagcttgcacaagcttctaagatcttcaccagatgacactctaccaccgacgtgtcaagagttgcaaacaccatagatggtcaagagattaagaaaatggtttgcggtcttctaagccatatgattcttgaacttcccaagtatatccttgtagaaatgatacacatataagcattataagaatgctcatataaattgccttcctgatcattaggctaattctctgacaaatgccactttgagcttccaacaaggccttcagtgtttgtctggcacatgtgattctataactcgtaactactttcctgattgtgttccacagtaaaccgaaatggactgtccatttcatcaatgccacgacatcctgacaaaataagacctagcattttccttcttacattatagacagggtttggatcaaccaggcatcccttactgtaactctctctaagaaggacatgctgtgtgcttcctttggttgagatgtagaaaatgccaaggtgcttaagaataagctcccgcaggtttacctccataccaaaaggtcttctgaagtgggacaacctctcaagtggtatcatcttttctactgtcaagcttaaaagttcatgaagaatgccaacaatacgtttctcgagccgcccgacattgtggattggatgcaaatcattcttatcataagccttagtatagggaagcctctgccagttcccaagcttttccctaaaaccattctcgatcttaaagccggctggcaagtttataggaaaaacatattttgtctcagattcagctaaccatttttctgtatattccttcgctcttcattcttcaacatcagctacagctagactttcatccctagtgaccaatgtcagagtatcaggggaacctagagaaaaatcagactgatggtttgttagtatagagcacctatagtcatcaggcaggccaagttcccttcttatgagccacaatgcatgcatattcagagttccatctttcattagcatgaggagcttcttcagccgcttaacaatagcaggctcattttccctgatgacagcatcttcttctgcaatcaattcagccatttttggggtgaccttacagcattcattccttttgactgggtgcacataaatgtaaaaaatgtggggatatttcttaaggaaagcgccaatctcaatatttaggccaacctcatgtctccacctggagaggagttggagagatgcaaagccattcctctgctgagatatcaactcgtgtaaatccaaagctagcctcaggttcttcagttgaatcatcagcttgtccagtttatgatctcttgttctgccttcctgtcgagttcttgctgaatcaactggttttttccacctcctctgtatggtgcaattataaggaccatgctgaaacaccgcatcccatatgtgccttctgaggggaaagacacgcagatttctttgaccaaacgctatagatgccattcagttgtatattcagaatcaggccttacttagagctcacaaaacaccatcggcatgcaaaaatggatatgtgaatcaatgtcgatttgtcaatctgcaacaaagaaattggatgcattgttatctgtaataccaacaaggtaaactaacttgtcatctgtagaaacaaccaaatatggaggactaattaattttcttttattattgttccacaaggttgtgcaaaatagcaaagaaacgcaggatgacaatcagttttggaagaagaaagtgacagaaccttaaccttgctaggcatttcgtcgaacatcatgtggtcaaggtggaggaagcaaactctaccggatggaggaaggccgtcgaacgcacacgtacggacaataatgtaggtgatgccgacgagaacaacggcgacgagagggatcgacgactctctgctttcccctggctggcgcttctgattggcttctagctagagttggggaaactggaaaaggagagcgtattggggagcttctcctgtctgccgctgattcgcctcggctctgccgtcggccagtccgccatggcgggttcgccggatagctatggaccattacttggtgtacgtcagagaaaagaaattaaaattatacattgtttttggctttttcagttatatacatactcttgaaaaaaaatagaaaaatatatacacgtaccattacgtgtgaacgcacgaccaattatttggcgtggcacgaaggtgccggaccgatggttgggacaatcccgcgccgtggcacgtggtagccgattgggaagattgtcctagccgttggtcccctaccgcgccaaacaattagtcacgcgtcctcgtaccacggtacgtgtatattttcataattctttcaaaaacatatatataactgcaaaaattctaaaaataatgtatattttttacttcttttgtcagtgtgtaatgaacatcttcccaaaacaacacttgatttttcattagtttttcaaacactaccccacattcatgaattattcattcatgttacataatgaaagagagatgaggtagttaattaattattactaattgtgatcacagtcgtatccaccagggccaccaaaggcgacattgatgccggggcgatagaggtcggggccatcgcccttgatgtcgtagcacttggggtgggtgacaatggtgttgacggggtcgtcgacctggtcggcgccggtgtaggcgatggcgaggtaggcatggatgcaggctgcgttctggaggccatcggaggggtacatgccactgcccattggggtgagcgtgtgccgccctcccggcctcctgtccagcacgtgccctcccatctcgttgtggaagctctcgatgaagggcgccgcgaacgcgctctcgtggaagtagccgatcggctcatccatcagcgacacccaccacaccgccggcccatcatcctgcatcatccactcttatatataattaatcaatttaatttctgaatactaaaacaagttctgttgctaaaacaaaattaatggtacgtcctgcgatacggattgagaagcctcctagctatccctttcccaatatatagcatagattactcatgctagctctatgtcttcctacacaagtgttagtcatttgtgatttctatagttgattttattgaataaaatgtgtggaacatgtaatttattgttatgtttgctggttgaaaattgagatgtgatttctaaattgtgatttttgggattatatatatagacttacagtttaacaagataatatcgcatgtgtttcatatggagataagcatcaaagtatataattatttaggacattataatatgacaaataattttcttataaagaaaattttattcaaaatgcattaaggtatattgtcaaatatcgtcgtagcgttagcatggatatattaattactagtatataattaatcaatctccttttattacatatatgtatcccataatcattgcaatacatatatacgtgccgcgtaccattctcttcttcatccttaaaaatatataagtatatttctagatacttaaaaaaagtatttctaactagctagcagctgagtgatgtttatacgcaatgcaacaagaaaatattatatactccctatgtattttaatgtacgacgcgccgttgaatttttaaacaacgtttaaccatttgtcttattcaaaatttttgtacaaatataaaaatatttatgtcattcttaaagaacatttaatgataaatcaggttataataaaataaatgataaattacataattttttaaataaaatgaatgatcaaacgataataaaaagtcaatgacgtcatacattataatacgttataatacggagggagtatgttttaggacagatgacctatgcaccctgtatattacgacgtgggtgaagtaggtggttccaccaaccgtggaaaacttgtcgtatttagcaccaatggcgtgctttttgctggtctggacgaaagaacactcaaggttgaagcactttaatttcacgccaccatcgttctgcatatatatatcccatgcattaattacaccagtgagtagctatagagcactgtagactgtgctgtacataccagctgacatcaccaactttaactagcatgcaccaaattaatttgtgtcatcttcttaaagaaaaaaaagagttttaagaaaattagctagctgttttaaatctagctagtgctctatctaactatcttaccactatgcaggtaagaggagtagaggactcctactgatcctgacagttgattatccatcatgtgcaatattgaataaaagaattatgtgatccttctattaatacatcacaggaaagtaataataataataataataataataataataataataataataataataataataataataataataataataataataataaatctaattagcgtactaagaattaggagattcataggggcctacatgtcaagaaacaactgaatatttatttttggtatttaattcaaacattcaattttctgtagaatatattcaaattaaataaaagtgaccaaataatttttgtacttctaatgaaaacagtatgtatgcaattcgttataaggtaggagagacactttacagtggagtatatgtagagccgaggaagatcgtcaccaaaaaattgagggtaaacctgcatatataaacaacaaattaacgtaacatacgttggtatgtacgtgacacatatggtatacatacatataaaagtgataactggccggtaacatatacacatacaaaaataaatatatagaaatggtaacgggcacgtacggcaattccgagagcaatttggttgtcgatgttgggtggatctttgcctggattggcgtaaattccctgactgttggactggcgatggcgaggagaattcagagggtcccaccccaactttccatataggaagccacgccgatgcaccgtgatatggcccattcactccatatgccgctgcaatctgcgcacacatcatactaatccatcatcttatatatgtttaatttgatgattaaattaatataatcactagtgctatactccattcgtcaaaaaaaaaaatcaaccttcctttaaaaaaaatcaacctagaagaagatttgaccttttctaatataataaatctggcctacctttatccaaattcatgatcttagaaggggtcggattgagttttcttttttctgatggagggaggatagtagtattattacttacttctagattataattattattgccagcttcatcatgaatactgtttggaggcacctaccgcttcgatgccatgcctgctccgcgaatttgaacgagttgtttcctcccaacaccaccatcttctcaactatcttgggacgatccacgcttggtttaaactgaacaatatatattcatcacatacatcagtactagtagctcttaaacagcaattagttctttgatcttaattctctccttaatttactactccctccgtgttttaataaatgacgtcgttgacttttcgaccaatatttgaccattcattttattcaaaatttttgtgtaaatatgaaaatatttatgtcatgtttaaaaacatttgatgataaatcaagtcacaataaaataaataataattatataaattttttgaataagacgaatggtcaaaatttggaaaaaaacagtcaatagcatcatacattaaaatacggaggtagtattattttctttctaacaattgcatacatacatgtataaatggttgcatttcttaaaaaactattataatattctatatgttttatatttaaaacattttgattttggtctttccatctctcgtctaaatttactaacatccatatatatttgagtacatatatgaaacatatacatgaatctattcagaatctaaatgttttgtagttataattataacgtgaaatagagaaagtagtaatcgacaatgaaaatgttcagacgtatgtacagcaccaggattttatgatctttgagcaatggattcttgaggcttggttgcttgtatatgtccacgcagtcaataatatcaccgcactcgctctgtcaattagaaaccaaagtgagacttaattagcacatgaaacttttttggggggtaaggccaatgatcactggaaaaattactgcctggaccaaaatgacctcagttgttcagctatatataaattcatgaattcaaccagatcgagtatatatgaagatgaggaatattagatttgagaattcatcttgtgattaacaaattaaacatatttatactatgatatatagctaatgcatggatatctgccaagtagtaaccttaccaatcctaaataaagaagattaacataatgtagaaattcttacctctatggtcttgataatgtcattgggatcgatatgtacaccatgaacagtagttgtcgttgaagccaacaatatgcttgctgcaaagaatgcaagaagagacctcattctctaggagtcgatcttcaggacagtcgaggatcataccgttagcaaacaagataatatggaggctttatatagaggtgtttgtggtgcatcgataagataattatgtattaatccattgctatcatttttacattactacacggaaataaggaaaggaggaataatgcttccttgtattctgtaaaattcatgattgattaattaataccataagtaagtctgctggtaaaattcaaatttcgaatgcaagtgtactaaccatattttggtggagtgtcacgccccgaactagtaccgaccggaactagcccgtgacgctccaatttaacctgttaatcgataccagtcccaggacacagtgctggtatcacaggaagacagattatcacagcaacagaggtctctttattatagagtagatgtacagtcatgttgggctgcggacagatcccgagctcacaactgcattacaaaaggaaaacggaagccgggacttggaccaaacaacacaggcgcgacttgggaaccaggccgaaaccctaaaactcatcgtagccggcttgctcctggaagaactcatcagcaggatccgcttcgtcttcttcagtgactgggggggattatttatatagagcaagggtgagtatggggagtactcagcaagccaagggaaataagtgtttaatgcaggcttcaaggaaaggccgttgtttttgcaattgattttagttgaactcttttctgaaaacaactaagtgagtgcttctcaaacgacacggttgagacagtgcgtctcgtccggtcggagtatgtgcaatgtatcagcctttagacttgattcaaggttggcacccggccaacagcttttcaaacggccacccgggcctacaactttcaaacggccacccgggcctagctgatcccatcagctgcagatttttcaaacatcgaacccctttccacaacagcaatttcacaagcagtagtcaaacaaaactacgctaggaatcacctcacatccgcccatgaccgtgggcacggctgttcgaacagtttgttaacctctgcagagggggggtacactttacccacacgacattactaacccggatcacccagcccatggggatcagccacgtcgggagacctccaagctttcatgacaaggcatttccaaagccgatacaggtttaccatatgccgacgagaggggtcccagaccaacaacaggttaggtcccagaccatactgtgccaggaagcccaggggtcctccccgacaccaccccggcgaatccacatgtctctcgacatcaaggctcccctgataagctagttactcagccaggggtgtcccattccacccatatggtcgtacttgtcttatgtttggatgaaattccaaggaatcggtccttaagtgcgagagcgggaaaaccgtacacccggtacgttccccggtccgcggttttggaaattcatttagttcacaagcaccgacccaggtgtcgggttttccaagtcttttgtaaaactcaagttttacccaagaagttgctcagattttaaatttgaaggcgcccttcggtactcgcacagattgcatgatttccgaggcgcaactgggtggttacaagggaacatggtataacaattaacaaaggaaggatcaaatgcaacaaactaggtagatccgccaatctgccttgcagacgggacaacagattaagtgcggcccaagggaaaaggagcggaccagccgagctaaatgggccggccggcccaaggtggcccaagtgcgcgcgcacgggaggggaagagagagagggccggcggaccgggctcaccgtgcgcggtcccgggtaggacccgcttgtcagcggctcggctcaccgtgcggagggagcacgcggcgcacgcgcgcgggcgggggagggacgcggtgcacgcgcgcggtctgcggaggaacggatgcggcgggcccacgcgcagcctcacggttcgcggtggaacgcgcgcacgggaggggctgaccggngtcggcccgtcccaacctcggctgagctggcgccgacgtggcgcctacgtggctgccacgcgggccgcgggaaggtagacgacgacgccgtccgggacggcggacaacagcggcgagcggcggagcgaaccacggcgataccggcgaaagcgagcacaccgggtggttgcacgagacaaggggagacgagccacggctcgggattcgccggaggaagcttgacggcggcgaatcgcggcggcggcaaccggcggggagggaagaggaaaccggcgacgaggtcacgaggggccgattcccggcggtgagagcatctacacggccaagggaatccgatgctagcgtcggattgggcggagctacgccgagcgaggctggcgacgagcgggtgctacggagctcgagcggcgatggcggcgagcacacggcgggcgacggcaacggtcggggcggcgccggctagctacggggaggctactcgtgctaccaccgaaaactaagggggggagatggagtgaggaggaagaacggagggaggcatccccgaggtgaggagaggcgctgtgacgagaggccgacggcgcgggagggatctctccggcctcgggccggggaagaggaggaagacgagcgcccggagtccccttccgcgtcctagtgcgcaccggctcctccggcacacacgcgacggctgcggtcggtgagagggacggcaatggcgcgggcgagaaaca

SEQ ID NO: 13438 - DNA, 598 bp, Oryza sativa
agccatcaagctcagctacttgatcgatctcctttaaaacggtagctgagagccttcctaacctgcttcccttcatcaattctgatagctcctctgccactcaagtacaattattcccattaattcgctccattgctgcacaattaaagttagcagaagctgctaggagaaatggagaggccgggtgatgaacatgatgactgcaggacggttcctctgctggagcctaagcatgctcatggcgaaggcagcaacaacaagcaagaagaagatgaagaggaggttgggtcgttggggcggcgggtgttggtggagagcaagaagctgtgggtggtggcgggtccttccatctgcgcgcgcttctccaccttcggcgtcaccgtcatcagccaagccttcatcggccacgtcggcgccaccgagctcgccggatacgctctcgtctccaccgtcctcatgcgcttcagcggcggcatccttgtaactatcctctctacccactacacttaatactatttaattacattttgtgtttaaactaatctaaactttgttttccaaattttccatcaaataactctcaaactctgcccaattt

SEQ ID NO: 13439 - DNA, 1069 bp, Oryza sativa
agcggtgttctctttttccaccctatcaatggagctacttggcttgttctacatctatctagctactgcattactttcaagtttagtcttttaaaacttagccctgaaccttgcctttttgacattgtgaaatggatgtgattgaaatgtttaagactctactctagtctctggaatatggttttgcctgttacctatgttgagttatatttatgttgttaagatgatccatactgcaagtgttatgctatgttaagatgattctgcgagtagtgttgctgtctgctttggtaccgctactgttatgttgtgattgtgacatgctcatttcaggtagttagggttttcaaatttcaattaattcccatggaaatgcttgttcagctccttagggttgcaaatttcaagtaattccaatggaaatgctcgtttgctgtattgttgcttattgtcagtttgagttttaatactattgatacatgtatgtgtctagtgcatatgttttaagttagcggatgcaattcatatatcgagtaataattatgcggaatatgtcatcaacacttgcacatatgtggtctgttgatcaacagttgcacttctataaatttaattagtcttatctaataacaatcatgcaagttgcaattctatctggtatatgcgtatgaacacttaattctgaattcagtgcccattcctgaagttaatctttatggtttgcttagattaggagcttagattatgatgcttaatttgatttaaacaaatggcctgctactttttgatatttttacttatttggtctggtagttgtacacatattgatgtgataatcttgtacagatgatttgcgaagagtttgtgtgctattttcattgtagcctatgtcagctctcttttaaaatgcttttttcgatcacatttactgtttgaggttttcaaccatccttgtatacctccccataaaaggaagtaccaaaactaaccttataggttgaaatagaattggaaattttcattataaatttctgtggcatttattgcattcttagaggtatgtatattt

SEQ ID NO: 13440 - DNA, 543 bp, Oryza sativa
acagctcttaatgatgcgtgcctgtccggcgatctagaggatccgattccacgccaagcaaatccatcagccggcccaggccctgcagaccataccactttcgtggccatttgctgtctggggactcgatatcctgggaccgtttaggcgggccccgggcgggtttgagtatctgtatgtcgcgatcgacaggttcactaagtggcccgaggcttatccggtcgtcaagatcgataagcactccgcacttaaattcattaagggcatcaaggcccggtttggagtgcctaaccgtattattacggataatggcacccaattcactagtgaactcttcggcgactactgcgaagacatgggcatcaagctctgcttcgcctcacctgcccaccccagaagcaatggccaagtggagcgcgccaatgcggaaatcctcaaaggccttaaaaccaagaccttcaacatactcaagaaacacggcgattcatggatcgaggagttgccagcggtgctctgggcaaaccgaactacaccaagccgagc

SEQ ID NO: 13441 - DNA, 558 bp, Oryza sativa
cctgatcgttgctttgtgactttgtgaagtgtctgggttcacaatggtgagtgggggaactgaattagaagggctctagcccttttccctctgaaatcttaccattctgtgaaccctcctactgggcttggggatcttcatttttgcagaagtcgtgactgtaacgctgggtgtggtggctcacacctgtaatcccagcactttgggaggcggaggtgggcagatcacctgaggtcaggagttcgagatcagcctggccaacatggtgaaaccccatctctcctaaaaatacaaaaattagccaggcatgatggcaggcacctgtaaccccagctactcaggaggctgaggaagaagaatcacttgaacctgtaatttctataaaatgacaattttgcccttttgatgaacatagaaatttatgaattacattattgaaaatgtaaaagtttgtcatatgagactattatagttatgagtttgttgtgcgatacattatttatgacaaaaattatttttagataatgaaacaaaaaatatgtatttaatttatttttt

SEQ ID NO: 13442 - DNA, 588 bp, Oryza sativa
cataaataggttggaagaatgcatttcccatgaagaagcagattttgttttaaaaattataaattggaacgattgttaaacaagttttacctgctttagtacaccagcctccatatcttttatcagaacaaacctcgacaatgcttagagccacagaggcatgatttgagtttgcaagctttgaagggttttccctcaaagccagggggagcacctcttgtaccataatcataagtcagttcagtcatgggagggatatgttccattgcaaaaaacatgatatgtgggtagctgtcatcgccatggtcatactgtacagcttgccaaaggagatttggagaacagctatggttcagaaaacgagccacattcccttcattgtttgctcttatgatgattggtagtttcttaaagttcttggttatcacagccgtacttttttcttcaagtaattcttctcccaaattccagcttaaagccttattgccgggacatgaagcgcgaaaggtatatttgtcttcctcaacatctatgtccatcttagtttcatcaatgacttcaccggcgtactcacaaatgaatgtgcca

SEQ ID NO: 13443 - DNA, 547 bp, Oryza sativa
ttgaacggaatatacaaataaaacataaccagaccatactacaagtcactcctatgaaaacttctttttactaaatattaatttgcactataagtcatctattgatatgcatataaaatatgcatataaaaacagtatatactacaaattaactgtatatgcacattgttgtaaattgcagcttggcatggcgagcgcattagaaacgttgtgtggacaatcatatggcgccaagcaatatcacatgttgggcatctatctacaacgctcatggctagttctcttctgttaggcagtcatccttctcccggtctatatcttcacaactccactcctgattgctctcggtcaagatcctgagatctctgccgtcgctggcaccatctctctatggtacatccccataatgttctcttacatatgggcattcacgctccaaatgtacctacaagcgcagagcaagaacatgattgtcacttaccttgccttcctcaatcttgggattcacctcttcttgtcatggctcctaacagtcaagttccaactt

SEQ ID NO: 13444 - DNA, 2430 bp, Oryza sativa
  unsure (1)..(2430): unsure at all n locations
aagccatagcaataccaaagatataatattcctctatttctgaaaatgttatatacactaatgtatttattttggcatagcttctcacatttgtttcattcatatagcatgtttaattgcattcttcatttgttccatgcatcaccataagttaggaggccatatgcaatgtcaaagcaagaaaagtacttcctttagtttttaatgtttgacgtggacttttggatatatgtttgaccattcatgttattaaaaaacaatgcatagttatcatttattttatgtgattttcttttatcattataagtacttcaagcatgacttacatttttgcatgtatacaaattgttttaaataaaacgaatggtcaatcatatgtccaaaagtcagtagcgtcaaacattaaaaaccgaatggagtaattgcaaagagacctatatctagtctcttggcttgaggttaagttggtttatttatttcccttatgactgattacgaaattcatttttgtgcgtagttcatacatgttaagagtcctaaggattcacatgatcctccatcaagcttacttttgcacattatagattcctcaagctacatgtcagatgaagatatttcttttagcaagttgacaaagacaccagtactgatgtgctttatgtctactaaggtgactccacgtggtaaattttaagttatcccctaaacgtagggttaataaatcacttttgtcgataatttaatgtggttacacttttcagacatttctaaggttctaagaaatctatgagtaataccacaaaggcatgtaactgaagtagaaaagaaccatgctcttcaaaggacagaagaatttaaaacctaataatcctttttgcagtgtaaataacgatggaaccacatatatatctatgttggatttttcatggtaatggtactttcatgtgttcatcctcatcccgtattgaactttttttttctacgtgcatcccgtattgaacttttttttttctacgtgcatgaggcattatctaaaaaaatgtggatgacaggattgatcttaacttgcataacggtactgcatctatagtttgagagttttggatgaggtctgatttgaatatcccatctgatgtttgatttttgtgtatgtttattttgaatgtgactgtacccattgaaaaatcctacaactatataaatcaccaatttgtgatagcacattatttttaatttgtggcccaattaccctgcatctttcaggtgatactaccaacaaattatgcaactaattactccattgataaccagatgttcattataaatttttaagcatacatatgtccatttattaactggaagtatctgaatattaggcattctattgatgcatactcatcagcgacagaacatattggactcagctttgatgcaattcatggccaaggccattggtgttgagccgaagtcgttgtcaagtgtatttgaagggcaagctaggggtttgaggatgaactactatccaccgtgcttgaaagccgacaaggtgttgggtttgtcaccgcacactgatctggatggcttgacactgcttctccaggtgaatgatgtgcagggcctgcagatcaacaaggatggcaaatggttctccgacaattttgtgtgatagcaaataacttgcaagattttcttggtgatgctagaagaattaacttctaacttctgcattacgagacacatgtagtcttacataaccaagtttggaatatcctgagtggccgttagggctcgtcgaccaatgattcattgaaattatatattagcgaaaatttaaacatattttttttaataataccatggccctaattttaaacttctaaaactctttttaatctgctacagattggtagctaaagttagaacatactaggagaaattagggatatatggccggtcaacatctccaaggtgatgggacgacagatggtggtgttggaatgagatggcgctgaccacgaccagtttgtgaggagggaggtgactacctcagtggggctatacaggttcgtcatagggatggctcggattatgatatccctaaatactgtccattggtcttcaaggttgatcagggggatggctcgtatcancacgccttcctcgtctcatcaaatcctatcatcattatcattaatcacccatcattatcattaattagtactccttaattaattaacgaatcattactgcttaattaattaccgtatctggcgggatgggtgatgatgtccatgatccccttgtagatgtcgcagaagacgacgtcggcgccggccagccgcggccgcagcgccgccagccgcgccgccaccctggcgttgtacccctggacgagctcgttcgcctcctccacgcagctccggccgtcca

SEQ ID NO: 13445 - DNA, 588 bp, Oryza sativa
cctaagacctatcatagactgatcaaattttagttccagtgttcacattaaacaacgacggttctgtccaccatccattgtgatcccaaggatagcttcccgccattgagtcgtcatggttttctgaggacgtccaccttccctcctctcaggaagtggctccatcagcataaaaatcaccatgcaatatcccatcccacacaagttaagaatttagagtctagccaagtgtaatacatgtcccggtgctcaataaccgcgagcacggctattcgaatagatttggtttactcacactgcagtggatgtacactttacccgtactccgcgactgcccaacacatgagcctcgtcccaacacatgagacgcgtcacggcaaagcttttcgataacctcgcattggcagtacccgctccatgaacttaaatcctcatgcactctaggcgtccatgtttctagcagtgagaggagttctggcgctcccgggaaagggaagtctcacacacatattaaattatggttcaagttaagttctctctctcacacactcatggcagtcctaccaatggcgacaccgatgtagggca

SEQ ID NO: 13446 - DNA, 10456 bp, Oryza sativa
aaactgatgattgagaaaattaatatactaatggctaaactcatataaattacaaagctagaaaagcaacatattaattgaaacaaatctagatcttactaattagtggccagtgctaacatcaatgtacatttgccataggagacagacaggagtagtgcagtacacatgagcagagcacccgagcagcggcggatggcggtatcagtcaatcaactgaatgtggccatagaggaatcaaatagacagaaacggaggagagttcctgcgtgagagtattatggcataatacccccacaatcctaaagatgagatagtattgcattcgtatcatgaattcatggtatgcttaaaaatgttgtgaacctgaaaatttctatacgtacggatgtgatatgcattggagacggaggcggtgacttggtgaggcggagagagggcctgcaggtcctgggcctgcggcgccgcggaggttgctgccttgcgccgttgagcaatcgcatgagaacctgctggtagctgcagacatcggcgaggtgcgctgctgctactcgttgtattctggcgccgtctcgaagtattcagcggcctcgtccgattttcgtgttctaggaatcgcaaacgctgccaatcgcgctcgtcatgcgccggccatcgcgcttgtgctgctctatcggccgcagggggggagggtcgggggtaggtgggggccccatggttttgggggcccagtgcaccgcactgctcgaaccccctcagggccgggcctgctctctccgtcctaaaaaaaagacaaaccctggtttccgtgtccaacgtttgaccgtccatcttatttgaaaaaattataaaaaaaattaaaaagataagtcacgcataaagtattaatcatgttttatcatctaacaacaatgaaaatactaattataaaaaaaattcatataagacagacagtcaaacattggcataaaaatttagggtttgattttttttggacggagggaacatgtatatacatactacaagtgtatcggccattcacgcccccaacagattgtcacctcaacctggcctatagtactagtactccagtcgtcctagcccctgactcgagaatttgtcggcagatacatccattgatcattgccaccatcatcatcacattatttatttcgaataatcgttattacaaaactgtcataaaaagttttaaaataataccgctagaactatcgttcaagttacatcgttacaaaattaaaaataccagtgataaatttacaaatgtccctatttattttaatccatcttcacctcctctgtttttttttaaaaaaaaatctctatctccctttattgaaaaagggcacggtcggttcaaaatagcaactcctgccaggggttgaggtcggtcaaggacggccttcgtaaaaaatctaccgcggaaatagatttattaatttcaagttctccatcatttatatatatcgagatcgccctatacagtggattaaaaaaatctatagagcttaagagaaacatactagggtcctgtttgagaagttttattctaactctgtgttcttaaagtacctaaaaaaaatctaggaataacctagtaaccagaaactgattaaccccagcttctctatgttttctccaacttcttttcataattttcagctccctctaagtaggattaagctcaaaaagagagagtggtgccacgtgcttgcccttatgccacatatcgatgagcgtgagcttacgagactacccaggatagccgagagctagatatggtgccccctatattattaactactccctctgtctcatattagaagggattttgagtttttacttaaattgtttgaccactcgtcttatttaaaaaattttagaattattatttatttttttatttactttattatccaaagtactttaagcataacttttcgttttttatatttgtacaatttttttgaataagacgagtggtcaaacaatgcaagcagaaattcaaaatcccttataatatgggatggagggaatagatgatatccccccacaaaaaaaaactaggtgatatcccacgctttgctatgggattcacggatgagtataagttaaatattgtcgaaataatgaaagttgaaatgttgagaaaataatgtgaggaagatgatttgacacatacttgttgatctctgtaatataatattatagatgatatgtcatgtttgcatggaatttaaaataggctagaatagtaattgcaagtgagtgaagatgtgacatgtttgcatgggattttaaatgggctagaatagtaattgctagtgggtgatgatgtggtatgcttgcatgctgagttttagttttagtgggtaccaactatatagaaattaagtatagattgtatttgtttttcttgtacaaacaattaaacatacaattcctgcggtattaaatgtgtttgagatctcataaacttatggatacttttatcatccttgagaaggtatcgggaggtaccatattttatagtgtaaaattttggtacctctagctacgtactaagtaccttgagtaccaaaatttgtaatgtaaaatcttggtacctctagatactttcttaagaactataaaatttctctaaatttattaggttttgtaaacctattctaaatataaaatggtaaccgagattatacttcaaagacttttaaaagtcaaacaacaaagtattaaacgttacaaattaaatgcatacatgtgtgtatgttaatggaatgagatttgcttcagtctagtaaaaagtaactcgaggtatcggtatctgacactactaaattattttcgatcgttggatttaactgaataggccgatgggcattgttagatctaacgatcggaaacgatttgttatcatgagatatcaatacctcgagttactttttattagatccaagcaaattagataatggaattactgtaatatgatatggccacgagaggattgattatatatgttgttgctggttaggcaggcagcagtagatggctagttaattcgccactgatctgatgtgagtcgcgtgccagcgacgcttggcgtatatgcatcgtgttccctttgtccgttgctagtccacaccaccttgatacgagctctcctctgctgctttccccttgtatacttgctttgcccactggaataatatcgatcgtcttgcgctctgtgtaacatagtacttgtacctgcctgccaccatgtgacactgcgtgcttcatgtctccacccgtgtaaactcttcctgccaagatcgatctagatagtcactacctccgttccatgttatttgttcttttatattatttgtctttttgagttttttttgtttgtcaatgtttgatcattcgtcttatttaaaaaattttgaaattattatttattttgtttgtcaattgctttattatcaaaattactttacatatgacttatcttttttttaatatttgcactaatttttcaaataaaacgaatggtcaaatgttgcaaataaaaagtcaaaaatgtcacctattatgggacggagggagtagtagctactcttgtgcatcatatattaattgatcagttggggattggacaattaattagtcttaaatatgacttttaggacaactacctttccaatgtataaatattataatatttaggaatttctcgtactaattgttactagtagctagcaatagctatatactaggtgaaaccctgcgcattgctgcgggaatttagtatgataataataaaaaaaaataacgtgtaagatagctagataacatcagattaagtaaattaatgtggtttacgataatttaaatttaaatagtatgtagaatggtgattcaaacataaaaagtaaggtggtataactttatggaagaagaaaagtagggatatagtttggaccatagattaatcatctaaagactaaaaacaattgatgtgatataacttaattagaggagaaaaggagaaagataatttgtacaatagattaatcatttaagcactaagtaaggatgaactatataagtatataatatctaaaacataataaagatatacattgaaacattatgtgaattatgttggatgttaatttaacatatttgtatttgaaaatctcttaaattataaaaaactataaagatatagcatgtttgcatgatgtttaaatgtgatgattgttagtggatgatgatgtgacatcttgttagtggatgatgatgtgtcatctttacatgttaagcttaaggagttagtgggggataattttatagtaagataggatatgtatcatccatggcattgtaaataatattagtgtctgtttgggttagtgccctcgtaaaattttagtagtgcatgttagtgtctgtttgggttagtgccctcgtaaaattttagtagtgcaaaatcttagatatgttatggcactactaaaattattattgacttggacaaaagttgaccacaatccaaatatgtaccgtgctatattaaagttatcaaatgattcgtaggactaaatttggtatccaaccaagctatttcgcagtacataccaactatcaagttaattagcaccagctactatgagaggcttgtaaacaacccgtctatttaaaaaaatatataatgcatagtaaaatgttcttaataagtctatatatgcgtgtgtatattaattaatcataaccattagattaagctctggggcctagaatccagcaacaaatatatatgtaccaacccatgcaattaagctaaccatataattaaccttgtaagccacctgctatataaggttcagaaatttgttgtgatattttttgggtaccagtgatttatactccccataaaatcgttttttcttttaaaaaacggaacacatgcatttgctgcttcttcttttcgatctggaacctgccgtcgatcgatcgatgaagcatcatatctcatgatatccagtcacgaatgtaaaggttgccacacctgactggttcctttcattcgcgtgtatagcaaagtacaagctggtgatgatgctggtctgattagtggaccgaccgacctggaatgaatatatacgacctctcagattttccttcaaaaagacaaacgtgtcgctctagtacttagagatgatattcttgagatgcatgctcctctcactgtctgattgttagcttatttcgaaactccttaattttcaagcttatattttttcgggggtggccaaacaactatttctaccagttatgctttcgaaacctcgggagcggcgtcggacggtggggacggtggtggggagctgtgggtggttgccaccagttgggtgggagcagcatgtcgaggacagaggaagggcggcggtgggaaagcggagacggttgcgagtggcggagagcggacgtggcagggagcgaagacggcagccttcggcggttgccgacatggactgggtaaggtgggaggacctccctgacaacgtcctcctcggtgtcaccgcccgcatcccctactgtgctaactgtgtccgcatcgggcggagccgcgcccccaccgccctccttctacagctggatcagcggttgtcaccgccatgatgtgcatgccgaccgtgtgctccccctctgccctcgcgccgttacgccgccgcctcctccccctcagctgtgtgcacagcgccgctcgctttgcctccgctccatccttgcgcgctcccccctcatggcatgtcgcggccacggcgctgcccacgttgtctacatggcggccgcagaggcaagctctctcctcccccacccgcggccactgccgtccccaccaccattgccgccactcctcaccgccattgccgctctagccaggtgaaaagaaaggccgggggagagaaaaagagataagagagaggggggaggaggaggaagaagggaaggagagaggataacatgtgggctctacatatcagtggttaccacaatattctttttgtgaatgataaataagtcttgcacgtatgtttttgattttaatgccacataagcgtcacatcaacgccacgtggaatgaagacctggtcaataccgctaagtaggtgccacgtcagtgaaaccgccttctaaaaccactaagggagttaaaatgcaccagttttaatagttgggggtcaagatattcggtatatacgaatcagattcagccattactgaagggagtaaaagtaaacttattcccagttaagcccagtgcgtatctgccactgttcctttttgttttgaactccaattttattgggtctgaaattagtaggcctatgcataccattattatacgcgcgaaatgtcattttcgtcatagtactttgcaaatatttttgaaaatgaaactgctcctgagtttcttctgatatttccaaacctccctgcatttgttctcatcctcaggccctctaaataacaaaatgttgcatcacaacgatgactgcttgattaacaacatgctagtgtatggttatttagctttatttttccaagaactatgtttaagctttgcactatgtataaattttataccataatatgcaattatccacaccatattatcagctattcctacatctatctcaacggtcaccaattctagaaagaaaaattctccgatgatcgatgatcatacacccggtcgtgcccatggcctacgcccactggctgtcctctccgccatcgccacgctgtcgccgccaaaatccaccgacattgctcccgctcccgctcccaccactgccgccggcctcccgtacgcctgcagcaccagcaccgacgccgtcgtctggaagtccttggacgccagcaggtcgccgatgggccccagctccggtgactcgctccactccgccatgcccgccgtcagccctgaccccccgggcaccttcccgacgacgaacaggtccttgttccccatggcctccacgctctgtatctcccccaccatctcgctcgcgttgaacacgccgcgctccctgtactccaccgtcgcgccgccgccctcgttcgccctctccaggaagtcgcgcaggcacccctcgtcggccttccgctctttcagcgcgtcgaactcgctcgccgtgaagcttcctcccttctggacgaaccggagcaatgtcaggtcgatggtcgggttcctcaccatccgcgtcgccagcgccgccacctcccggtcgtcgctcccgccgaagaagagagccaccacgcggtacccgccacccggcaccgccgcgaggccacggtccacgaggatgcccaccgtgcacggcgagaagctctgcacgctgcagttgagcggctgtatcgccgggtgggacacctccaggccgccgtccaccgaccggtacttgtggaacgggagcaggatgagcgccgagtgctggttctccgcggcggaggtgatgtcctcgtgcatggaggcgtacggcgagacggcggccatggtgcgcgccgacacgcccaccgactgctcctcgtacgccatgaaggcgtgggagatgtgcttgaactgcatctccgtgtggctgcgcccgtggacggaggcgtcgtaggaggacgacgatggcgccgaggcgttgatgaggaggagcgcggggaggagcggcccacgaactcgatgaggtggagggcgaggacgcccacgggcgatcggctcgacggcgtcaccacgtcgaggagcgtcagtagcgcgggcacgtcgcgcggcacgtggacgcaggccagcacgcggagctccgattccgggtgagcccacgccaccgtgcgccgcttgtagaacacgagccgccgcgccggcttcaccaccatgcccaggaaagggctcaccatcgccgtgatcagcgctgacacgaacaccagcaccgtgaacgactggtcactcataatctacacaacacaagaagctacctacccttaattaatcacgacatgcaatgcactacatggcgatcgattaattaaaatggattacccctttgttccttgcaatgttgaggatgacgagctcgatgatccccttggtgttgagcaacagcccgatggacgtgccgtcaccgagcggcatgccgaacacaccggcgacgccgattgcggcgacgaccttcaagaccgcagcgaccatggcagcgaccatgagcaacacggcagaatgcatgttggtgatcttggcggtgtcggtgcggaggccgctgagggcgaagaagagcgggagcagagcgcccaccacgaagtcctccaccttcttcaccagcgccaccccgaccggcccgttgggcaccgcgagcccgaacacgaaggcgccgaatatggcgtgcgtgccccccgcgtccgccaccagcgccgccaccatgacgccgatcagaatccagcactcgcggtcctcgccgaccgcctccccctcggcggcgcgcctcgccagccgcaggagcatggggcggagcaggaggtagctggcgccgaagatgacgacgcccgacgtgagcgtccacgtggtctgcgtgatggtgcagcgcgagtggccgagcaccgtggcgacggtgaggccggtccaggcgaaggtgtcgttgatgagtgacgcagagagcgtgagctggccgacgtcggtgccggcaagcttcagctcggcgatgttgcgggcgaggacggcgaaggcggtggaggagaaggtggagccgaggaagatggggaaggagagcttgttgaggaacgtgtcacccttgtgtttgtcgtcagtgctgagcgcgacgtagccggtgagagcgccgacgaggaagggcgggagcgtgcagccaatggcgaagccgaagctacggatgccggcgcgggtgatggcggagacctcgatctcgacgccgacgatgaaggtgtagtagacgaggccgagaagggccatggactcaaggacgaagaggctacggacggggaagacgaggttggagaagtgagggaggtggccaaggacggaggggccaaggaggaagccggcgaggatctgggagatgtaggtggggagacggagaggagagaggaggagggtggcggcgcgggtggtggaggtgatgaggaggatctggaagaggaggagaggtatggagaagtcgagcggattgtcgcccgtccagacgccacccatggtgatcttgctcgggtagaagcacatcaggtgcgtcttgtccatcgacatcgtgtggttccatagctcctccagtgggtccgtcactgtatgcgctgccattgatgaattccttgtttggtatcaactccggcaatgggtggcgttcttaggtaaggtgaggtgaggggaggaggagtgataagatacatcgtcgatctctcatttgatgggagggaagggaaagaggagtgtgctatttttggatttttgcatgcagaggtttagatgggttgcatgcctatcaaaggacaacaatgggaggtaaaaggcaccactaaaaatcaaagtgtttatgtggttgcttttaaaaaaataatcttaacgaaagataacctcacatagagaaaatggaggggaatcttttactccaatatctttttttttactaccacgttgcatattttgcttggcgatgtgtcttctttgtcttcaatatccccctcctcacaatgcaaaatatattttggtgattggctggggagtgcctaggcccctccaaaaaagattttatttggagctagtgtgctatattggtcaatctggtgtttccgtaatgatatagtttttaaccataagaaattgtttaacattatgcatgttatctttatgtgttttaattggttccacacttggtgtatgatgttttcacatgaacaatagaatactatgtgcattggtgctatacacttggaattggtagccaatgagcttttattctagtttggatggcgtagtacctaattttgtgctagaatctatgtgattttgaaaaacgttatttcatttgcgtcgaggaggaagggcgggagcgtgcagctgatagtgaagccaaagttgaagctgcggatgccgacgtggatgatggtggggacctcgatcttgaagccgacgatgaaggtgtagtacacgaggtcgagaaaggccatgactcgaggatgaagaggttgcggatggggaagacaaggttggacaagtgagggaggtggccgaggactgagtcggcaaggatctggaagatgtaggtggggaggcggagaggggagaaaaggagggtggtggtgcgggtggtgtaggtgatgaggagcatttggaagaggaggagagagggatggagaagtcgagtggatttctactgtgcaggggtccttttgcagg

SEQ ID NO: 13447 - DNA, 546 bp, Oryza sativa
actcaatgagcacacgagctgggtttccaatgcctctgttggggccaggcattggtatcaaggaatgatttgaattaacaccattgtgttgccccacgatgaaaggatcatctgtgcagcggccgaagatgtagctgcgtagcgcgtccaaatgatcccgtactgcaaagtattcatacaagtgaactgagccatcaacagtagcagtgatattggataacttgagcgagaatatctgcatcatgaattgttcttcgtgaatattgcaagcccacatgtgtggtcggcaattggttggatttgacagcatcattgcctccttgagagctgaaacgcagtatgtaggagcattttacatcagcggataaagttaaattttaaacccaaattgaaataaaggagaaaacaaacaaatcaagaggacggacagaatattgatacaattaaggttttaaatagcaaacttggcgctgccatggatccaaactcccaaagcgagctatacaatatcgtataaggtggttttaattctattctaattaagaa

SEQ ID NO: 13448 - DNA, 609 bp, Oryza sativa
ttcttgctttagggtttgaagctggagccaacacatcaaacattgacccatggtccatcattggagatgaatcctctgtgcacgtcacaactgatcgctcatcctgtttcagtcaaaatccggttgctgtaaggatagaggttgtctgtgacgattgtccagctggtggtgttggaatatacaatccaggattctggggcatggtataagttctctctcagcatatagcagctcattcccatatgaatatgcaaaatagatcttgtaatcgaaagaatcttttttctgatgatagtttaaagtatacggtgctgccaccgaaggtaattatagcaaagttattattcttatcaaaatactgaagctaacagataactaagctaacctattttttgtttgctttcaatttgcattgatcgcataatgctggttttctatcttattgccgtgcatcacttgcttggaaagtgtaatcagtgttatagcttttcgtcaaaccattttcacttttaccttctgatattttaatgtgattatgatcatttcaattttcagaatgtagaagaaaggaagacatataatctagtcatgcatatcagatcattagaa

SEQ ID NO: 13449 - DNA, 771 bp, Oryza sativa
agctgttaaaacagttttcctctgtttgttctcttctcacgcgttctacgctacgcgggaggcatataaatccggcaagcaagcgaccactcccacgccacgcgccgctctcactcggtcactctcactcttcatttcgtcgaacacctttgcctcacaaccaccccccatggccgaccgcgtccaccccatgcccgctccaccgccgccgtcctcctcccctccgttggaacacgccgccgccgccacggagaccacgccgctgcaccccagcttccgcggcgcgcggccgccgtcgccgggcacgtacatcatccaaatccccaaggaccaggtcctccgcgtcccgccgccagaccgcgcgcgccgctacaaaaagctcgcggcgaggcccgcacgccgccgccggctccgccacgcgtgctgcgccgccttctgcgcggccctcctcctgctcctcctcgccgccgccttcgtcggcgccgtctacctcgtcttccgcccccgcgcgccgtccttctccgtcgcctccctctccatccgcggactcgacgccctcgccgtgtcatcgttgactccgcagatcgacgccgccgtgcgcgcggacaacggcgccaacaagaagaccggcatcgactaccgcggcggcggggaggtgaccgtctcctacgccggcgagcggctcgccgccgggccgtggcccgcgttccaccaggcgccgaggaacgtgacggtgttctcgacggcgttggccggaggaggcgtgagctt

SEQ ID NO: 13450 - DNA, 666 bp, Oryza sativa
tgtgccctaccaaatttttagcaatttgaattgtactttggctagtttttggtttgctaaaaaaataccaataataacacacatatagattgacaaaaaaaaattggcactaccaaaatttttctaggttttggtattttccatattaattttggcatggtagcaacggaaaaaactgaaaaaaaaagaagaccagggcacacactacactgatgaatcccctaatgatttttatcaaaatcattaagttaaggtagatacacatcttgtcatatgatcaaatggtttcgccaaaaatcaataatcagacaacaaaatgtgcgaactcgatattttacacgactctctttaccaattctgccccgaattacacttaaaacgactcaacagcttaacgttggcttgccacgccttacttgactgtaaaactctcactcttaccgaacttggccgtaacctgccaaccaaagcgagaacaaaacataacatcaaacgaatcgaccgattgttaggtaatcgtcacctccacaaagagcgactcgctgtataccgttggcatgctagctttatctgttcgggcaatacgatgcccattgtacttgttgactggtctgatatccgtgagcaaaaacggcttatggtattgcgagcttccatcgcactaca

SEQ ID NO: 13451 - DNA, 745 bp, Oryza sativa
ttctacatggtcataaatggagcttgagtttcatgattattttaaaaatgcaagcttgatggagcaaagaccgattgatgattcatcggtcacttatgatactattttggttacacctattgctaagaccggaattgttagtaatccccttcctattgctcctattgattttgacaacaagaaagtagtgattcggcctagtcaagccgaatccacaaaagggaaaagtgttattattggggatcctcggtccgagacaattaggattaataatgctaaggccgaagatcataaagttgtaaaggatgagtcatctagttcccagaagactaaaaagccgaagcttacttttgagatgcttatggctaagtacaagaaaggattagccggtcaacgatttgataatcagactagtgattcaaaaagactaagatcatctcgtaggaagagaattggtcaaacgctaaagcaattggagccatcaactataccaacttcatacaaacctccggttgtgatgccatggtatccatatccaatgtcactatatggttatcttttttatgtattacatgccatggatggctcaatcacctatgccatttgatcaagaatggaggggatcacctaagtcaaaatcaagtcattcatttaactctagacaagaccattctcacaaaagaatcgatccgatggatcaaaggtgaaaaatgtgaagaaggtgtgggtgagaaaagaagccaaa

SEQ ID NO: 13452 - DNA, 715 bp, Oryza sativa
ctatggtgagatgcttacaatatttggtagcaccatggctacgggaaagtatgcaaaggactcaagttcagtcctaggaacagaggatgtccaagaggaaaatgatgaagaggaaaatgatggccctgccactactgatgatcgtccggaggcatcatctgcaagcaagccaaagaaagctagaacacaagaaattgaagatgatgggctgattggtgcattcaccagtgttggtgacaagttagcttctgctatactaaaggtcgctgagccagacaataaactgccagatggtttatttgaaaccttgaaaagccttcctgggtttgaggagatccacgtatctgtttactatgctcatttggttgctaaccctcacattgttagagcttttgatggacttcctttcgaaaacaagatacattgggtccatttgttcattaatgagaagtttcctggatcaatgtagcgttgttagatgagttgggtagttcttttggtattatgtgttgccggtgggcccatggtcatgtatgacttgtactgccaatatgttgtaggcagtgaactcttaggtgcaagacttaaatttgctattatgtgtaagaccttaattggctattatgtgcacgacttgaaacttcttattatgtttggcttggactctatgtatggattgaaatgggatcagatgtgagctaattatgtgtgattg

SEQ ID NO: 13453 - DNA, 653 bp, Oryza sativa
aactcgttttgagtttatctccaaaaccgagtttttgatttcccggagcgatttcttgcgggaggagtccgatctattcaacccaaggctataaataggaccccctagtcctcctctttcgtttgccccctctcccgtgatctcccgtgcctcgtagcgccgccgccacgtgctccaccccgccatcgtcgccggccgagttccatccgcgtcgcgccgccgcctccgtcgtcgccgccggtcgccgtcaccaccgttaggtgcgcgggagggtggagaagcccggccgcctgacccccgaagccgccgaccaccgcagctccggcgccaccgccgaccgaagtcgtcgccgccgctcttcctctccgccggccgtcgtccgtcgtcgtttgtcgtatcggtgagcaccattgagttcgcaatgttgtcctctacgcgtatgtgtcctccaaaagtccggccgaccaccctagctccggcgaggtcgccacccgtgccgtggctgccgtcgatgacgtcatgacgtcatcatctcctctttttcagttttttttaatagattaaatcttcggaaattcataactaaatcatcgtaactcggttttgagtggttcaagttgctaaattcatctaaaatcatgatctttgtactg

SEQ ID NO: 13454 - DNA, 6464 bp, Oryza sativa
gtattagctttgcgacccttcaaacagccgtgggctattgaattagcttggcttctcgccagagagttgccaccttgggccaagaacacgtttcttggttaaagactcggcggttgtgctctttctagatggaccaagccatcaaggtgacaattatatcaaagccattgcatagctatttgctgacccttttccggttgtggtaccactagctaacgaaggagttttgtatggtcggaagaatttcgggccatccgatggcattgagaactatccactagagttggcgagatttaggacaggacacaaggatgtggtccattgtctcctcgcattggtcgcaaaggacacatttggcagggcgtggcagccctcatttgtacaagtggtcggctgtccagcaagcgcggtgggtgatgagccaggtgaagtacctgcaatggtgtggcgcattgctcttccaaactagagattctgggaagctttcacgaccaaggaagagcagtgagtaggcagacttggtggaatattgccctgagatcttccacttccagacgaagttgtcagcttgcctaggtagtagggtggtcaaggagatacgctaccagatcctaaggtattgcagcactgcttcaactcctaaagtccccctgatgtcgctaatccatcgccgatcagtgattgcctccgccactattcgtttgcggctcacgcgcgccaagacaagggaatgcagggctagcgccaggctctttaggttagccccttcagccatcgatcctcccagaaaaggatgcaggtcattatcgtagacacgaagtcgcattcttgattagagatcggcattggtagccctttccagggcttgcttgcattggttcgcagtgcccaaagccaccgagcatgaagggccagacccattagattgaggtcatggattccaagaccatcgtagttttgggcacacatacattgctctaggcgaggcggcagtggccacccttggctttggctgttccagtccagaggaaaccccaccttatcttattgatccccttgataacccatttgggaggggacatggcgatcaagaggtggattggatggatcttaacactgaattgataagtgccaggctgccaactgcctggccggggcaagctaaccagctttctatgacgggagcctaccggcgaccgagtcaagcatcagttggagctcggccttgttcagcttgccggtggagagcagtaggcctaggtacttgcacgagaaatgcgtgattaggcaaggtagcttgttctgcatgagctccatttcgctttccccgcaccgaattggaatggccgaacacttgctatagttcgtcctcaaccccacgactgaagcaggttgaagaaggtcaaggtgctaagccttgacgaacatggaatttagcatttccattacgatgacgaacaacatcggtgataggggatccccttggcgcacgcccctgccgtgctagattgtccttcccggcgtgccgtttagtaataccttgtactactagtgctaaagaggatggatagccagacttgccaccgtttaccgaagccactatggagaagtatctcgaggatgaattgccaggagaccgagtcgaatgcttacgccaggtcgagtttgagaaggattgctggggagagaccggcatgcaacttccttgccggctggtgtacaagcacgaaattatcgtggatgcaacgatacttgatgaaggcactttggttgtcggcgaccagcaaattaagtttgggcactaattgctttgataggattatcgtgaataacatcgcaaagctgtggcaaaggcttatgggccagtagtccttcaagccacttgcgtccgcacgcttcggagcaaagttatgagggccttgtttactttgtcaaatcttgatccgtccagatgaaagagttggttgagggctacaaggatattttctttaatgaccgaccaacaagatttgtagaacaagccggtgaagccatccgtccttgacgcgcaatcattaggggtgtccttgattgcattccggactttgtcctcagtgaagcacacctcgaggttgtgcatgacaggtcggctagggctaaagaagggtaagctgagtgtgtgcttccttgaagttgaaggggtggagcctagcactccggcgtagtactcgtgtaccattcgctctttatttgcgtgcgagatggcgaccatcctattgttagccagctgctggatgaaattctttcatcgcctatagggtgcttgttggtggaagaagtgggcgtttgcatccccctctttgagccaggtgacgcgtgagcattgtcgagccatcgttctttctagggacacaagggcaagcacccacttcttcaacgcatggtggagcacacactcctgttggctaagcgggcgatgctcctcggcagcgtcaaatatgtcaattatctcccttgtcatggccagttgcagcttgacgttcccgaccttcttgttagaccaactgcgcagcgcctttgctaggcatcacatctttgcgtccaatcggtgaatggggtctttgaatgggcaagggaagtaccaggaatcctggactgttacgaggaacccatcccgcttcacccagaagctctcaaagagagcgagcagagcgtcaagaagaagacgaggtgtttaggaggagtaggtagtggtcagacatgtccatcgagagaaccttgaggaatcaagaaggcagggttgtccagttgtcggtcacgaagatgcgatctatacgctctagggtcgttctgtcccagccgttgaaccaagtgaaggccttgcatttgaggtgcacctcttgaactgaaggtcacaaatgacccggcgaaagcgcctcatcatgcgacggtgcatgtttccgttgttcttgtcttggtcctagtagatgagattgaaatcccctaccaccaaccaagttcggagaaggaagtctggatttctcggagttcttgaagaaaacgaactttgtcggagtcgccctgcggcccatagacagaagtgaaccaattgatcgttccgtctatgaactctagccgcattgtgattgataactcgttagtgcggtggctgaaacaactagccacactcggatcctaggcaaggaggatccactccccctccccgcatttgagtagccgcgagatagatgaaactagatagattagggcctaaaatttgagaggccgacataagggagattacattcagtcttgtttcttggagaccgaccaccaagcgcactacgtcccggcgtgctcctgcgttcaaccctctcacattccagactagtatgttgtagtttgggctagtcattgggaataggacaggggggttcgaccggggctagcgcattaagcctccaccgcgatcggcgacccctgcactggtggcgcctggatgaggtccatgccgaataggtccgccaacgcttgaatgtgttcagtggttagaggctcggagaagaattctttgtacgccttggcgtcttgctcggagggcttggagtcggggatgactttttttttctcgaacacgagtcagggatgactgggacttccgttcctaacttcttggcgaggactgattgcgccttggtcaacgtttctcatttccactcctctcaaacattctcttagggcttgttcgtttaatcatcaatagagaaggattggtggggattgaaggggagtaattccacaccacaataaatatggaataaatcacctttaaatcctcttcaatccctctatgagagggattgccttaaacttacaaggtcaactttaggataagtggttgtttagacgatgcacacatggcctattttttgtgccaaaacttgccacaaacaacttaggtatggtttggtaagaattagtctatgacatagtaccataagtgtatcatgtcaacactcaacagttatgatagtgaataagacactcatcacctactactataatttaagaaaatcgttaaacgagtaatcgttatttcctcatattttctctttccgccttccagttcctggatccaggtgaccaggtcggacagctgcggtcaacgcaaacaacgagtaaacgcaaggctgcaagcagaaagggtcaacgcgaacaacgagtaaacgcaaggctgcaagaagaaaggcgcaaggtacgagccgtgccgcgagcagcggtgcgcgctagacggagcagtgcagccacggtagacgtgcaggcggcatcgacaaagggcggtcatcggtgctgatcaaggagtagcagcaggacctccaggtagccgcgaccgtcgaaagcatcagcagatcccaaaatcagtatgtgcccttcaatctatcctcagctcagctttctcgatgtggattcgtcctccaaattcttctcttgcccttagcaaaattgtccattttatgtgtaatgaatctgtgctaagatctatggattcattctccaattctctgtgctatttcattctttgtccatgtcttcacggtgaataatcggtgaaaagggggctcgagtatgtcacagcgaatctcgggaacttcgtcccgaaacgaggcttgacaatgtaccgatcgcaggcggatcttgtctggtataaggcggacgagcgcctctattgctccctcactgcgccgccgccgtcgtcgtgtgaggaggatggatgagcgctggcgttttcccgccgagtgggatggacgagcgccgagccgcttgcgggcctccctcgctcgctttgggctggtggtggtctggctttgggctttaccgctttagttattgggcccagaaaatattactcgctagttagaaagctactactaatagtttggcacgttattttaagaacctgaatcgagaaaatagagaagtgaagacctcctatgcatctgcatcgcaattgatccacgatcgatcatcgttccggatcatcgtcccgaaattattttaaaatttgttgttgtcctatgtcgctaactagtgttttaaagagccatcttttggaagatggagcctcagaccgaggttgtgctgtaggttctcagtgatgggccagggctatagttaggaggggtgaaattggaacacataccaagatggatacggatacaagcaatacggagtatgggttacggatatttattggaattcaagtcaaagcaacaaccgtacatatcaaatttataatagacattaaaccactctatgtattcaaaattgaaaaggcaactagattaatgcatattaaaaattaatagtagcaactctagcatgactgatttactgcatttacatcattagtagttttaccactagtattttaatcttgcagggagttttgcactagtagtatagtttactctcatcaaactagccgtacctatgagtttacaagtatagtcaacccaaaatgtgcatccatgcatactattcacggcttcacgaattatgcaaatacgtgactgcgtgtgcgttaataccaaggtacccaatagagtttgcaggcgagcacacgtctctcgtttgtttgctcatgtttctttgggttgtgtgcaatatttaatctgtaacttttgttttctttttttttatcaagagcctgacggctcccatttcttttactagaaatgaaacatcgagctacaatagtcttcagaaaaaaaaacaggaaagttcaaaagctagccctattacaagggttcctgactcttttcagaagttttgcctaaacagatatctaacagtaaaaaagaaggaaagggaattacaaaacatcatcacttatatctatctcatcccttgatccttttggtgttgattctccatccgaactgcgagttgtagacttcatttgccgactgtcttatgagtctggatcccagtagcagtcttcttcgacttgcctcctccttctgcagtagtgcccaggaatcaacccaatggcaagccaaaaagatcacatcagtggggtcttttggataaactttttcaaaacaagctttatttctagatttccagatggcccaaattatagcagccattcctaccataactaagtctttcatgttcttatcaagttttttcaaccaatctccaaacatgttttgactatcaagggctgggttcagattcaggacacaaattgcagtgttccacattaatcttgccaggggacagtcaaaaaacaagtgttgcatagtctcctctctatcacagaactgacattttttatccccttttctccaacctctcttgtataaattgtcttttgttaagatcttatttttggtgaagagccaaaaaaaaccttaatcttcaaaggagttctgaacttccaaatttttttctgtgggaaatgcacttgttgtagcttcaaa

SEQ ID NO: 13455 - DNA, 5472 bp, Oryza sativa
tttcagtttgccacagtttatatgttttgtcaaagtgatattgtaaaggttggggaattgttcatttaaaggtttgccccctatccagctgtcctcccagaaaagtgtcttttcaccattgcctatcaccctggagcagaatttcagaaagatgtttttgatctccatgagcccatgccagaaatgggactctccatttttaaatttcaataaagatatgggtttgcaacccatgtatttacttgtcaaaaagctttgccaccaaccttcctcattttccaatctccagatccatttccctaacaacgctttgttcattgtttccaaatccaggatccccaggcccccttgatctttgggtgaacataccaccggccattgtaccagatgatattttcttatcccttgatcttcttgccacaaaaatctcctcctgtaaaaatccaatctctctctaactccttgtggcagtctgtagaaggatatcatgtaaaggggcacattgctaaggcttgaattgaataaaatcaatcttcctccaatagattgaagtttgccactttgccttgccagcatcccaatttgtgttccatttttgttctcagcgtttttccaattcatgtaacttttgttttcatgcttatgtatcattagcttatacatttttaatgtcatattattgtatggactgttttatgaataagtttattatatatatgtttaattgtagaagacaataaaaaataattttcattaccacatatatgtttctctttaacaggatatggcctttgctgaatcaatatggacctttatgccaggaaagaagggatcagttgttcaggggccaaacactagaactctaacaaatgctcatgatggtatcttggatgatattaattgtgctcagattgctgggaagcatgtgggagatcattccaattgtgctaatgtcatcaaggtagatatatgctataactttctattaattctttgtatcttttcaattttgatacatgttaactagtgccttttccataatgtctgttccacatgtattttcacgctttgatatgaatatttgagtacatagatttgaattatattataccatcttttcctccttagaaaacatagcatgttatggttaaaagtattgatgaaacttcctagctttccatttgaaccatgacaaactccccattccagagatgcgctttcaatgatttcagatggtcatgtatgttgttggattgcagtttattctttgtattgcagcatttcaaaaccgaattacatctgtgttcgctgcacgcagttgggaacctatctccagcgcacggaaaacggaacagtccattagcacgcggttaattaagtatttgctattttttttaaaaaatggatcaatatgattttttaagtaactttcgtatagaaatttttttgcaaaaaacacaccatttaatagtttaaaaagcgtgcgcgcggaacacaagggagatgagttaggaacccttcctaccgaactaagcacttctcaattttttgtatgaaattattttgatattccatacattgttgtatgtttcatgcatgcaggagaatccttgtttatcgtcttcaaaacattatgttggattctgttcagcggataggtccgctgggccatcatgtttcatttactctttcaggcctgacaatgaaaggctggagtcatatcattgctaggaaagctagttcaatatcctgagagacctggtgaaccattctgtcgatactacatgaagtttggggaatgtaaacatatgactttctgtaaatacaatcacccaaaagataggttcagttgcaagaccacaaacactatcagatcagaatccttatgcctgcatgaccaggtttgtgtggggtgagtttttcattatttattaggaacaacttcactgtgaaagagcatatagcttagtggctgcagtgacttaagtagcactccaaggtcttgagtttaaatctccacaggagcgagattaagttccctgtttgatggtatagaagcccttctctaaaaaaaatttagaagccggctaagtttctaaaaaaggcggcatatatccgttaaaaaggcatttaaatccagttggatgtagttccctgtttctgtttgatatgctaagttcctaattttaaaaaggcattcaagttcctaaaaaaggctgcatatatccatttaaaaggtattcaaatccaattctgtttgatatgctaagttcctaattttaaaaaggcatctagaagctgggtaaaaaatacccttctctagaaaaaatggttcttcttactgacaggttagaaaatacacttctctaaaaaaaattggttattcttactgaccgaaaatacccttctcagaaaaaaaaaggtttttcttactgaccgtgcaaaatccgattatagctgatattatgatgactcatgtgttataccttatgcagcagacaacaattttggaaaatcaatttgggttaccttcacttgttgataaggccacagctaacacaacaaatcttgtggcatctgcgtcatcttccatgacacccgatgaaataggagaggggaaaaacaatccagatgaggtaatgccattggcatccatcgcttgtttattttagaaatcctatgtaatgtgagtgctttgtgttatctgctgcttgcatagcttgattgtagttttgtgaatttcacaggtgtttgtatgtatatgtggagagaagcttttattccatacaaacttcaatacaacggcagtaaaagaacttgtcgtatttgctctccagaggaggaacatcaagtattgtgatatttatgtaacatggtgcggaaaagttctgaaaggagatgagatcttgagctccatacctatccacacgaatacgcatattcatgtgacacccagactgaggggtggagagtacgtaccgcgtaacttatctatgtatatgtattttatcacttcctactttagaggtgtaacaagtgttcatttgcaggttaattccaatggaatatgagcgtatggatgaacttattgaccgtgcggtccgtgacaataataatgaccttttctattatgtgaaccttcccccagaattgataaacccttataaggatacatgggtaacttttctaagtgatttctcgagatatatcatacaccaactattggtatgtgtttcccgtgatggtcaccagcggaacattacttggtatggtacttttgatctccgggacatactgattcaagcgggcatgttaggatcagcccccatatcgtcgaaaatacatacacccctattggtggtagacttgattatcttaagctagtttcaattctaaaggataaattcgtcgataatttacaaggttcttcctccccttgccatctgaacaatttactttctgtattgtgcactacttcccatgaaacttatggaagatccgatctattcattacattttttataaaccatccgtgcttgttatcatgtggagaaagagttgcacgataccttcaatatgatcatatgattacaaatcttgtgcaacgcgatcttcgcaaatttaagcaatatttgaatgatacttttggagatcctccttcttggatcgctgatatcagctgggttcctgacatgtggaagacatacaattatagtcctaataacaactcaacgttatggaccccacgatatactttggatctaaacagttgctcacattttgccaggaatttcttgaaccatttcggtcgtgaggttagtctttttttaattattattttaacttttctatatgaaccggtttaggcttttgtttgagcttagacttttaagcaactttttggctcatgtgatttatacaccaatattataggctcttatatctgccagttgtaaaaccaacactgatgaccatcattaattggtgctgctttgtaggtgacggctgccaatctagcacttatgctaggttagcagccaacacttagggtttatttactagtgcttttaagggtcctatcttcacttcacataaactaaaaattactataacttagcttttagcttaacaatataagagtagcttatggtttattggttttaaaaaagccaaatgaaaaaaaaaactaaaaaactgtttgtttgccttagattttttagattataagcaggcgtaagcctataaataaaaaaaacttatgacatatacaatgataattaataacgattcctagtcttgctaattaggaatatttgatgatatggaaggaagagaagtgaggagaggccaacgtcgttgctacagttaataattgcttaggaacgacttttaacctctatagaatgaaaactttactgcatgtgggtgtgaacaaggaatgaatagtaataaaaaaagttttattaatactttagagcctttgtagtctccaccattataaagacatagtttttaaataaatatgcattatctaagagtttatatggactctacctttaaacatacccatactgttctattcttgcataggtttctttgcaggcagctgaggctgccgtttctcagaatctagagtttctgcttccaaccatcatgatgctaatgcctgtgtacagtggacctcatcattggaacaatgacttcatggagatgtaagggaaagtgatcatctatttttccttgtttatatattatcttgattcttgagtactagacaatttcttgttgtagattgttaaacacaaactccgacagaagtaacgggcaaatctcctaatatcaagggataagaggccacgacaaattgtttatcagagcgagtacaataacaggctacaaattagctatatgcacatgtggagaagataagataagagagagaataaaagcggtctatagatttggagccaactgtaacatagactccaaagcgttatgtgtgtatgagaggtgggaccatattttaattgtgtagtatatatttatatataactattgtttagatgagttattaaatgggctatatatgatttgggtaatagttggccatactattaaacttgctctcaggtgcaacgagacacatgctttagtaattaatcgtttaattgcaagtacagtgatgtgagttaagcagggatgcagtcagcatcaatatgggttcattgggcattttttttctgtattgataatgcatagtgcccatattaccaaatttattacgctttgatacttgtggtgttaacagcacgtaccattttgctgctatcttgctttctgaggtggaagaggacggtaggtacaacagcattaaagagaaggccacatcatatggatctggaataaaaactttccggacaatttgtgcaagctttattgtattttaaccccccccctccgttttgtaaaaaa

SEQ ID NO: 13456 - DNA, 605 bp, Oryza sativa
ttctttggatagccaaataggacgtaatgttgaggcttatgtcgatgacttggttgtaaagacgcgcaaccaagagaccttactctcggatctagcggaaacttttgagagtctccgctccgcccgcataaaactgaaccccgataagtgcgtgttcggtgtacctgcgggcaagcttctcgggtttttggtctctgctcgaggcatcgaggccaaccccgagaagatacgagctatagagcggatgcgccccccagcaagcttagggatgtgcaatgcgtcaccggttgcatggccgccctaagtcggttcatatcgaggctgggagagaaggcgctacccttatttaagctcctcaaacgctccgggccgtttacttggacggaggaagctgaacgtgccctcactcagttgaaggcgtatctcagttctcccccagttctggtcgccccggagccaaatgaacccttgctactctacttagcggcgaccccgcaagtggttagtgcggcgttggttgtggagcgcgatgaggacaattctcattccgcgcacccccaccctgtgctggcttggccccggagagagcaggaggagaggccccc

SEQ ID NO: 13457 - DNA, 530 bp, Oryza sativa
atgaagaaggtttatcggatcaaaatggatttagaagagtagctttacctgttattatctctggtcggggacgagaagatccttgaaccttaacaggagacttggatcccgggtcagcgttggcatccttcttaggagggctatcggcttgggcctctgctttcgggatatcttcgctctgagttgtgcccgactggcttccagttgggggctcctgttcagcactgacgttagcttcggccgactagtttccagtcgggggctcattgctagcttgtgcattatcaaatgctggttgatctttactcgggtgatcttcagtagtcggcccggtttcaactgaggggccagtctctgtgccgatcggcgtggggtcttttccagaaggatctatatcagatggctttctgcaaattccatacacgttgtcagctctgctacaatgatgagcgacttatgatacagaggcattttggtagatgatacacacctggatgactttcttatttttggcatgggacgaccggatg

SEQ ID NO: 13458 - DNA, 1997 bp, Oryza sativa
ccaactgtataaaaaataaactcaaacggacaaaatatgttacatatagaattttccaaaactctaccgaaacggacaaaatatgtcatctattaaaataggcgtaactttctcatacggactcggaatcagacaaataatatatgcatggacatctacagaaaaagttacatccgattctcccaagcttcgccaggttcggcgatattaaaacctccaaattccgcttgtaagattgtgttttcgaggagagaagtttttcggtagagctttggaaaattgcacatgccacatatttcgtccgtttgagtttattttttacatgattggttcatgtgagttcctaagtgtgaaaaaaatatcaaaaaaataaaataaaaataaaaaagttgcacatctctttcctctgcactagttcagagagagaggagaggagaggaaaaattctacatgtcacatattacgtccatttgagttcaattttttttatgtttggttcttgtgtgtctctaagcgtgaaaaaaatatcaaacaaataaaacaaaaataaaaaatttaggggggtgggcgtcagccactctggcgcactccccctagccacctcagcatcgccccgcaacgtcggcaggggggcgccccaaaaaggaccatttttaggataagtttttctagggatctatttacgaaataagtttttcaaaaggaccaaaatgctgatccttgcactgattattctgcaataatccgtccactacaacacacatgaccttttgcgaagaatttttcctgacatcgaagctatttataattatgtcattcagttttatttcgctctctatgggatagtgtaacttagcgacaaaaataaggggttcatcaatgagacgaactacaaatcgtcgtaacctagtctagtggcaatattattgtgacgagtgttattttgtcgtaagaggccaaccaacaaacgtcacaagctcatgacaacgttgatttatcataagtttttttttctaaatattttttttaaaaaataaaagtatagagcaggtcccctttagatttcacacgtgaatacgtgataggaaaaagtccactttgactcccttaattgtatgccgaatttaattcgtacctctcaaccagaaaaccggatagaacgactccccgaactattgaaccggtgcaatttgactccctcagcggtattggagggcggttttgctgacgtggcgctaacgtggcggtgttgacccggtcttcgtcccacatggcgcttaagtggcattagaattaaaaaaaattatgggacccatctgtcattcacacaaaaaatatattgtaggacccactgacatatggggcccaaatgtcatcctctctctccaatccttcttcctcctcccttcctctctctctctcccctttctctcccccttccccatctgcggccgaggacgctggagacgagagcggcggcggcgggcgagcgagggcgtagacgatgaggaaggcgaagaggaggttggcggctacgcccgcggagacgacgaggaggcggtcggggacggggcagttgcagaggaggtccgggtcgtcgggcgcgaagccggagtctgggtcgtcatcggggaggtggcggcaaggaagtggcccgactcgtgacgaggacgatggtggcgaggacggaggcggcggtggcaacggactggacgctggcgaggaggtcggacggggcggcggagatggagatgggcctggaggaggaggaggaggggtggaaggggaggtgttgcccgcgtcgctcgccgccgtctccgcttccccaacatgtcgtccccaccgctgcagaggccgacagatacggccgcgccctcgcccgcaccggccaccgccacctccccccagccgctccctcgtgccttcctcgttgccgcggcctcctcgccccaccgcgaccccgtatccccgacatgtcgtccccaccgctgatgcgg

SEQ ID NO: 13459 - DNA, 14162 bp, Oryza sativa
cggagtatattgtggataccagcaaaccaaagcaccacagattcctcttcctatccatcaattaggcatgggagccatactggattcatctgcctctccgatgacaacgccaagttttatagtttgttcctcattgtgagtagcaactgcagcccatagtggtccattgtgatgtggacgagggttaccgatcttccgaaaggttctaataggcagtcaatttgagcggagtcgcgacacagcccgatccggcttctgaacgaacacgctcttgagccccgcaatcgtagcaccacgtctcctctggttatcacccgtatcgaaacgcggaagacctcgccgaaaaggctaatccctgtttgcgaatcgaagaacacaaacaagaacaaggaagaatacaactaaaattgtagatgaatgattaagctcacaagttggtgtcttacaaaccgatctagtggcgaaagtgttcttaacagaataatctaagaaaaacctaaaccctaaaggtgacggctggtactgatatatagagtttacggtcgtgcaaacaacccttgatgcaaccctaatgggttccaatacgatacacggcccaaatgcccaaatacggtgacgcagcaccgggacagattcttgacgtcaaattgttcggtcgattcctgttgacttggaaagaatttggacgtgggactagaaccattggaaatattatcttcttagctttccagccatataaagaacgccataatccgagcatgtatgcgatctgggtgcccgttttagtgcagagggtcctggactccgaatcgtactcgaagtcgacttggtttgggcctccatcttgacttggacgtccttgatgatcctccgcgcctctaagtccctctctaagggtgtgttcgctggttcatgttcccatccggaacaatagacacggaaaacagagcggtccattagcgcgtgattaattaaatattagctattttttttaaaaatggattaatttgatttttttaaagcaactttcgtatagaaactttttgtaaaaaacgcaccgtttaacagtttgaaaagcgtgcgcgcgaaaaacgagggagatgggttgagaaaaaggggttgcaaacacaccctaagtgtctctttgtcctctccatgattcctataattattaggtagcaatatattctcaaaatcatacaaagaagaataggaacgagcttacctctaaattcaattgtctcgcgcgagctcttgttattggtccttgaatgaccggtggaggattgttgtgtgtatccgaaggagtgatgtccttatcatcctccctctcttgaattagagtcgtcctcgactcaagtacatcttcttctctcaagtatggttttaaatctaaatgttaaaagtgggactaaccccaaactcaggaagcaattcaagtttatatgcattatcattaacctcctcaataattttgaaaggaccatcagctctaggcattaacttagacattctaaaatctgaaaattgatcctttcgcaagtgtaaccaaactaaatcacccggttcaaacttcacttcttgcttacctttactaccagcaattaattctatactttttagtcatcttttcaatgatctcatgtattttcaaaataaattcagcatgtgccttagtttcagtgtgaaccctctcactagtaggtaaagactaaactgctccatggcctgtccctaatcctgttacgttcaacgcatcaaaaacatcaattttgatttgatgccacctctcgatcagttctgtttcttgttttggtatttaaagaaaaacaccgcctgatcttaccaagcctcctccctctacttatggatggaagtgtgcaatctggttacccaagtaaaaaccagcttagtagtttagacgtgttagtataaagcccaatgtgaaatttgtataattgacatcccactgtgcctgatgtgcctatttgtatcattgcttcctttggaatcctctaataatccattatgtttttttatggtaaagagtggacgatatggtcttatattgtggacacgtaaaatattatgagaaattatacagtatttgagaaagtatctcaaggtatctaaattttatattaaattttttggtacttcattcgaggatatcaaaattaatttatatatattagaaactatggtatctcctggtatcttttgaaatatgttaaaattaccaaaatagtatactgtgcatacacatataagaataaataaaacaatcaaacagaactagtcagaagaaagggatctacgtgtaaattgattttgaggcaaaatatttatccttggctatttgaacgagcaccacgaatcgaatccatgtctgaaaatgctcttcgaattgtccgatgatggtgtagagttttctaaaaccaagttcttataaacttttacctgcttcatcctaaaaagcatagattatgtttcctggtatcagttaggcatgggatgcatacaggattcatccaaaaaggaattgatggttcgcagtgttttgtagtttgcacttccttgtcagctggagctagcagtgatgcccagcaatttgcgatacatatgtttcgctttgatattatgcgaagagctagctatcgcttataggttcgagtttttgtcacaaactgatcaaagaccgcaaaacagctaacatgtatattttagctttcagatctgttatatctgaaaaggaataactctccccccgcgtcgccgccgcgcctccgtcgccgctccccctcccccctccccctacctcgccgccgccggagctctcctttgccggctggcgagctaggatggcggcggcggggccttcttcgcggcggcgtcccttctaaggcgcggtggaggagacgttcgccggcgtcggggagtggtggcggcgaggcctctgggctaggcagtggcagatccggcgccgccgtcgccggatctggccagcctctccggttttcggccggagtactggcggcggcgccgtggggcggcgtgtgcggaggcggcaaggttggcggcggccggtgcgcgcgtggcggcgcgaggcggcgaagtccagcgcgcgcgtgggtggtccggtgcgcgcgtggtggcgcggaggacggcgcttgcgaggcggcatggcgacatctgctggctcccgatcggcgaggcgcgtcgctgggggcgtcggctacactggctcgccagccgccccccatcgccacacctacccctccggtgtcgacagtagccacaaccaccctcccctctcttggcttcttcctctttgcaagcagaagggggtgtccgccacccttgtctcccttcttctcgcttcctccctggcagctctgctgcctagttgtttagttgctttgcttcttacaccagtgctcctctctctgtgctagtggtgaagttggaggtggtttgtcgcagctgtaaggggtgtcctgcgaaggccggggtcctcgccggaaacatggatgacaccgatgccttcgatgccttctctcctccttgatgctcctccctttttttggccgtctgcttccagtctcggccgtggagtctttcggtggttgaggagaagtgttcgtctatgaaggtggttcagtctgtctgtagtcagggctcttgggcctcgcaagtgcttctagtgtcctgcgactaagtgaacctatcgtagtgccgagttggagcggtgtgcttatcttcagtgccagagttttgtgtttggcggagtcggagctgctgcatcgggcttagccgatgagctgggcaacgataacacaacacttttgctctggcccattgtagatcctcctttggagggagtctcgggtgaaagccctgtcttgtcttccagaatcggcaacatcgacgcttgtgggtgtcgtatccttcttggaggtgctgctttgtggactctctccccctttgggtgaaaactcagtccaatttttgggcaggcgtcggcagcggcttctgtcgttgttcccctccttggaggcttcgccttgaaggtcttgctcttccctcggtcacttttgtggttcggtcgtttgtcccaggcttttttctctgtcttctgtgtaaggtttcgtcagtttccctttagcaaactatgcagttgtaaggtttttgagcccggtttttcttattaacaaggtcaactctcttcttataatattccggtagatctcctaccgtcggtttcttcaaaaaaaaaatattttacctttcagtttataattaatgcattgtacatttcctctcaatactttggagttcctttagtaaaactggataaaaagtttgtttcattgacacatgtatacgaaataattaatttaacccctcctcccaaaaacaaacaaaaaaaaaccagatgattccttcactacatatataggctttgtttattccaaatccacaaaatcccaatccctaaaagtcactctcacagtcacacttgacaaattagacaacatccttcgaggtgttagtacgcacgcgtaacacacatacaaaccctcatctaactagcgaccgtctcaaaaaaaaagaagggaaataccatgtgtcaattttaggtttaggaggcattgggaattgatttcatccggtttctggtgatagaactagcgctgtggagattatgggtaccccatacccacacgacatggttatccgactggttataggggataacttatatctatgaaatatataacggatcatgacttgggtattacgtttccctgtatattatggaacggcctaaagtcctggtttgataagattgtaaagtagatttaggaaaccgataccgtattggttaagatttctatcttgtaatcctgccccccatcctatataaggtgggcaggaggccctctagggggcatgagacaactagatcgtcagatctataatacacatggtggattcaaatccccaaacaggagtagggtattacctctcatcgagggggcctgaacctatctaaatccttgtctccgcatccatccacttttaggtctcgtgcgctacccttttattattgctgaattcatgtttcgacagttggcgcgccaggtaggggtgcgtcaagttttccgtcaagaagtgtgatggaatcaagatcaggagtggccggattttccttcaccccgaaggctggctttcggttttgacggattcgtcttctttgatggtgactccaacaatctctccctcttcgacttgggttttaaccagtcgagagaacggcgatcaaagatttacgtcatcaagttggaggcttcaatcgtcggggtcaccgatatctcctgtgcatctccacaaagatctctgcttcaggagctacactttgtggttacaagaataaccaggttcgtcgttccaatctactaatcgttattagattggtctctgatataactactaattaaattaatctatgccttgcatgtactgttgctggttctgacctccgagtctttcgatcattgtcacgggagatcaagacatcagctcactgagcacacatctctatatgggtagatcgtattgatcttataccaggcgtacaatagaagtccagactcggatttagctgattggatcattctcggactcggctgactactggatgatcaggtcaaaacaaaaatacactcggcatgcaaggaaagcactgggaatgtggtcggcacgagccccaacacttaccagtaccccagctctgggaaaagcaacgaacgctatgcatttgatcaattccagagctattggttttgcatctacatcccagaagaattgccaggcatacacatcgttaattggttgtcatgagctatcctcaataagggacaccaattaatatttccatccagctcatacgcatgtgagcatatatggctaccttgccaactaatcagatcaggagtcctagcaccatactcctacgtgaggatatatgatatattggctgacatcatcaggagatattatctcggactccatcaaaacatgctccggttttcccttcaagcactcctctgacatcatgagcttgagttataaaccactaccggatcagtacaacatggcgttgagtctggaagggcctatgtcttcgttattaccgctggcttgcctccgtcgtcgccgactagtgttctcgcctatacggttggttgatcacaccaccgttgatgggcatcttcgtcttcaccgactggtcaccttcgtcgccgccgattgatgtctttgccttcatgactggcttatttcatcgccattgacggatgacttcgttcctatatcggtcatctctccgtcaccaaggagaatattacaaagctaagtcatcattaattttcttctttatatgatatttttcttttcctctaactcactacatcaattggttcgccattgactagtgagtcgggggctagagatgctatgtcatattttttcaacaattttcataatatttatcttgattgcttgcgacataatctgagtacaaaagtgactatcgagttatggagttctatcttcctatgctttccgtttggtttgtcgatggatagttgcctttgggccgattcctagcacccgggggctcgttggatggaccgagtaacgcaagatgctaagtattatattcggaataaatcaaaagcatagagataagataaatttatttattttcttctcttaacaattgcaaaaatacccgagtagtaaattttgattcgtgaaactttgttccattaatgacgaactcatgtcactcatatgcatgtttgggaagtgcctaggccgactcccggtgcttggtggctatgactagtcaggcagagtgtttaaacgtaatgagtcatctgctcggggaaatcaaaattgacgagaggagaaatacatatttataaacacttttaatacttgaatctttctcaagtactgtatttacatcagatactactcatcctatatatttgttctgcaggatccagatccagatatgcatcaaagggattcatggctttaagcttatctcctatgttacaggaatggatcagtcagaacatcaccaccggcttgccgtcgtcgccgccgactggtgtcctcacctatacggttgggtagtcacaccgccgttgttgggcgtcgttttcttcactgaccggctgcctcgtccgccgtcgactggtgttttcgcctatatgattgggtggtcacaccgccgttgttgggcgccgttttcttcaccgactggctgcctcgtccgccgtcgactggtgttttcgcctatacggttggttggtcacaccaccgtttgttgggcgtctacgtcttcaccgaccggcttgccttcgccgccgccgactggtgtctccacctgcacgactggcctattatgccgtcgtttgttgggcgtctacgtcttcaccgaccggcttgccttcgtcgccaccgactggtgtctcagcctgcacggctgacctattatgccgccgtttgttgggcgtctacgtcttcaccgaccggcttgccttcgccgccgccgactggtgtctccacctgcacggctagcctattatgccaccgtttgttgggcgtctatgtcttcaccgaccggcttgccttcgccaccgctgactggtgtctccgcctgcacggctggtctattatgccgccatttgttgggcgtctacgtcttcaccgaccggcttgccttcgtcgccgccgactggtgtctccgcctgcatggctggcctattatgccgccgttgttgggtgtctacgtcttcaccgccggctcgccttcgccgccgccgactggtgtcttcgcctgcacggttggtttattatgccgccattgtaggacgtctacatcttctccgactggccacctcatatgacgccaactggtgctatcgtcttcacggttggccacgtcgccaccaccgcaaacaggcatcatcaccttcaacgcaagctgtctacgtctgctgccgactggtttctttacttccatggctacatgattctgccagtgttgattggccttatcgtcttcaccgccggtcatctcgtctgctactgactagtgcccttgcctctacggttgatttataccgctaccactactgatggacgtcctcatcttcattgctggtcgccttgtctaacgccgactggcttgttcgcctccacggctgcgcgtcttcatcgtcattgactggcgtcatcgtcatcgccggtttgctttcaccgccgcccattgtgacttcaccttcatggctggcctattttaccaccgttaaagaacatctccgttttcgtcattattctacttcttccgtcgccaactggttctgtcgccgccgactcgtgttcacttcatcacagctatgcaactttgtcaccatggtggagctacttcatcttcattgtcttcggcaccggcaaactctattgccgctacttcgcaagttttgctacttcactagccatgacgtctacaagagcttcgacatctcggtatgcgtcaccaaatatgatgccgtgttattttactacaacaagtggtgctccaatattcaagatttctctccggacatcctcaatacatatcttcactcaagtgatggctactcgacgacaagaagctacagttctcgactctatgttcagttgtttcccaactaatcaaagagttgggggctacacaaatacaagactctcaaaatttgacaagatgaagcaatcaatcaatcaacgagtcaactctgggagttattatcttcgtctgcgcttcagagctggcattttacttcagcgactccaattattacaccggtaggtcaagattaaatttacatgtctgggagtttggagtcatcaaacaatcaactcagatcagattcaatgagttgaacaacagcatatactttcctctaagtaaagcatctgcaacagttatagcaccaagttctactgccatctttataaatcaaggggcgttgcatcagtcttcattatgcacatgcttgcatcaaggaaactattcgagcttcgacatcttctcaacaatttgaaggattattgtcactgacatcatcaacagaacctctacttcatcggccctgacgtctccgctgttgctaaggggtgactacgtattcaccttcggttgcttctgtcatcacctactttcatcgccgacttgttatttcatcttcacggatgacctactatgcaaacgctgatgagcatcttcatcattatcatcagttgctacactgctattgactggatcaccgacatcgtcatcttcatcaatatcctgtcaagcctcttcaacatagcctattctactgctgtttgatgggcaacttcgtcatcatagtcaatcatctatgattgctacttatcatcattactgtcggttgcgtttgtcgtcgccgactattttcttcatcctcatgattggtggatttcgtcatcgcctttgatgcgtgtctacatcttcaccgtcggcttgctttcatcgccaccgaccggtatcctcgccttcatggatggcttattatgtcgccactaatgggcatcttcatcttcttaaccagctgcctcatcagttaccgactgattatttcgctgccatggctacacaactttatcgttgggcgccttcatcttcattgctggctgacctgactgctgtcgactggtttcttcgcctccacggttgtacaacttcatcacttttgattggtatcactatcttcaccaccaccaatatttttgccacctctggtgggcaatattatctctatattggtcgtcttgtctctatgccaactgcgtcagctactatcaatggaccattgtaactacgacaaaaggacaagctatatgatcaggggcttactagctcaaacacaagtattataccttcaatttggacttgttccggatacatgcaacatgaattcatgatcatgggtctattttctatgctcaaagactggactatttattattcccagtaagggttatcaaccgaatacttgcgccagtcgggattcaattattatatctattttggagtatcccataagggataatcactcagattagaagctattcatatgagctacacttggtctatatcacccggaagatttattactcgagagcatgttacatgcgtcatcctttaaagggtgtcgaaggcatattttttggcctaggcctaatatgtctgcagcccatattttcaggtgtgacctgtcacgttcttttagggacttaggcacttttttcttaggtcaaagtgcgcgtgatcaagtgcccaataccttaaaatccttttataccacagttactcaactttttaggagttggtacaatgcatcttaaaaggtgtcgaacagtaaagctttatatagctgtcccgctgacttttttatatagtcaaggtgttgtttgggtttatcaagcaattgattggatacaatatcattgctttttgtcacgtaagtgtgcatttttatttaccaatattatggcttaggctgattatatattttggtcattttccaggcggttggtaaatcctttatgagtttatttactcggatgttacactacatatgccatatatttccatgtgtggtgaaaccatgtgtcttttagggacttaagcacatctgttaaagcagtgtgcgcatggtgtgtgcccaatactttggaaatttctttattcacaacatacaagcttctttataactattttgctatgtgaattttcaatgatgtagtcaactttaggttgcacgcatcatattctacaaagcagtcggtatatcacttggatcatgttatttagggattcacaccgtatatgctatcaagtcacttagttgactataattatcaagaatcactcagttggttggattatttactctttgactatatgttcagtttgctcaactaaccacatagtcgggggctacacctattaggtgcatctagtcgatgcacctaaaatttcatttaattatttttcagccctccacagtcttctgatttggtaaaagtactcgggagaccatggcgaagatgattgaagcacttatctttggagtaatctagttcgagaaaagattatcttttcgactgtgaaggtctcaggggctactgtgaagattgtgggtaccccatacccatacggcatagttatccgactggttataggggataacttatatctatgaaatatgtaacggatcatgacttgggtattatgtttccctctatattatggaacggcctaaagtcctggtttgataagattgtaaagtagatttaggaaaccgataccgtattggttaaggtttctatcttgtaatcatggcccccatcctatataaggtgggcaggaggccctctagggggcatgagacaactagatcgtcagatctataatatacatggcggattcaaatccccaaacagaagtagggtattacctctcaacgagggggcctgaacctgtctaaatccttgtctctgcatccatccacttttaggtctcgtgcgctacccccttttattattgccgaattcatgtttcgacaagcgctgttgacaacatttaacacgcatgatcaggcaggactacagcttctccattgcttgtccctaatcacttcacagtggcacgagaaggaaaggtgaaaccaacatctgtggcttggtaagggatgaaaacggtcagaaacggtcggaaaaaccctataccatttccattttcattttattttctcgaaaatggaatcggaacggtctactcggaaacagtaacgatatcagtaatgtcggtatatctgaaacggaatcgtcggaacgggaatctaccgatatcggtcggaagtcaaaaattcatgtcggaaacaacgaactgtggtatcatcccacatttaactatgtatgaagatgaccttataatttcacccttgcatcatcacgctgccacacaacaccgttatacgatgattaataagttgacaataaggtcgacaaacaatataaaaagttcaacgatatttcaacatcaatatggctaaagcatacaatgtggtaactaccattgtaattaagttttttgttgacactatataactaccattgtaattaagcttcatgctaaactagactttttggtagtttccaggtaagggggtcacggagaagagtcaagatagtggggcccgccggtgggtcccactgtctttgtttttctctctttcttttcttttctctctctcttatccttctcttctctcggttccttctcctgctctctcaatttcttctctgttttctcacccgttctcttctctgccttcggctccttcacgcgcgcccgagaggagagaggcgccggagatggcggcctggcgcagcgcggcggtgggggaaggagagagaggagaaaggggcggtgccggtggggaagaggaggccggggcggtgcggcggtgctcggcacgacgtcgctcggcgcttggcgcggtggcgcttggctcggcggcacagaggccggcagtggaggatgggggaggaaaagagggccggcagcgacggaggccatcggggcgaaggaggctgcgacccgcgtcagcgatgtcgactgctttagtctcttaatgcctaatgggctgctcctgctcctgctagccaggcccagtcggctttcttcttcggaattttgttggaaatttgacggaaattaccgataaaaaacggttaccgacaaaacggtcggaaaaaaccccatatcatttccgctaccatttccgaaaagcgattaccgtttccatttccgataccgactgaaacggtcggcgcaaaccggaaacggtagccggaattctcggaaatttccgtaccgttttcacccttactggcaacgctttttttttaaaggcaacaagacgaaacaggagctgatggcgacgtcgaaggcggagagcatcgagtactagagtattggaggggtaccaggaacccggtcaagaaattttttttaagctatatctcacttattttcattatgtgtgtatcccactcaatacaaatttagacacccgcatcaggttaaacttaatctaaagagagtaaattaagcaagtgtcacccttctctattttattttagctctgcccccgtctgattgtacgcattgacgacgtacactgtcctgtagtatcatatggcatgacaggacctacaagattataaattaagtagataaattatgcataatatcacggtgacggtgggaagacaatccataaaaatattcctgtaaaaacgatcagaaaaatgtacattttcgaatttttacatttcagtttataattaatatgttgcacatttactttcaatactttggaattcctttgttgcctagaacctcaatcgaacaccttgcgggtgaatgtagttgtcctgcaatggcaaagaacaaagggaaataaaatgtggaatgacactcaatctggaaattggggctaacctggtgtgtttcttattgcttagataacaggatacaaaagtttagaagaaaacttcttctatttatatacaagtatactatgcgatccgggttctcgggactcccgttcacttgctctatggcgattgcagctggatttttcacattttggtccttttaaaaaaattatttcacaaatagacctctaaaaaaacttataccagaaatggtcctttttgggcgccagaatggctggcgccgtcatccaacgggacggcggctggcgccgtcctcctgccaccgtggcgcacgtgaaccgacgtggcaggaggagggcgccggccatgctggcgcggccggctgcattccgtgttctctggggagcactggcaaacagataatttttattttattttttcggatgttttttcacactcaggatcacaatacaaccaaccacaaaaaaaatttaaactagaactaccacttagctaagtctgaaaatatctagcataccacttagtct

SEQ ID NO: 13460 - DNA, 551 bp, Oryza sativa
gtgcccgtgcgttacaacggagaaaataattcacacctaactacgactcaatatataaatgatgcaaaattgtgaaaaatgcaaaagagaaaggaacagcttacgcctaaatctcttattctaacatgaacatagaagagagagagaaccatgcatgatactagctgtttctgaattttatcagagtccacgaattccgtagcaatttggctgtcgatcaatgcagccttgtccgatcacttcttggccgtctcctcggctgccgccttgttcgcctgcgcatccgccgccgccgcggcggtcaccggcggaccagccgcgggctccttctcgcctccggccgcctttttctcaatctctccagctgccttttctgcctcgccgtccttgttggcgtccgtgtcgccgccggtgtccttcgctggctgcgggggaggaggcgccatgtgcggcggcggggtctgcttgagcttcatgaggacctggcgcatccgggagaggtcggtgggcttgccgggcttggtgccctggacgaccaccacgccgggctg

SEQ ID NO: 13461 - DNA, 987 bp, Oryza sativa
ccaaaacaacaatggacccacatgtcagcctctactccgcttcttcctctctcccccttctttcttctctttccttcttttcccctttccttccttctcgtcgatcacgctgatgccgatagctcagcgcacggcgggaggcgggaggcggcgtggggaggcggaaggcggtccaccaacgccgacgctcgccgaggtgctctcgctctccccgccaataactctccgcaaccgagcgccatcgagctgccgtatctacggtgacggacgaggtgggaggtggcaagcgacggcgacaacggcttgggggggggggaggggggcggcggtggagctcagggaggggatggcgatggcgacaacggcttgggggggcggcggtggagctcgaggaggggatggtgacggcgacaacggctttgggggggggggcgcggcatcggaggtcgggcgaggatggcgacggcaactgagcagaggctagcgacggcggcggcggctctcgacgaccgaggcgcagaggcggaggtcgtgcggtcggctgaattcggcgggggcggaaaggctcggcgaagctggtagcggtgaggagtacaccagccgccacgccgaccggtcgttgctgcgggccaccgtttggcaaggcgttttggttggccaactctagccagccagtgagcaagtttgaccaacgggatggcttggccatccggttggtcagtctgttggacctcctttttgtgcttgaatgacgaaaatttggcttggagaggttgatagagaggctgcattcagaagcctctgttcctatcccaggctgtgcgcacggaaaacgaagccggccattaacgtgtgattaattaaatattttctttttttttaaaaaaaaggacaaatataattttttaagcaacattcgtataaaaactttttttaaaaatgtacaatttagcagttttaaaagcgtgcgtgtggaaaaggagagga

SEQ ID NO: 13462 - DNA, 2493 bp, Oryza sativa
gcatgcaagcttgcccaatgaagccggatcgataaccttttggtttatcgcattgaagaactggcacaacttgatgattgggtcttggaccttttctagaaggataccctaattgcgaccggtagcagttgcgtcataagaacatggcagtcatgtgacttcattccaaccaacctcttatctttcatgctaaccagtctcttaatgttcgcacagtaaccggatgggactttgacaccccacatgcattccaacatactcgttttttctgcagcactaagagtgtagcatgccggagataggtaatagcggtcatttcctctgtcctgaggatgcagctctttcctgatgcccatgtctttgagatctttccgtgcttgcgaagtgtctttcatcttgccaggtgtgttcaacaataccccgagcacgccttggcacacgttcttctccacgtgcatcacgtgcatcacatcgatcgcatgacgaatatccaggtcttcccaatatggcaagtcccaaaagacagacttctttttgaatagaggggtctcaccgctcgatgtggatgcacatgtgcttccgctcccttgcataccgggcattactccaaatctgcaaattcaccacgatacagaatgcaatcatttagacaagcgtgaattttctgtatgtcaagactaaggggacatgtaacttttttgggttggtacgtcgattctggcaagacattgtctgtaggaagaatttctttcaagagctctagcaactcatgaagctcttatcagaccatccgttgctcgccttcaagtgaagcagcgataggaccacttggagcttgctgtgctctgccttacatccattgtaaattggagttttggagtccttcaccatggttgtgaacttgtgatattccctatcatcagtgtcaaatctctccccgtcgcgcaacatctgatctagattaggttcaccgtgatcgacacatgtttggtcctcctcctcctcgtagcctacatccgcatcatgcccatgacagttgccagcacttccctcaccttgattctcctcgctaaggaaattgtccataaaaccccttgtaaggatatgtgaatggacccgctgagctggaagttgtctgtctttcttacaatcatggcatggacaccaaatatattctggtgcatcgactaagtttgtgctggtggacgtggcaacgagagccgttactcccctgaaatactccacagagtcacgatccgctatagttatccattctagatccattatatccagtgggtacctgcggttattatcatttattacaaaccatgaaggaaaaaaacaatgaagatttcatcatttacaagcacattagaataaaaacaactaggaatgaccattttaccctacgacaaaatagaggtttttgcacacacccacgtcaccttaattagatagtcatggctaacaaaaatattaaaaaaattctattttttgtcaatccgaaataatatttggctaatgtgaaacattaatgacgatggcatagatggaataaaccattaattcaaatttagcataacacccgagaacagatctacgaatgacttatggatccatacaaattaatgactagtgcattttacatgtattactgcatggcagttcaattcaacgagcgggtgtgaatcggggtgagaaattctgaatatttaccttgtaggctttaatcttcaaccaaaacccaagaaaaatcaagcaaaaccgcttccacctcctctagcggatcgatgggcacccttaacataaatttgagataaatcaaactatcaatggatattttcgtggccttaacatagtttgacaagcattaatttgactaatggccatgacgtagatcgaagaaaacattaacgcaaatttagcatttcatccaacaatagacacaaaagagataaaaagaattatccctaaaaacaacacccatagcgtattttacatgcatacgtgcagcacacgacaattcaaatcaacaaccaagagttaaacgaagcgagaaataatgaatatttacctttaggcttcaatatttaaccaaactgtcacatcctgattttcgtttcaggatttataaattatttaataaattattaatagaatttatattaaacgttcattaatttactagtgaagttaaatgtgggaaataaaatttcctaaatataaagcatggatggatttaatttttattaaattctccatggttaattatactctctggagttttctcggatttttcggagctcaattcataatttttaatcatacaaagagcatttcagtaattaaccacatattaaattaatcattaaatggtctaattgtaattttgttaagtactttgagtgtccaagtatttttcaggatttttcttgaaattatttgaacattggaaggatttttaataattcaaagatcatttaagtgattatt

SEQ ID NO: 13463 - DNA, 6360 bp, Oryza sativa
ccaagcgcatcgggtcacggtggttacgtcttaccccctcggccaaatcttgcataatcgagagggtactggacgggtggtgaaatgggcaatcgaactttctgagttcgatttgcactttgaaccacaccacgctatcaagagccaggctctcgccgattttgtggcagagtggaccccagctcccgagcctgtctcagtccccgaggccagctcgggcccctcacagctgcctcacaccgctcactgggtgatgcagttcgacggctccctgtctcttcagggcgccggtgcgggggtcacgttgacctctccgagcggagacgtcctcagatacttggtccgcctcgactttcgagcgaccaataatatggcagaatacgagggactccttgccggactaagagtggcagctgcactggggatccgccgcctcctggtgttaggcgactcccagctggtcgttaactaagtctgtaaggagtaccggtgctctgacccgtagatggacgcctacgtgcgccaagtacggcgtatggagcgccattttgacgggattgagcttcggcatgtgcccagacgggataacatgattgccagcgaactctcacggctcgcgtcctcgcgagcccagaccccaccgggcgcctttgaagaaaggcttgcccagccgtcggcgcgacccgaccccttaggggagatggatgcgcctgaccggcccccgaggcccgtcggagtccaggcctcgggacctgaggggagtgctcccaactcccttagattgattgcttggatcgccgagatccaagcatacctcacagataagactctacccgaggaccgcgaagggagtgaacgcgtccatcgcatctccaaacgctacgtgctggtagaagggaccctctatcggcgcgcggctaatggaatcctcctgaagtgcattcctcgggaacaaggcgttgtgcttcttgccgatatccatgaaggcgaatgcggagcccactccgcctcgcgcaccttggttggtaaagcttttcgccagggtttctattggccgatagctcttaatgatgcggtcgacctggtccggcgatgcagagtgtgtcaattccacgccaagcaaatccatcagccggcccaggccctgcagaccataccactttcgtggccatttgctgtctggggactcgatatcctgggaccgtttaggcgggccccgggcgggtttgagtatctgtatgtcgcgatcgacaggttcactaagtggcccgaggcttatccggtcgtcaagatcgataagcactccgcacttaaattcattaagggcatcacggcccggtttggagtgcctaaccgtattattacggataatggcacccaattcactagtgaactcttcgacgactactgtgaagacatgggcatcaagctctgcttcgcctcacctgcccaccccagaagcaatggccaagtggagtgcgccaatgcggaaatcctcaaaggccttaaaaccaagaccttcaacatactcaagaagcacggcgattcatggatcgaggagttgccagcagtgctctgggcaaaccgaactacaccaagccgagcaaccggggaaacgcctttcttcctcgtctacggcgcggaagcggttctcccatccgagctcaccctgaggtctcctcgggctaccatgtattgcgaggctgatcaagatcagcttcgcagagatgacctcgactacttggaagagcgaaggcggcgcgcggccctccgagccgcgcgctaccagcagagcctgcggcgctaccatcagcgtcacgtccgggcccgatcactctgcgtcgacgacctcgtcctacgccgcgtccaaacgcgtgctggattgagcaagctttcaccaatgtgggagggtccgtatcgagtggtcggcgtcccccggccgggctccatacggctggccacgggcgacggcactgagctgcctaacccgtggaacatcgaacaccttcgtcgcttctacccctgaggggggggtcgggtgtcaggtttcgggctcgggccaaccccgcaccccctcgggcgtgtagggttggccgggggctgccacacatgcacattcttatttcttttttttttcagtatttcaataaaagaagtttcaatttcctaaaggctgtatctgtgctgtttttttttttccttttgaagaatcttgacttgaaataggtcactcgtgctcaatcctgccctcgggggctcgggtcggctaaaatcgcaaaacggggcccagaaccgagccgtgccccgaggcgtggtgaactccgggggggaatcggcaaaaacccacaatcgggtcacccataaccctcggtcaccacgttcccggcctggccagtctcgacatgtggatctcccaggcactagccccgacccgcgccttttgaggaccagaacctgggcacaagcccttattcaagctaagacacaaaaggaccacggcacagatcatcctcatctcatactcacagcaagatgaaattaacacaaaaatttcttcatttttgattacagattaagttgatctatacaaaaaagaggcccgaaggccttagaagaaagaaaagaagaaaaaactgaagaatggcgggggtctgggggctcaatccgatgcgcccggatcgccggcctcgtcgtcactgtcgtctgcaccaccggcattgccctccttgtcggagttgggggcgaacgcgagccgaggggccgagccctcgaagctgtcgacgatatggtcggcggcatcccggacctgcgcgcgcgcgcggtccacggtcccaagagggaactcatccagcgccatccatggagagaaattggggtccctggcctggtaactcgccaggacgagctccaccgctccttgggcgaggtccctcgaggatgacttaattgtcttctcgagctcctcggggagccgttggagagccccggccatcttcgagaggcgctgggtgaggcctccctggttggcggcgtactttacggtccgccctctccagaggcccacttgccgaccggcgcaatctaggcgggagacggcgtcccaaagcatgccgggccctacctcgcctgccaagcggagggcttcgacctccccggcggacgagtccagtgcgccctgcagatcggcgatggtgcgttcggcagctgcgaggcgggcggctaagtcgctttcgcccgtggccgccccgccgctgcgcgccctcgcgtccagctccttcgcccgcgcctcgagctcagcggcccgttggttcagtacggccctctcggcgcgggcaccttccagattgcggcgcgcctgctcctcctgcgctgcctcgcggagggacaggctgaccgccagctgttgcgccgcggcctcggccccctcgagagctcgctcccgctcggtgagcgcgtcctcgcggaggcggagcgtgaactcttcttcggcgcaggcagcctcgtgcgccgccagcgttgcttcccggatggtgacggcagcctcgcggtccgccagatccctctccacgacgcaggtgcgctcttccagcgccatggcgcgcgcctcaagggcctcttcacgccgccgggacgccgcttcggtctccgccgcccgctgttctcgggcagcggcagcgtcaagcgccccctgggcggcgtcgagtttcttccctagctccgcctcccagctcccgtattgaaggcggagggtgtcctgcgcctcgttcatcacggtggtggcaatgagggcagccccccgctcctcctccacttccttggcgatctccgccagcaccttcttacgagtttcaagctccgagacgtgccggcggtgagccttacggcccacctccaccatggcctccaccgagcgtcgcccctcttcgacacgcgcccacgcggcgtcgagctccgcccgctctgcctgcaggacctccacctgggcacttaacccatccaacaccgtggtgtttgcggcggccaaggcctgtagaaggggctctgcgttcagtggggcgatagaaggcgtggggaagagccgccttggagaggatgccacgcggctcgggccgccgatggaagtgccggactcggggatgtcccccggacccggttggtcctgagcgacgcccgagggagtgggtccaagcgacgcgcccgcagcctcgtcgccagccgccccggaagttgtcgcctgagcgtcgcccgagggagtgggcccaagcgacgcgcccgcggcctcgtcgcgagctgcctcggaagtcgccatcgcctcgtcctggcaaaatccggcctcctcccgagcggtttccccggcctggcgggcccgggcggcctcctcccgagcggtttcctcggcctggcgagcccgggcggctcctgggcggcctcctcggcttcccgtaggcgatccgcggcctctcgccggtcagattcccgcctgagggcctctgcggctgccggatcctcggcctcagactggccggacttggaatggcgggagggacgcgacgggatctcgctgaaacaaaagaaaaaaccagaagacgaacaagatgggtgagtgaaaactcgcgttgagagagtgaatacagccacgatgggtgagagacgaacctgcgagggggtcggttaaacgaccactttggaggggaaatgaggtttccccgagatggttctgtctcccccatcttacggggccgcttcttcttgcgctccccctcgggctgcgatgttggcgcggccccctccgggcgcctgctgctggcacgcgccgccccgccccctcggggaggagatgggggaggtgttcctccctgcttcctcttaccccgggcgtcggcagggcggctgctccccgggcccctgtcgcgggacccagaagcacgaccccctctcggggtagattgttcccccctgcggctcccgcctgcgccgtcgtggccctttggagctcgctcctctgaggccccgaccgccatcataatggtcaggatggaggcgcggtctggatcgctgcagagggggaggattccttggggaatgagggccgcctctacggagttgagattcagcacccgttggaccaatatcttgaagtcctcaggagcccagtcccatctcactccctggtgggtcctcgtgaagtcttcggacccggtgtactcccaggcgccccgagcgcgtcgctggagcggcgcaatccgacgacggaggtagtcgccgtacaccatggcccctgtgagcccctgggatcgcaggcccgccaggcggtcgaggacggcgtcatagccatcccccagatctaccggcgcccgccagctggaggcctgcgccgggggctggctcggaagtcggaggcgcgcttcgtcggcgaggggagtgtagaaccagtcgctcttccagtcgtcccacttcttgcggagggcgcaggggatgtagcggttcagcaccggcccccgtggctggaagtagcagccaccgactaccgatggcggcgacaccgactgcacggtgaagaaccaccggaacagccgaagagatgggcgcaccccaatgaacatctcgcacagatgcgcgaagatggccaatgtcatcaccgcgttgggggtgaggtgcgccatctggagatcgtagaactccagaacatccatgaagaaagaagaaaatggcggaaccagccctgccattgcaaaggggagaaagaagacggaccgccccaggtagtctggcgccgggcgtccctcgcccagcgtgaccatctcctggccggtggcagattccggcatgaagcggcgcgacagcccagcctgtctctcgctcacgatgcgggaaggcggcagcacgctaccatcgagcagagcggagccccgtgccatggcgccggaggaagagaagattaagagcgagcgcgtgtggcgaaggtagggcacaggaaagaaggagttagggcgcaagcggcgaaaacaaggggaataatggcgaaaggaaggaaacagattccatcttcagtgcctttatactcttgccaacgctgtgcccggctcctcgcttctcgcgccctctatttcgccccctcgtttctcgcacccacgcttccactaatcctattcgcccgcttgcggcgcatgaggtggatatgcggttgtggcagtcgagatagatcatatcgtgcgcgcgctaattacgctcgccgaccgaagcgacgttaccatatctccagatgaaacgaatcgccatgtccagattcgtgtgctactcaagtaatgtggcagtcttgaagagaccgctcattgttgacagccgagttaccattgccga

SEQ ID NO: 13464 - DNA, 10554 bp, Oryza sativa
agtacggtattacgcttctcagtggcccgaacctgtatacatcgcccgtgtcttgtgtgtttcctgtctcgcgagccttccacatacagagagcttagaatctcaccctgagtccccggccgaactggcaaaggggggcctgtgcggtctcccggtgaggagccccacgctccgtcaccgtctatcgttgggaaaagatggacataaactttgttggtgcatggtgcctatgagtatgaacacacattgtttacacaaataaataaatatactacataagcatgtgattagtattaacgggtttttctttatagatgcaatacatggatgcttagaagaccatggttcccatcggttatctagatccaacaaggatctgtcaatcccagcataccgtaacgctatcagaaaacactgaacagctcaagaacatgacgcctgaagaaatagcggaatacaagaagggcttgcatacgatcaagttgcttactatggtacaatacattagacgagctttcctgaaatttcaacggaaaagagtcctaatggccgtatacaactttaagtaaatcccatagatttctctatacacatctgtgttatttcatccgtgactaactgcaccgtcgttaccatgtagcaatcatgaaatttgtttcttgatctacccgaagtacaggactgttacagtcctggacccccttgattataatcacatgacgtatacacaattcctaataatcttacaattgcaagtgattctaatccatgcatgtgtacttttcatgtattataattaaatctcctccttaatacgaatcgctaatatccttacaatgcgtacaactactacaagataaagagtggagaacaactataaataaggaagaagctactagtgcatacatactggctggtaatactccactcacttaatgtatttaaattcttttacttgcagtatctaactaattccttctatgtgtatgtcacgaagtattagaagcaacctaaaggcagtaccctctatggttattacacatgcaaatttctcagtgttaatgtgaggtacaggaccaacgcagaggatgtaagtcttcaactcaacgtataagtccaattgagaactgcacatctaaatgacatacaaatatattctcgttcttccgtacatgcagttgcctagaatcaaacatcgaacaagctttgacgataaaggcattaaaaatatgcagcaggacctctgccacttcatccattgcgagtgctgtcataaggatgtaaggatggacggttcttcaacacagaagacagcctagcgacaagtgataaatacaagtctcttctggagtggaacaatgcaatgccatgatgtattaattagatagtgcattcaaaatgacaactgtaaaaattattgtaatatattgacaacacttttcactactgcaatatatgtatttatgtcagtattaaatgtttgttactatctaaatagtattatgtattaattaattaattatttgcaacattattgattaaaaattatttttaaaaaaattggcgggaaattttaaattttggcgtgcatattttaccaggcagccccgccttctttatcacaggcggccccttccctctttcccaggaggcgtgccgtgctcccgttcacctgcgaaaatcggcgataagaaggcctttgcctacaaaaatgtttttggtccgcctgagaagagaccgttttcagtcctatgcaaaaaatgttttttctagttgtagtggctggtgataatcaaaattcaaaagggaagattagatggatcccaagtgcatgcatgcagtacgcttctgggaaagaagaggatgcatgttcatgtgcaaaagcttgctgaatatgtacgtggaccaagaaacaaaggaagaagattacggctcaatgttgtgctacatgggctgagcctgttggactctgtcatgcgtgaaaactcgagttgggcctcgtcagtcagattgctctcttgccgtttggatggcagccggccctaagggaaagtttgtttgtgtcgctagcgtaagcttagattgattcatctatttttttttaagaaaccactaggatataggccctttcgcagagattcatctattattatttttgctaattcttcggagttgcttggattgactgtcgttgtcaacccgttcgtgcaatcgccttcgtgtcgattatgtggattggatttgtgaaggttcgtgtgattgacgtcgttgaggtgttgtacacgggtacaaggttgctgcgaggattgatcgagctgctactttcgagttatcattcgtcatcactgcaagaacgggccaccctatatcataactgtttcaactattaatgtatataattttatgtgtagaatagtgttggtgacgtgagactcggagatatatagaaatagactcaattattgagcatgccctaattgtactattccaaaacatgtgacaccttaaatcatgggtggaaaagactaccaaacttgcgcagttgcgctttacttctaattgtaaatgcatgcatctcttttttatacatgtgtatcattcatcctatattttggaactgagataacaacgttacaatccgtactcccggagggacgacttcccggcacctacacactgtagcggaatgaaagtataggttagtataggttacatgaaattggacggtagggaatgtttcgtatatatgaagctaacgcccgcaaaaggcgacaacatatggttgttactgagagacacatccatacacgtccagacatccaatttaaacccctctctaactatcctccacgtactagagaagcatatatataattagtcgcaccaactggttacatttttcctggccggtgtaatttgcaattattgcgcatcgtacaattcaatgacaacttaaactgtctttaatatatatcttcaaaagtaaaagactatcgttatcaaagtatcagtgcatcgacggcaacacactgtggaatatatactggaccgttgtattgcttgggcattaagatcaggtcgatcagtgctggttcgtaagagccatcagtaccggaagtcaacccaggcacaaaatttccagcactgatgacccctctcatcagtgccagttctggacccggcacagatagagcttgcgagcatcttgggcaagatcagattaactcatctgtgccaggtaataatttgaatccggcactgatgattgtatatctctgtgctgggtattagtttgaatccggcgccaatggcttcatacggtcatacctgtacaagctatacataataacctgcattgatgtttttttttcgagattaaaaaaataaataaaggaaaaatgtgatttggttaagcatgtatgtactagggtgatttttgcaacaaaactaagcaggtgggtggacatttgcaacgaaaataacttttagggtgtaatgcatgtcaaacttcaagtgatttagggagtgccttatgcaattttccgttcattaatttttcaggcagacctaaaaaagtaacgcttgtaaaaatgttgagaggccacacagatctagccccacttgtgaaaaccaattttcatagcaaaatctaaaaggagactgcctgcaaaaataacattattttcacaggcgaacctcttagcataccacctatgaaaattgattttaactttgtcaccctaaacgcaccacctgcataaaaggaaaaaacctaagctacacataataacctgcattgatgttttttttcgagattaaaaaaatataaataaaggaaaaattgcaaaaaaaaacatcccataagtcacttgaaatttgacattccaccttataagttgttgcacatacccatccttagtcttgttgaaaaaaccatcctaacacacacatgtttaactgaatcagtctgttattggtgatgtgagatttaccacaggcgaagctagccaagttaatcttctccaagtgcttgcattagacttatttttcatatttgatttaactttttttttgcaaatagcgaaactccctacgacaacgtttaagctctcgtccgcaaatttatctgtggaatctcacaatagaaaatgtcaaaagtatttaattttggtaaaaatcgcattgacagctcacacttatgaaaacatgtggtttggttaagcatgtatgtatggggtggtttttgcaacaaaactaagcaggtgggttggcatttgccgtcctcccaccagcctctccctcctggtagctgcgcgcagcccacaacactgtccctgcccgctaccaccgtctgcgccatcccccctccggccacgatggcctctctctcctagaggctaccactgtgcctctccccaccatcgtcccctggtactcgaccccggtcagatatgacgtggaggcactagataggggtgggcagaataagaccgaaccgaagaacagaaccgaaaagaccgagactgaaaccgaaaagaccgagaccaagaaattcggttagtaattcggtctcagctctggaaagaccgaatttttttcgggcaattcggttattgtcttcggttaaccgaattaaccgagaaaaccgaattgtggccaataggcctaggaggcccaataagcccactaaattgctaaaccctaaaagccagcactaccactcgtcacgaggccatcaaccccatccatcatgctgcctctacctccgatccatccccatcgcgtgtcgcgtcgcgggcatccacagcgtcggcgccgcctccggccagcccacctccgttgtggccccgacgagcaccgccatccgcctccgccacggcccgacgagagccgccgtccacctcgcgccacctccagccatcccgcctccgccgcagccccgatgatcgccgccgtccgcctcgcgccgcctccagctggccgccgcggccctgacgagtgccgccgtccacatcggcgctgcctccagctaggccgcctccaccgcggccccgactagcgccgttgtccgcggcgcacctggcgagcagcggcgtggccttcaccagtgcttgccgctgagccggtgaacttctccagtgatttcggtcagaccgagactgagactgaaaaaactgagaccgaatttgccggtcctgagttttttcggatgaaattcggtgctgagttttcaatgactgaaatgaccaaaaaaccgaagactgagaccgaatttttcagtcagaccgaacgcccacccctagcactagatctagctacggaagtaccggatgcgggcacgacggtgccggatccgccacctccttcgctggggagtgggtgcgttgtcgccacctccggtctccggtcaccacacgtcatgccgcctctcccatgccagagacagggcgccgctgcaattaaacctagccacctctatctcggcccgtcgtccggttctccagcgacaccctctggcagcagcgatcgaggtgggaagaggggggcgacgggggctagggtttcgcccctgagccgcccacgcgtgggcgatacgagagcctgttagttttttgttttatcttgtttatacgttatatgaatatagtattgtaaaattttgaagaatagatgtgtgttggtttattgtttggggtgctagatgaatttttattgttgcaaagtttcttttttttttgcaaattttagggtgtatatagatttttttcatgtcctggctactgtagctgaatggaagttgttttgcttgaataggacaatgtaggacaatggagagcgagccagctcctgcgcacagaagagtaggaccgcacaaactgataaggttgcacctgaatgcttatggaaccagcatcaatttaccggcaccattgagggtagtcattggtaccggttctacaccattgaggttacaccaatgacctcatcattggtgcctattataatttaatactagcactataggggtgcaccctttttaatttttctaagtgcgaaaaaacccaaaaaaatattttgcattttattagacgtcaaccacaatcacactttacttcccccaagtcatattatttttttaacccatattctttggaatgtactccctccgtcccgttaagtgcaacaatatatatataacctccttactatctcacccaggaacaattattgtcttggaagcaaatgcttttttaaagaaattatactccagtccatacttaatactgtagatgatgtcaaatgaaaattttgtcaactacaaaattgtagatctcatcaaaatataaaactttcgtataggttctatctccatccgagatcgtttataaattttaaaaattcacttatccaaatagatttgagaccttataatatatatttttggttatccaaacaacctcaaatagaaaatcattagctagaaagttgtagaactcatataactttacaaatttcagataaagtttatcttcgtccgatttcgtataaaaaagttactaaaaacacacatatatgagttgtggtattaatgatgctggttttaattataaagcggtacctagggtagtcctaatgggcgggtgattgctccctccccaccccagcgatcacccgcccctccccctgtacgttacttcctttccccctttctcctccccttcttctcttcctactacaccataaatatttgaattcaaatttaaattttaaactgatatgtaaactttttacttataaactttgggtctataaactaatatttgaattcaaattcatatttgaaacgggtatgttaacttttgacctataaactttgggtctataaactaatatttgaatttaaattcaaatttgaaacgggtatgtaaactttttacttataaactttgggtctataaactattatttgaattcaaattcaaatttgaaacgggtatataaactttaggtgtataaattttagatgtatagaaatactatatataaaaaaatatttgagttcaaattcaaatttgaatcggatatataaacttttgacttataaactttaggtctataaactttaaatgtattgaaatactatatataaaaaatatttgaattcaaattcaaatttaaatcggatatataaacttttgacttataaactttgggtctctaaactttagatgtgtaaacttgaggtgtataaataggtgcataaatttactaaaatagaaaagtaatgcggtgccaaaaaaataaaaccaggtggagggagggtggggggtgaattgattgctaccgccaccaggcgagcgatcgcccctttccgcggtacctatgacttcagaaacggtacctatgacttcgatgcggtattttggtggatgttgttaaaccacatcgattgtccggtatcagggatgatggcgcggggtgttttcggaatctcggaccacctttgcagctcttttatatatgagctggctagccttcatcgtgatatactactcctactaatcagctgctaattataacctccataaattctctggctgatcctaccttctgttaattttccgtgaaatactgcgtggcagggcactagctagttatgtcccattaccttcctttcctctctcatggaatggttggtcgtcgtccggttctgcagccggttcagcgttgcaatccgactggtgcccaagctcgcggcttcttccgacaacagagcgcgagcggtgtgctgctacatgcatatacgcacaagaagtctggtgatgccgccccttctatggaggcatctagctttcagcccagtgtgtggggagatttctttatcaactacgaaccgaagcaactacaggcaagagcacgatatttttatatctatgtcttttgcatgcatgatacactggtgaaaccatctttggttggtcggccgaaatccaaaatagtcccgattccactaaaaaccggttagagctactttttgatctttgctcccagttggtaacatcaaccgggactaaagatcatttttagtcccggttcaaaagacggaaggtggtgtcagacccctcctttatctttagtcccggtgggtgacaccaaccggaactaaaatatttttactctcggttggtgttaccaaccgggaaaaaagatcgacatgcgccatgcgagatcaatagaaccaaggcgcatggaaggatcagttaataagttctaacctttatctcctcctcttctcactcaccctatcccttcctcttcctcctcccatctcttcctctacctcatctggatccgccccctcccctcccctctcctccccacttctcaacctcctctcgatccgccccctcccctctcctccccacttctcaggcggcagcggccaggcggcctcgcgcggccgggaggcgcggaggcggcctcgcgcatcctcacgcggtagccggagggcgaggcacagcgcgcggcgggcggcacgcggcgcgggcagcggagccgcgcacagggcagcagcgcgccggctctcttctctttttttttataatttgtgattgagagatgtataatttcttttttagaatttgtgattcattgcatggatctgagatgtataatcgatctgtgatgcatttgatttgtgtgtaatttttttaagatttgtgatgtatttgatttgtgtgtaagtaaattaggatttgtatttttatttgtgatgtgaatgatttgtgatgttactttgatttggagatttgggatttgatttaggtatatgcatgacactcgatttggggatttgttgtttgatctgggtatatacatcctactcgatttgagagaaaataaaaagaaaatggaccaaccgggatatataggagtaaaaaaatatatataaactgatgcgctcaacctgaatgttttatccacacacatggaatgctaaaggagctagtttggatagttaggggctttctccctatattcctttttgcttgtcattatggacacataggtctatagcacacatcgttcttttttttttctaataccatataaatgcgcacaaactcacatcttgttcttatgagatccactttctcattatatatatttactaaaagaataaatttcacaaaaatacatatactatgaacaaactatcacaaaactacatattttacataaaatttatcacaaaactacatttaagatacagtgtcacaaaactaaatatttagtaacaaaattatcataacactacatatctagaaccaattttagtaacaaaactacaatgtttatagctacaacataataatggtgctacatatttaaagtataaaaactagataaattcaatactgaatatgtagttttatgatatttggccttaaatctatagttttaacataaatttggtgctaaatctatagttttttgatacaattcattaaatatgtggttttatgataatttgattaatatacctatattttttgaaatttactcttactaaaatagtaacaataaaacattttaattggtaatctagatactacctccaagttgataataattatcgttttaacaagaacatatagtctacgaaattaatttttaccactattttctattaaaatatatagttttattaaagtaccttttaaacattaattcttcaaaaacattaatgcttcatgtttagaagttaaatatttcagacgttatttatagtcaaggtttttcaagtttgacaactccaaaatgacaattatttttaacttggatagagtattaattaacattgctttcacatgacgattcataaagttgtttatgcctctagcgtgcataatactaccttcctttttaggttataagatgtagtcaaactgtttcaaatttaaccaaatttatagaaaaaaaatagtaatatttttgacccaagataaatttattataaaaatatatttaattattaatttaataaaaaaaatttggtaatataaatattaatatatttgtctataaacttagtcaaacttgaagcattttgactttggccaaagtcaaaatatcctgtaacctgaaacgtaggcagtatttggcagtagcttttaagcatatattttttatatttttataaaaaaatgtttttaaattttcacttcattcatgtaaacaaaatatattcatcgatggtgtatcttatttgtttttttatggtagttaattttatgctgattttggcatataattggtcatcgaacaatatggacaacaaatccacaacaaacacaagttatatacattgtaaattactgactcaactcaactatgttggttccaatatttttctttcggttgatcatagataactaatcaaattcatgcgtgcaagcagcgatcaaaggagtggatgatgaataaggccgataagctacaacaagctgtccgcacactgtttaggacctgtaatgacatggtggacaagat

SEQ ID NO: 13465 - DNA, 4006 bp, Oryza sativa
tattacgctcctcaccgacccgaacctgtatacatcgcccgtgtcttgtgtgtttcctgtctcgcgagccttccacatacagagagcttagaatctcaccctgagtccccggccgaactggcaaagggggcctgtgcggtctcccactgaggagccccacgctccgtcatctggcgcgccaggtaggggactctgcgagggattttctgagctctcgcactctttcgtgtgcgccaagcttttcctgttcagcccaatggccgagccagcaaaggcgcacgacctctccccgagtatgagcggtgacgacggggagccaaacccacgccgtcgagctcgtactccaccgccccctccacgccaaagtcctatgcgggagaaggcgctcgagagggccgaaggatccgcgacttcgacacccacaggaggtggagaagggcggcgagatggggagcgtcgcctcctcgtctacggcgatggcagcacgccccagggcgcgctccaagctgcgggcgcgctcctacgtcacccgcccgtcgcccatgacccggagtctccagcccaacgttggctggacgatgtggccaaattgatcatgactgcacggcagcgcctagatgctggtgggcggtcctccgccaccaaggcctctggtgctgctaccaccggctccgcgtcgtcaagacggagggcgcggcgagcggcagccgctgttcgccattcggccgccactccttcgtcaacgcctccgacccggaaagatctgcgtggggaaccggatgcccgcatcagtatcgagcgccggcgtaatggccgacgtgctccccacgcaacggagggcgcctcctcgtccggagtgtcacctcaccacggacgcggggatcagccctccgtgcccccggttgttggtgtcggctgtagagcctttgtggcgagccttcggaatgtccgttggcccccaaggttccggcccaccatcgccgaaaaatatgacgggagcgtcaaccccgccgagtttctccaggtctacacgaccgggatcgaggccgccgggggtgacgacacggtcatggcgaatttctttcccatggccctgaaaggacaggcgcggggttggctaatgaacttgccacccgcgtctgtccactcttgggaggatttgtgccaacagttcaccatgaacttccaaggcacatatccgcgcccaggtgaggaagcggacttgcacgcagtacagcgaagggatgatgagtcacttcgctcgtacattcagcggttctgtcaagtccgcaacaccataccatgcatccctgcacacgcggtgatttacgcgttcagggggggtgtgcggcacaaccgcatgctcgaaaagatcgcctccaaagagccccagactaccgcggagctttttcagctcgcggaccgagtggctcgtaaggaggaggcatggacctggaacccctccggttccggtgtggcagcttcggccgcccccggatccgccgctcagatagggcggcgtgacaggaggaggaagaagaggtcagcccataccgacgacgacggtcatgtcctcgccgtcgagggcgcttcgcgggccacccgaaaggggaggcctgcgggaggcaaaaagaacgaggccggcgctcccaacagggagcgcccaaccggcaagtggtgcaccgtccacaacacttcccttcacgacctcgcggactgccgtgcagtcaaaagtttggctgagcggacgaggaagtgggaggagaagaggaggcaggagcgccgagagggcaaatccccggcggttccttccggtaatcggcgaagtgaggccaagcagaaggcccccgccgaggacatcgatgacggcgatgatgacctaggtttccaagagcctggggccaccattgcaaccgtcgatgggggagcgtgtgctcacgtttctcgccggagcttcaaggccatgaagcgagagcttctggccgcggcccctactcatgaggcgacgtgtcgggcgcggtggtcggaggttgccctcaccttcgaccagaccgaccacccaccgtgcgttgcccggggagggcagattgcgatggtggtttctcccaccgtttgcaacgtgaagttggggcgtgtcctcattgatgggggagcggccctcaacatcctttcccctgcggcctttgacgccatcaaggccccggggatggtgctccggccgtcccagccaattatcggtgtgacgccggggcacacgtggccgttaggtcacattgacctaccggtcaccttcggtggatccgccaacttccgcacggagcgggtgaacttcgatgtggcggacctcagtctgccctacaacgcggtcctggggaggcccgcgttggtgaagttcatggcggcggtccactacgcctacctacagatgaagatgccgggccccggtggccccatctctgtccatggcgacctcaaagtcgcgctcgcttgtctggagcagcgcgcggaccacctcgccgctgcgtccaagcccgagggtggcgacgagaggcttggcgcctccgcccccgccaccccgaggcagcggatgatcacaggcgacgaggtcccggtcaaggaggttgccctgggcgacggcccgtccaagaccacacggatcggtggtcttctggacggcaaataggaagacgcgctcgtctccttcctgcgggcaaacgctgacgtcttcgcatggagaccggcggatatgcccggggtccccagggggttgattgagcaccgtctcgccgtgcggccgggcgcaaggccggtccggcagaaagtgcggcggcaggccccggaacgtcaagccttcatccgcgaggaggtggcacgacttctggaggccggattcatccgtgaggtcatccatccagagtggctggcgaacccggtggtcgttcccaaggcgaacggcaagcttcggatgtgcatcgactacaccgaccttaacaaggcatgtcctaaggatccttaccccctgcctcgcatagatcagattgtcgactccactgcggggtgcgaccttttgtgttttctagatgcatactctggttaccatcagattcgcatggctagggaggatgaggaaaaaactgcgttcattacccccataggaacctattgttatacgacaatgcccttcgggttaaagaatgcaggtcctacttttcaacgtactactcgaatttctttgggtagccaattaggacgtaatgttgaggcttatgtcgatgacttggttgtaaagacgcgcaaccaggaaatgttactctcagatctagcggaaacttttgagagtctccgctccgcccgcataaaactaaaccccgataagtgtgtgttcggtgtacctgcgggcaagcttctcgggttcttggtctctgcccgaggcattgaggccaaccccgagaagatacgggctatagagcggatgcgccccccccagcaaacttagggatgtgcaatgcgtcaccgattgcatggccgccctaagtcggttcatatcgaggctgggagagaaggcgttacccttatttaagcttctcaaacgctccggaccgtttacctggacggaggaagccgaaaatgccctcacccagttgaaggcgtatctaagctctcccctagttctggtcgccccggagccagacgagcccttgttactctacttagcggcgaccccgcaagtagttagtgcggcattggttgtggagcgcgatgaggacaattctcatttcacgcttccccaccctgtgccgacttggcccgggagagagcagggaggagaggctcccgagccgaacggtggcccaaggcccccgacgaccggagttggccctctacccgcttgtcagacggtgctaggagcccccgacccccaagaaggccccgacgccactgtgggaaggccgcacctatcgccctttgaccccgaggctaaccctgtgccgactcgacccgggag

SEQ ID NO: 13466 - DNA, 4832 bp, Oryza sativa
aatcttcggaaattcataactaaatcatcgtaactcggttttgagtggttcaagttgctaaattcatctaaaatcatgatctacatgtttgtttactttatatgtactgtttatttggtttttattagtctttttcttcgttttgcgtgttagcttgtcgtttccgtcgttgcgaaggttcgtgagtgcgtcggaagtgatcaagaagattacttgaagaccgattattgcaaggcaagtcacacagatcctaaacacaatcctttgagcatgttgatcctatatttaaattctctatttatttcaactgtgcatttattttcgaatgtcaccgggtggtgtgaacttattcctttgttatggccaatttgcattgattactttattccttgataccttgggttattataacttgactagttgggctttatatattggttcagctagatattagttatgattgcttagccatgcttagaaacattagcacactattgggataacttatgactcactattatttaaggatggcttaatgatagttcacgatggttaatcgtgattggttaattaattacttgccaactaaaacttgataatggtgggttgtgagcacatggttttgagagtcgtgctcatgacaattaaggaccggttcgcgagctactgttgtgagacatttatcgtgccaaccacaagccagcgtgggcaacggctttatcttttgtatagcgtgattcattatagtgcgccagactgagaagtggcgagaagtccacgggggtcgctggggagtccatgcctctggtttttgagggggtgattatgatccaggaaaggtgcgctgtaatggattatgttgtgcaaggggtattgtcacaactcctttccgaggtaccgtggtggtattgaggcacatggtgacatgatgtggggttgtgtcttgtgggtacagtggtacacctctggccagagtaaaactattcgaatagccgtgcccgcggttatgggcgggttgagcaatgtttttcgtgattagtctcacacctctcacaataattatggatgttaatacctgataataatttgcttagctcctggtttggagttagatctgtacagccgggtatggttgttcaggatggttgggcctgtacagcatgggtgtgctgttcagtgttgattaaaatttttaattaattactctactgttttactactcttaactctttgctaaatgctgctttcgcaaatgagcctatattatgccatcctttggtatccttgtgcacttgcatatttgctgtgtggcttgttgagtatgtcatatgctcattcttgcaataatcaatcaacctcagttgaagaaaaaggatccagaaggagaagacgtttggcttataccccagttgagctgcctgtgggagtggagctgaagccatcgctagaccgttaattccgctgctgttttcttttcttttgtaagtgtgtaacgttattattatgatggatttgtatattaaattgtcagtttgtgtacctcggctgattcctggacgaggattttatgcacaaataagttcggaaattactagtgaatttccgggcgtgacaagttggtatcagagccatcttgactgtaggataagccaaatggtcaaaccttaaggacaaatcttccgaaaacataatttgtgaaaattttcctttcttccttatctagaattctttgcaaatcgttttgtcgttcttcccccttcctctttcaacttgagtagtcgttaatcttgatggagaaactcgaagacgtcgatgttgtcaacttctgcaagtcaagtggatcgaggaataagaagatgatagtcgaatcttaagtgttcagatagagtgaagtttggaacctatcttagaacctatgccgccaaagtgtctttgaagaatagttagtagggtagaacgcttgttgtttgctttgtgtgtaggtatggttgcattcccatcattggagtagttcattgatgagtgtgtaactatactaggttgcttgcttaatcaacttgaacaatataatggtctacacacatcagatcagtgttaacctagttaaggtcttgtctttagtgtaacccctctccttctaccttttctaatctgcatcagaatggtgggatcatttccggatgaacagagcagaacgacaaccaatcacttgggaagagtttaccgaaggattcaagaagacacacgtacctgtaggagttgttgctttgaagaagcgtgagtttagggctttgaagcaaaaggatcgtaccgtggcagagtatcttcatgagttcaatcgtctggctcgctatgctccagaagatgtgcgtactgacgaggaaaggcaagagaaattcttggaaggtccgaaggatgaactgtcagttatgttgatctctcatgactatgaggattttcaggagttggttgataaagcaattcgactggaagacaagaagaacaagatggataaccgtaaaaggaaaatgactgtatcccaggaggcacaaggtagtagccagaggcagcgtatcaagccactccaaattggtgaatctttttctgcaggtcaagaacagtcacaacaacagtcacaacagttgggcatcagtggtgagatcaactcagagactaatgcaagcaatgaagacaatgatgagcaagctactcaatcagtgtcatttcagcaggatcagtctcaagaagataacagtaatggaagggagcatcgggtgtgtttcaattgttatgagccaggtcacttcgtaaaagagtgtccgaagccgaagcgtcaacagccacaaggccaagtcaacaacattgtcctcacaggagcaaatgcagtgccggttgcgtctcaagggatacagctcagccatcagttccaaagcagcagtagctttctttaaaaccttagaataattattggagttgtggaataaaagatagactgtagtttacctatgcctttttctttctagccgttccgaatctcgggatgagattctttgtaaggggggtagatttgtcacatcctgattttcgtttcaggatttataaattatttaataaattattaatagaatttatattaaacgttcattaatttactagtgaagttaaatgtgggaaataaaatttcctaaatataaagcatggatggatttaatttttattaaattctccatggttaattatactctctggagttttctcggatttttcggagctcaattcctaatttttaatcatacaaagagcatttcagtaattaaccacatattaaattaatcattaaatggtctaattgtaattttgttaagtactttgagtgtccaagtattttcaggatttttcttgaaattatttgagcattggaagtatttttaataattcaaagatcatttaagtgattattttaattgggaaagtaataaaatcctcctcctcagcttgggccattttcggcccattccttcctttccttcctctctcttccgccggcccaacctgagccgcctcctctcctctcagctcagccggaaaagtctactttccctccctgcgctactgttcatcttccaactcaggcagagcccgagccagccgtgccgtgcacagtgccgccgcctcttccttccaaatctcgcctccccgttgctctttttctccaattttgctgaggggaaatattcctcttatcctcctctatctttacccccaaaaatcggagcaaatcgttgagtatcttatccgaatcaaactcgttttcgagtttatctccaaaaccgagtttttgatttcccggatcgatttcttgcgggaggagtccgatctcttcaatccaaggctataaataggaccccctagtcctcctctttcgtttgccccctctcccgtcctcttccgtgctccgtagctccgtcgccaccgccgccaagcaaaccgccgccgccggccatctccggtgccgccgcgccgccgtctccatcgtcgtcgccggtcgccgtcaccaccgttgggtgcgccgtggtgaggggaagctcggccacccttccttttccgtcgccggtcatcggagctccgccgccccgtgcaacccgagccgccgccgtcgcctcctcgtcgccggccgtcgtcggtcgtcgtttggcacgagggtgagtatcgttgggttcgtctcgtcgtcctctacgtgttcatgtcctccaaatccgcagccggtcgctctatctccggcgaggtcgccatcttggtccggccattgatgatgtcatcatgacgtcatcatcttctccttttccagttttttctaatagattaaatcttcggaaattcataactaaatcatcgtaactcggttttgagtggttcaagttgctaaattcatctaaaatcatgatctacatgtttgtttactttatatgtactgtttatttggtttttattagtctttttcttcgttttgcgtgttagcttgtcgtttccgtcgttgcgaaggttcgtgagtgcgtcggaagtgatcaagaagattacttgaagaccgattattgcaaggcaagtcacacagatcctaaacacaatcctttgagcatgttgatcctatatttaaattctctatttatttcaactgtgcatttattttcgaatgtcaccgggtggtgtgaacttattcctttgttatcgccaatttgcattgattactttattccttgataccttgggttattataacttgactagttgggctttatatattggttcagctagatattagttatgattgctta

SEQ ID NO: 13467 - DNA, 1951 bp, Oryza sativa
aaatgctgctttcgcaaatgagcctatattatgccatcctttggtatccttgtgcacttgcatatttgctgtgtggcttgttgagtatgtcatatgctcattcttgcaataatcaatcaacctcagttgaagaaaaaggatccagaaggagaagacgtttggcttataccccagttgagctgcctgtgggagtggagctgaagccatcgctagaccgttaattccgctgctgttttcttttcttttgtaagtgtgtaacgttattattatgatggatttgtatattaaattgtcagtttgtgtacctcggctgattcctggacgaggattttatgcacaaataagttcggaaattactagtgaatttccgggcgtgacacaaacgccacaaaaaaaatggagcaaaccctcctcccctcctctagctaatcaggcaagaaggagaggcaccgctctcttcttgctcaatcagctcgagtggcaagggatggagtataagtacaactgtcggaacaaaggtgctggttctagacccaaaaccggcacctttgtcttcctaaccggcacctttgtgtggggcatgaaaagcactattggaagaaaggtgccggttctcgatccaacaacggcacctttgtgtgaggcatgaaaagcactatcggaacaaaggtgccagttctagaccaaaaactggcacctttgtcttcacatacaaaaaaccggcacctttgtgttgggcccaccaacggctagtgtgggagggagaatattaaaggtgccggatttgggctgagatccggcacctttgacttgtcataccaagaaccggcacctttgtgtaggacccaccgtcgggatgaaaagcattagtgaaacaatggtgccggttttgggttgagaattggcacattgtctaaaaaccggcataggttaggtgggagggagaagattaaaggtgccggtttagggtctagaaccggcacctttctctgacacaggttttaggtgccggttttaaaatgaaaccggcacctatttggatataaaggtgccggtttttgaatatgtggagcatgggggtgggcgtatgggtgggcaagacattataggtgccggttttaagtgtgccggcacctatagtggcgacacctatttgcctttttgtagtagtgggcccacctctcatccgcagcatataaccccaaataatgatatcccataatctagacaccacgtctaaactaccagatactactctaatatcatcgtcatgacatagagtataattgcatacgcaaacattatacccgcaccaaagcatctcccagataacctagcaacatattcagtataacatgaacataatgaaaagttggcattcatatactcggaaagtatttcgataccataaatatataaagaagaatactctaataaaagtacaaagcttacaaaagaggaaaggaaaattactagagccatacccaaactcttccgaagacttccggactcctgatttctactctattcctattccactagcttgagactactaaactaacttgagagaatatgagagctcttgcttgacatgtgtgactgaagtgagaagagcaactccttttatagcctcccaatgacggttgtgacggttggaatggtcggaaataccctccaaccgtcattgggggctaatccacaccgtccaggcaaagccctggatcggatggcgctgaggaggattcggccgaacctggggccggcccaatccagcccatttttggctggcggcctcctccgttgttcttctctgcagacttgtgaattttggcccggtttgtcgtgtcaattctgagttcttggcccactcatacataagtataattctcgacatcgcctaattgatttattgtctgtgttgatgtcgattctcctccactttaatgttatt
